United States Patent Application Publication US 2011/0182862 A1 - sequence listing, part 9

SEQ ID NO: 12044 - protein, 280 aa, Muscodor strobelii
  misc_feature: SGI Peptide ID NO. 563890
  misc_feature (10)..(280): NCBI GI: 46137043 Blast Desc: FG10037.1 [Gibberella zeae PH-1] gi|121810648|sp|Q4HYC1.1|BUD32_GIBZE RecName: Full=Serine/threonine-protein kinase BUD32
  misc_feature (10)..(280): NCBI GI: 39951403 Blast Desc: MGG_01344 [Magnaporthe grisea 70-15] gi|145020835|gb|EDK04964.1| MGG_01344 [Magnaporthe grisea 70-15]
  misc_feature (7)..(280): NCBI GI: 164425350 Blast Desc: NCU04595 [Neurospora crassa OR74A] gi|157070892|gb|EAA28627.2| NCU04595 [Neurospora crassa OR74A]
  misc_feature (10)..(280): NCBI GI: 171691713 Blast Desc: protein product [Podospora anserina] gi|170945805|emb|CAP72605.1| protein product [Podospora anserina]
  misc_feature (1)..(280): NCBI GI: 116179776 Blast Desc: CHGG_00516 [Chaetomium globosum CBS 148.51] gi|121792217|sp|Q2HGY8.1|BUD32_CHAGB RecName: Full=Serine/threonine-protein kinase BUD32 CHGG_00516 [Chaetomium
  misc_feature (7)..(280): NCBI GI: 28950035 Blast Desc: related to MNORI-2 protein [Neurospora crassa]
  misc_feature (17)..(280): NCBI GI: 238837605 Blast Desc: serine/threonine-protein kinase bud32 [Microsporum canis CBS 113480]
  misc_feature (20)..(280): NCBI GI: 119191506 Blast Desc: CIMG_00130 [Coccidioides immitis RS] gi|121932320|sp|Q1EBD3.1|BUD32_COCIM RecName: Full=Serine/threonine-protein kinase BUD32
  misc_feature (20)..(280): NCBI GI: 240106446 Blast Desc: CPC735_060090 [Coccidioides posadasii C735 delta SOWgp]
  misc_feature (1)..(280): NCBI GI: 70998951 Blast Desc: protein kinase [Aspergillus fumigatus Af293] gi|74674675|sp|Q4WYU4.1|BUD32_ASPFU RecName: Full=Serine/threonine-protein kinase bud32 protein kinase, Af293]
  misc_feature (10)..(280): SWISSPROT Homolog: EC 2.7.11.1 Non-specific serine/threonine protein kinase
MASTDIEPTFPLPRILTNPSSTSPVLITQGAEGRLYKTTYLLPSIPSALKYRPPKPWRHPVLDARLTKHRILAEARILSKCRRDGVPVPAVYAVDEASGWLMLEWITGGPVRVFINKFLETRRESEIAAGKTGDAVVTGEEEADKDLVALMRRIAEAVGKLHKVGIVHGDLTTSNMMLRPWERGKEPANGHTTETTTESELDGEIIIIDFGLASQSSHEEDRAVDLYVLERAFASTHPRAEGLFTKVLESAYRGAHKQAPNVLRKLEDVRMRGRKRSMIG

SEQ ID NO: 12045 - DNA, 3440 bp, Muscodor strobelii
  misc_feature: SGI EST ID NO. CUFF.28580.0
  misc_feature: Variant of the nucleotide sequence at SEQ ID NO 12043
gcagcaaggacagatgtgagagccaactccgtaaacgcatcgctgtagtacagtaatgtactcggagaggtatctccagagcggtgtgtttcgcaattgttgagctcagtatgagatgagcaaggaagtgaacgtcgcaccagcattggaaatagaatgatgggaaacgtcagctcttttaagaatgggatgacgaaaagtcctggtgacgtttgtctggaatgtgtttgattttctaccaaagcttaagaccggtcttattgatcctcattttattgcccgtcatgcttcatgcctcttggttgatttgaatggattctcagctgaactggtgggagccactctcgtcatggattaccacagctctgggatgctattgttgctgctgcttggctgacttgacagcgggtgtttcccgctgtgtccgaagtgccacagggtaggtatagcaagcatgaatgcaatcttatcgatcaatggcggggcagacggtggaatctctgtgcaccttgacttaggactcatctaccccacctttaagcacagcaatagctagacgatctaagtgaccagtttgaaagcaagcgacatttgttgaaaatcgcaaattcatcctaacgaagaaacgctcttaaaacccgccgcaatggcgtcaaccgacatagaaccaaccttccccctcccgcgaatcctcaccaacccctcctcgacctccccagtcctcataacccaaggcgcagaaggccgcctctacaaaacaacctacctcctcccctccatacccagcgcgctcaaataccgacctccaaagccctggcgacaccccgtcctcgacgctcgcctcaccaaacaccgtatcctcgccgaagcacgaatcctctccaaatgtcgacgtgatggagtccccgtccctgcagtatacgccgtcgacgaagcaagcggatggttaatgttagaatggatcaccggcgggccagtacgagtcttcatcaacaaatttcttgagaccaggagggaaagcgagatcgcggcgggcaaaacgggcgatgctgtagtgacgggcgaggaagaggccgacaaagatctcgttgcactcatgcgacggatagctgaggctgttgggaaattacataaagtcggtatcgtacacggcgatctaacgacaagcaacatgatgctacgaccttgggaacgcggaaaggagcctgccaatggacatactaccgagactactaccgagagcgaactagatggagagataataatcatcgacttcggtctcgcgtcccagagttcacacgaagaagatcgagcggtcgacttatacgtcctcgagcgggcgttcgccagcacgcatcccagagccgagggattgttcacgaaggtgttggagagtgcctataggggcgctcacaaacaggctcctaatgtgttgaggaagcttgaggatgttaggatgagggggaggaagaggagtatgattggctaatagggggtggcaaattcaagatcagaaatatttcacgaggtccgtggtcgagtataagtggtatcatttcaactgatgctatcctgtgtacgccagaacccaagccgccgatggctcggggtacgatctataggatatcgtgcctgatgcttatggtatgtctaagagatgcgcaaatgcgtccaagacccgcaataacaaattcttgaagggaagaaagatatacaaagaagctctgtgtgtgtgtttgtgatcgcggaaaccgatcaggttgttgggattagctgcgcacccgcgaagtagcccttgttctcaatgacgcccctgttcttgacaaaggccgtgtacttggctacccacgtgggcacgacctcgtcgcgcccgacgatactatcgccgagaagttcttgtaatgtatcgggaggtagtatatcagtgctgtcactgtgggtcagcagctctacgccgtgggatttggcaagctggatcaaaggcatggggacgctgcagcagtctttgaggttgatctggtccaccgctggcttgaccttaaccttgtcgataaatcgtttgagcttctctgtgccgaactcggcgatgcctagacggcctacaacacccttgtcatgcagctcttctaaggtagcccaggtaaaaacttcctcttcgtcgctgcccatcgtcgcattcatcttatcggcctcccattcgcaatcgccctcgaacgacaggccagggaacgatgcgatcaggagatcgatattttggatgcccagctctctcgacactagccgcaacgcctcttcgatgtgctcttcgcgagcctcgggggttggatctggaagaaagaaaagcttgacagtgatctcgtactgatcgcgatcttccagcagcccagcgccggcccagtcgatgcgcgggacgtaaaggaccgaatcctcagtctcaagccaagaactcgtcgcggagccgtttgcagaaccgttcacgccatttgtccgctgtccattttcttgcgcacgcacgccgttgccattagtggtgccgtagtcggcctgggcggcgacgaagttgttgcgcagagaatttgtaagctcgagattggatctggaggtgcccggtttccggatgatagagggtcccgccgagacaatattgccggtcgataagactatgcgcgtcatgtcgaagacagcactcggcgcccgattattatgaggagggtttggctactaaatcccaacctatagaaggaggtgaagaggatataggatattagatattaggaatggtagtatcaagaagcacgaaaagatgtattgcgaggttgcagaccaggacgagtctcggagttgggtggatttattagcgtggaggggtgaaggttttctagatggagtggagatttgtaggctagatatcctagcgacctgggggactatggaatctagagatctaaaatgtgaccgaggaccctgtcgagggagatccgctgcggttaccagagagcagtagtttgtcagcgtgtttaataatcgtggagatgataataaagtagcacgggggaaatgggttgccgacacgggattggaaggctggtgcttgttgattgagagataataaaaattcccgagacggatcggagaaagcgccccgggcagagaggtttaagagcttcaaagtgagcaaaaaacgacgtgattgttctactatcatggatacttgtcatccaaacttggctttggtcacgaaaaacgtagagattgtacaatagttgacaatcatgacgcccttggattcactgagaccaatgccgaccttgaatgtctctgttgatcgcgggatgggctaaaccctgattggtcatctgatataggtttccagaggtttgtactgcacaacattgggataatgcagatgcaaggctcgaatcatgcggcgtgagttcgcg

SEQ ID NO: 12046 - DNA, 918 bp, Muscodor strobelii
  misc_feature: SGI cDNA ID NO. 563891
  misc_feature: Encodes the peptide sequence at SEQ ID NO 12047
atgacgcgcatagtcttatcgaccggcaatattgtctcggcgggaccctctatcatccggaaaccgggcacctccagatccaatctcgagcttacaaattctctgcgcaacaacttcgtcgccgcccaggccgactacggcaccactaatggcaacggcgtgcgtgcgcaagaaaatggacagcggacaaatggcgtgaacggttctgcaaacggctccgcgacgagttcttggcttgagactgaggattcggtcctttacgtcccgcgcatcgactgggccggcgctgggctgctggaagatcgcgatcagtacgagatcactgtcaagcttttctttcttccagatccaacccccgaggctcgcgaagagcacatcgaagaggcgttgcggctagtgtcgagagagctgggcatccaaaatatcgatctcctgatcgcatcgttccctggcctgtcgttcgagggcgattgcgaatgggaggccgataagatgaatgcgacgatgggcagcgacgaagaggaagtttttacctgggctaccttagaagagctgcatgacaagggtgttgtaggccgtctaggcatcgccgagttcggcacagagaagctcaaacgatttatcgacaaggttaaggtcaagccagcggtggaccagatcaacctcaaagactgctgcagcgtccccatgcctttgatccagcttgccaaatcccacggcgtagagctgctgacccacagtgacagcactgatatactacctcccgatacattacaagaacttctcggcgatagtatcgtcgggcgcgacgaggtcgtgcccacgtgggtagccaagtacacggcctttgtcaagaacaggggcgtcattgagaacaagggctacttcgcgggtgcgcagctaatcccaacaacctga

SEQ ID NO: 12047 - protein, 305 aa, Muscodor strobelii
  misc_feature: SGI Peptide ID NO. 563891
  misc_feature (178)..(220): Pfam Id: PF00248 Pfam Desc: Aldo/keto reductase family
  misc_feature (1)..(302): NCBI GI: 261351728 Blast Desc: glutamate-cysteine ligase modifier subunit [Verticillium albo-atrum VaMs.102]
  misc_feature (1)..(302): NCBI GI: 256731690 Blast Desc: [Nectria haematococca mpVI 77-13-4]
  misc_feature (1)..(302): NCBI GI: 46137041 Blast Desc: FG10036.1 [Gibberella zeae PH-1]
  misc_feature (1)..(301): NCBI GI: 154305402 Blast Desc: BC1G_08470 [Botryotinia fuckeliana B05.10] gi|150853257|gb|EDN28449.1| BC1G_08470 [Botryotinia fuckeliana B05.10]
  misc_feature (1)..(301): NCBI GI: 171691711 Blast Desc: protein product [Podospora anserina] gi|170945804|emb|CAP72604.1| protein product [Podospora anserina]
  misc_feature (1)..(301): NCBI GI: 156044296 Blast Desc: SS1G_10251 [Sclerotinia sclerotiorum 1980] gi|154694640|gb|EDN94378.1| SS1G_10251 [Sclerotinia sclerotiorum 1980]
  misc_feature (1)..(302): NCBI GI: 116179778 Blast Desc: CHGG_00517 [Chaetomium globosum CBS 148.51] gi|88184814|gb|EAQ92282.1| CHGG_00517 [Chaetomium globosum CBS 148.51]
  misc_feature (1)..(304): NCBI GI: 39951405 Blast Desc: MGG_01345 [Magnaporthe grisea 70-15] gi|145020834|gb|EDK04963.1| MGG_01345 [Magnaporthe grisea 70-15]
  misc_feature (1)..(301): NCBI GI: 85088689 Blast Desc: NCU04596 [Neurospora crassa OR74A] gi|28919105|gb|EAA28628.1| conserved [Neurospora crassa OR74A] gi|28950036|emb|CAD70791.1| related to gamma-glutamylcysteine
  misc_feature (3)..(299): NCBI GI: 255938277 Blast Desc: Pc13g15130 [Penicillium chrysogenum Wisconsin 54-1255] gi|211584529|emb|CAP92582.1| Pc13g15130 [Penicillium chrysogenum Wisconsin 54-1255]
MTRIVLSTGNIVSAGPSIIRKPGTSRSNLELTNSLRNNFVAAQADYGTTNGNGVRAQENGQRTNGVNGSANGSATSSWLETEDSVLYVPRIDWAGAGLLEDRDQYEITVKLFFLPDPTPEAREEHIEEALRLVSRELGIQNIDLLIASFPGLSFEGDCEWEADKMNATMGSDEEEVFTWATLEELHDKGVVGRLGIAEFGTEKLKRFIDKVKVKPAVDQINLKDCCSVPMPLIQLAKSHGVELLTHSDSTDILPPDTLQELLGDSIVGRDEVVPTWVAKYTAFVKNRGVIENKGYFAGAQLIPTT

SEQ ID NO: 12048 - DNA, 3440 bp, Muscodor strobelii
  misc_feature: SGI EST ID NO. CUFF.28580.0
  misc_feature: Variant of the nucleotide sequence at SEQ ID NO 12046
cgcgaactcacgccgcatgattcgagccttgcatctgcattatcccaatgttgtgcagtacaaacctctggaaacctatatcagatgaccaatcagggtttagcccatcccgcgatcaacagagacattcaaggtcggcattggtctcagtgaatccaagggcgtcatgattgtcaactattgtacaatctctacgtttttcgtgaccaaagccaagtttggatgacaagtatccatgatagtagaacaatcacgtcgttttttgctcactttgaagctcttaaacctctctgcccggggcgctttctccgatccgtctcgggaatttttattatctctcaatcaacaagcaccagccttccaatcccgtgtcggcaacccatttcccccgtgctactttattatcatctccacgattattaaacacgctgacaaactactgctctctggtaaccgcagcggatctccctcgacagggtcctcggtcacattttagatctctagattccatagtcccccaggtcgctaggatatctagcctacaaatctccactccatctagaaaaccttcacccctccacgctaataaatccacccaactccgagactcgtcctggtctgcaacctcgcaatacatcttttcgtgcttcttgatactaccattcctaatatctaatatcctatatcctcttcacctccttctataggttgggatttagtagccaaaccctcctcataataatcgggcgccgagtgctgtcttcgacatgacgcgcatagtcttatcgaccggcaatattgtctcggcgggaccctctatcatccggaaaccgggcacctccagatccaatctcgagcttacaaattctctgcgcaacaacttcgtcgccgcccaggccgactacggcaccactaatggcaacggcgtgcgtgcgcaagaaaatggacagcggacaaatggcgtgaacggttctgcaaacggctccgcgacgagttcttggcttgagactgaggattcggtcctttacgtcccgcgcatcgactgggccggcgctgggctgctggaagatcgcgatcagtacgagatcactgtcaagcttttctttcttccagatccaacccccgaggctcgcgaagagcacatcgaagaggcgttgcggctagtgtcgagagagctgggcatccaaaatatcgatctcctgatcgcatcgttccctggcctgtcgttcgagggcgattgcgaatgggaggccgataagatgaatgcgacgatgggcagcgacgaagaggaagtttttacctgggctaccttagaagagctgcatgacaagggtgttgtaggccgtctaggcatcgccgagttcggcacagagaagctcaaacgatttatcgacaaggttaaggtcaagccagcggtggaccagatcaacctcaaagactgctgcagcgtccccatgcctttgatccagcttgccaaatcccacggcgtagagctgctgacccacagtgacagcactgatatactacctcccgatacattacaagaacttctcggcgatagtatcgtcgggcgcgacgaggtcgtgcccacgtgggtagccaagtacacggcctttgtcaagaacaggggcgtcattgagaacaagggctacttcgcgggtgcgcagctaatcccaacaacctgatcggtttccgcgatcacaaacacacacacagagcttctttgtatatctttcttcccttcaagaatttgttattgcgggtcttggacgcatttgcgcatctcttagacataccataagcatcaggcacgatatcctatagatcgtaccccgagccatcggcggcttgggttctggcgtacacaggatagcatcagttgaaatgataccacttatactcgaccacggacctcgtgaaatatttctgatcttgaatttgccaccccctattagccaatcatactcctcttcctccccctcatcctaacatcctcaagcttcctcaacacattaggagcctgtttgtgagcgcccctataggcactctccaacaccttcgtgaacaatccctcggctctgggatgcgtgctggcgaacgcccgctcgaggacgtataagtcgaccgctcgatcttcttcgtgtgaactctgggacgcgagaccgaagtcgatgattattatctctccatctagttcgctctcggtagtagtctcggtagtatgtccattggcaggctcctttccgcgttcccaaggtcgtagcatcatgttgcttgtcgttagatcgccgtgtacgataccgactttatgtaatttcccaacagcctcagctatccgtcgcatgagtgcaacgagatctttgtcggcctcttcctcgcccgtcactacagcatcgcccgttttgcccgccgcgatctcgctttccctcctggtctcaagaaatttgttgatgaagactcgtactggcccgccggtgatccattctaacattaaccatccgcttgcttcgtcgacggcgtatactgcagggacggggactccatcacgtcgacatttggagaggattcgtgcttcggcgaggatacggtgtttggtgaggcgagcgtcgaggacggggtgtcgccagggctttggaggtcggtatttgagcgcgctgggtatggaggggaggaggtaggttgttttgtagaggcggccttctgcgccttgggttatgaggactggggaggtcgaggaggggttggtgaggattcgcgggagggggaaggttggttctatgtcggttgacgccattgcggcgggttttaagagcgtttcttcgttaggatgaatttgcgattttcaacaaatgtcgcttgctttcaaactggtcacttagatcgtctagctattgctgtgcttaaaggtggggtagatgagtcctaagtcaaggtgcacagagattccaccgtctgccccgccattgatcgataagattgcattcatgcttgctatacctaccctgtggcacttcggacacagcgggaaacacccgctgtcaagtcagccaagcagcagcaacaatagcatcccagagctgtggtaatccatgacgagagtggctcccaccagttcagctgagaatccattcaaatcaaccaagaggcatgaagcatgacgggcaataaaatgaggatcaataagaccggtcttaagctttggtagaaaatcaaacacattccagacaaacgtcaccaggacttttcgtcatcccattcttaaaagagctgacgtttcccatcattctatttccaatgctggtgcgacgttcacttccttgctcatctcatactgagctcaacaattgcgaaacacaccgctctggagatacctctccgagtacattactgtactacagcgatgcgtttacggagttggctctcacatctgtccttgctgc

SEQ ID NO: 12049 - DNA, 468 bp, Muscodor strobelii
  misc_feature: SGI cDNA ID NO. 563892
  misc_feature: Encodes the peptide sequence at SEQ ID NO 12050
atggccatccactacttgatattgctctcccggcagggcaaagtgcgcctagcaaaatggttcacgacgctgtctcccaaggacaaggccaagatcgtcaaggacgtctcccagctggtcctcgccagacgaacccgcatgtgcaactttcttgagtacaaagataccaagatcgtctaccgccgctatgcctccctcttcttcatcgccggctgctcgtctgacgacaacgagctgatcaccctcgagatcatccaccgctacgtcgaacagatggacaagtactatggcaacgtctgcgagctcgacatcatcttctccttcaccaaggcatactacatcctcgacgagatattactggccggcgagctgcaggagagcagcaagaaggccattctaaggtcgatagggcagcaagactcgctggaagacatggagatcgatgaagagattacacggatcatgtaa

SEQ ID NO: 12050 - protein, 155 aa, Muscodor strobelii
  misc_feature: SGI Peptide ID NO. 563892
  misc_feature (2)..(143): Pfam Id: PF01217 Pfam Desc: Clathrin adaptor complex small chain
  misc_feature (1)..(155): NCBI GI: 171691709 Blast Desc: protein product [Podospora anserina] gi|170945803|emb|CAP72603.1| protein product [Podospora anserina]
  misc_feature (1)..(155): NCBI GI: 145613812 Blast Desc: conserved [Magnaporthe grisea 70-15] gi|145020833|gb|EDK04962.1| conserved [Magnaporthe grisea 70-15]
  misc_feature (1)..(148): NCBI GI: 46137037 Blast Desc: FG10034.1 [Gibberella zeae PH-1]
  misc_feature (1)..(155): NCBI GI: 154305400 Blast Desc: BC1G_08469 [Botryotinia fuckeliana B05.10] gi|150853256|gb|EDN28448.1| BC1G_08469 [Botryotinia fuckeliana B05.10]
  misc_feature (1)..(155): NCBI GI: 261193573 Blast Desc: clathrin coat assembly protein ap19 [Ajellomyces dermatitidis SLH14081] gi|225558745|gb|EEH07029.1| AP-1 complex subunit theta-1 [Ajellomyces capsulatus G186AR] clathrin coat
  misc_feature (1)..(155): NCBI GI: 259484023 Blast Desc: TPA: AP-1 adaptor complex subunit sigma, (AFU_orthologue; AFUA_2G01570) [Aspergillus nidulans FGSC A4]
  misc_feature (1)..(155): NCBI GI: 238837607 Blast Desc: clathrin coat assembly protein ap19 [Microsporum canis CBS 113480]
  misc_feature (1)..(155): NCBI GI: 189207627 Blast Desc: AP-2 complex subunit sigma [Pyrenophora tritici-repentis Pt-1C-BFP] gi|187976240|gb|EDU42866.1| AP-2 complex subunit sigma [Pyrenophora tritici-repentis Pt-1C-BFP]
  misc_feature (1)..(155): NCBI GI: 212527324 Blast Desc: AP-1 adaptor complex subunit sigma, [Penicillium marneffei ATCC 18224] gi|210073217|gb|EEA27304.1| AP-1 adaptor complex subunit sigma, [Penicillium marneffei ATCC 18224]
  misc_feature (1)..(155): NCBI GI: 238495514 Blast Desc: AP-1 adaptor complex subunit sigma, [Aspergillus flavus NRRL3357] gi|220695643|gb|EED51986.1| AP-1 adaptor complex subunit sigma, [Aspergillus flavus NRRL3357]
MAIHYLILLSRQGKVRLAKWFTTLSPKDKAKIVKDVSQLVLARRTRMCNFLEYKDTKIVYRRYASLFFIAGCSSDDNELITLEIIHRYVEQMDKYYGNVCELDIIFSFTKAYYILDEILLAGELQESSKKAILRSIGQQDSLEDMEIDEEITRIM

SEQ ID NO: 12051 - DNA, 2846 bp, Muscodor strobelii
  misc_feature: SGI EST ID NO. CUFF.28969.3
  misc_feature: Variant of the nucleotide sequence at SEQ ID NO 12049
gtttaatgctcctaaacctcccactgtcgcaaggtcactgcagtgctgctgtggtcctgtgctgccactcgtcacccaccccactacttgtccagagaaattgtatctgcagccagctccaccactcccacctccattgcccgctttgcttccgcccagtcagtctgctacaaatttgtctaaaaaccactccgtcgtgtttgatacaaacgtatcaccatggccatccactacttgatattgctctcccggcagggcaaagtgcgcctagcaaaatggttcacgacgctgtctcccaaggacaaggccaagatcgtcaaggacgtctcccagctggtcctcgccagacgaacccgcatgtgcaactttcttgagtacaaagataccaagatcgtctaccgccgctatgcctccctcttcttcatcgccggctgctcgtctgacgacaacgagctgatcaccctcgagatcatccaccgctacgtcgaacagatggacaagtactatggcaacgtctgcgagctcgacatcatcttctccttcaccaaggcatactacatcctcgacgagatattactggccggcgagctgcaggagagcagcaagaaggccattctaaggtcgatagggcagcaagactcgctggaagacatggagatcgatgaagagattacacggatcatgtaatgaacactgcatgtacttactatggactattgcgcaagccctcattgatatgcttgatttggttgcgaggcgtaccggtttgcgggaaggtattcagacattgcatttgcaagtatgctcatctagtcatattcacagaacgcggaagaaatcgaatcaaatctcaaacaagccggtttcctctaatagacgggcattcgaagtgagatctttgacgaatcacccacagtatcacggatgatttagcacaaactcaagggccccaggaagcaatgcaagactattatttcaggactttatggacgggaagtgactatgatgcgcaacatcactcgattgcagtttcccgcggctgtcggcacagaaccatatcaattgattctcgcccgaattgatcccgaatcgacaaacctggcgcaatcaaatgaatcggaagtgatacagaacggaagagactggctattcgcaagccgatataggacaccaggggtttactaagacatgcagggacacagcatctgaggacttgacaacattcgacacaaagcctttcgaggaatgaggcaccaacagacgtaatcatttcccgtggttcagtaacgttatctcattcgtttaggtcgctctagagacgggcgattgcccaattagcgtgagtatccgggtggtgtggacagttcgcgatcgagggaatggtccaaggataccaacgttatcagtcccactcacatctcacggccacctagaaagggggaatctgcaggcgggcgctcctggtgaccgcccgcgcaagcagccactgcagtctaccacgcttaggcccgaccgcccagccagcaccagccaacacatcgcacacacaccaatactgtacctactaggtactaagccatatcgcactccgcccagatacggcgggttgttctatcgggtgcatacccggtttattgcgagcgtctgggcgtggacccttggatgagtgtcgatgcttgtcagacaacgccagtccagacacgcagcagctgatcctatccgtcaatcagacaccaccacaaccagcatccttcattcggccatgtgcgcccgctctttcacccaacttgccgatctcccctgttcctttcattcattctcccaacgtccacacaagcagccaaacaacccatcaaaataacaatcagttcctccctgccgcaactctgttcaatccgtatctactcatcgcatagtgctttcctagccaagaacctgtcccacaggcgaacattcctcgtttccgactaccgctacgtcacaatatccaacggcaggagcaccccgacacgtttacccaccgccccgaccgcttcgccagagaccacatcaatcgcaacttccaacatcgtccgctactacctcgaccttgctttttgcatccgatcaatccatctccaccactgctcggactcattgcgcaacttacaacctccgtcccatttaccgcttgttccatgcacaccgctatctgtgtttcagcccgaccgcagattcaatcaaccgattttgaaacttcggatacaccgcatcgcgcaaccgtctctacttgctgcatgattcccgagataatacatccatcatgaaggttcggggcattatccgtgcatctgcctcagtcgcgcgcgacctgggaggatacacagcactcgattatcaacactaagctgaccgtcatagtttcttccgcttcgcgacttcgacgtcataacgtctgcgctgaactttagcacaactgaatgccgcgttatgggtggctgcgatctctacacaacgaaagccgcaggttctgacaagaaactataccgaaacattgaatgctccctcgagtcacaacatgcagctcttctcaagttcggcgcgtcgctatctcctccgcagaggaaggagatggccgactctctcaacctgtcgcgctcaagcccattcggctcgctgagcgagttatcaagtcgccgcaccttcgcctatttgatcgcaacgctgaatgcaagccatccagactatgacttctcgcatgtcctgcggcctacagacttccggcgggaaaagaacctgcggcgtgtgatggctaccgtggacagtctgatgaatagtgttcgaccgcatggtgcaagtctactaag

SEQ ID NO: 12052 - DNA, 1542 bp, Muscodor strobelii
  misc_feature: SGI cDNA ID NO. 563893
  misc_feature: Encodes the peptide sequence at SEQ ID NO 12053
atgttgtattctccccatcgtcttctactaccagctttggtcacgtctctagtcgcgtatgcggctccccacttgacatatgattcagcgatccttgaggccaacaagggctctttagccgctcctcccaagaataacgctgtatttacatgcaaagccttgaggactgcgatgggaggcggtgatacggttctgtggtctggttcaggagatgtctatgaagacgcgattgatgataactactcctctacttgctggctgccagcagcttgcgtcgttagccccgccaatacaacaatggtcgcaagagttgtgaccattttgaatcagctcaatacgaaattctcaatacgcagcggcggtcataaacaaaaccctggctacggcagcatcgacgaatctggtgtgctggtgtcaatggccaatatcaataccctttctctctccaagaataagagtacaattcaggtcggtccaggaaaccggtggcagaaagtttatgactacctagttccccaaggccttgtcgctgtcggtggacgtgtcggcattgtgggcgtgggtggcttcatgcttggtggcgggctcagttatcattccaaccaatacggcctggccatggataacgtcgagtcattcgaggttgttcttgcaagtggaaaaatcgtgaaagcttcagcgtcgcagaatgccgatctctatcagggccttcgaggtggtgcggcgaattttgggattgtcacctcgttcgagctccaagtgtatcctataacgcagatgtacttcgaagctcgagcatatgcacacaaccagacggcagaggttctcaccgccctcgctgagtttaacaaggttgggatgaaggatccgttgtctagcttcggcctccagatacaaccaactggacccgtcgtcctcctccaatactcggtgccagtcaatcagcccgactgctttgaatctttctacgcaatcagctcgttcactcagtactttccaccgaccaacgggtccttccttgacgcccttgcgcttgcgacgggcggatttgcgcccgtcggcattcgcacatatggcgaaacctttacccacaccgtcgatgcagctttcatgattgaggcgtacgaaattttcgctgccgagattgcgatgctccccgaaggcgcgagcggcacgtggattcccaaccccatttccacaaatatcgtgaaacggggtcaccgtaatggtggaaacctcattggtctcgtcgaagttcctcagcagtggcacgagtggtttattcaatgggaagatgctgcgcttgacgaccagatatattcgatcagtgacacaatcaccactaagctcaatgaagctgcgcacaaggcaggaacattcctcccttacatcttcttcaacacagctggaacacaccaaaaggtattgcaaagctttggcgaggccaatgtcaaaactatcaagaaggttgctaagaagtacgacccggaccgcgtgttccagcgcctacagaatgagggacagttgatcagagacttgtag

SEQ ID NO: 12053 - protein, 513 aa, Muscodor strobelii
  misc_feature: SGI Peptide ID NO. 563893
  misc_feature (89)..(226): Pfam Id: PF01565 Pfam Desc: FAD binding domain
  misc_feature (46)..(512): NCBI GI: 255939370 Blast Desc: Pc16g00310 [Penicillium chrysogenum Wisconsin 54-1255] gi|211585077|emb|CAP92701.1| Pc16g00310 [Penicillium chrysogenum Wisconsin 54-1255]
  misc_feature (43)..(513): NCBI GI: 116201111 Blast Desc: CHGG_08440 [Chaetomium globosum CBS 148.51] gi|88176958|gb|EAQ84426.1| CHGG_08440 [Chaetomium globosum CBS 148.51]
  misc_feature (46)..(497): NCBI GI: 145256064 Blast Desc: An10g00190 [Aspergillus niger CBS 513.88] gi|134078582|emb|CAK49110.1| protein product [Aspergillus niger]
  misc_feature (77)..(510): NCBI GI: 242821331 Blast Desc: 6-hydroxy-D-nicotine oxidase, [Talaromyces stipitatus ATCC 10500] gi|218712579|gb|EED12004.1| 6-hydroxy-D-nicotine oxidase, [Talaromyces stipitatus ATCC 10500]
  misc_feature (41)..(510): NCBI GI: 46138193 Blast Desc: FG10611.1 [Gibberella zeae PH-1]
  misc_feature (60)..(513): NCBI GI: 238499855 Blast Desc: conserved [Aspergillus flavus NRRL3357] gi|220692915|gb|EED49261.1| conserved [Aspergillus flavus NRRL3357]
  misc_feature (61)..(510): NCBI GI: 145230445 Blast Desc: An01g11180 [Aspergillus niger] gi|134055649|emb|CAK44023.1| protein product [Aspergillus niger]
  misc_feature (73)..(512): NCBI GI: 256723541 Blast Desc: NECHADRAFT_42078 [Nectria haematococca mpVI 77-13-4]
  misc_feature (76)..(513): NCBI GI: 85090595 Blast Desc: NCU09273 [Neurospora crassa OR74A] gi|28919859|gb|EAA29256.1| conserved [Neurospora crassa OR74A]
  misc_feature (28)..(507): NCBI GI: 46138189 Blast Desc: FG10609.1 [Gibberella zeae PH-1]
MLYSPHRLLLPALVTSLVAYAAPHLTYDSAILEANKGSLAAPPKNNAVFTCKALRTAMGGGDTVLWSGSGDVYEDAIDDNYSSTCWLPAACVVSPANTTMVARVVTILNQLNTKFSIRSGGHKQNPGYGSIDESGVLVSMANINTLSLSKNKSTIQVGPGNRWQKVYDYLVPQGLVAVGGRVGIVGVGGFMLGGGLSYHSNQYGLAMDNVESFEVVLASGKIVKASASQNADLYQGLRGGAANFGIVTSFELQVYPITQMYFEARAYAHNQTAEVLTALAEFNKVGMKDPLSSFGLQIQPTGPVVLLQYSVPVNQPDCFESFYAISSFTQYFPPTNGSFLDALALATGGFAPVGIRTYGETFTHTVDAAFMIEAYEIFAAEIAMLPEGASGTWIPNPISTNIVKRGHRNGGNLIGLVEVPQQWHEWFIQWEDAALDDQIYSISDTITTKLNEAAHKAGTFLPYIFFNTAGTHQKVLQSFGEANVKTIKKVAKKYDPDRVFQRLQNEGQLIRDL

SEQ ID NO: 12054 - DNA, 831 bp, Muscodor strobelii
  misc_feature: SGI cDNA ID NO. 563894
  misc_feature: Encodes the peptide sequence at SEQ ID NO 12055
atggcccctgctcagcccaagtcttggactgccggttccaaccctgttagcaagttcgaaggtgcctttgtagtgcgtaagcacactccaccagagggccgcaacattcactttcatgttcttattgacccaaaccacccgcggacattgcaaatatcggcctcgggcaagaagcctcctacacattggcacccacatcaatgggagttcttcaaggtggtccgaggttcactgacagttgagatcaacggcatcgcgcatgtcttcacgaaagagtctggcgaatactgtctcccgcctggcccgcatcactgcttgtacgcaactcctggccagcctgatgggtccatggtagagctgtggctcggtgcttcaccttcgggtggcgactctcaactagatcaagcctttttcgagaattggtacgggtatcaggaggattttcttatgcatggtgacacgccggatcccattcaggtgctctccatgtttgatgcaggtgactcgtacctctctccgccagcgtggctccccttccgtaagacggtcggatggcttatgggcgtcatcattggtcgttggatcggtggattgttgggctacgcgcctttctacccagagtggacgaccgactgggacgctgcgtgtaggcagatggagagccactggactcagcgccgcttcgctgatcgatcactacaggccaagaagcgaaagcagctgctttcccgtggtgagtcggtgggcaatgaagctttgtacaaaatcgagccaggcttacacctttggggcggacaccaagcaaatggaaatgggaaaaaggtgtattga

SEQ ID NO: 12055 - protein, 276 aa, Muscodor strobelii
  misc_feature: SGI Peptide ID NO. 563894
  misc_feature (1)..(248): NCBI GI: 145256060 Blast Desc: An10g00180 [Aspergillus niger CBS 513.88] gi|134078581|emb|CAK49109.1| protein product [Aspergillus niger]
  misc_feature (1)..(246): NCBI GI: 255939374 Blast Desc: Pc16g00330 [Penicillium chrysogenum Wisconsin 54-1255] gi|211585079|emb|CAP92703.1| Pc16g00330 [Penicillium chrysogenum Wisconsin 54-1255]
  misc_feature (1)..(235): NCBI GI: 238502251 Blast Desc: conserved [Aspergillus flavus NRRL3357] gi|220691169|gb|EED47517.1| conserved [Aspergillus flavus NRRL3357]
  misc_feature (12)..(235): NCBI GI: 116201113 Blast Desc: CHGG_08441 [Chaetomium globosum CBS 148.51] gi|88176959|gb|EAQ84427.1| CHGG_08441 [Chaetomium globosum CBS 148.51]
  misc_feature (1)..(237): NCBI GI: 255948128 Blast Desc: Pc22g08160 [Penicillium chrysogenum Wisconsin 54-1255] gi|211591848|emb|CAP98104.1| Pc22g08160 [Penicillium chrysogenum Wisconsin 54-1255]
  misc_feature (1)..(237): NCBI GI: 121710952 Blast Desc: conserved [Aspergillus clavatus NRRL 1] gi|119401242|gb|EAW11666.1| conserved [Aspergillus clavatus NRRL 1]
  misc_feature (10)..(232): NCBI GI: 242821297 Blast Desc: conserved [Talaromyces stipitatus ATCC 10500] gi|218712572|gb|EED11997.1| conserved [Talaromyces stipitatus ATCC 10500]
  misc_feature (1)..(238): NCBI GI: 238491836 Blast Desc: conserved [Aspergillus flavus NRRL3357] gi|220697568|gb|EED53909.1| conserved [Aspergillus flavus NRRL3357]
  misc_feature (36)..(230): NCBI GI: 46138199 Blast Desc: FG10614.1 [Gibberella zeae PH-1]
  misc_feature (17)..(237): NCBI GI: 115399716 Blast Desc: [Aspergillus terreus NIH2624] gi|114191120|gb|EAU32820.1| [Aspergillus terreus NIH2624]
MAPAQPKSWTAGSNPVSKFEGAFVVRKHTPPEGRNIHFHVLIDPNHPRTLQISASGKKPPTHWHPHQWEFFKVVRGSLTVEINGIAHVFTKESGEYCLPPGPHHCLYATPGQPDGSMVELWLGASPSGGDSQLDQAFFENWYGYQEDFLMHGDTPDPIQVLSMFDAGDSYLSPPAWLPFRKTVGWLMGVIIGRWIGGLLGYAPFYPEWTTDWDAACRQMESHWTQRRFADRSLQAKKRKQLLSRGESVGNEALYKIEPGLHLWGGHQANGNGKKVY

SEQ ID NO: 12056 - DNA, 1512 bp, Muscodor strobelii
  misc_feature: SGI cDNA ID NO. 563895
  misc_feature: Encodes the peptide sequence at SEQ ID NO 12057
atgatttcgatgttgatagttcttaagttctacccatactttttcgccagcgctcttgcgctagtagtgttcacgtttagacagttgcttcctacaccaggccgacagaaacagaggcagcatggacctcctggattgcctatcattggaaacctgcaccagattccaagcacaggggcccatcgtcatttcaccaaatggtccaaagcctacggtggtctcttcactctaaagctcggtcctgccactgctgccgtgatcacagatcgccgtctcgtcaaagagcttatagacaaaaagagtgccattttcagcaatcggccggcatcgtatgtatcgcatgatcttatcaccaaaggagaccatcttctggtaatgcaatatggcgatacctggaggtctttccggaaactcctgcaccaaaacttccacgaaggtatgtgcgacaagcagcatatgaatctcgtcgacgccgagcagacacagatgttacgcgactttattgagaaacccgagcaatatatgctccaccctaagcgcacaagtaatagcattatcatgagcattgtctacggaattcgcagtgaatcgatcaaggcgcctcacctggtcgaactgtacgacatcatggatcgctggtctgaggtcatggaagttggtgccactccgcccgtcgacttgtttcctgtgctcaagtatctgcccgagagccttttcaacaactgggtccaaagatcacttcatgtgggccagcgtatgaaagcgctctactccaccatgcgccgtaaagtcatcgccaactcttcccctgacgcgccattcctcggcaacgtcatggcccagaatggaaagctacaattgagtccaaaccaacttgactttttgggcggtgtcctcatggaaggtggatctgacaccgcccaggcgcaaatcgatagcttttgcgccgaggatcacttgcctgtgtgggctgactacgacaagctacctttagtgagcatgatcatcaaagaagcaatgcgatggcgaccagtcacgccgctaggcttccctcacgcgttgaatcaggactactatcatcacgccgatggcagcgacggctccgacgccgtcttcctgcccaagggaaccacggtctttgtcaatgtatatgagggccggacgcgaccggcggctgaatacgcggcttcggctgactacgaggcgagggaccactacacgtatggtttcggccgacgtatctgcccaggcatccatctagccgagcgagaactttttctgggtattgccaagcttctgtgggcctttgacttcgcgcctcagatcaatcctgcgactggtcttccgatacccatcgacaccaatccagagacagggtacagtgagggctttcttgtctgccctaagccatttccatgcgttgtgacaacccggtcgagtaaacgccgagacacgatcttcgcagagcatgccaaggctgaagctggggtgttttccaaatacaggggttaa

SEQ ID NO: 12057 - protein, 503 aa, Muscodor strobelii
  misc_feature: SGI Peptide ID NO. 563895
  misc_feature (41)..(475): Pfam Id: PF00067 Pfam Desc: Cytochrome P450
  misc_feature (41)..(144): Pfam Id: PF00067 Pfam Desc: Cytochrome P450
  misc_feature (323)..(384): Pfam Id: PF00067 Pfam Desc: Cytochrome P450
  misc_feature (409)..(441): Pfam Id: PF00067 Pfam Desc: Cytochrome P450
  misc_feature (49)..(501): NCBI GI: 255939388 Blast Desc: Pc16g00400 [Penicillium chrysogenum Wisconsin 54-1255] gi|211585086|emb|CAP92710.1| Pc16g00400 [Penicillium chrysogenum Wisconsin 54-1255]
  misc_feature (17)..(501): NCBI GI: 145256038 Blast Desc: An10g00110 [Aspergillus niger CBS 513.88] gi|134078574|emb|CAK49102.1| protein product [Aspergillus niger]
  misc_feature (5)..(503): NCBI GI: 242782663 Blast Desc: cytochrome P450, [Talaromyces stipitatus ATCC 10500] gi|218720192|gb|EED19611.1| cytochrome P450, [Talaromyces stipitatus ATCC 10500]
  misc_feature (12)..(501): NCBI GI: 259479677 Blast Desc: TPA: cytochrome P450, (Eurofung) [Aspergillus nidulans FGSC A4]
  misc_feature (49)..(501): NCBI GI: 171691562 Blast Desc: protein product [Podospora anserina] gi|170945729|emb|CAP71842.1| protein product [Podospora anserina]
  misc_feature (12)..(501): NCBI GI: 121710948 Blast Desc: Cytochrome P450 oxidoreductase, [Aspergillus clavatus NRRL 1] gi|119401240|gb|EAW11664.1| Cytochrome P450 oxidoreductase, [Aspergillus clavatus NRRL 1]
  misc_feature (12)..(501): NCBI GI: 195971093 Blast Desc: m-cresol methyl hydroxylase [Aspergillus clavatus]
  misc_feature (41)..(501): NCBI GI: 255948120 Blast Desc: Pc22g08110 [Penicillium chrysogenum Wisconsin 54-1255] gi|211591844|emb|CAP98099.1| Pc22g08110 [Penicillium chrysogenum Wisconsin 54-1255]
  misc_feature (42)..(501): NCBI GI: 238840115 Blast Desc: cytochrome P450 2D18 [Microsporum canis CBS 113480]
  misc_feature (19)..(501): NCBI GI: 259482076 Blast Desc: TPA: cytochrome P450, (Eurofung) [Aspergillus nidulans FGSC A4]
  misc_feature (42)..(478): SWISSPROT Homolog: EC 1.14.14.1 Unspecific monooxygenase
MISMLIVLKFYPYFFASALALVVFTFRQLLPTPGRQKQRQHGPPGLPIIGNLHQIPSTGAHRHFTKWSKAYGGLFTLKLGPATAAVITDRRLVKELIDKKSAIFSNRPASYVSHDLITKGDHLLVMQYGDTWRSFRKLLHQNFHEGMCDKQHMNLVDAEQTQMLRDFIEKPEQYMLHPKRTSNSIIMSIVYGIRSESIKAPHLVELYDIMDRWSEVMEVGATPPVDLFPVLKYLPESLFNNWVQRSLHVGQRMKALYSTMRRKVIANSSPDAPFLGNVMAQNGKLQLSPNQLDFLGGVLMEGGSDTAQAQIDSFCAEDHLPVWADYDKLPLVSMIIKEAMRWRPVTPLGFPHALNQDYYHHADGSDGSDAVFLPKGTTVFVNVYEGRTRPAAEYAASADYEARDHYTYGFGRRICPGIHLAERELFLGIAKLLWAFDFAPQINPATGLPIPIDTNPETGYSEGFLVCPKPFPCVVTTRSSKRRDTIFAEHAKAEAGVFSKYRG

SEQ ID NO: 12058 - DNA, 966 bp, Muscodor strobelii
  misc_feature: SGI cDNA ID NO. 563896
  misc_feature: Encodes the peptide sequence at SEQ ID NO 12059
atggccagaattgacgtgcatcatcacttcattccccaaccttatatagaagcatataactcctcaggaggtgatccttctggatgggtgttgccaaaatggagcatcgagtcgactttgaatttgatgcgtgagcacaacaccgagacagccatcttgtcgcttactgcacctggcacaacaattctccgtgggcaagctgcttcggatcttgcgcggcaggtcaatgagtgcgcggctgcactctgcgccgatcatccaggcaagcttggcttttttgccgcgctgccacctttagtggataatatcgatgccgttttggcagaggtcacgttttcgctcgacgtgttgcacgcggacggcgttacgctatacactcgatatggcgaggatcaccactacctggggcaccccgatttccgaccgctatgggacgagttagacagacggggagccgttgttttcgtacatcctacgcatctcgtagatacaaaccttgtcaacccggctctcccgcagcccatgattgactatccccacgagacgacgcggactgccgtggatttgattgtatctggtactatcaaagagcacactaacgtgagaatcattctctcccacgccggcggttctttgccgtacttggcgatccgtgctgctcacttgacatatgacaccaaactcagcaagaaagacccagcagaattcttggaagaagccacgtcgttttatttcgacctggcactatcaggaaacccgttaacactggaccttctcctgaaatttgctaaacccggtcatgtgctttatgggagtgacttcccgtacgctccgaaaaagacagttgattcacatgtgcaaatgctggaccaatatgtgatggaacctgatgttgttgactccgtcacgcgcggcgcagcggaagcattgtttccccgcttaaaatacgatgctactaagaaatag

SEQ ID NO: 12059 - protein, 321 aa, Muscodor strobelii
  misc_feature: SGI Peptide ID NO. 563896
  misc_feature (4)..(313): Pfam Id: PF04909 Pfam Desc: Amidohydrolase
  misc_feature (1)..(318): NCBI GI: 145256042 Blast Desc: An10g00120 [Aspergillus niger CBS 513.88] gi|134078575|emb|CAK49103.1| protein product [Aspergillus niger]
  misc_feature (1)..(321): NCBI GI: 255939386 Blast Desc: Pc16g00390 [Penicillium chrysogenum Wisconsin 54-1255] gi|211585085|emb|CAP92709.1| Pc16g00390 [Penicillium chrysogenum Wisconsin 54-1255]
  misc_feature (1)..(313): NCBI GI: 145230461 Blast Desc: An01g11270 [Aspergillus niger] gi|134055657|emb|CAK44031.1| protein product [Aspergillus niger]
  misc_feature (3)..(315): NCBI GI: 256724908 Blast Desc: NECHADRAFT_91485 [Nectria haematococca mpVI 77-13-4]
  misc_feature (3)..(315): NCBI GI: 85089642 Blast Desc: NCU09844 [Neurospora crassa OR74A] gi|28919354|gb|EAA28806.1| [Neurospora crassa OR74A]
  misc_feature (1)..(320): NCBI GI: 121710946 Blast Desc: amidohydrolase family protein [Aspergillus clavatus NRRL 1] gi|119401239|gb|EAW11663.1| amidohydrolase family protein [Aspergillus clavatus NRRL 1]
  misc_feature (3)..(314): NCBI GI: 169777657 Blast Desc: [Aspergillus oryzae RIB40] gi|238494842|ref|XP_002378657.1| 2-amino-3-carboxymuconate-6-semialdehyde decarboxylase, flavus
  misc_feature (1)..(314): NCBI GI: 189202840 Blast Desc: amidohydrolase family protein [Pyrenophora tritici-repentis Pt-1C-BFP] gi|187984855|gb|EDU50343.1| amidohydrolase family protein [Pyrenophora tritici-repentis
  misc_feature (3)..(314): NCBI GI: 145248824 Blast Desc: An14g01235 [Aspergillus niger] gi|134081422|emb|CAK41904.1| protein product [Aspergillus niger]
  misc_feature (3)..(314): NCBI GI: 115437270 Blast Desc: [Aspergillus terreus NIH2624] gi|114188583|gb|EAU30283.1| [Aspergillus terreus NIH2624]
  misc_feature (3)..(311): SWISSPROT Homolog: EC 4.1.1.45 Aminocarboxymuconate-semialdehyde decarboxylase
MARIDVHHHFIPQPYIEAYNSSGGDPSGWVLPKWSIESTLNLMREHNTETAILSLTAPGTTILRGQAASDLARQVNECAAALCADHPGKLGFFAALPPLVDNIDAVLAEVTFSLDVLHADGVTLYTRYGEDHHYLGHPDFRPLWDELDRRGAVVFVHPTHLVDTNLVNPALPQPMIDYPHETTRTAVDLIVSGTIKEHTNVRIILSHAGGSLPYLAIRAAHLTYDTKLSKKDPAEFLEEATSFYFDLALSGNPLTLDLLLKFAKPGHVLYGSDFPYAPKKTVDSHVQMLDQYVMEPDVVDSVTRGAAEALFPRLKYDATKK

SEQ ID NO: 12060 - DNA, 1920 bp, Muscodor strobelii
  misc_feature: SGI cDNA ID NO. 563897
  misc_feature: Encodes the peptide sequence at SEQ ID NO 12061
atgcccagcaatggcgccagccgtgacgaaagcaggtacggcacgagaccagtaatcattgccaattgttccgggtcgatgggcgattctggataccaaatgctgcgccagatgactcttggagaggttgactacgttacgggcgattaccttgcagaactgaacttggctcaaaacgccgaagctgtcgctgctgggaagcatccgggctacgaaccaacggcctgggatggtctgcaacagagcatggagacaatcgcttccaagcatattaaagtcattattaatggcggtgccctcaatcccgtcggtctagcccgtaaatgccaagacctgattaataggaaagcctatgatatcaaagtggcagcagtgataggagacgatattgtcgatcaagtgcgacacggtcttggtctcaagcagaacaacaacgagggggccgctgtcgagaagctgcagtatctggacacaagcaaggagcatgtccacgagcccaggaatcttcacgcttatctggaccccaagcttcatccgatcgtttcggcacacgcctatctcggctcgcgtggcatctatgaggcattgtgccacggagccgatatagtcatttgcggtcgggtcgctgatgcggccccagtcatcggcgccgctcgccattggtttggctgggccgatacagactacaatcagctggctgggagtcttatcgctggccacttaattgaatgctcggcctacgtgacgggcgccaacgttgcgggatttgaaaaatatcccctcgagcagcttcttgatctaccttttggaatatgtcaagtctacaaggatggttcttgcgccatcactaagcatgaaaataccacgggcatggtgacggaaacgaccgtcaagtctcagttattgtatgagattcagggcaatacttacctgaatagtgacgtgaaggcatacttggacggagttatagtgaaagagattggtccaaaccgtgtgtctgtgagtggcgtgcgtggcggcgcgcctcctgccaccacgaaggtagccgttgcctacaaagggggtttccaagctcagctacttcttaatcttggcggatatgctgtggaggcaaagcacgctttgtacgagaagcaaatccgtcatggtctccagaaaaatggtctcatcgacaagttcgatttacttgaattccagtgtgtcggaacggcggcgcccaatgccagcaaaatggtggccggcacaacataccttcgagtcttcagccaggctccaacacccgagcctatcggaggtttgcttcgcgtcttcgttgacaacggcatgcagcatgcctcaggtgcgcacgggtccactgacttccgctgcgcaatgcctacaccctacctcgcctacttcccagccctctacccacagaaccagctacaagagaaagcgctgattttaggtcctgacggagaggtctcgttgaccttggaagcaggacacccacctaaatactgcagtgaaagcgaggacaaaggtagcgttatcgctgctgagactagtggagaaaaggcgacacgggatttcggggcaactcgaaccgttcctctgggtgacattgcgctagggcgctcaggtgataagggttcaaacgtcaacgttggtctattcgtactggacccagagtgctactcttggtttaagagtgagatgacagtggaaagaatgaagcagctcatgggtgatgactggcgcgaaaatagttactccatcgagagagtcgagtttcccaacctattggccgttcatttcgtgatctacggcctgctgggccggggtgtgagctcgactagtagcctggacagtctcgggaaagggtttgcggactggatcagatcaagatggatcgacgtcccggagaaatttctcccttga

SEQ ID NO: 12061 - protein, 639 aa, Muscodor strobelii
  misc_feature: SGI Peptide ID NO. 563897
  misc_feature (20)..(402): Pfam Id: PF07287 Pfam Desc: Domain of function (DUF1446)
  misc_feature (181)..(372): Pfam Id: PF07287 Pfam Desc: Domain of function (DUF1446)
  misc_feature (20)..(129): Pfam Id: PF07287 Pfam Desc: Domain of function (DUF1446)
  misc_feature (1)..(638): NCBI GI: 261198973 Blast Desc: DUF1446 domain-containing protein [Ajellomyces dermatitidis SLH14081] gi|239595040|gb|EEQ77621.1| DUF1446 domain-containing protein [Ajellomyces dermatitidis SLH14081]
  misc_feature (1)..(638): NCBI GI: 225678245 Blast Desc: conserved [Paracoccidioides brasiliensis Pb03]
  misc_feature (16)..(637): NCBI GI: 169785763 Blast Desc: [Aspergillus oryzae RIB40] gi|83776090|dbj|BAE66209.1| protein product [Aspergillus oryzae]
  misc_feature (15)..(638): NCBI GI: 145234182 Blast Desc: An02g13310 [Aspergillus niger] gi|134057406|emb|CAK47744.1| protein product [Aspergillus niger]
  misc_feature (24)..(638): NCBI GI: 154319289 Blast Desc: BC1G_02596 [Botryotinia fuckeliana B05.10] gi|150857027|gb|EDN32219.1| BC1G_02596 [Botryotinia fuckeliana B05.10]
  misc_feature (13)..(638): NCBI GI: 256720792 Blast Desc: NECHADRAFT_49887 [Nectria haematococca mpVI 77-13-4]
  misc_feature (16)..(628): NCBI GI: 85107671 Blast Desc: NCU07901 [Neurospora crassa OR74A] gi|28924023|gb|EAA33181.1| conserved [Neurospora crassa OR74A]
  misc_feature (54)..(638): NCBI GI: 240110010 Blast Desc: CPC735_035150 [Coccidioides posadasii C735 delta SOWgp]
  misc_feature (1)..(638): NCBI GI: 239609848 Blast Desc: DUF1446 domain-containing protein [Ajellomyces dermatitidis ER-3]
  misc_feature (14)..(638): NCBI GI: 119184871 Blast Desc: CIMG_07186 [Coccidioides immitis RS]
MPSNGASRDESRYGTRPVIIANCSGSMGDSGYQMLRQMTLGEVDYVTGDYLAELNLAQNAEAVAAGKHPGYEPTAWDGLQQSMETIASKHIKVIINGGALNPVGLARKCQDLINRKAYDIKVAAVIGDDIVDQVRHGLGLKQNNNEGAAVEKLQYLDTSKEHVHEPRNLHAYLDPKLHPIVSAHAYLGSRGIYEALCHGADIVICGRVADAAPVIGAARHWFGWADTDYNQLAGSLIAGHLIECSAYVTGANVAGFEKYPLEQLLDLPFGICQVYKDGSCAITKHENTTGMVTETTVKSQLLYEIQGNTYLNSDVKAYLDGVIVKEIGPNRVSVSGVRGGAPPATTKVAVAYKGGFQAQLLLNLGGYAVEAKHALYEKQIRHGLQKNGLIDKFDLLEFQCVGTAAPNASKMVAGTTYLRVFSQAPTPEPIGGLLRVFVDNGMQHASGAHGSTDFRCAMPTPYLAYFPALYPQNQLQEKALILGPDGEVSLTLEAGHPPKYCSESEDKGSVIAAETSGEKATRDFGATRTVPLGDIALGRSGDKGSNVNVGLFVLDPECYSWFKSEMTVERMKQLMGDDWRENSYSIERVEFPNLLAVHFVIYGLLGRGVSSTSSLDSLGKGFADWIRSRWIDVPEKFLP

SEQ ID NO: 12062 - DNA, 807 bp, Muscodor strobelii
  misc_feature: SGI cDNA ID NO. 563898
  misc_feature: Encodes the peptide sequence at SEQ ID NO 12063
atggcccgtacagccatcccaatcatccacagtgatgaatgggacaggctccgtgaagtggctttcgcctgggagcctcccaattctcatgtcatgcctatctcaaacgtcctgtcggctatatgcgggctcctctgggccgcctcgtacgtgctccttacgataaaggcattcaaggaccgatcttatgggatgccgattttcgccacttgctacaacgtgacatgggagaccatttacgcatttgtctacccgccggatcccttcaacgccgtcttcttcggcctgtggtctatctcagatatatttctcttcgtcgccacggcccgctacggcgtgcatgagtggtcccactcaccccaggtagccggcaatctgccgctgatcatggtcatcggcgttatctctgccgcttggatgcaattggcattggcgagcgagctgatcccagtcatgggccgtgagattgtattcttttccagctggccgctgcagattgttctcggcgcgggcagcctcatgcaactcttatcgagggacaacaccaggggtcaatccattcacatctggtggactcgcgccgtgggtactctggcggcatgtctctgcttcacgtatagagcgtactattggccagagaggttcggatatgcgactaggccagtcgctgtctatatatttgccaccagtatcttcattgacgtggtttactactttgcgttcgtcgctgtgcttcgacgggagcggcttactgtcaagcagaccagtgtcggcaagattggcaatccccatgtgaagtcgaattga

SEQ ID NO: 12063 - protein, 268 aa, Muscodor strobelii
  misc_feature: SGI Peptide ID NO. 563898
  misc_feature (27)..(249): NCBI GI: 255939372 Blast Desc: Pc16g00320 [Penicillium chrysogenum Wisconsin 54-1255] gi|211585078|emb|CAP92702.1| Pc16g00320 [Penicillium chrysogenum Wisconsin 54-1255]
  misc_feature (27)..(248): NCBI GI: 154319283 Blast Desc: BC1G_02593 [Botryotinia fuckeliana B05.10] gi|150857024|gb|EDN32216.1| BC1G_02593 [Botryotinia fuckeliana B05.10]
  misc_feature (34)..(249): NCBI GI: 169783724 Blast Desc: [Aspergillus oryzae RIB40] gi|83775068|dbj|BAE65191.1| protein product [Aspergillus oryzae]
  misc_feature (34)..(249): NCBI GI: 238493553 Blast Desc: integral membrane protein [Aspergillus flavus NRRL3357] gi|220696507|gb|EED52849.1| integral membrane protein [Aspergillus flavus NRRL3357]
  misc_feature (18)..(248): NCBI GI: 145609179 Blast Desc: MGG_07412 [Magnaporthe grisea 70-15] gi|145016587|gb|EDK01017.1| MGG_07412 [Magnaporthe grisea 70-15]
  misc_feature (34)..(249): NCBI GI: 162286822 Blast Desc: AtmB protein [Aspergillus flavus]
  misc_feature (29)..(259): NCBI GI: 85091113 Blast Desc: NCU09400 [Neurospora crassa OR74A] gi|28920126|gb|EAA29507.1| conserved [Neurospora crassa OR74A]
  misc_feature (46)..(259): NCBI GI: 169768878 Blast Desc: [Aspergillus oryzae RIB40] gi|83766767|dbj|BAE56907.1| protein product [Aspergillus oryzae]
  misc_feature (46)..(259): NCBI GI: 238498222 Blast Desc: conserved [Aspergillus flavus NRRL3357] gi|220693620|gb|EED49965.1| conserved [Aspergillus flavus NRRL3357]
  misc_feature (29)..(248): NCBI GI: 169625658 Blast Desc: SNOG_16105 [Phaeosphaeria nodorum SN15] gi|160705700|gb|EAT76477.2| SNOG_16105 [Phaeosphaeria nodorum SN15]
MARTAIPIIHSDEWDRLREVAFAWEPPNSHVMPISNVLSAICGLLWAASYVLLTIKAFKDRSYGMPIFATCYNVTWETIYAFVYPPDPFNAVFFGLWSISDIFLFVATARYGVHEWSHSPQVAGNLPLIMVIGVISAAWMQLALASELIPVMGREIVFFSSWPLQIVLGAGSLMQLLSRDNTRGQSIHIWWTRAVGTLAACLCFTYRAYYWPERFGYATRPVAVYIFATSIFIDVVYYFAFVAVLRRERLTVKQTSVGKIGNPHVKSN

SEQ ID NO: 12064 - DNA, 1230 bp, Muscodor strobelii
  misc_feature: SGI cDNA ID NO. 563899
  misc_feature: Encodes the peptide sequence at SEQ ID NO 12065
atggatttacaccaccaactctcgtcacaacagcaggccgtttcggccctaccagtaacaccagatggcagtagctttgcgcgcgcaactcttacatctcaagatgtcgttggagtgctgggccctctcaacgtgaaccaattccttctcattgccacactcatgaccccggtcattctcatctgggcacccgactccatcgttcgccgggcgctatacccgcttcagctcttctgcctggctgcttcgttgtttgcaccattgcccctaggtcagtcgcaggccgagctctacaacatgggtctccaagtcggcacgattggagcgcgcatcctcgaccgcgtctatctgcataacccagaggatacgtttctacgtatgggtgtcgacgatgtgcctcacaaaggacccgcctcttatggccctctagacaaagctcgttgggctctcgagttgatcttgtccgctagaggcattgggtggaattggcaggcgtctgacgataagcatttcttacggaactcgcttttcttgcgtgtcttcatcacggcaggatggctcaccgtcatttatggtcacctcacactccccgagaatctcgtcgccatcctttttgtcacaacgggaattgggggccgctattctgatactcaccaatggccgcccatgttcggtaacataagtgagtcgtacagcatacgacggtgctggggcaaattctggcatgcatcattgagacggtctaccagtgtacccggtcagttgctcctcgggccattgaggcccaaatcgcgcctagggaagctgtataggcgatacggaatgctgttcctgtcttttatcgtgtcaggcgtcatccatgccttcggctcgtacatggtgacgcgcgatggacttcaaggtatctcggacggaggagctgcggtatattttctggctcagcccgctgctatattagtcgaggacacaatgttatccatcttaggtattgttgacgatgggaagccatcctacttcaggcgcgttgtgggatacacatatgttggattattctggctatggtgttttccgacgctgaaagtcattccactcgccctggcacatgggatacaagacgaggctgccaatactccaatgctagccgcagttagagcttgcctcgagttgtccgaggctttgcctttcaaccctgctgtatcggcgtggaattacgcaatgaagacattgtag

SEQ ID NO: 12065 - protein, 409 aa, Muscodor strobelii
  misc_feature: SGI Peptide ID NO. 563899
  misc_feature (76)..(403): NCBI GI: 255939378 Blast Desc: Pc16g00350 [Penicillium chrysogenum Wisconsin 54-1255] gi|211585081|emb|CAP92705.1| Pc16g00350 [Penicillium chrysogenum Wisconsin 54-1255]
  misc_feature (150)..(358): NCBI GI: 115437158 Blast Desc: [Aspergillus terreus NIH2624] gi|114188555|gb|EAU30255.1| [Aspergillus terreus NIH2624]
  misc_feature (49)..(384): NCBI GI: 170109169 Blast Desc: [Laccaria bicolor S238N-H82] gi|164639372|gb|EDR03644.1| [Laccaria bicolor S238N-H82]
  misc_feature (174)..(358): NCBI GI: 255956885 Blast Desc: Pc21g22250 [Penicillium chrysogenum Wisconsin 54-1255] gi|211590906|emb|CAP97122.1| Pc21g22250 [Penicillium chrysogenum Wisconsin 54-1255]
  misc_feature (187)..(357): NCBI GI: 170092659 Blast Desc: [Laccaria bicolor S238N-H82] gi|164647410|gb|EDR11654.1| [Laccaria bicolor S238N-H82]
  misc_feature (144)..(357): NCBI GI: 170092665 Blast Desc: [Laccaria bicolor S238N-H82] gi|164647413|gb|EDR11657.1| [Laccaria bicolor S238N-H82]
  misc_feature (112)..(384): NCBI GI: 170109039 Blast Desc: [Laccaria bicolor S238N-H82] gi|164639307|gb|EDR03579.1| [Laccaria bicolor S238N-H82]
  misc_feature (210)..(362): NCBI GI: 145240391 Blast Desc: An08g07270 [Aspergillus niger] gi|134077359|emb|CAK39974.1| protein product [Aspergillus niger]
  misc_feature (174)..(357): NCBI GI: 212542735 Blast Desc: toxin biosynthesis protein (Tri7), [Penicillium marneffei ATCC 18224] gi|210066429|gb|EEA20522.1| toxin biosynthesis protein (Tri7), [Penicillium marneffei ATCC 18224]
  misc_feature (70)..(348): NCBI GI: 170092661 Blast Desc: [Laccaria bicolor S238N-H82] gi|164647411|gb|EDR11655.1| [Laccaria bicolor S238N-H82]
MDLHHQLSSQQQAVSALPVTPDGSSFARATLTSQDVVGVLGPLNVNQFLLIATLMTPVILIWAPDSIVRRALYPLQLFCLAASLFAPLPLGQSQAELYNMGLQVGTIGARILDRVYLHNPEDTFLRMGVDDVPHKGPASYGPLDKARWALELILSARGIGWNWQASDDKHFLRNSLFLRVFITAGWLTVIYGHLTLPENLVAILFVTTGIGGRYSDTHQWPPMFGNISESYSIRRCWGKFWHASLRRSTSVPGQLLLGPLRPKSRLGKLYRRYGMLFLSFIVSGVIHAFGSYMVTRDGLQGISDGGAAVYFLAQPAAILVEDTMLSILGIVDDGKPSYFRRVVGYTYVGLFWLWCFPTLKVIPLALAHGIQDEAANTPMLAAVRACLELSEALPFNPAVSAWNYAMKTL

SEQ ID NO: 12066 - DNA, 1572 bp, Muscodor strobelii
  misc_feature: SGI cDNA ID NO. 563900
  misc_feature: Encodes the peptide sequence at SEQ ID NO 12067
atggagttatcactgggagctaatttcggcatctggctgcctttggtcgccgtcgctgtgcctttcatcatctaccacgccgttcgcgcggtgtatctaatttacttcagtccactttctgtatttcccggctctaaatgggctgctgttactgaactcaggtgggaagcatggtacaacatcggaagcaggccggggaaacaaggccaaactttgttcctcttggagaagatgcaccgtgatccgaaatttggctccgctatccgcatgggacctaatgaggtccatatttatgacccggccttctatcatacactatactcgctaaacacgcggtactataaggaccccgccatgcacaaggtgctcggagcaccgacatctaccgtcgcagagaccgatccggttcggcacaagcagcgacgggcgccgctcgagtctctcttctcacgccagtctatcatcaaattagaggctatgttgatggagaaggtcgagctggcatgcgaccgcttcgacgaaaagtatcaggccggtgagataatacccgtcgagtttgctatcaagagcttgtcaatggacatgatctctgagtttgccctgggacgcagcatgggcgcactgcatgacgagaactttaagagcgccggcgtccaggttttccgtgcttatctccacaatttgcacgtcatcaaggcatttcctatcgttcgcacgctctctgagaatattcccttgtggttgggccgccgcatatcgaaaacgattgcgatgggaacggagctcgataaatttacgcgcgcacgtgttgagggtttcgtcacggcatacgagggcggcagcaagcccgatttcccaactgtgatggagagactcatcacgcccaacgcagaaaaggggtgggtaccccctgaccacgcgggactacgcgacgagattctcactttgatctccgccggcaacgatacaacgggcatcacggccatgacgggtctgtatcagatattgcgtagcccagaaattcagtcccgcctcgttgaggagctcaagaccgttatgccaaacccgagagattgtgttccttatgccactcttgagcggctcccctacctgtctgccgtgatcaaggaaagcctccgctacgccagcgcggctgccagtcggacgccacggctcgttcccgacggtggtgttaccctgcctgatggccgcttcatacctgcgggcactcgcataggtatgtcgatctaccaggtgcactttaaccccaatctcttctcccagcccacccggttcatgcccgagcgatggatggagcgtgaaggtgccagcagggaagagcaggagcagctgaaaactatgaatcacttcttcgtgcctttcagcaaggggacccgcgcctgcattggcatcaacttagcgtatatggaactctatctcatgttagcgtacttcgtgcgccgttatgatttcatcactgagactacagacgcggacatgcgatgggatgatatggtcattgctatgttccacggagagtttactgtgtcggcacggccgaggacttcttaa

SEQ ID NO: 12067 - protein, 523 aa, Muscodor strobelii
  misc_feature: SGI Peptide ID NO. 563900
  misc_feature (53)..(518): Pfam Id: PF00067 Pfam Desc: Cytochrome P450
  misc_feature (309)..(518): Pfam Id: PF00067 Pfam Desc: Cytochrome P450
  misc_feature (10)..(521): NCBI GI: 255939380 Blast Desc: Pc16g00360 [Penicillium chrysogenum Wisconsin 54-1255] gi|211585082|emb|CAP92706.1| Pc16g00360 [Penicillium chrysogenum Wisconsin 54-1255]
  misc_feature (11)..(521): NCBI GI: 145256052 Blast Desc: An10g00150 [Aspergillus niger CBS 513.88] gi|134078578|emb|CAK49106.1| protein product [Aspergillus niger]
  misc_feature (11)..(490): NCBI GI: 259489428 Blast Desc: TPA: cytochrome P450, (Eurofung) [Aspergillus nidulans FGSC A4]
  misc_feature (15)..(502): NCBI GI: 115390408 Blast Desc: [Aspergillus terreus NIH2624] gi|114195105|gb|EAU36805.1| [Aspergillus terreus NIH2624]
  misc_feature (32)..(504): NCBI GI: 145229411 Blast Desc: An01g05900 [Aspergillus niger] gi|134055119|emb|CAK37065.1| protein product [Aspergillus niger]
  misc_feature (31)..(498): NCBI GI: 115396804 Blast Desc: conserved [Aspergillus terreus NIH2624] gi|114193610|gb|EAU35310.1| conserved [Aspergillus terreus NIH2624]
  misc_feature (23)..(500): NCBI GI: 115391483 Blast Desc: [Aspergillus terreus NIH2624] gi|114194170|gb|EAU35870.1| [Aspergillus terreus NIH2624]
  misc_feature (11)..(507): NCBI GI: 145249340 Blast Desc: An14g03850 [Aspergillus niger] gi|134081687|emb|CAK46621.1| protein product [Aspergillus niger]
  misc_feature (12)..(516): NCBI GI: 119472265 Blast Desc: benzoate 4-monooxygenase cytochrome P450 [Neosartorya fischeri NRRL 181] gi|119406456|gb|EAW16407.1| benzoate 4-monooxygenase cytochrome P450 [Neosartorya fischeri NRRL 181]
  misc_feature (22)..(519): NCBI GI: 238494890 Blast Desc: benzoate 4-monooxygenase cytochrome P450, [Aspergillus flavus NRRL3357] gi|220695331|gb|EED51674.1| benzoate 4-monooxygenase cytochrome P450, [Aspergillus flavus NRRL3357]
  misc_feature (67)..(491): SWISSPROT Homolog: EC 1.14.13.12 Benzoate 4-monooxygenase
MELSLGANFGIWLPLVAVAVPFIIYHAVRAVYLIYFSPLSVFPGSKWAAVTELRWEAWYNIGSRPGKQGQTLFLLEKMHRDPKFGSAIRMGPNEVHIYDPAFYHTLYSLNTRYYKDPAMHKVLGAPTSTVAETDPVRHKQRRAPLESLFSRQSIIKLEAMLMEKVELACDRFDEKYQAGEIIPVEFAIKSLSMDMISEFALGRSMGALHDENFKSAGVQVFRAYLHNLHVIKAFPIVRTLSENIPLWLGRRISKTIAMGTELDKFTRARVEGFVTAYEGGSKPDFPTVMERLITPNAEKGWVPPDHAGLRDEILTLISAGNDTTGITAMTGLYQILRSPEIQSRLVEELKTVMPNPRDCVPYATLERLPYLSAVIKESLRYASAAASRTPRLVPDGGVTLPDGRFIPAGTRIGMSIYQVHFNPNLFSQPTRFMPERWMEREGASREEQEQLKTMNHFFVPFSKGTRACIGINLAYMELYLMLAYFVRRYDFITETTDADMRWDDMVIAMFHGEFTVSARPRTS

SEQ ID NO: 12068 - DNA, 930 bp, Muscodor strobelii
  misc_feature: SGI cDNA ID NO. 563901
  misc_feature: Encodes the peptide sequence at SEQ ID NO 12069
atgcaagtccgctctgttcttgtcacaggctgcagtagcggtggattaggctcctccttggctctagctttcgtcgaagcgggatatatcgtctttgcgacagcccgtaatcccgcgaagatcgactcaaagctatctgaatcacccggcgtccatgttctagcccttgacgtgaccgatgctgcgcagatatcatctgctgtgaactatgtagctgagcataccagaaatggccttggcttgcttgtcaacaatgcagctctcaatctgacatcacctattctcgacctcgatttaccatccgcccagggccttttcgacgcaaacgtatggggtccgttgcggttaacacaagcttactcacctctactgattcaggcccgcggtagcgtaatcaatattagctcaatcgctggggtcctgcatactccgtggatgggaatatataccgcatccaaagcggctctcgcatcattgtcagaaacactccggttggaaatggagccacttggcgtcaatgtggtaacggttatggcaggaaacgtggaaacaaaattctgggatgatggatcgaatttcacgttgccccacggctcactcttcgctccaattgaggaatacatcgctgccgcagcaaggggcgagaaagggggcaagcagtgtaaggcggatgtattcgcccgcgatcttgttaggcatgtccagtctaaaaaagctggaccgatatggattggggccctggccggcacggtaagatggatgacttggctggtaccatccagtatattggtaagccgagtagtgttccgctcttctctgaagctcaagcatatacatatactaatccgtgggaagggtcacgcacttgcctccggccgcggtcttaaggagctcgggcagtattatgctcggaattttcaggctaaatag

SEQ ID NO: 12069 - protein, 309 aa, Muscodor strobelii
  misc_feature: SGI Peptide ID NO. 563901
  misc_feature (4)..(168): Pfam Id: PF00106 Pfam Desc: short chain dehydrogenase
  misc_feature (5)..(190): Pfam Id: PF08659 Pfam Desc: KR domain
  misc_feature (4)..(265): NCBI GI: 121700480 Blast Desc: short-chain dehydrogenase/reductase, [Aspergillus clavatus NRRL 1] gi|119396647|gb|EAW07079.1| short-chain dehydrogenase/reductase, [Aspergillus clavatus NRRL 1]
  misc_feature (1)..(265): NCBI GI: 212531875 Blast Desc: short-chain dehydrogenase/reductase, [Penicillium marneffei ATCC 18224] gi|210071458|gb|EEA25547.1| short-chain dehydrogenase/reductase, [Penicillium marneffei ATCC 18224]
  misc_feature (3)..(259): NCBI GI: 145241480 Blast Desc: An09g00620 [Aspergillus niger] gi|134077924|emb|CAL00322.1| protein product [Aspergillus niger]
  misc_feature (1)..(263): NCBI GI: 242784833 Blast Desc: hydroxybutyrate dehydrogenase, [Talaromyces stipitatus ATCC 10500] gi|218720620|gb|EED20039.1| hydroxybutyrate dehydrogenase, [Talaromyces stipitatus ATCC 10500]
  misc_feature (2)..(263): NCBI GI: 145250899 Blast Desc: An15g04280 [Aspergillus niger] gi|134082488|emb|CAK97295.1| protein product [Aspergillus niger]
  misc_feature (3)..(260): NCBI GI: 39956189 Blast Desc: MGG_09068 [Magnaporthe grisea 70-15] gi|145016457|gb|EDK00887.1| MGG_09068 [Magnaporthe grisea 70-15]
  misc_feature (4)..(275): NCBI GI: 259485671 Blast Desc: TPA: short-chain dehydrogenase/reductase, (AFU_orthologue; AFUA_6G03370) [Aspergillus nidulans FGSC A4]
  misc_feature (4)..(275): NCBI GI: 67525785 Blast Desc: AN3350.2 [Aspergillus nidulans FGSC A4] gi|40744138|gb|EAA63318.1| AN3350.2 [Aspergillus nidulans FGSC A4]
  misc_feature (4)..(263): NCBI GI: 169768292 Blast Desc: [Aspergillus oryzae RIB40] gi|83766474|dbj|BAE56614.1| protein product [Aspergillus oryzae]
  misc_feature (1)..(262): NCBI GI: 154300616 Blast Desc: BC1G_10896 [Botryotinia fuckeliana B05.10] gi|150856503|gb|EDN31695.1| BC1G_10896 [Botryotinia fuckeliana B05.10]
  misc_feature (91)..(259): SWISSPROT Homolog: EC 1.1.1.101 Acylglycerone-phosphate reductase
MQVRSVLVTGCSSGGLGSSLALAFVEAGYIVFATARNPAKIDSKLSESPGVHVLALDVTDAAQISSAVNYVAEHTRNGLGLLVNNAALNLTSPILDLDLPSAQGLFDANVWGPLRLTQAYSPLLIQARGSVINISSIAGVLHTPWMGIYTASKAALASLSETLRLEMEPLGVNVVTVMAGNVETKFWDDGSNFTLPHGSLFAPIEEYIAAAARGEKGGKQCKADVFARDLVRHVQSKKAGPIWIGALAGTVRWMTWLVPSSILVSRVVFRSSLKLKHIHILIRGKGHALASGRGLKELGQYYARNFQAK

SEQ ID NO: 12070 - DNA, 861 bp, Muscodor strobelii
  misc_feature: SGI cDNA ID NO. 563902
  misc_feature: Encodes the peptide sequence at SEQ ID NO 12071
atgtcagaacccaagaagaagtcgcacgaagagctcgattggagcggagtcccggaagatgtattcaagttcatggaatcacgcacagcatccaacagcgctatattcctactcccgacattaagagaaatgcatgctcaaaaccccagtctgaagatgctagacgtcggctgcggttcaggctccatgacgtgctcattcgctcagatgatctctcctgatgggcatgtcacaggcgtcgacatcaacccagtagcgatatcacgcgcgggcgtggttgcggagcgttgcagcatccccaacaagaacatctcctttcaaacggcggatgcctacaaactgccattcgaagacagcacattcgatgtggtgcattgccatcaggttctcgtgcataacaagagcccctgggagatcctagccgagatgctccgcgtcactaagcctggtgggatttgtgccgctcgcgaaggtgatctcgagactgaggtgatgtggccgccgttgccgggcttgcttaagttccatcgcgacctcgaggtcaagcgtatagtcgaccgtggcggcagctcgacagccgggagggaacttctgtcttgggcactcaaaacaggtgtcaaacgaagccaaatcacgacaagcttcagtacatggagttatactgagcctgaggatcgaaagctttgggcttccggaatggtaggagctgcactgggcccagcggtccgtgagaggcacatggcgtctggcatctcagctgaggccatggatgaaatgcgcgcagcgtggttagagtgggtcacgcgagatgatgcagtgcttgcacagctcattggcgaggtcattatccggaaggagtaa

SEQ ID NO: 12071 - protein, 286 aa, Muscodor strobelii
  misc_feature: SGI Peptide ID NO. 563902
  misc_feature (54)..(155): Pfam Id: PF08241 Pfam Desc: Methyltransferase domain
  misc_feature (54)..(153): Pfam Id: PF08242 Pfam Desc: Methyltransferase domain
  misc_feature (5)..(207): Pfam Id: PF01209 Pfam Desc: ubiE/COQ5 methyltransferase family
  misc_feature (51)..(124): Pfam Id: PF01209 Pfam Desc: ubiE/COQ5 methyltransferase family
  misc_feature (23)..(286): NCBI GI: 256725591 Blast Desc: NECHADRAFT_43209 [Nectria haematococca mpVI 77-13-4]
  misc_feature (23)..(285): NCBI GI: 85095846 Blast Desc: NCU04695 [Neurospora crassa OR74A] gi|28921636|gb|EAA30922.1| conserved [Neurospora crassa OR74A]
  misc_feature (21)..(285): NCBI GI: 119483056 Blast Desc: ubiE/COQ5 methyltransferase, [Neosartorya fischeri NRRL 181] gi|119409711|gb|EAW19659.1| ubiE/COQ5 methyltransferase, [Neosartorya fischeri NRRL 181]
  misc_feature (21)..(285): NCBI GI: 70986829 Blast Desc: ubiE/COQ5 methyltransferase [Aspergillus fumigatus Af293] gi|66846532|gb|EAL86864.1| ubiE/COQ5 methyltransferase, [Aspergillus fumigatus Af293]
  misc_feature (21)..(285): NCBI GI: 159123330 Blast Desc: ubiE/COQ5 methyltransferase, [Aspergillus fumigatus A1163]
  misc_feature (16)..(284): NCBI GI: 256775430 Blast Desc: UbiE family methyltransferase [Streptomyces hygroscopicus ATCC 53653]
  misc_feature (16)..(285): NCBI GI: 260645768 Blast Desc: conserved [Streptomyces scabiei 87.22]
  misc_feature (16)..(286): NCBI GI: 239927813 Blast Desc: UbiE family methyltransferase [Streptomyces ghanaensis ATCC 14672]
  misc_feature (1)..(286): NCBI GI: 254405079 Blast Desc: SAM-dependent methyltransferase [Streptomyces sviceus ATCC 29083] gi|197714533|gb|EDY58567.1| SAM-dependent methyltransferase [Streptomyces sviceus ATCC 29083]
  misc_feature (16)..(285): NCBI GI: 46116748 Blast Desc: FG04216.1 [Gibberella zeae PH-1]
MSEPKKKSHEELDWSGVPEDVFKFMESRTASNSAIFLLPTLREMHAQNPSLKMLDVGCGSGSMTCSFAQMISPDGHVTGVDINPVAISRAGVVAERCSIPNKNISFQTADAYKLPFEDSTFDVVHCHQVLVHNKSPWEILAEMLRVTKPGGICAAREGDLETEVMWPPLPGLLKFHRDLEVKRIVDRGGSSTAGRELLSWALKTGVKRSQITTSFSTWSYTEPEDRKLWASGMVGAALGPAVRERHMASGISAEAMDEMRAAWLEWVTRDDAVLAQLIGEVIIRKE

SEQ ID NO: 12072 - DNA, 2526 bp, Muscodor strobelii
  misc_feature: SGI cDNA ID NO. 563903
  misc_feature: Encodes the peptide sequence at SEQ ID NO 12073
atgaatggcattgccagcgagacgatgtcgctcgatgcagccgactacgaccccatacagcacctcaacctcctcttctcgcatccatccaccgtatcatcagtcttccgcgtatcctcgaccctccgctccgaacaagatgtcctgtccgccgagatcgccacgcgccaggccgcccaggcgtacggccccgactcgtcgctcgagcgaatgcagtccgcgcaagccgagctgggcgagctcttccgcaagatcgagaccgtgcgcgcgcgcgccatacagactgagcagaacatcacctccatgaccgccgacatcaagcgtctcgatggcaccaagcggaacctgaccttgtccatgacggctctcaagcgtctccagatgctgacgacagcctacgagcagctgcgcggtctcgccaaagcccgccagtaccgcgagtgcgcttctcttctgcaggctgtgttgcagctcatgcgccatttcaacagctatcgaagcatcgaccagattgcaaccctgagtcgtggcgtaggcgaggtacagcgagagctgctggaacaggtctgcgaagactttgagatggcatttgccaagggcgagatcggagggcgcaaatctacactcatcgaagcttgcggcgttatggacgcgctgggcgacactgcacgagcacgactggttacgtggtacgtgaacacggaattacgagaatacagacaagttttccgagggaacgatgaggcagggagtttggacaacattggtcgtcggtatgcatggttcaagaggatgatgaagggctacgaagaggagcatgcatcactcttcccaccacattggcgtgtaggcgagacactagctatgtcgttctgcgacggcacaagagacgactacaagggcatactggagaagagcatgcgacgagtggatggcgccaagattgatgttaacctgctattgagctgtctgcaggagactatggacttcgagcaaagcctagaaagaagattctcgagcaacccaagagccagcatcgacaccctgagctcggcagatgagaggacacagacattcaacgggtcgatatccgttgccttcgagccgtacctaagtctctgggtagaatcccaagacaaggcactggcggccatgattcccaagtacaaagcccagcccttactgccagaagacgaggaattttccccacaggccgttataagctcagccatcgagcttttccacttctacaaactcacactctcacaatgcgccaagctctccacttccgagcgcctcctcgatctcgcaaggacactagccaaatacctggatgagtacgcccaacaagtcctcctcgccatcctccaacgacctcctcaaactgcagcatcaatacaagacacagtactcgtcctcaacaccgcagacttctggcacaccaacaccgggcaactcgaagaaaacataaaaaagcggatcgataaccatctagtagagaaagtcgatctgacatcccaagccgacgccttcctaggcgtagccagcaccgctgtcctcgcgctagtaaacaaggtagaagcggactgtgacagtgcttggcgcgagatgaagaacacgaactggagtaaaatggaaagcgtcggtgatcaaagctcatacgtcggggagctcctaagtcatgtcaattcgaagaccgaggagacattagctgtggtcattaaaccgcagtatgccagggcgtttgctgataatcttgtcgagcacattgcaaatacatacatcgccaacattgtgcagtgccgacctgtttcagaggttggggctgaacagatgctactagacaaatacgtcctaacgaaatccttcgaaaatctgctctcgtaccataatccctctagcacaccccacgtcccctcaacgtccttcacaaagcgtgtaaacagcacaatgacacgcatagatccccttctcaagaccctacaagtccgtccctcgccgccagaggggctggtacaagcttatctaatccacatcggcgaccgctccgataccaacttcagaaagatcttggagttgaagggagtaagaaaagcggaccaggcacatttagttgagctcttcggcatacaccgcgattcagcccccaatagcggagggaacaaactcgtggcgagtagtccattgttgacgccgctgttgaatagcacgggaataggaagttcgggggtggcgactacggcagcaacagcgaatgccggttttggcacggcgaggtttgatcccacggccctgggagagaaactactttcagcggccagagatggagttgagaggatcgggacaccggcgcagcttggcggcgctgcacagggaagcacagcgcagggcgtcggagtccagagtgtcaatgagaatttgaggaatttcgggaagtttttcagaagagatatcgcaattagtggcttgggtgctagatttgggaagagggatgttagtggtggtggacctcctaatgagaattag

SEQ ID NO: 12073 - protein, 841 aa, Muscodor strobelii
  misc_feature: SGI Peptide ID NO. 563903
  misc_feature (13)..(395): Pfam Id: PF04100 Pfam Desc: Vps53-like, N-terminal
  misc_feature (69)..(395): Pfam Id: PF04100 Pfam Desc: Vps53-like, N-terminal
  misc_feature (1)..(835): NCBI GI: 46107976 Blast Desc: FG00870.1 [Gibberella zeae PH-1]
  misc_feature (1)..(833): NCBI GI: 171695210 Blast Desc: protein product [Podospora anserina] gi|170947847|emb|CAP60011.1| protein product [Podospora anserina]
  misc_feature (1)..(836): NCBI GI: 85118218 Blast Desc: NCU03024 [Neurospora crassa OR74A] gi|28927218|gb|EAA36174.1| NCU03024 [Neurospora crassa OR74A] gi|38566968|emb|CAE76269.1| related to subunit of VP52-54 complex
  misc_feature (27)..(831): NCBI GI: 154321437 Blast Desc: BC1G_01593 [Botryotinia fuckeliana B05.10] gi|150852131|gb|EDN27323.1| BC1G_01593 [Botryotinia fuckeliana B05.10]
  misc_feature (30)..(833): NCBI GI: 156054100 Blast Desc: SS1G_05898 [Sclerotinia sclerotiorum 1980] gi|154703678|gb|EDO03417.1| SS1G_05898 [Sclerotinia sclerotiorum 1980]
  misc_feature (32)..(836): NCBI GI: 145613836 Blast Desc: MGG_01331 [Magnaporthe grisea 70-15] gi|145020850|gb|EDK04979.1| MGG_01331 [Magnaporthe grisea 70-15]
  misc_feature (1)..(836): NCBI GI: 261358650 Blast Desc: vacuolar protein sorting 53 [Verticillium albo-atrum VaMs.102]
  misc_feature (9)..(824): NCBI GI: 169603417 Blast Desc: SNOG_04718 [Phaeosphaeria nodorum SN15] gi|160706392|gb|EAT88478.2| SNOG_04718 [Phaeosphaeria nodorum SN15]
  misc_feature (8)..(829): NCBI GI: 189203031 Blast Desc: conserved [Pyrenophora tritici-repentis Pt-1C-BFP] gi|187984950|gb|EDU50438.1| conserved [Pyrenophora tritici-repentis Pt-1C-BFP]
  misc_feature (7)..(835): NCBI GI: 225563000 Blast Desc: vacuolar sorting-associated protein [Ajellomyces capsulatus G186AR]
MNGIASETMSLDAADYDPIQHLNLLFSHPSTVSSVFRVSSTLRSEQDVLSAEIATRQAAQAYGPDSSLERMQSAQAELGELFRKIETVRARAIQTEQNITSMTADIKRLDGTKRNLTLSMTALKRLQMLTTAYEQLRGLAKARQYRECASLLQAVLQLMRHFNSYRSIDQIATLSRGVGEVQRELLEQVCEDFEMAFAKGEIGGRKSTLIEACGVMDALGDTARARLVTWYVNTELREYRQVFRGNDEAGSLDNIGRRYAWFKRMMKGYEEEHASLFPPHWRVGETLAMSFCDGTRDDYKGILEKSMRRVDGAKIDVNLLLSCLQETMDFEQSLERRFSSNPRASIDTLSSADERTQTFNGSISVAFEPYLSLWVESQDKALAAMIPKYKAQPLLPEDEEFSPQAVISSAIELFHFYKLTLSQCAKLSTSERLLDLARTLAKYLDEYAQQVLLAILQRPPQTAASIQDTVLVLNTADFWHTNTGQLEENIKKRIDNHLVEKVDLTSQADAFLGVASTAVLALVNKVEADCDSAWREMKNTNWSKMESVGDQSSYVGELLSHVNSKTEETLAVVIKPQYARAFADNLVEHIANTYIANIVQCRPVSEVGAEQMLLDKYVLTKSFENLLSYHNPSSTPHVPSTSFTKRVNSTMTRIDPLLKTLQVRPSPPEGLVQAYLIHIGDRSDTNFRKILELKGVRKADQAHLVELFGIHRDSAPNSGGNKLVASSPLLTPLLNSTGIGSSGVATTAATANAGFGTARFDPTALGEKLLSAARDGVERIGTPAQLGGAAQGSTAQGVGVQSVNENLRNFGKFFRRDIAISGLGARFGKRDVSGGGPPNEN

SEQ ID NO: 12074 - DNA, 2894 bp, Muscodor strobelii
  misc_feature: SGI EST ID NO. CUFF.28638.0
  misc_feature: Variant of the nucleotide sequence at SEQ ID NO 12072
cggaccggtagcctgcccagactagacagcttcaacatacgcgactctaccacttcaagatcactttgaatctccctctccgcggcaacaacacattctatgactccaatgcaagggtgagatccggatttaggacatcaaagatgaatggcattgccagcgagacgatgtcgctcgatgcagccgactacgaccccatacagcacctcaacctcctcttctcgcatccatccaccgtatcatcagtcttccgcgtatcctcgaccctccgctccgaacaagatgtcctgtccgccgagatcgccacgcgccaggccgcccaggcgtacggccccgactcgtcgctcgagcgaatgcagtccgcgcaagccgagctgggcgagctcttccgcaagatcgagaccgtgcgcgcgcgcgccatacagactgagcagaacatcacctccatgaccgccgacatcaagcgtctcgatggcaccaagcggaacctgaccttgtccatgacggctctcaagcgtctccagatgctgacgacagcctacgagcagctgcgcggtctcgccaaagcccgccagtaccgcgagtgcgcttctcttctgcaggctgtgttgcagctcatgcgccatttcaacagctatcgaagcatcgaccagattgcaaccctgagtcgtggcgtaggcgaggtacagcgagagctgctggaacaggtctgcgaagactttgagatggcatttgccaagggcgagatcggagggcgcaaatctacactcatcgaagcttgcggcgttatggacgcgctgggcgacactgcacgagcacgactggttacgtggtacgtgaacacggaattacgagaatacagacaagttttccgagggaacgatgaggcagggagtttggacaacattggtcgtcggtatgcatggttcaagaggatgatgaagggctacgaagaggagcatgcatcactcttcccaccacattggcgtgtaggcgagacactagctatgtcgttctgcgacggcacaagagacgactacaagggcatactggagaagagcatgcgacgagtggatggcgccaagattgatgttaacctgctattgagctgtctgcaggagactatggacttcgagcaaagcctagaaagaagattctcgagcaacccaagagccagcatcgacaccctgagctcggcagatgagaggacacagacattcaacgggtcgatatccgttgccttcgagccgtacctaagtctctgggtagaatcccaagacaaggcactggcggccatgattcccaagtacaaagcccagcccttactgccagaagacgaggaattttccccacaggccgttataagctcagccatcgagcttttccacttctacaaactcacactctcacaatgcgccaagctctccacttccgagcgcctcctcgatctcgcaaggacactagccaaatacctggatgagtacgcccaacaagtcctcctcgccatcctccaacgacctcctcaaactgcagcatcaatacaagacacagtactcgtcctcaacaccgcagacttctggcacaccaacaccgggcaactcgaagaaaacataaaaaagcggatcgataaccatctagtagagaaagtcgatctgacatcccaagccgacgccttcctaggcgtagccagcaccgctgtcctcgcgctagtaaacaaggtagaagcggactgtgacagtgcttggcgcgagatgaagaacacgaactggagtaaaatggaaagcgtcggtgatcaaagctcatacgtcggggagctcctaagtcatgtcaattcgaagaccgaggagacattagctgtggtcattaaaccgcagtatgccagggcgtttgctgataatcttgtcgagcacattgcaaatacatacatcgccaacattgtgcagtgccgacctgtttcagaggttggggctgaacagatgctactagacaaatacgtcctaacgaaatccttcgaaaatctgctctcgtaccataatccctctagcacaccccacgtcccctcaacgtccttcacaaagcgtgtaaacagcacaatgacacgcatagatccccttctcaagaccctacaagtccgtccctcgccgccagaggggctggtacaagcttatctaatccacatcggcgaccgctccgataccaacttcagaaagatcttggagttgaagggagtaagaaaagcggaccaggcacatttagttgagctcttcggcatacaccgcgattcagcccccaatagcggagggaacaaactcgtggcgagtagtccattgttgacgccgctgttgaatagcacgggaataggaagttcgggggtggcgactacggcagcaacagcgaatgccggttttggcacggcgaggtttgatcccacggccctgggagagaaactactttcagcggccagagatggagttgagaggatcgggacaccggcgcagcttggcggcgctgcacagggaagcacagcgcagggcgtcggagtccagagtgtcaatgagaatttgaggaatttcgggaagtttttcagaagagatatcgcaattagtggcttgggtgctagatttgggaagagggatgttagtggtggtggacctcctaatgagaattagctatttcggatatgtatccgtcagatcgcacctatgtcgatacaccattcatactagtagcccagaacactacattccatctcatgtcaacttctctcagagcgggatcttgtcgaagaaaaagatccatatcatctgttagcgttctgttaagtcaataagtatagtttattttattccgaggtccactcgtactacaaacgagctgtagacgacagattgctc

SEQ ID NO: 12075 - DNA, 2592 bp, Muscodor strobelii
  misc_feature: SGI cDNA ID NO. 563904
  misc_feature: Encodes the peptide sequence at SEQ ID NO 12076
atgaatggcattgccagcgagacgatgtcgctcgatgcaggtgtgttgaatgcccccaaacacagctgggagatagctccattgactgacgtaacacgtggaccagccgactacgaccccatacagcacctcaacctcctcttctcgcatccatccaccgtatcatcagtcttccgcgtatcctcgaccctccgctccgaacaagatgtcctgtccgccgagatcgccacgcgccaggccgcccaggcgtacggccccgactcgtcgctcgagcgaatgcagtccgcgcaagccgagctgggcgagctcttccgcaagatcgagaccgtgcgcgcgcgcgccatacagactgagcagaacatcacctccatgaccgccgacatcaagcgtctcgatggcaccaagcggaacctgaccttgtccatgacggctctcaagcgtctccagatgctgacgacagcctacgagcagctgcgcggtctcgccaaagcccgccagtaccgcgagtgcgcttctcttctgcaggctgtgttgcagctcatgcgccatttcaacagctatcgaagcatcgaccagattgcaaccctgagtcgtggcgtaggcgaggtacagcgagagctgctggaacaggtctgcgaagactttgagatggcatttgccaagggcgagatcggagggcgcaaatctacactcatcgaagcttgcggcgttatggacgcgctgggcgacactgcacgagcacgactggttacgtggtacgtgaacacggaattacgagaatacagacaagttttccgagggaacgatgaggcagggagtttggacaacattggtcgtcggtatgcatggttcaagaggatgatgaagggctacgaagaggagcatgcatcactcttcccaccacattggcgtgtaggcgagacactagctatgtcgttctgcgacggcacaagagacgactacaagggcatactggagaagagcatgcgacgagtggatggcgccaagattgatgttaacctgctattgagctgtctgcaggagactatggacttcgagcaaagcctagaaagaagattctcgagcaacccaagagccagcatcgacaccctgagctcggcagatgagaggacacagacattcaacgggtcgatatccgttgccttcgagccgtacctaagtctctgggtagaatcccaagacaaggcactggcggccatgattcccaagtacaaagcccagcccttactgccagaagacgaggaattttccccacaggccgttataagctcagccatcgagcttttccacttctacaaactcacactctcacaatgcgccaagctctccacttccgagcgcctcctcgatctcgcaaggacactagccaaatacctggatgagtacgcccaacaagtcctcctcgccatcctccaacgacctcctcaaactgcagcatcaatacaagacacagtactcgtcctcaacaccgcagacttctggcacaccaacaccgggcaactcgaagaaaacataaaaaagcggatcgataaccatctagtagagaaagtcgatctgacatcccaagccgacgccttcctaggcgtagccagcaccgctgtcctcgcgctagtaaacaaggtagaagcggactgtgacagtgcttggcgcgagatgaagaacacgaactggagtaaaatggaaagcgtcggtgatcaaagctcatacgtcggggagctcctaagtcatgtcaattcgaagaccgaggagacattagctgtggtcattaaaccgcagtatgccagggcgtttgctgataatcttgtcgagcacattgcaaatacatacatcgccaacattgtgcagtgccgacctgtttcagaggttggggctgaacagatgctactagacaaatacgtcctaacgaaatccttcgaaaatctgctctcgtaccataatccctctagcacaccccacgtcccctcaacgtccttcacaaagcgtgtaaacagcacaatgacacgcatagatccccttctcaagaccctacaagtccgtccctcgccgccagaggggctggtacaagcttatctaatccacatcggcgaccgctccgataccaacttcagaaagatcttggagttgaagggagtaagaaaagcggaccaggcacatttagttgagctcttcggcatacaccgcgattcagcccccaatagcggagggaacaaactcgtggcgagtagtccattgttgacgccgctgttgaatagcacgggaataggaagttcgggggtggcgactacggcagcaacagcgaatgccggttttggcacggcgaggtttgatcccacggccctgggagagaaactactttcagcggccagagatggagttgagaggatcgggacaccggcgcagcttggcggcgctgcacagggaagcacagcgcagggcgtcggagtccagagtgtcaatgagaatttgaggaatttcgggaagtttttcagaagagatatcgcaattagtggcttgggtgctagatttgggaagagggatgttagtggtggtggacctcctaatgagaattag

SEQ ID NO: 12076 - protein, 863 aa, Muscodor strobelii
  misc_feature: SGI Peptide ID NO. 563904
  misc_feature (35)..(417): Pfam Id: PF04100 Pfam Desc: Vps53-like, N-terminal
  misc_feature (91)..(417): Pfam Id: PF04100 Pfam Desc: Vps53-like, N-terminal
  misc_feature (1)..(855): NCBI GI: 171695210 Blast Desc: protein product [Podospora anserina] gi|170947847|emb|CAP60011.1| protein product [Podospora anserina]
  misc_feature (37)..(857): NCBI GI: 46107976 Blast Desc: FG00870.1 [Gibberella zeae PH-1]
  misc_feature (1)..(858): NCBI GI: 85118218 Blast Desc: NCU03024 [Neurospora crassa OR74A] gi|28927218|gb|EAA36174.1| NCU03024 [Neurospora crassa OR74A] gi|38566968|emb|CAE76269.1| related to subunit of VP52-54 complex
  misc_feature (49)..(853): NCBI GI: 154321437 Blast Desc: BC1G_01593 [Botryotinia fuckeliana B05.10] gi|150852131|gb|EDN27323.1| BC1G_01593 [Botryotinia fuckeliana B05.10]
  misc_feature (52)..(855): NCBI GI: 156054100 Blast Desc: SS1G_05898 [Sclerotinia sclerotiorum 1980] gi|154703678|gb|EDO03417.1| SS1G_05898 [Sclerotinia sclerotiorum 1980]
  misc_feature (54)..(858): NCBI GI: 145613836 Blast Desc: MGG_01331 [Magnaporthe grisea 70-15] gi|145020850|gb|EDK04979.1| MGG_01331 [Magnaporthe grisea 70-15]
  misc_feature (37)..(858): NCBI GI: 261358650 Blast Desc: vacuolar protein sorting 53 [Verticillium albo-atrum VaMs.102]
  misc_feature (31)..(846): NCBI GI: 169603417 Blast Desc: SNOG_04718 [Phaeosphaeria nodorum SN15] gi|160706392|gb|EAT88478.2| SNOG_04718 [Phaeosphaeria nodorum SN15]
  misc_feature (37)..(851): NCBI GI: 189203031 Blast Desc: conserved [Pyrenophora tritici-repentis Pt-1C-BFP] gi|187984950|gb|EDU50438.1| conserved [Pyrenophora tritici-repentis Pt-1C-BFP]
  misc_feature (37)..(857): NCBI GI: 225563000 Blast Desc: vacuolar sorting-associated protein [Ajellomyces capsulatus G186AR]
MNGIASETMSLDAGVLNAPKHSWEIAPLTDVTRGPADYDPIQHLNLLFSHPSTVSSVFRVSSTLRSEQDVLSAEIATRQAAQAYGPDSSLERMQSAQAELGELFRKIETVRARAIQTEQNITSMTADIKRLDGTKRNLTLSMTALKRLQMLTTAYEQLRGLAKARQYRECASLLQAVLQLMRHFNSYRSIDQIATLSRGVGEVQRELLEQVCEDFEMAFAKGEIGGRKSTLIEACGVMDALGDTARARLVTWYVNTELREYRQVFRGNDEAGSLDNIGRRYAWFKRMMKGYEEEHASLFPPHWRVGETLAMSFCDGTRDDYKGILEKSMRRVDGAKIDVNLLLSCLQETMDFEQSLERRFSSNPRASIDTLSSADERTQTFNGSISVAFEPYLSLWVESQDKALAAMIPKYKAQPLLPEDEEFSPQAVISSAIELFHFYKLTLSQCAKLSTSERLLDLARTLAKYLDEYAQQVLLAILQRPPQTAASIQDTVLVLNTADFWHTNTGQLEENIKKRIDNHLVEKVDLTSQADAFLGVASTAVLALVNKVEADCDSAWREMKNTNWSKMESVGDQSSYVGELLSHVNSKTEETLAVVIKPQYARAFADNLVEHIANTYIANIVQCRPVSEVGAEQMLLDKYVLTKSFENLLSYHNPSSTPHVPSTSFTKRVNSTMTRIDPLLKTLQVRPSPPEGLVQAYLIHIGDRSDTNFRKILELKGVRKADQAHLVELFGIHRDSAPNSGGNKLVASSPLLTPLLNSTGIGSSGVATTAATANAGFGTARFDPTALGEKLLSAARDGVERIGTPAQLGGAAQGSTAQGVGVQSVNENLRNFGKFFRRDIAISGLGARFGKRDVSGGGPPNEN

SEQ ID NO: 12077 - DNA, 2894 bp, Muscodor strobelii; identical to SEQ ID NO: 12074
  misc_feature: SGI EST ID NO. CUFF.28638.0
  misc_feature: Variant of the nucleotide sequence at SEQ ID NO 12075

SEQ ID NO: 12078 - DNA, 1782 bp, Muscodor strobelii
  misc_feature: SGI cDNA ID NO. 563905
  misc_feature: Elevated expression when VOC is produced
  misc_feature: Encodes the peptide sequence at SEQ ID NO 12079
atgcctgactcagcaataccctttacccgacagcaactggatgttgtctttgacaaacttctcgaatggtccgagagaagcaaccgcgagctgaaagagatcttgggaagtccagcatgtgataattctagcgtggtagaccagtctacatctcaaaaaaagtcacccgatgtggacaaatcgccactgacaccagaatctccgccaccctggacgccgagtgactttgtttggaaactgggattcacgcctcaggaacgggaggaaaatctagagctctttaagcaagatatgtttcctattgacaatgttcctacaaatttcgaggattccttaaggccaaggtggatgtcaaaaatgaggcgtcgcagacagataaacccctctaattgcttccgccttgtcggggagttcaacgatctcttccttatggggttctgctcagtagagtcagattactccataaagacttgcagaagccctgcggatgacttactcctgcccgatcgctctgacgatgggactgagcgatgtggagttatttgtttcactcgtgtcgagttccgagagaaccataccataggtgtgataggttatgatgtgctggctaggatatatggcttctgcaggtttggagatccctctgattatttcgccgagaatcttttagaattacattccaagcgatggactggcgtcaatcaatggtcatgccatcgagatagctcctcggacacaatctttggaaagcttctatctataactgagcaacgattgtccatgagtctgacaataattgctgaagggcagcatggaaagttcgggatcgctgtgattaaagatggaagagatcacggtgaatgtgatctcttcgttgccattaacgacaataatacttatacccagtatgggctcaaggccccatcaaaattctacaaacggactatcgcgcccggagtaatcaaattccaagccgtcattatagttagtctagaatattggcataatttgtggacttctgtattgcatcatatcgacaaagcggtcaatgcaacggtcgcccaaattttgactcgttcgtatagagaacagttgatgtacgacaaccataagctagaacgatccgagttatacttcactgttctccaactgcttcctatatttcgtccctatattgcggacatgatagacagcacccggaagttcatcgcggagtcgcgagcggaagtactctactttgaacaggagctgggtctgcagtcccatgaagccgtttctctcaactgggacaccatctcgactcacctagacaaaatcggaaaggatctcaccgaacgacttaaacgtcaaaccgatgaagtcacacgactacgagatggactatttaacgcctcaaccgttcgtgaaacctttcgaggcgctgaaatcaaccgctatctgttcatcttcactgtgaccttctacggtatgcacctgttcgacgacgccaatgttgctgtaactcaagttacgttctggaaggtcatcggtgttctctcaggtgtcacgtacttgattgcaggagcggcactactgagtatagcacacagaaagcgacaaaatcttgatggtaagcaggatcatcacatcccaggtaatattggaaataatgtgaaagaaaacttcccaacaatcacccgtaacttcccaaccgcgtcctcggctttcatcaagtttaaaccaatacttcgtcgaagaaaaaacagacagaaagccaacgacgccgagctcgggagagattga

SEQ ID NO: 12079 - protein, 593 aa, Muscodor strobelii
  misc_feature: SGI Peptide ID NO. 563905
  misc_feature (334)..(485): NCBI GI: 119501615 Blast Desc: NFIA_044860 [Neosartorya fischeri NRRL 181] gi|119415730|gb|EAW25667.1| NFIA_044860 [Neosartorya fischeri NRRL 181]
  misc_feature (269)..(485): NCBI GI: 46134027 Blast Desc: FG09153.1 [Gibberella zeae PH-1]
  misc_feature (317)..(535): NCBI GI: 116194133 Blast Desc: [Chaetomium globosum CBS 148.51] gi|88182697|gb|EAQ90165.1| [Chaetomium globosum CBS 148.51]
  misc_feature (297)..(485): NCBI GI: 171676599 Blast Desc: protein product [Podospora anserina] gi|170936366|emb|CAP61024.1| protein product [Podospora anserina]
  misc_feature (372)..(531): NCBI GI: 116198769 Blast Desc: [Chaetomium globosum CBS 148.51] gi|88178819|gb|EAQ86287.1| [Chaetomium globosum CBS 148.51]
  misc_feature (238)..(503): NCBI GI: 116197541 Blast Desc: [Chaetomium globosum CBS 148.51] gi|88178205|gb|EAQ85673.1| [Chaetomium globosum CBS 148.51]
  misc_feature (325)..(484): NCBI GI: 115385843 Blast Desc: [Aspergillus terreus NIH2624] gi|114187915|gb|EAU29615.1| [Aspergillus terreus NIH2624]
  misc_feature (313)..(399): NCBI GI: 115436796 Blast Desc: [Aspergillus terreus NIH2624] gi|114188461|gb|EAU30161.1| [Aspergillus terreus NIH2624]
  misc_feature: Useful for introducing or modulating the production of volatile compounds
MPDSAIPFTRQQLDVVFDKLLEWSERSNRELKEILGSPACDNSSVVDQSTSQKKSPDVDKSPLTPESPPPWTPSDFVWKLGFTPQEREENLELFKQDMFPIDNVPTNFEDSLRPRWMSKMRRRRQINPSNCFRLVGEFNDLFLMGFCSVESDYSIKTCRSPADDLLLPDRSDDGTERCGVICFTRVEFRENHTIGVIGYDVLARIYGFCRFGDPSDYFAENLLELHSKRWTGVNQWSCHRDSSSDTIFGKLLSITEQRLSMSLTIIAEGQHGKFGIAVIKDGRDHGECDLFVAINDNNTYTQYGLKAPSKFYKRTIAPGVIKFQAVIIVSLEYWHNLWTSVLHHIDKAVNATVAQILTRSYREQLMYDNHKLERSELYFTVLQLLPIFRPYIADMIDSTRKFIAESRAEVLYFEQELGLQSHEAVSLNWDTISTHLDKIGKDLTERLKRQTDEVTRLRDGLFNASTVRETFRGAEINRYLFIFTVTFYGMHLFDDANVAVTQVTFWKVIGVLSGVTYLIAGAALLSIAHRKRQNLDGKQDHHIPGNIGNNVKENFPTITRNFPTASSAFIKFKPILRRRKNRQKANDAELGRD

SEQ ID NO: 12080 - DNA, 344 bp, Muscodor strobelii
  misc_feature: SGI EST ID NO. CUFF.28650.0
  misc_feature: Variant of the nucleotide sequence at SEQ ID NO 12078
gtccatgagtctgacaataattgctgaagggcagcatggaaagttcgggatcgctgtgattaaagatggaagagatcacggtgaatgtgatctcttcgttgccattaacgacaataatacttatacccagtatgggctcaaggccccatcaaaattctacaaacggactatcgcgcccggagtaatcaaattccaagccgtcattatagttagtctagaatattggcataatttgtggacttctgtattgcatcatatcgacaaagcggtcaatgcaacggtcgcccaaattttgactcgttcgtatagagaacagttgatgtacgacaaccataagctagaac

SEQ ID NO: 12081 - DNA, 2208 bp, Muscodor strobelii
  misc_feature: SGI cDNA ID NO. 563907
  misc_feature: Reduced expression when VOC is produced
  misc_feature: Encodes the peptide sequence at SEQ ID NO 12082
atggccacaagagcccttctttccgcttcccggcgagcaggtcccaatgcgcccatcactactctctgccgatcatgtctcctcaagtctctcgccgccacccgagaatcccgtcgctctatacacgagagtaccctagcaaagagacggaaagcagacgaggattgggctgcaaagaaggtcaggatcgaggcgggcgaggagaagcacttgtgggatgagttcaaggacagaggctacatcaaagacaccgccggcacccacgagcagatccgggaactcatgctgaacaagcgcatcggcgcctacgtcggcatcgacccgaccgccccctccctccacctcggccacctgctgcccctcatgccgctgttctggatgtacatgcacggctaccgcggcgtcaccgtcctcggcggcgccactgccaaggtcggcgaccccaccggccgcctcaccacccgcgacgacatcgagcgcaaggaacgctccatgtacctcaccaagatccactaccagcttaagcgcatatggaagaacgccgagaaccaggcccagcgagtccatggcctggagaaggagtgggcctggtctcgcgatatcgccaacaacagcacatggtataacacaacctccttcgtgcagatcgtctctacgctattcaagggcatgcgcatggggcccatgctatcccgcgacaccgtcaagcgcaagatgaccgagggcgacggcatgtccctcgccgagttcgtctaccccctcatgcaggcctgggactggtgggtcttgttcagcaagggcgccgtccgcatgcagatcggtggctccgaccagttcggcaacatcgtcgccggtgtcgacgctgtcaagtatatgcgtgagaccaacgaggaccccgccaccatattggaagatacccccgagaacactcctgtgggattcactgtccctttactcactgactcgtcgggggccaagtttggaaagagtgcaggtaatgccatgtggctggaccctttcatgaccagctctttcgatctctacggctacttcatgagacgacccgatgaggacgtagagcaactcctcaaactattcactttcttacccctcgaacaaatagcagaggtgatgaagatccagaacgaggacccgtcgaaacgccatgcacatcacgtgcttgcctacgaagtcctttgccttgtacacagcgagcaagaagcaaagctaacgcaggaaaaacacaagagcatgtacgggaagcccaccctcggcagcctgatggacgccaccaccacagagggtcctactggaggagaaagaatgaaatatcccgacaaactcaccccagcaaacaacgatttagccctaaactttcgcccggacatccaactcccagaatccctcgtcctcgggcaatccatccccaagatcctctacgccgccggtctggcggagagttccagcgacgcgcatcgtctcgtgtcccaccagggggcctacgtcggcggagcgcccggccgcaatgcgcacaacaacgtattgatgcgcgacggcgaactccagttccagacggtgaaagcctggtttccgggcgaaaccaagaatttcctcattgccgacaagattctgatcctacgacgtggcaaacacttcatccgcatagtcgaaatggtatcagacgaagaatgggaagccagcgggcagacctaccctggcgaacccggcacaggccgcttgcgtttactccggaaacaactcaaggcagcgaacaacggcaaagacgagaattggagccccaacgaactagctcgcctttccgaggagatcaccaaaatggagcgcgaaggcgaggcagcaattcaagatctggaggatccgaaccccaccatcaggttcccgccaccgaggagtagggctgcgacgctactagataagtttaagaagagtcgacagaataacttgcccgcgtctgtggagatgagcgtcaaggccaagacggcggctattgataaagtattggccgaaactaagaaggtgctcgaggacaggagacgggagaagcaagatgagattaggagaataaagggtaacgatgtgatgtacaatgttcttgaagacactataaagaccgctgagagtgcgttcagagaggcgatggatgaacggaagaaaagctcgcaggatgtggatgcgcatgataagtag

SEQ ID NO: 12082 - protein, 735 aa, Muscodor strobelii
  misc_feature: SGI Peptide ID NO. 563907
  misc_feature (95)..(420): Pfam Id: PF00579 Pfam Desc: tRNA synthetases class I (W and Y)
  misc_feature (21)..(593): NCBI GI: 171695206 Blast Desc: protein product [Podospora anserina] gi|170947845|emb|CAP60009.1| protein product [Podospora anserina]
  misc_feature (21)..(593): NCBI GI: 135195 Blast Desc: SYYM_PODAN RecName: Full=Tyrosyl-tRNA synthetase, mitochondrial; AltName: Full=Tyrosine--tRNA ligase; Short=TyrRS; Flags: Precursor gi|3109|emb|CAA38725.1| mitochondrial tyrosyl
  misc_feature (22)..(594): NCBI GI: 116182242 Blast Desc: CHGG_01749 [Chaetomium globosum CBS 148.51] gi|88186046|gb|EAQ93514.1| CHGG_01749 [Chaetomium globosum CBS 148.51]
  misc_feature (1)..(691): NCBI GI: 85118241 Blast Desc: tyrosyl-tRNA synthetase, mitochondrial precursor [Neurospora crassa OR74A] gi|1351183|sp|P12063.2|SYYM_NEUCR RecName: Full=Tyrosyl-tRNA synthetase, mitochondrial; AltName:
  misc_feature (1)..(637): NCBI GI: 46107722 Blast Desc: FG00744.1 [Gibberella zeae PH-1]
  misc_feature (22)..(585): NCBI GI: 145611092 Blast Desc: MGG_00665 [Magnaporthe grisea 70-15] gi|145018420|gb|EDK02699.1| MGG_00665 [Magnaporthe grisea 70-15]
  misc_feature (39)..(594): NCBI GI: 256734771 Blast Desc: NECHADRAFT_103243 [Nectria haematococca mpVI 77-13-4]
  misc_feature (1)..(573): NCBI GI: 156060931 Blast Desc: SS1G_02608 [Sclerotinia sclerotiorum 1980] gi|154700012|gb|EDN99750.1| SS1G_02608 [Sclerotinia sclerotiorum 1980]
  misc_feature (1)..(573): NCBI GI: 154322040 Blast Desc: tyrosyl-tRNA synthetase, mitochondrial precursor [Botryotinia fuckeliana B05.10] gi|150850414|gb|EDN25607.1| tyrosyl-tRNA synthetase, mitochondrial precursor [Botryotinia
  misc_feature (38)..(419): NCBI GI: 61680508 Blast Desc: tyrosyl-tRNA synthetase, mitochondrial precursor [Botryotinia fuckeliana B05.10] gi|150850414|gb|EDN25607.1| tyrosyl-tRNA synthetase, mitochondrial precursor [Botryotinia
  misc_feature (21)..(593): SWISSPROT Homolog: EC 6.1.1.1 Tyrosine--tRNA ligase
  misc_feature: Useful for introducing or modulating the production of volatile compounds
MATRALLSASRRAGPNAPITTLCRSCLLKSLAATRESRRSIHESTLAKRRKADEDWAAKKVRIEAGEEKHLWDEFKDRGYIKDTAGTHEQIRELMLNKRIGAYVGIDPTAPSLHLGHLLPLMPLFWMYMHGYRGVTVLGGATAKVGDPTGRLTTRDDIERKERSMYLTKIHYQLKRIWKNAENQAQRVHGLEKEWAWSRDIANNSTWYNTTSFVQIVSTLFKGMRMGPMLSRDTVKRKMTEGDGMSLAEFVYPLMQAWDWWVLFSKGAVRMQIGGSDQFGNIVAGVDAVKYMRETNEDPATILEDTPENTPVGFTVPLLTDSSGAKFGKSAGNAMWLDPFMTSSFDLYGYFMRRPDEDVEQLLKLFTFLPLEQIAEVMKIQNEDPSKRHAHHVLAYEVLCLVHSEQEAKLTQEKHKSMYGKPTLGSLMDATTTEGPTGGERMKYPDKLTPANNDLALNFRPDIQLPESLVLGQSIPKILYAAGLAESSSDAHRLVSHQGAYVGGAPGRNAHNNVLMRDGELQFQTVKAWFPGETKNFLIADKILILRRGKHFIRIVEMVSDEEWEASGQTYPGEPGTGRLRLLRKQLKAANNGKDENWSPNELARLSEEITKMEREGEAAIQDLEDPNPTIRFPPPRSRAATLLDKFKKSRQNNLPASVEMSVKAKTAAIDKVLAETKKVLEDRRREKQDEIRRIKGNDVMYNVLEDTIKTAESAFREAMDERKKSSQDVDAHDK

SEQ ID NO: 12083 - DNA, 2831 bp, Muscodor strobelii
  misc_feature: SGI EST ID NO. CUFF.28656.0
  misc_feature: Variant of the nucleotide sequence at SEQ ID NO 12081
gcagaaaaaaaaagttgacctcaagggtctcaggcattgcagctattcggctatcaccaacgctattccaaccacaactccattctgcaaccagttgtacagttatacccttccgttcgtgcttatgctagactttcatcgttaaagggccctgagctctgttctttttgattcttattgtaattctatagactagtcctcctcaaccgccctcactatggccacaagagcccttctttccgcttcccggcgagcaggtcccaatgcgcccatcactactctctgccgatcatgtctcctcaagtctctcgccgccacccgagaatcccgtcgctctatacacgagagtaccctagcaaagagacggaaagcagacgaggattgggctgcaaagaaggtcaggatcgaggcgggcgaggagaagcacttgtgggatgagttcaaggacagaggctacatcaaagacaccgccggcacccacgagcagatccgggaactcatgctgaacaagcgcatcggcgcctacgtcggcatcgacccgaccgccccctccctccacctcggccacctgctgcccctcatgccgctgttctggatgtacatgcacggctaccgcggcgtcaccgtcctcggcggcgccactgccaaggtcggcgaccccaccggccgcctcaccacccgcgacgacatcgagcgcaaggaacgctccatgtacctcaccaagatccactaccagcttaagcgcatatggaagaacgccgagaaccaggcccagcgagtccatggcctggagaaggagtgggcctggtctcgcgatatcgccaacaacagcacatggtataacacaacctccttcgtgcagatcgtctctacgctattcaagggcatgcgcatggggcccatgctatcccgcgacaccgtcaagcgcaagatgaccgagggcgacggcatgtccctcgccgagttcgtctaccccctcatgcaggcctgggactggtgggtcttgttcagcaagggcgccgtccgcatgcagatcggtggctccgaccagttcggcaacatcgtcgccggtgtcgacgctgtcaagtatatgcgtgagaccaacgaggaccccgccaccatattggaagatacccccgagaacactcctgtgggattcactgtccctttactcactgactcgtcgggggccaagtttggaaagagtgcaggtaatgccatgtggctggaccctttcatgaccagctctttcgatctctacggctacttcatgagacgacccgatgaggacgtagagcaactcctcaaactattcactttcttacccctcgaacaaatagcagaggtgatgaagatccagaacgaggacccgtcgaaacgccatgcacatcacgtgcttgcctacgaagtcctttgccttgtacacagcgagcaagaagcaaagctaacgcaggaaaaacacaagagcatgtacgggaagcccaccctcggcagcctgatggacgccaccaccacagagggtcctactggaggagaaagaatgaaatatcccgacaaactcaccccagcaaacaacgatttagccctaaactttcgcccggacatccaactcccagaatccctcgtcctcgggcaatccatccccaagatcctctacgccgccggtctggcggagagttccagcgacgcgcatcgtctcgtgtcccaccagggggcctacgtcggcggagcgcccggccgcaatgcgcacaacaacgtattgatgcgcgacggcgaactccagttccagacggtgaaagcctggtttccgggcgaaaccaagaatttcctcattgccgacaagattctgatcctacgacgtggcaaacacttcatccgcatagtcgaaatggtatcagacgaagaatgggaagccagcgggcagacctaccctggcgaacccggcacaggccgcttgcgtttactccggaaacaactcaaggcagcgaacaacggcaaagacgagaattggagccccaacgaactagctcgcctttccgaggagatcaccaaaatggagcgcgaaggcgaggcagcaattcaagatctggaggatccgaaccccaccatcaggttcccgccaccgaggagtagggctgcgacgctactagataagtttaagaagagtcgacagaataacttgcccgcgtctgtggagatgagcgtcaaggccaagacggcggctattgataaagtattggccgaaactaagaaggtgctcgaggacaggagacgggagaagcaagatgagattaggagaataaagggtaacgatgtgatgtacaatgttcttgaagacactataaagaccgctgagagtgcgttcagagaggcgatggatgaacggaagaaaagctcgcaggatgtggatgcgcatgataagtaggatgtgaaaggaatgtgttgagtggctgtatgagtaggtgtgtgatattgtaaatttaaatgtttaaagcatagatctcggggtccccgttatcgcggatgccccagcctggattttcccgcttcgccgcttgatgtggcggtactacggtttgtctgtcacgccagttatctcagtccgggtcaaacggcaggaatagcatatcaataccgggaaaccagtgtgtcatcaagacgatagggacagggcacatggtgcgggtgcattagataccgagatagtcggcacttcagatcgcgctttcgaggctgagcaacgttctctttgtgcaaaagactattcttaactctgactacgaccgcgatctgcctctttaatttccagtgttgattcgagagctagccgg

SEQ ID NO: 12084 - DNA, 555 bp, Muscodor strobelii
  misc_feature: SGI cDNA ID NO. 563908
  misc_feature: Reduced expression when VOC is produced
  misc_feature: Encodes the peptide sequence at SEQ ID NO 12085
atggcctcggcactccgtcccacgctactccggcacacagctctcgccgcccgccgcgcaccctcctccttcctcaccaagacccccgcccaatgcgccatctcccgcgatgccgtccgcgtcgccgccttccacgcctcatctaggagatctctgcttcctcccggtccccaggtgatcaaaggcacagtcaacgacgccgtaaaagtccccgacccgacgcccacccacggctcctaccactggaccttcgagcgcgccgtcgccgccggtctgatcccgctctccatcgcccccttcgtcggcggctctctcaaccccggcaccgacgccctgctgtgcggtctcctgctcatccactcccacaccggtcttcagtctattctgattgattacgtgccgaagcgcaagtaccccggtgctgctaagggtttgatgtggttgctcaatggtgcgactgtcttggtgggcgtcggactgtatgagtttgagacgaatgatgtgggcgtcacggctgcggttaagagggtttggactagtgctggctctacttag

SEQ ID NO: 12085 - protein, 184 aa, Muscodor strobelii
  misc_feature: SGI Peptide ID NO. 563908
  misc_feature (40)..(180): Pfam Id: PF05328 Pfam Desc: CybS
  misc_feature (1)..(178): NCBI GI: 156054650 Blast Desc: SS1G_06173 [Sclerotinia sclerotiorum 1980] gi|154703953|gb|EDO03692.1| SS1G_06173 [Sclerotinia sclerotiorum 1980]
  misc_feature (1)..(178): NCBI GI: 154320917 Blast Desc: Succinate dehydrogenase-ubiquinone-cytochrome b small subunit, mitochondrial precursor [Botryotinia fuckeliana B05.10] gi|150851871|gb|EDN27063.1| Succinate b small subunit, precursor
  misc_feature (1)..(180): NCBI GI: 256735486 Blast Desc: [Nectria haematococca mpVI 77-13-4]
  misc_feature (1)..(178): NCBI GI: 254839117 Blast Desc: SdhD [Botryotinia fuckeliana]
  misc_feature (1)..(178): NCBI GI: 254839121 Blast Desc: SdhD [Botryotinia fuckeliana]
  misc_feature (1)..(178): NCBI GI: 46107720 Blast Desc: FG00743.1 [Gibberella zeae PH-1]
  misc_feature (2)..(178): NCBI GI: 119186173 Blast Desc: CIMG_03134 [Coccidioides immitis RS]
  misc_feature (1)..(180): NCBI GI: 116182244 Blast Desc: CHGG_01750 [Chaetomium globosum CBS 148.51] gi|88186047|gb|EAQ93515.1| CHGG_01750 [Chaetomium globosum CBS 148.51]
  misc_feature (14)..(178): NCBI GI: 261194400 Blast Desc: succinate dehydrogenase membrane anchor subunit [Ajellomyces dermatitidis SLH14081] gi|239588619|gb|EEQ71262.1| succinate dehydrogenase membrane anchor subunit [Ajellomyces
  misc_feature (2)..(178): NCBI GI: 240108671 Blast Desc: CybS family protein [Coccidioides posadasii C735 delta SOWgp]
  misc_feature: Useful for introducing or modulating the production of volatile compounds
MASALRPTLLRHTALAARRAPSSFLTKTPAQCAISRDAVRVAAFHASSRRSLLPPGPQVIKGTVNDAVKVPDPTPTHGSYHWTFERAVAAGLIPLSIAPFVGGSLNPGTDALLCGLLLIHSHTGLQSILIDYVPKRKYPGAAKGLMWLLNGATVLVGVGLYEFETNDVGVTAAVKRVWTSAGST

SEQ ID NO: 12086 - DNA, 2550 bp, Muscodor strobelii
  misc_feature: SGI EST ID NO. CUFF.28659.0
  misc_feature: Variant of the nucleotide sequence at SEQ ID NO 12084
atccagacgcaaaagacgtcgggaagagtctcaaactgctaaacaaatccactgcatcatcgacgtcgtcgccaatcttcaacacctcaacacacctacagaacaatctcccctccttcggtgccacaaccaccaacagcctcccacccatccgcatcgcaccgtcacatcattagtcaacttcaaaagataggtagaggaggaattgtcacacaatggcctcggcactccgtcccacgctactccggcacacagctctcgccgcccgccgcgcaccctcctccttcctcaccaagacccccgcccaatgcgccatctcccgcgatgccgtccgcgtcgccgccttccacgcctcatctaggagatctctgcttcctcccggtccccaggtgatcaaaggcacagtcaacgacgccgtaaaagtccccgacccgacgcccacccacggctcctaccactggaccttcgagcgcgccgtcgccgccggtctgatcccgctctccatcgcccccttcgtcggcggctctctcaaccccggcaccgacgccctgctgtgcggtctcctgctcatccactcccacaccggtcttcagtctattctgattgattacgtgccgaagcgcaagtaccccggtgctgctaagggtttgatgtggttgctcaatggtgcgactgtcttggtgggcgtcggactgtatgagtttgagacgaatgatgtgggcgtcacggctgcggttaagagggtttggactagtgctggctctacttagtgcgtggatgatgaggatggagatagggatcgagggaagcgaaatgaggggaacagtgggagagggagcgggaggtgtggatttgccaagtttgcgccgagctgggcttttccctcctgaagctcgcatcgcacgagagaagagagcatagggcattttgtcgagagaaagacgacgaattccttttgtgtctttgggcaaagcctacgaacatcctagagtcgggtcaggtcagtgccagcgttggtgaaacaatggctcaccgtgtattcatcatcagtacaatactacaaatacaatcctcgtacatacatctcattcttattgctgcacatacactactcttgagaatattctatattcggtagtctttgatatgaggtagtagtacctaaattttgaggcacacctctgcaaagtattttaagttcgccggcctaaccactatcaatactcaaatttgacatcaattcttcactggatgctcctcatctcctgtcattcgaaaagggatgagacatcccctcttcgtttcgtgttattaaaccttccactacctgtctacccattcctcctcccaggaacatcaggtttgaaatgcttcatgagcgtcttgttcccaccccgttccaccctacttctcatccaccgctcagctcgttgtgctttgtcgacttgcttcttctgtgttgagagcacggcccgctgttcgggcagtgagaggtgcgttagttgtctttggtcgctgacacggagggatgagagctgggtttgggtcgtgaggttgcgggttgttgtttttgtgagggattgggaggttgttgatgtggttgttgaaaagggtgattggaggatttgggatgggtgtgtggaagcagaggatgaagaggaatgtgtggaggggacccaaggagcacggtatgaacgctgaccgagtatcttgccggatgggagacgtgctgatgtctcgtcgatctgtagaagactccctctcccgccttgctctttaccgccacgacctttcataccttctcttgcatcattgtcctcctcgttgtcgtcgctattctcaatctcgcttttgagtttatcatcctctccgtctgtctcttcgtccctatccttaaaatcatagaaatctctgaactcactctccccctcagtatcaaccctgcaatgtcccttatcgagcatatgcgctctcaccgcttcagatgtcctcttctgggttccgcaccatatgcactccgcatactcgaatatcacgagatgcagatactcgatcaatgcctcgggtgagattatgagattggtttgtgaggggatgaagagcccatgggatttcgacatgtgttggatgttggaatcgaaggtggggagtattgtaagacagaagagacattgtttggggttggacgttggtgttgtgcgggatggggcgttcgatagttcgttgtcttcgtgttctgtcgatatggaggagacggttggtcgatttggatctgagttcgtgtgtcgagttggagaaattgcatttccttccattttgcttggcggtatagtgcggctcataggtctcgatggttctttatcattatcaatcaggcgcgttgagtgagtgtgtcataaaacgcaagcaagaagcactgcttttgttgccactacctatagtcacttgctctaggaaatatcgctatccaggcccatacttgtaatcgtcttgcagaccccacgatcttcactgtgtttgccacaaatccgctaacaagcccaaaatttc

SEQ ID NO: 12087 - DNA, 984 bp, Muscodor strobelii
  misc_feature: SGI cDNA ID NO. 563909
  misc_feature: Encodes the peptide sequence at SEQ ID NO 12088
atggaaggaaatgcaatttctccaactcgacacacgaactcagatccaaatcgaccaaccgtctcctccatatcgacagaacacgaagacaacgaactatcgaacgccccatcccgcacaacaccaacgtccaaccccaaacaatgtctcttctgtcttacaatactccccaccttcgattccaacatccaacacatgtcgaaatcccatgggctcttcatcccctcacaaaccaatctcataatctcacccgaggcattgatcgagtatctgcatctcgtgatattcgagtatgcggagtgcatatggtgcggaacccagaagaggacatctgaagcggtgagagcgcatatgctcgataagggacattgcagggttgatactgagggggagagtgagttcagagatttctatgattttaaggatagggacgaagagacagacggagaggatgataaactcaaaagcgagattgagaatagcgacgacaacgaggaggacaatgatgcaagagaaggtatgaaaggtcgtggcggtaaagagcaaggcgggagagggagtcttctacagatcgacgagacatcagcacgtctcccatccggcaagatactcggtcagcgttcataccgtgctccttgggtcccctccacacattcctcttcatcctctgcttccacacacccatcccaaatcctccaatcacccttttcaacaaccacatcaacaacctcccaatccctcacaaaaacaacaacccgcaacctcacgacccaaacccagctctcatccctccgtgtcagcgaccaaagacaactaacgcacctctcactgcccgaacagcgggccgtgctctcaacacagaagaagcaagtcgacaaagcacaacgagctgagcggtggatgagaagtagggtggaacggggtgggaacaagacgctcatgaagcatttcaaacctgatgttcctgggaggaggaatgggtag

SEQ ID NO: 12088 - protein, 327 aa, Muscodor strobelii
  misc_feature: SGI Peptide ID NO. 563909
  misc_feature (31)..(325): NCBI GI: 261361300 Blast Desc: TRI15 [Verticillium albo-atrum VaMs.102]
  misc_feature (42)..(327): NCBI GI: 46116078 Blast Desc: FG03881.1 [Gibberella zeae PH-1]
  misc_feature (41)..(327): NCBI GI: 46139021 Blast Desc: FG11025.1 [Gibberella zeae PH-1] gi|33943129|gb|AAQ55290.1| transcription factor TRI15 [Gibberella zeae]
  misc_feature (31)..(322): NCBI GI: 212539275 Blast Desc: pre-60S factor REI1, [Penicillium marneffei ATCC 18224] gi|210069535|gb|EEA23626.1| pre-60S factor REI1, [Penicillium marneffei ATCC 18224]
  misc_feature (45)..(325): NCBI GI: 39964117 Blast Desc: MGG_09816 [Magnaporthe grisea 70-15] gi|145011119|gb|EDJ95775.1| MGG_09816 [Magnaporthe grisea 70-15]
  misc_feature (46)..(322): NCBI GI: 12044392 Blast Desc: AF327521_1 TRI15 [Fusarium sporotrichioides]
  misc_feature (42)..(319): NCBI GI: 256726053 Blast Desc: NECHADRAFT_43795 [Nectria haematococca mpVI 77-13-4]
  misc_feature (34)..(322): NCBI GI: 171682532 Blast Desc: protein product [Podospora anserina] gi|170941225|emb|CAP66875.1| protein product [Podospora anserina]
  misc_feature (47)..(327): NCBI GI: 116208214 Blast Desc: CHGG_03400 [Chaetomium globosum CBS 148.51] gi|88183997|gb|EAQ91465.1| CHGG_03400 [Chaetomium globosum CBS 148.51]
  misc_feature (33)..(322): NCBI GI: 242765209 Blast Desc: prohibitin, [Talaromyces stipitatus ATCC 10500] gi|218724124|gb|EED23541.1| prohibitin, [Talaromyces stipitatus ATCC 10500]
MEGNAISPTRHTNSDPNRPTVSSISTEHEDNELSNAPSRTTPTSNPKQCLFCLTILPTFDSNIQHMSKSHGLFIPSQTNLIISPEALIEYLHLVIFEYAECIWCGTQKRTSEAVRAHMLDKGHCRVDTEGESEFRDFYDFKDRDEETDGEDDKLKSEIENSDDNEEDNDAREGMKGRGGKEQGGRGSLLQIDETSARLPSGKILGQRSYRAPWVPSTHSSSSSASTHPSQILQSPFSTTTSTTSQSLTKTTTRNLTTQTQLSSLRVSDQRQLTHLSLPEQRAVLSTQKKQVDKAQRAERWMRSRVERGGNKTLMKHFKPDVPGRRNG

SEQ ID NO: 12089 - DNA, 5031 bp, Muscodor strobelii
  misc_feature: SGI cDNA ID NO. 563910
  misc_feature: Encodes the peptide sequence at SEQ ID NO 12090
atggatgatgagactcagtatcaaggttctcaagcgtatgctcgaaatgtggacgcggacgaatccgtaatacccaactgtggtgcggtcggttattctaaaactctcgttaatcttcgaggcaagctccaaaccattaaccttgttatcaaaacgtcctttactagcggcactgatggtacctttggacttcctcctaactgggggttgaatatctcttatacagttcctaccaagagtctaactgcgcaaggcaaaaccttcacagttgacttcgattggaaggataggactggttggcagagcggtcttcgctatgtgaaccatcatggtatgatgttcagccgcattttcccactattaccgcttccatctggtaggcccgggtactatgcctggaaactgcgcatgacggacggagctacggaatactttgacgagtacggaaagttgttggagcacgccgacatctatggtaactccatctactacagctatattgatcccctgtctgctccgcggtgtgctataattggatatatcatagattcatggggtcagcatatcacattccagtacgacgttgacaccagattaaccatccttgctccggatggtggcaagacgactttggtctatggcaaccaaggcttggatagaatccaggacgcttcaggctatgtcacctcttttgattacatcgtctttggcaaacagaatgtcttgtacagaatcacctacccgaccggccttcagtctacttttgagtatgttgggcttaacggattccaagacaacggaactcctatcgtacttccggcatgcttccaccacgtacacaaggatgcaactggtgctcaaatgagtgtcaccaagtacacatacggggaatccaccggctacgccaacttcactggtagtaatattggttgtatgatgggttcgggcaatgactctttgatggatagcaaaaaccaaacatacagatacgacgtgactatccgaagattagatgagcaacaatctgtcctacagaagtcgcggatttactacaattacttacacctgaccatgaaggaagagcactacttgcttggtgccgacggcagctcgaccatcgcatactcggtggaaaatacatacgacatcccgcttgatcaacaacaatggtccacgtcgtatagtcagccgatccaagtcgatcatttcaaccacagtggtggtccctcgcgtcggcctctgcgtaggaccactgctgcctacgatttctttggaatgccgctgacaatgaatgaatatagttggaatgggagtctgttagttcatgaacagagcacttgcaacacctacagtaccgtctcttggggtaacgaaatgctagtcagtgaaaggtatatcgacaaccgctgtggcagtgagagactcataactcataaactctctcccgatcaacggagtgttgctagctcgacgattaccttccgtgagtcttcgagctcggcttggataccctggaaaacgaagcagtacaactatgactcctgtggtcgtgtcacgtccgagagcgtcgcgtggagcgagggtgctactatccctgatgatagcgttactcaatacaaataccataaagcatacagattcgaccaaaatacgggtatcttaattgagtcaagtacggatccgcacaacaagactggaaatctcgaatacgacatgcggatcattggcgggccacttgtgcgaaagacgtccccccttggcgttgtagagacgctcaaatatgacttgtctggcaggctaaccgaaacaaccgatgcacttgggtataccagtaagactgagtacttcatcggatactcagacagcaaagtccgtgttaccaactcggttgggtacactacccagcaacgttatgatgctttgggtcgagcaatcgaagtttccgatagtggtgttgacggatcgcacggcattcaccgggtactgtctcgcaacgaatataatttcatttccaagatctccaagtcttccaatgaattaggcctggagacatctacaacctacgacgcgctcggaaggacgattcagaaaaccgactatctgggaaatgaaatgacatacgttcataaagacgcagagatgatgacagaggtgaggctgaatggcgagctacagcagcgcgtatttgccgacgcgtttgccaggaccatcaagaccatcaggtatcaagactctggagccagtatgctaggctaccaactcttgtctgagacgatgttcgatgggtttggcaggattaggagtaccctgttacatcagcaaaaccaggatggagcaggctcgataattttgtataggaaagatgtcgatctgaacccggaggataagccgcaaaaggtgtcaacaatgggcttgtcaagcatagccgaaggtcaggtggatcaagtcgtccgcgagtatactttcgacatatttggcaataccatcacttacagcaaggacgtccaatataacaatgggagtcggtttgttcacaaaggacctgtgagcacatttgacgaatgcaatcgcttggtggagttaaaaaaccaactaggaatgtcagaaacaagcatttacaacgcagatggtcacaaagtacgtttgacgcgttatgacggtactgtattcagttacacgtacgatgcgttaggccaaccattaatttcagcggggccggatggtgcaacgtggcgggaatggttaccaaatggtagactatccaaagttacaagagacgattccggaagcatcagctacacttataccctagacggaagtctcaagtctgtcctttatccaaacggatccacgcagtcctacgtgatagacagtttctctagggtgggcagagaaattgatgctgcgggtcgcgtgacggcgaactcgtttgacagctttgggcggctcgcatccaagacatttggtgacaacaagatcgaatatagctttggaacagtcaaccatctcatcggtacgattactggctatgccgttactggtagccagtcctactaccgctctatctcgtatgatggttacaaccgacgagctcaggtcgtcgatacgaacaactttggcgggctgatgttccttcggacaacctatcagtgggatagtaggaatcgtctcgtcgagtcacaaataagctcgggagacggtaacgatccgaatacgaattattacgaatatttgcaatatgatggattaggtcagctgagctcgagaagcacgcaatatgcaaatggcatggctcctaaccacacacaaagtttcgtttatgatggaaactacaatattttacaactgacagataatgagacaatgtctgcgtttagatataatgagatcgatcagcgagttgacccgggcttttgttacgacacgaatggcagactggttaaagacccccaaaatcgaaagtatgcttatgactccgaggataggcttctcagcactgatagcaaaatgacaaatacaagctattggtatcatccaaacgacgcgctcttcagaatgagtaagcccaaaggaacctcgtcgtattactacacctcaggcgccgtcaacgcggtgctcgactcagacaacaagagttcagcttcctggacatcatacttcatgcagcctcaaggcccgattctgtctcagaaggccacaggcaaagatggcaattgcatttttctcgagagtggaagctcgacggtcatgaccctagacagctctggaaaaagtacgtggacatacgacgcatacggcaaaacagccaaaacagcccgcagagaagtaccacggtttggatggcaaaatgaactgagcaatacggacgaagggctcgtgtacctacgttcgcgattttatcaacccgacatcatgtctttcctaaccatggatggatcacgagcacaggagaaccggtactcgtattgcaatggcgaccccatcaacggccaggaccccgacggtcacgatgccagggcagtagtcggcatggtcgccggcgccatcgttggaaccgccgtctctgttgcctcctatggtacattgttcgaagtcgggctcgaaatctttgggtctaccacaggagcaggctttttctcctccgccatttccggcgcggtgagtagtgttgctggggatgcagcgaccgtctcgataactggcgaacagttcaccgctgcacgcttctacgaggacatactttccggcgcagttgcgggggttgctggggccgccgtagcattacctgcccaggcggcggccagatcggcgctcaacaaaaactggtcgctcttacggatcaaagcgactgcattcagtacatcaatcctgataggtgggagcgccggtgctgttgggagcttcgcggcagcagcggcgagtgctgttgtgaatggtcatccggtattcacggcccagacagcactagcagtgcttaccgggttcgcaggaggcgctgggggggcgacggtaacaagtggcattgcgcgcggaattgaagaggacgtactgcccgtgccgataatggaggcggagcttagtagcgtagaattcgtgaagggacggccaggttatgcaacaaaggtcgattggttttgggcgtatccgatgagcaccccggaagaaatgacaaaagatataaagacctggaccgacgacacgtatcttatcgacgggtatggcggcaaggggcaaaaacaccgcgtcattgttgcacatggtgatccggagttcctctatgcctcgatcaaataccgaggcagagtactgtacaggcctatagacgcatcgttgctgggaagacatatcgctgctgatgggccgttcaatgtggccctccctgagcgaacgaccaacgatatcaagctgatcgcctgcaaggggggcttcgcgaatgccgcaaagttagcaagagcattacaaacaccggtgtgggccagctataaaaacgtgagccttaatgaaaagccaacgtggtataagtttacgtga

SEQ ID NO: 12090 - protein, 1676 aa, Muscodor strobelii
  misc_feature: SGI Peptide ID NO. 563910
  misc_feature (914)..(951): Pfam Id: PF05593 Pfam Desc: RHS Repeat
  misc_feature (5)..(1675): NCBI GI: 126464846 Blast Desc: YD repeat-containing protein [Rhodobacter sphaeroides ATCC 17029] gi|126106661|gb|ABN79186.1| YD repeat protein [Rhodobacter sphaeroides ATCC 17029]
  misc_feature (4)..(1675): NCBI GI: 221634533 Blast Desc: YD repeat protein [Rhodobacter sphaeroides KD131] gi|221163406|gb|ACM04368.1| YD repeat protein [Rhodobacter sphaeroides KD131]
  misc_feature (5)..(1675): NCBI GI: 125654718 Blast Desc: YD repeat-containing protein [Rhodobacter sphaeroides 2.4.1] gi|77386378|gb|ABA81806.1| YD repeat protein [Rhodobacter sphaeroides 2.4.1]
  misc_feature (62)..(1482): NCBI GI: 262199423 Blast Desc: YD repeat-containing protein [Haliangium ochraceum DSM 14365] gi|262082770|gb|ACY18739.1| YD repeat-containing protein [Haliangium ochraceum DSM 14365]
  misc_feature (506)..(1336): NCBI GI: 73670837 Blast Desc: Mbar_A3399 [Methanosarcina barkeri str. Fusaro] gi|72397999|gb|AAZ72272.1| Mbar_A3399 [Methanosarcina barkeri str. Fusaro]
  misc_feature (583)..(1335): NCBI GI: 167463207 Blast Desc: Plarl_11701 [Paenibacillus larvae subsp. larvae BRL-230010]
  misc_feature (510)..(1336): NCBI GI: 282866644 Blast Desc: YD repeat protein [Streptomyces sp. ACTE] gi|282558546|gb|EFB64106.1| YD repeat protein [Streptomyces sp. ACTE]
  misc_feature (413)..(1437): NCBI GI: 258516064 Blast Desc: YD repeat protein [Desulfotomaculum acetoxidans DSM 771] gi|257779769|gb|ACV63663.1| YD repeat protein [Desulfotomaculum acetoxidans DSM 771]
  misc_feature (554)..(1267): NCBI GI: 197301422 Blast Desc: RUMLAC_00154 [Ruminococcus lactaris ATCC 29176] gi|197299579|gb|EDY34098.1| RUMLAC_00154 [Ruminococcus lactaris ATCC 29176]
  misc_feature (506)..(1344): NCBI GI: 83648291 Blast Desc: Rhs family protein [Hahella chejuensis KCTC 2396] gi|83636334|gb|ABC32301.1| Rhs family protein [Hahella chejuensis KCTC 2396]
MDDETQYQGSQAYARNVDADESVIPNCGAVGYSKTLVNLRGKLQTINLVIKTSFTSGTDGTFGLPPNWGLNISYTVPTKSLTAQGKTFTVDFDWKDRTGWQSGLRYVNHHGMMFSRIFPLLPLPSGRPGYYAWKLRMTDGATEYFDEYGKLLEHADIYGNSIYYSYIDPLSAPRCAIIGYIIDSWGQHITFQYDVDTRLTILAPDGGKTTLVYGNQGLDRIQDASGYVTSFDYIVFGKQNVLYRITYPTGLQSTFEYVGLNGFQDNGTPIVLPACFHHVHKDATGAQMSVTKYTYGESTGYANFTGSNIGCMMGSGNDSLMDSKNQTYRYDVTIRRLDEQQSVLQKSRIYYNYLHLTMKEEHYLLGADGSSTIAYSVENTYDIPLDQQQWSTSYSQPIQVDHFNHSGGPSRRPLRRTTAAYDFFGMPLTMNEYSWNGSLLVHEQSTCNTYSTVSWGNEMLVSERYIDNRCGSERLITHKLSPDQRSVASSTITFRESSSSAWIPWKTKQYNYDSCGRVTSESVAWSEGATIPDDSVTQYKYHKAYRFDQNTGILIESSTDPHNKTGNLEYDMRIIGGPLVRKTSPLGVVETLKYDLSGRLTETTDALGYTSKTEYFIGYSDSKVRVTNSVGYTTQQRYDALGRAIEVSDSGVDGSHGIHRVLSRNEYNFISKISKSSNELGLETSTTYDALGRTIQKTDYLGNEMTYVHKDAEMMTEVRLNGELQQRVFADAFARTIKTIRYQDSGASMLGYQLLSETMFDGFGRIRSTLLHQQNQDGAGSIILYRKDVDLNPEDKPQKVSTMGLSSIAEGQVDQVVREYTFDIFGNTITYSKDVQYNNGSRFVHKGPVSTFDECNRLVELKNQLGMSETSIYNADGHKVRLTRYDGTVFSYTYDALGQPLISAGPDGATWREWLPNGRLSKVTRDDSGSISYTYTLDGSLKSVLYPNGSTQSYVIDSFSRVGREIDAAGRVTANSFDSFGRLASKTFGDNKIEYSFGTVNHLIGTITGYAVTGSQSYYRSISYDGYNRRAQVVDTNNFGGLMFLRTTYQWDSRNRLVESQISSGDGNDPNTNYYEYLQYDGLGQLSSRSTQYANGMAPNHTQSFVYDGNYNILQLTDNETMSAFRYNEIDQRVDPGFCYDTNGRLVKDPQNRKYAYDSEDRLLSTDSKMTNTSYWYHPNDALFRMSKPKGTSSYYYTSGAVNAVLDSDNKSSASWTSYFMQPQGPILSQKATGKDGNCIFLESGSSTVMTLDSSGKSTWTYDAYGKTAKTARREVPRFGWQNELSNTDEGLVYLRSRFYQPDIMSFLTMDGSRAQENRYSYCNGDPINGQDPDGHDARAVVGMVAGAIVGTAVSVASYGTLFEVGLEIFGSTTGAGFFSSAISGAVSSVAGDAATVSITGEQFTAARFYEDILSGAVAGVAGAAVALPAQAAARSALNKNWSLLRIKATAFSTSILIGGSAGAVGSFAAAAASAVVNGHPVFTAQTALAVLTGFAGGAGGATVTSGIARGIEEDVLPVPIMEAELSSVEFVKGRPGYATKVDWFWAYPMSTPEEMTKDIKTWTDDTYLIDGYGGKGQKHRVIVAHGDPEFLYASIKYRGRVLYRPIDASLLGRHIAADGPFNVALPERTTNDIKLIACKGGFANAAKLARALQTPVWASYKNVSLNEKPTWYKFT

SEQ ID NO: 12091 - DNA, 651 bp, Muscodor strobelii
  misc_feature: SGI cDNA ID NO. 563911
  misc_feature: Encodes the peptide sequence at SEQ ID NO 12092
atgcgctttgtaagcatttcacatatcctctctatctcactcaatgtctttcccatctttgccggccctggcgccgttgtgtatggctgcgtcaacctacaagttcagccgtctgcaagcttcaacgtcacatttgaggtcatccctaaagaaggggcgaacaagtgcatgaactcgtacggccactcagtcacggtagaggtctcccagtctggagctacctgtggcgaagtcggctatgtcgaggcgaaaagctccgacagctctgacgttacaactgaggacctttgtgccagcgacgagagtatatggaaccttgcatactacacgctcaatctgcccgtgtccaagtcgggtagcgtccgcagccggtggtccaaattaaccttctcgttgacaaatgagatcaccttcaaggagaacgagtacatcgccggtgcaatggtctgtcccactgaagctttgtgctctgcgactcaattccactggaaatctggaactactggccctgcatacttcatcttccaacccgacaagcagaatagcttaaccgattgtgctgcctaccagatgggcagtcaccaacatctacgccagcatgattgcggctgtagcgcccatggtgggtctaatagagagaaagagctatag

SEQ ID NO: 12092 - protein, 216 aa, Muscodor strobelii
  misc_feature: SGI Peptide ID NO. 563911
  misc_feature (30)..(181): NCBI GI: 126464845 Blast Desc: Rsph17029_4110 [Rhodobacter sphaeroides ATCC 17029] gi|126106660|gb|ABN79185.1| Rsph17029_4110 [Rhodobacter sphaeroides ATCC 17029]
  misc_feature (30)..(181): NCBI GI: 125654719 Blast Desc: RSP_4285 [Rhodobacter sphaeroides 2.4.1] gi|77386379|gb|ABA81807.1| conserved [Rhodobacter sphaeroides 2.4.1]
  misc_feature (30)..(181): NCBI GI: 221634534 Blast Desc: RSKD131_4509 [Rhodobacter sphaeroides KD131] gi|221163407|gb|ACM04369.1| RSKD131_4509 [Rhodobacter sphaeroides KD131]
MRFVSISHILSISLNVFPIFAGPGAVVYGCVNLQVQPSASFNVTFEVIPKEGANKCMNSYGHSVTVEVSQSGATCGEVGYVEAKSSDSSDVTTEDLCASDESIWNLAYYTLNLPVSKSGSVRSRWSKLTFSLTNEITFKENEYIAGAMVCPTEALCSATQFHWKSGTTGPAYFIFQPDKQNSLTDCAAYQMGSHQHLRQHDCGCSAHGGSNREKEL

SEQ ID NO: 12093 - DNA, 513 bp, Muscodor strobelii
  misc_feature: SGI EST ID NO. CUFF.28692.0
  misc_feature: Variant of the nucleotide sequence at SEQ ID NO 12091
cacatatcctctctatctcactcaatgtctttcccatctttgccggccctggcgccgttgtgtatggctgcgtcaacctacaagttcagccgtctgcaagcttcaacgtcacatttgaggtcatccctaaagaaggggcgaacaagtgcatgaactcgtacggccactcagtcacggtagaggtctcccagtctggagctacctgtggcgaagtcggctatgtcgaggcgaaaagctccgacagctctgacgttacaactgaggacctttgtgccagcgacgagagtatatggaaccttgcatactacacgctcaatctgcccgtgtccaagtcgggtagcgtccgcagccggtggtccaaattaaccttctcgttgacaaatgagatcaccttcaaggagaacgagtacatcgccggtgcaatggtctgtcccactgaagctttgtgctctgcgactcaattccactggaaatctggaactactggccctgcatacttcatcttccaacccg

SEQ ID NO: 12094 - DNA, 891 bp, Muscodor strobelii
  misc_feature: SGI cDNA ID NO. 563912
  misc_feature: Encodes the peptide sequence at SEQ ID NO 12095
atgacatctccaagacgaacgattctcatcacaggctgttcagatcatagcttgggatcggctctggctcttgcttttaacaaggccggatggcgcgtcttcgcatcagcacgaaacccagccaaactacgtgaggcggaagctacttccattgaaacaatacaattagatgtttgctccgaagaatcgatcacggatgctgtcaaacaagttcaagaactgactggtggctccctcgatgccctgatcaacaatgctggggcaaactacgcaatgccagcgatcgatatcgacatcgacaaagctcgtgatgtgtttgatctcaatgttttctccatagttcgggttacccgcggctttgtcccactccttttggaatctcaacacggtggcctagttgtcaataacacatcagcatcatcccttactgcaggtggtctgccttggcagtcggcatacaatgcctcaaaagcggcggctagcagtatcacagagggcttacgactcgaattggctccgttcggtatcaaggtgatcaacctcgtaactggtcaagtcaagtccacgttttttgagaatgcaccgagcgcgatacttccacctgggtcgatatacaacatcgcaaaagaagagattgagaaagtcatgtcgggagaggaaggcgccaacaatggtactgaggccagtaattgggcggatagtgtggtcgaggatatcagtcagcccaaccctccacattggatctggcgtggtcgccatgcgacagaggtgcgatcgtcttcacatttaccagttgggacactagatggcgtgatcaagagaatttcaaagctcgatgtgctggagcagaggattaaagaaagcggtggggtggacaagcttaagctgtga

SEQ ID NO: 12095 - protein, 296 aa, Muscodor strobelii
  misc_feature: SGI Peptide ID NO. 563912
  misc_feature (6)..(172): Pfam Id: PF00106 Pfam Desc: short chain dehydrogenase
  misc_feature (1)..(295): NCBI GI: 256723333 Blast Desc: NECHADRAFT_72692 [Nectria haematococca mpVI 77-13-4]
  misc_feature (1)..(295): NCBI GI: 46115124 Blast Desc: FG03404.1 [Gibberella zeae PH-1]
  misc_feature (7)..(220): NCBI GI: 242814001 Blast Desc: IBR finger domain protein [Talaromyces stipitatus ATCC 10500] gi|218714621|gb|EED14044.1| IBR finger domain protein [Talaromyces stipitatus ATCC 10500]
  misc_feature (1)..(289): NCBI GI: 242820004 Blast Desc: short-chain dehydrogenases/reductase, [Talaromyces stipitatus ATCC 10500] gi|218713894|gb|EED13318.1| short-chain dehydrogenases/reductase, [Talaromyces stipitatus ATCC 10500]
  misc_feature (3)..(283): NCBI GI: 256723231 Blast Desc: NECHADRAFT_86494 [Nectria haematococca mpVI 77-13-4]
  misc_feature (5)..(287): NCBI GI: 212538923 Blast Desc: short-chain dehydrogenase, [Penicillium marneffei ATCC 18224] gi|210069359|gb|EEA23450.1| short-chain dehydrogenase, [Penicillium marneffei ATCC 18224]
  misc_feature (2)..(293): NCBI GI: 119467458 Blast Desc: short-chain dehydrogenase/reductase, [Neosartorya fischeri NRRL 181] gi|119405687|gb|EAW15638.1| short-chain dehydrogenase/reductase, [Neosartorya fischeri NRRL 181]
  misc_feature (5)..(251): NCBI GI: 145254010 Blast Desc: An18g00230 [Aspergillus niger] gi|134084069|emb|CAK43099.1| protein product [Aspergillus niger]
  misc_feature (1)..(287): NCBI GI: 242769409 Blast Desc: estradiol 17 beta-dehydrogenase, [Talaromyces stipitatus ATCC 10500] gi|218724958|gb|EED24375.1| estradiol 17 beta-dehydrogenase, [Talaromyces stipitatus ATCC 10500]
  misc_feature (5)..(251): NCBI GI: 146324313 Blast Desc: short-chain dehydrogenase/reductase [Aspergillus fumigatus Af293] gi|129556254|gb|EAL85701.2| short-chain dehydrogenase/reductase, [Aspergillus fumigatus Af293] fumigatus
  misc_feature (2)..(286): SWISSPROT Homolog: EC 1.1.1.101 Acylglycerone-phosphate reductase
MTSPRRTILITGCSDHSLGSALALAFNKAGWRVFASARNPAKLREAEATSIETIQLDVCSEESITDAVKQVQELTGGSLDALINNAGANYAMPAIDIDIDKARDVFDLNVFSIVRVTRGFVPLLLESQHGGLVVNNTSASSLTAGGLPWQSAYNASKAAASSITEGLRLELAPFGIKVINLVTGQVKSTFFENAPSAILPPGSIYNIAKEEIEKVMSGEEGANNGTEASNWADSVVEDISQPNPPHWIWRGRHATEVRSSSHLPVGTLDGVIKRISKLDVLEQRIKESGGVDKLKL

SEQ ID NO: 12096 - DNA, 1826 bp, Muscodor strobelii
  misc_feature: SGI EST ID NO. CUFF.28695.0
  misc_feature: Variant of the nucleotide sequence at SEQ ID NO 12094
ttacgactcgaattggctccgttcggtatcaaggtgatcaacctcgtaactggtcaagtcaagtccacgttttttgagaatgcaccgagcgcgatacttccacctgggtcgatatacaacatcgcaaaagaagagattgagaaagtcatgtcgggagaggaaggcgccaacaatggtactgaggccagtaattgggcggatagtgtggtcgaggatatcagtcagcccaaccctccacattggatctggcgtggtcgccatgcgacagaggtgcgatcgtcttcacatttaccagttgggacactagatggcgtgatcaagagaatttcaaagctcgatgtgctggagcagaggattaaagaaagcggtggggtggacaagcttaagctgtgatataatagtgtctcgaccaaccgcacaaaacattttcaactcaatttgaacagcaacatcatgaagagagtggcagcgaattgcattaggcgttacgacaatcattatggtctctagtctccgccatgcgacaaagagtaatacgcgcatgcactcagcatgcaaataacactagcaacaacaatagcaagggcaaaaaaagattgtaatttggaggcccacctctaacccgaggacttttttacttttttttttactttttctttttctgtccccctccaattatcctagattggcttctttctaccctgatagggcggtcgctgttcggtttatttgttgcatgccacctcttaactttttttttttttttttttaacttggcatcggggctcgaacagtcgacctttacattaagcatcagcggtctagccgactgagctaccatggcacaggcccagtgtccaatggtgatagctgtacgaactatttggccctttgtacctcaaagctgctacccatcgcaacaggcacctcactgccgctttgctgctactcaccccacctctgccgccttgccaaccacaagctccccccatttacagacctgtccaccaccgtcacctgactgacgcgaaatcctcgagatcaacaagtgcggcctaacaaatagaacactgcgatgcacctatcgatcgcgctttccgcgatgtgtcctggtagttcgcgcccgagccaaatattgcactctactgtactgcaggcatatagaagcaccagcagcagcccacttgcaccattgttgctgactataggcaatcatactaagaacactagttacgtctaccatagtatgcatatacaagctcgaatacaagctccttaacaaaccccatcccgtttgacatagcgataatcactaccgtagatcaccacttggccatattgcaacatatatctcaccggctcatgaacttcttccaggtttacctggacctcaatcgcagtttgctacattttcttgcctacatattttggttccgatatgtcatagtgaatagttatccgacctttcctgcaatctcattgtgaccacgtctacagtataaatcaatgatttaaggcaatgtcgtgcggcgtcgtctttggccaattagataatgccatctaaatagtgtcttccaccatctgcaattactagtcctccagacagcgtcaaccaccatcggatttacgccttcgcagtccgcttctaccaccgccacgtgcactgtctatctaatccagtgcaatccgctacgaacgacgagtccgacatgaaaaaaatcagctaccatatggccatgtgaaagattcaaacagtctgtgatctgaactccgaattcgtaatcaagatgacgaaactactgtgctctcataagaggctattcgct

SEQ ID NO: 12097 - DNA, 1461 bp, Muscodor strobelii
  misc_feature: SGI cDNA ID NO. 563913
  misc_feature: Elevated expression when VOC is produced
  misc_feature: Encodes the peptide sequence at SEQ ID NO 12098
atggcttcagcctcatctccctggaacacccaggtcactggggtatttgattcaagcgctggcttgcaagtgctgctgccggcagacgctagctaccacgagcgcgtcgagtcgtactggtcaaacacggcaaaacaaaaaccagccagcatcatttgccccgcgtcgtcagatgagcttgcaaaggccctcgtcgcgttggcgaaagctggccagccattctctgttcgcagcggtggtcattgtccgtcgacaggcgcgagcaacatcgatggcggagtcgccatcgatcttcgcctgttcaatcagattgctctagatgtagagtccaatactgtccacgtcggaactgcctgtgtgtggtccgacgtgtacggggagcttgaaaagcataacctagcagtcgctggtggacgggccggccatgtcggcgttggcggtcttcttttgggtggtggcaacacctggctcactgcgcagagagggtgggcctgcgacaatatggttgcagctgaagtggtcctggccgatgggcaaactgtaacagctaatagaggtgaacgtgccgatttatttcaagcgcttaagggtggatctaataacttcggtattgtcactcgcttcaccctcgcgacagtccctctcgagaaagtctggggaggtgtcatggtccttgccaaagatgctatccctgatgtttgccgattgaaggagaaattcactaccaagatagaagggtctccagagaataatctgatcattgtgattgggtacgtgcctgaaatgaagactgtagctgcctctgtggctgttgtcaacacgaaaggcgcgatggacagtcccgtgtttgacgactggaaaaagcttccttcgttattcgactcgactaagattcgatcggtttatgatctgtcctttgaggtcactctcccgggtaactattttagcagttggttcacgctgaccttcaagaacgacaagcgaattatggccaaggcgtctgacatccatgacgatttggtatctaagttgcaagctcgcgtatcggagggcgacttcagatctcaatgtatcttccagcctttgcctactacatttgcggagcattctcttagggcgggaggcaacgtgcttggactcgaagacaacaagacggatggcattttgttccaaaccgttgtcatgctaaagactcatgagcagcacgatgaagcctatcctttgctcaaacaatgtgtgcaagagttgaaggagttcgcggcctcagttgaaaatggtctcttccgctggctttacatgaattatgcggacaaatctcaggatgtgatcacgagctatggagaagacaatgtcaagaagatgtgggaggtggcgaagaaatacgatccaaacggagttttccaagagctatgtcctggaggttggaagttgcccacagtggatgcttcagtgagagagtag

SEQ ID NO: 12098 - protein, 486 aa, Muscodor strobelii
  misc_feature: SGI Peptide ID NO. 563913
  misc_feature (48)..(184): Pfam Id: PF01565 Pfam Desc: FAD binding domain
  misc_feature (15)..(477): NCBI GI: 171679329 Blast Desc: protein product [Podospora anserina] gi|170939290|emb|CAP64518.1| protein product [Podospora anserina]
  misc_feature (11)..(480): NCBI GI: 256732288 Blast Desc: NECHADRAFT_41792 [Nectria haematococca mpVI 77-13-4]
  misc_feature (19)..(480): NCBI GI: 46110302 Blast Desc: FG02033.1 [Gibberella zeae PH-1]
  misc_feature (18)..(481): NCBI GI: 171678393 Blast Desc: protein product [Podospora anserina] gi|170937266|emb|CAP61923.1| protein product [Podospora anserina]
  misc_feature (21)..(478): NCBI GI: 256726365 Blast Desc: NECHADRAFT_39434 [Nectria haematococca mpVI 77-13-4]
  misc_feature (20)..(477): NCBI GI: 169609567 Blast Desc: SNOG_07875 [Phaeosphaeria nodorum SN15] gi|111063031|gb|EAT84151.1| SNOG_07875 [Phaeosphaeria nodorum SN15]
  misc_feature (19)..(480): NCBI GI: 46118786 Blast Desc: FG04732.1 [Gibberella zeae PH-1]
  misc_feature (19)..(477): NCBI GI: 189198724 Blast Desc: conserved [Pyrenophora tritici-repentis Pt-1C-BFP] gi|187982798|gb|EDU48286.1| conserved [Pyrenophora tritici-repentis Pt-1C-BFP]
  misc_feature (26)..(477): NCBI GI: 255945439 Blast Desc: Pc20g09930 [Penicillium chrysogenum Wisconsin 54-1255] gi|211588222|emb|CAP86322.1| Pc20g09930 [Penicillium chrysogenum Wisconsin 54-1255]
  misc_feature (19)..(482): NCBI GI: 169612738 Blast Desc: SNOG_09495 [Phaeosphaeria nodorum SN15] gi|111061640|gb|EAT82760.1| SNOG_09495 [Phaeosphaeria nodorum SN15]
  misc_feature: Useful for introducing or modulating the production of volatile compounds
MASASSPWNTQVTGVFDSSAGLQVLLPADASYHERVESYWSNTAKQKPASIICPASSDELAKALVALAKAGQPFSVRSGGHCPSTGASNIDGGVAIDLRLFNQIALDVESNTVHVGTACVWSDVYGELEKHNLAVAGGRAGHVGVGGLLLGGGNTWLTAQRGWACDNMVAAEVVLADGQTVTANRGERADLFQALKGGSNNFGIVTRFTLATVPLEKVWGGVMVLAKDAIPDVCRLKEKFTTKIEGSPENNLIIVIGYVPEMKTVAASVAVVNTKGAMDSPVFDDWKKLPSLFDSTKIRSVYDLSFEVTLPGNYFSSWFTLTFKNDKRIMAKASDIHDDLVSKLQARVSEGDFRSQCIFQPLPTTFAEHSLRAGGNVLGLEDNKTDGILFQTVVMLKTHEQHDEAYPLLKQCVQELKEFAASVENGLFRWLYMNYADKSQDVITSYGEDNVKKMWEVAKKYDPNGVFQELCPGGWKLPTVDASVRE

SEQ ID NO: 12099 - DNA, 1928 bp, Muscodor strobelii
  misc_feature: SGI EST ID NO. CUFF.28714.0
  misc_feature: Variant of the nucleotide sequence at SEQ ID NO 12097
acagcgatgattgtgggacggcctgatatgcacgtttaccaactcatgcatgttggtgcgacaacccaattgatcgtcgcgtttagacagtcagacaccgtgcttccgggatgaacatcgtgtccagtttgaaatgtaacagaacgacatcgaagacctccaccggcccaaaagatggggttcatacttcttcatcatttaatcattcgctttcagactttgggcaaatggcttcagcctcatctccctggaacacccaggtcactggggtatttgattcaagcgctggcttgcaagtgctgctgccggcagacgctagctaccacgagcgcgtcgagtcgtactggtcaaacacggcaaaacaaaaaccagccagcatcatttgccccgcgtcgtcagatgagcttgcaaaggccctcgtcgcgttggcgaaagctggccagccattctctgttcgcagcggtggtcattgtccgtcgacaggcgcgagcaacatcgatggcggagtcgccatcgatcttcgcctgttcaatcagattgctctagatgtagagtccaatactgtccacgtcggaactgcctgtgtgtggtccgacgtgtacggggagcttgaaaagcataacctagcagtcgctggtggacgggccggccatgtcggcgttggcggtcttcttttgggtggtggcaacacctggctcactgcgcagagagggtgggcctgcgacaatatggttgcagctgaagtggtcctggccgatgggcaaactgtaacagctaatagaggtgaacgtgccgatttatttcaagcgcttaagggtggatctaataacttcggtattgtcactcgcttcaccctcgcgacagtccctctcgagaaagtctggggaggtgtcatggtccttgccaaagatgctatccctgatgtttgccgattgaaggagaaattcactaccaagatagaagggtctccagagaataatctgatcattgtgattgggtacgtgcctgaaatgaagactgtagctgcctctgtggctgttgtcaacacgaaaggcgcgatggacagtcccgtgtttgacgactggaaaaagcttccttcgttattcgactcgactaagattcgatcggtttatgatctgtcctttgaggtcactctcccgggtaactattttagcagttggttcacgctgaccttcaagaacgacaagcgaattatggccaaggcgtctgacatccatgacgatttggtatctaagttgcaagctcgcgtatcggagggcgacttcagatctcaatgtatcttccagcctttgcctactacatttgcggagcattctcttagggcgggaggcaacgtgcttggactcgaagacaacaagacggatggcattttgttccaaaccgttgtcatgctaaagactcatgagcagcacgatgaagcctatcctttgctcaaacaatgtgtgcaagagttgaaggagttcgcggcctcagttgaaaatggtctcttccgctggctttacatgaattatgcggacaaatctcaggatgtgatcacgagctatggagaagacaatgtcaagaagatgtgggaggtggcgaagaaatacgatccaaacggagttttccaagagctatgtcctggaggttggaagttgcccacagtggatgcttcagtgagagagtagattgtctctttcaatagagagcaggatcattactcttgaatagcgtactacaatgcactcatgaggagatcattattgcaaatctcttcctaccttgggaagagcgatggataagtgaccaagacgatctgaagcgccggtttctagttcaaccacattgccgattatcagattttagggcatattgctattcattaattcgagttatggattgcaccatagttgccccagtaaccctac

SEQ ID NO: 12100 - DNA, 1167 bp, Muscodor strobelii
  misc_feature: SGI cDNA ID NO. 563914
  misc_feature: Encodes the peptide sequence at SEQ ID NO 12101
atggaagctggcggatcacagtcgatgtcagatgacctgcaacgcgacagccgcgcgttgaaacgggcggcttccgagcgaccagagactcctcccgatgttaaaaagactaaatacacgccgggtaacagggtggaatctgaccatattcgcctggcagacaagatgcgaatacctttcctagacaagcctgcagtactggaagagcgaaacggcgacattgagttccgggtcgtcaacaacgatggcagcagagccagcatgatgatcctaacgggcctaaaatgtctattccaaaagcagcttccagagatgcctaaggcttatattgcgcgcctcgtctacgatcgtactcatgtatccatggccattgtcaagcatccgctcgaagtaattggtgggataacatatcgagcattccgggatcgtaagttcgccgaaatcgttttctgcgccgtgtcgtccgaccagcaagtgaaaggctacggagcacacatgatggcccatctcaaggattacggtttcaccaaagacatcacgcttgaaaagtccatttgggtgggatacatcaaagactaccagggcggaactctaatgcaatgctccatgcttcctcgagtacgctatcttgaagttggtcgcatgctcctcaaacagaaggaaacggtgcaagccaagattcgccatcttagcaagagccacgtggtccatcaaccaccaaagcagtggtccaacggcgctatcaccaccatcgatccgctctctatcgcggcaattagagcgactgcttggtcccccgacatggacgaactggcacgaatcccacgccacggaccgcacttcaacaaaatgcgacgctttctgtcgcagatgcaatttcacaaacaagcttggccttttctcaaccctgtgaacaaagacgaggtcccggattattataaggtcattacaaacccaatggatctatccactattgaacaaaagctggagaacgatcaatacaatattccgagagacctcattgaagacatcaagctcatctttagcaattgcaaacagtacaacgatgctacgacggtttacactaaatgcgccgtcaaactggagaattgtatgcggactctgattgaagatatcccagagtggttcgatcttctcgaagaatga

SEQ ID NO: 12101 - protein, 388 aa, Muscodor strobelii
  misc_feature: SGI Peptide ID NO. 563914
  misc_feature (280)..(367): Pfam Id: PF00439 Pfam Desc: Bromodomain
  misc_feature (123)..(182): Pfam Id: PF00583 Pfam Desc: Acetyltransferase (GNAT) family
  misc_feature (1)..(388): NCBI GI: 115389862 Blast Desc: histone acetyltransferase GCN5 [Aspergillus terreus NIH2624] gi|114194832|gb|EAU36532.1| histone acetyltransferase GCN5 [Aspergillus terreus NIH2624]
  misc_feature (21)..(388): NCBI GI: 154282515 Blast Desc: histone acetyltransferase GCN5 [Ajellomyces capsulatus NAm1] gi|150410233|gb|EDN05621.1| histone acetyltransferase GCN5 [Ajellomyces capsulatus NAm1]
  misc_feature (1)..(388): NCBI GI: 225561393 Blast Desc: histone acetyltransferase GCN5 [Ajellomyces capsulatus G186AR]
  misc_feature (21)..(387): NCBI GI: 171683325 Blast Desc: protein product [Podospora anserina] gi|170941622|emb|CAP67276.1| protein product [Podospora anserina]
  misc_feature (26)..(388): NCBI GI: 116207144 Blast Desc: CHGG_02865 [Chaetomium globosum CBS 148.51] gi|88183462|gb|EAQ90930.1| CHGG_02865 [Chaetomium globosum CBS 148.51]
  misc_feature (10)..(388): NCBI GI: 145605331 Blast Desc: MGG_11716 [Magnaporthe grisea 70-15] gi|145013152|gb|EDJ97793.1| MGG_11716 [Magnaporthe grisea 70-15]
  misc_feature (1)..(388): NCBI GI: 239612685 Blast Desc: histone acetyltransferase GCN5 [Ajellomyces dermatitidis ER-3]
  misc_feature (1)..(388): NCBI GI: 261191470 Blast Desc: histone acetyltransferase GCN5 [Ajellomyces dermatitidis SLH14081] gi|239589909|gb|EEQ72552.1| histone acetyltransferase GCN5 [Ajellomyces dermatitidis SLH14081]
  misc_feature (1)..(388): NCBI GI: 145249730 Blast Desc: An14g05810 [Aspergillus niger] gi|134081887|emb|CAK42142.1| protein product [Aspergillus niger]
  misc_feature (6)..(388): NCBI GI: 242803667 Blast Desc: bromodomain-containing protein, [Talaromyces stipitatus ATCC 10500] gi|218717566|gb|EED16987.1| bromodomain-containing protein, [Talaromyces stipitatus ATCC
  misc_feature (54)..(387): SWISSPROT Homolog: EC 2.3.1.48 Histone acetyltransferase
MEAGGSQSMSDDLQRDSRALKRAASERPETPPDVKKTKYTPGNRVESDHIRLADKMRIPFLDKPAVLEERNGDIEFRVVNNDGSRASMMILTGLKCLFQKQLPEMPKAYIARLVYDRTHVSMAIVKHPLEVIGGITYRAFRDRKFAEIVFCAVSSDQQVKGYGAHMMAHLKDYGFTKDITLEKSIWVGYIKDYQGGTLMQCSMLPRVRYLEVGRMLLKQKETVQAKIRHLSKSHVVHQPPKQWSNGAITTIDPLSIAAIRATAWSPDMDELARIPRHGPHFNKMRRFLSQMQFHKQAWPFLNPVNKDEVPDYYKVITNPMDLSTIEQKLENDQYNIPRDLIEDIKLIFSNCKQYNDATTVYTKCAVKLENCMRTLIEDIPEWFDLLEE

SEQ ID NO: 12102 - DNA, 343 bp, Muscodor strobelii
  misc_feature: SGI EST ID NO. CUFF.28723.0
  misc_feature: Variant of the nucleotide sequence at SEQ ID NO 12100
gtgggatacatcaaagactaccagggcggaactctaatgcaatgctccatgcttcctcgagtacgctatcttgaagttggtcgcatgctcctcaaacagaaggaaacggtgcaagccaagattcgccatcttagcaagagccacgtggtccatcaaccaccaaagcagtggtccaacggcgctatcaccaccatcgatccgctctctatcgcggcaattagagcgactgcttggtcccccgacatggacgaactggcacgaatcccacgccacggaccgcacttcaacaaaatgcgacgctttctgtcgcagatgcaatttcacaaacaagcttggccttttc

SEQ ID NO: 12103 - DNA, 570 bp, Muscodor strobelii
  misc_feature: SGI cDNA ID NO. 563915
  misc_feature: Encodes the peptide sequence at SEQ ID NO 12104
atggaattcacaatcaagtttaaaaagcccagtggcaaaactgactccatgaagagaaagcctacatcctttacagcattgttgagcgatgccgacgccagctactcgtcccaaaatgacatcaacccaggagcaacgcatatcaagcgactgaaaacaaaccagagtgtacaaggcttaacaatgacatcctcacaggaactttccccgaccctttccacaccagatcgcaccattcttatatcaagcaagaatgatgccactctatcagtaagggatgtgaggccggtgaagagagggccgactaaggtccgggctacggtgacgacaaattacgccctttacgtttgcaaagatctggaagactacaagcagggttggcagcttgatcgtggatgggaagatgccactcggacaaagataaacgtgtctcacaacgtgagcgcaaagatcgacgtcgagaattccaaaggggaagaaaagggtgacatggatgccttttttgctggcaaatcatttgtttgcatcatctgcaatgggtcttataagaagctaatcgtcaatacctag

SEQ ID NO: 12104 - protein, 189 aa, Muscodor strobelii
  misc_feature: SGI Peptide ID NO. 563915
  misc_feature (15)..(187): NCBI GI: 256731219 Blast Desc: NECHADRAFT_85242 [Nectria haematococca mpVI 77-13-4]
  misc_feature (48)..(187): NCBI GI: 258563592 Blast Desc: conserved [Uncinocarpus reesii 1704] gi|237908048|gb|EEP82449.1| conserved [Uncinocarpus reesii 1704]
  misc_feature (62)..(187): NCBI GI: 261353440 Blast Desc: pre-mRNA-splicing factor cwc-24 [Verticillium albo-atrum VaMs.102]
  misc_feature (96)..(187): NCBI GI: 226278332 Blast Desc: pre-mRNA-splicing factor cwc24 [Paracoccidioides brasiliensis Pb01]
  misc_feature (92)..(187): NCBI GI: 171676129 Blast Desc: protein product [Podospora anserina] gi|170936130|emb|CAP60790.1| protein product [Podospora anserina]
  misc_feature (53)..(186): NCBI GI: 39970987 Blast Desc: MGG_02960 [Magnaporthe grisea 70-15] gi|149210519|ref|XP_001522634.1| MGCH7_ch7g734 [Magnaporthe grisea 70-15] gi|86196689|gb|EAQ71327.1| MGCH7_ch7g734 grisea
  misc_feature (60)..(187): NCBI GI: 119479765 Blast Desc: CCCH and RING finger protein (Znf183), [Neosartorya fischeri NRRL 181] gi|119408065|gb|EAW18014.1| CCCH and RING finger protein (Znf183), [Neosartorya fischeri NRRL 181]
  misc_feature (92)..(187): NCBI GI: 154305163 Blast Desc: BC1G_08876 [Botryotinia fuckeliana B05.10] gi|150853618|gb|EDN28810.1| BC1G_08876 [Botryotinia fuckeliana B05.10]
  misc_feature (53)..(187): NCBI GI: 225679424 Blast Desc: pre-mRNA-splicing factor cwc24 [Paracoccidioides brasiliensis Pb03]
  misc_feature (60)..(187): NCBI GI: 70998280 Blast Desc: CCCH and RING finger protein (Znf183) [Aspergillus fumigatus Af293] gi|74673091|sp|Q4WUA0.1|CWC24_ASPFU RecName: Full=Pre-mRNA-splicing factor cwc24 gi|66851500|gb|EAL91826.1|
MEFTIKFKKPSGKTDSMKRKPTSFTALLSDADASYSSQNDINPGATHIKRLKTNQSVQGLTMTSSQELSPTLSTPDRTILISSKNDATLSVRDVRPVKRGPTKVRATVTTNYALYVCKDLEDYKQGWQLDRGWEDATRTKINVSHNVSAKIDVENSKGEEKGDMDAFFAGKSFVCIICNGSYKKLIVNT

SEQ ID NO: 12105 - DNA, 443 bp, Muscodor strobelii
  misc_feature: SGI EST ID NO. CUFF.28728.0
  misc_feature: Variant of the nucleotide sequence at SEQ ID NO 12103
cgacgccagctactcgtcccaaaatgacatcaacccaggagcaacgcatatcaagcgactgaaaacaaaccagagtgtacaaggcttaacaatgacatcctcacaggaactttccccgaccctttccacaccagatcgcaccattcttatatcaagcaagaatgatgccactctatcagtaagggatgtgaggccggtgaagagagggccgactaaggtccgggctacggtgacgacaaattacgccctttacgtttgcaaagattacaaacgaaccgcattttgtgactatggagatagctggaagactacaagcagggttggcagcttgatcgtggatgggaagatgccactcggacaaagataaacgtgtctcacaacgtgagcgcaaagatcgacgtcgagaattccaaaggggaagaaaagggtgacatggatgcctt

SEQ ID NO: 12106 - DNA, 1848 bp, Muscodor strobelii
  misc_feature: SGI cDNA ID NO. 563916
  misc_feature: Encodes the peptide sequence at SEQ ID NO 12107
atggagaggcagtcgattttcaccgtggcggctgggcaggcgtcccgtcgctttacgacgtcagacaattggcgttttctgggagaccgaatatacgcccttaagagaggaagtatacatttcatcacagtcgatccgcagttcgacttggaacgtaacgacgaggacgacgatgcagcccgctcggtcaggactgggcgggcctcccgcgtcagtagctttacaacgaggacggcgagctgggactcacgggcgccacaaaatccctttgacgacgctcgtatcataggtcgcgatccgctggttacaaatcccaatcccaatccctttgatgactcgaatgcagtatcggcgaatgatgtacaaacacggaagcctgaggcggaggtgccttatcacaccttctcaaagcgccaaaagtggcatctcatcatcataatcggcgctgcgggcctattctcaggactgtcgtcaaatatttatttcccttcactagatgccatcgctaaggacctgaatgtcagccttagtgcagtctccttgactatcacatcatatttaataattcagggcatctcgcctgtgatatggggctcattttctgacgcactcggtcgacggcccatttatatcgcatcttttgctgtttatataattgcgaatgttgtgctcagtttttctcccaacttcgcagtgctactgattttcagaggactacaagccgccggaagcgcttctactgtgagcattgggaatggcgtaatccaggacgtctctccgcccgctgaaaggggcgcattcattagtttttatcaggccatccggaatttcagcatcgctattggtcctgtattgggcggcgtgcttgctggtgcatttggctttcggtcaatctttatattcttaacaattctttcggctctcacgacgatagccattatcgtatttctgccagaaacgatgcgaagtattgctggcaatggtactattcggctccaaggcatctatcggccacttatcaactatgtgaaaaaggagccagaatacatggtggacccagatgaacccgtttctcggaagataaccttggctaaatttcgaagaccgttcaagcttcttgccgaaaggagcattctcttcaacttgatctttggaggcgtcatctacgctatatggagcatggttacatcaagtagtacgggcttgtttaaacaaaatttcggcttgagcgagcagctcattggcctatctttcctgtcgaacggcattggcacaattgtgggctctacgatcatcggaaaactgctcacacgcgattacctagcagccgaaggagcatataagaggcaccataatttaccattggaccataagcttccagtgagaaacattccagtggacttccctatcgagcaggcacgtttacgccaactgccgtggatcgcatctttattcgtgatctccactgctgcctacggcttctcgttggcattgccaaaccttgtagcgttgcgaggctggattgcggttccattgacgctgcaattttttatcgcggccaccagcaatgccatctttgcgctaaaccagaccctcgtctcagacttggcccccggccagggcgccagcagcaccgctatcaataaccttgtacggtgtagcctaggcgcaataggcgttggcttggtcgacatcatgattgctgctctgggtatcgggccgacattccttggcttagcattcgtggcggtcgtatgcgttcccctagtggtgggaaactggttttgggggatggaatggaggcaaaagaaagctgctggtaaattcacagcaggggagaaggtctga

SEQ ID NO: 12107 - protein, 615 aa, Muscodor strobelii
  misc_feature: SGI Peptide ID NO. 563916
  misc_feature (147)..(560): Pfam Id: PF07690 Pfam Desc: Major Facilitator Superfamily
  misc_feature (147)..(438): Pfam Id: PF07690 Pfam Desc: Major Facilitator Superfamily
  misc_feature (98)..(604): NCBI GI: 255931921 Blast Desc: Pc12g06790 [Penicillium chrysogenum Wisconsin 54-1255] gi|211582136|emb|CAP80306.1| Pc12g06790 [Penicillium chrysogenum Wisconsin 54-1255]
  misc_feature (13)..(421): NCBI GI: 169618665 Blast Desc: SNOG_12526 [Phaeosphaeria nodorum SN15] gi|111059219|gb|EAT80339.1| SNOG_12526 [Phaeosphaeria nodorum SN15]
  misc_feature (106)..(605): NCBI GI: 156064615 Blast Desc: SS1G_00315 [Sclerotinia sclerotiorum 1980] gi|154691177|gb|EDN90915.1| SS1G_00315 [Sclerotinia sclerotiorum 1980]
  misc_feature (108)..(604): NCBI GI: 169772747 Blast Desc: [Aspergillus oryzae RIB40] gi|83768703|dbj|BAE58840.1| protein product [Aspergillus oryzae]
  misc_feature (111)..(602): NCBI GI: 154322963 Blast Desc: BC1G_00824 [Botryotinia fuckeliana B05.10] gi|150848158|gb|EDN23351.1| BC1G_00824 [Botryotinia fuckeliana B05.10]
  misc_feature (131)..(604): NCBI GI: 145253775 Blast Desc: An17g01710 [Aspergillus niger] gi|134083972|emb|CAK43067.1| protein product [Aspergillus niger]
  misc_feature (129)..(601): NCBI GI: 85090908 Blast Desc: NCU09876 [Neurospora crassa OR74A] gi|28920021|gb|EAA29407.1| conserved [Neurospora crassa OR74A]
  misc_feature (111)..(604): NCBI GI: 169765195 Blast Desc: [Aspergillus oryzae RIB40] gi|83764923|dbj|BAE55067.1| protein product [Aspergillus oryzae]
  misc_feature (113)..(606): NCBI GI: 171694568 Blast Desc: protein product [Podospora anserina] gi|170947526|emb|CAP59687.1| protein product [Podospora anserina]
  misc_feature (127)..(613): NCBI GI: 242768643 Blast Desc: florfenicol exporter, [Talaromyces stipitatus ATCC 10500] gi|218724807|gb|EED24224.1| florfenicol exporter, [Talaromyces stipitatus ATCC 10500]
MERQSIFTVAAGQASRRFTTSDNWRFLGDRIYALKRGSIHFITVDPQFDLERNDEDDDAARSVRTGRASRVSSFTTRTASWDSRAPQNPFDDARIIGRDPLVTNPNPNPFDDSNAVSANDVQTRKPEAEVPYHTFSKRQKWHLIIIIGAAGLFSGLSSNIYFPSLDAIAKDLNVSLSAVSLTITSYLIIQGISPVIWGSFSDALGRRPIYIASFAVYIIANVVLSFSPNFAVLLIFRGLQAAGSASTVSIGNGVIQDVSPPAERGAFISFYQAIRNFSIAIGPVLGGVLAGAFGFRSIFIFLTILSALTTIAIIVFLPETMRSIAGNGTIRLQGIYRPLINYVKKEPEYMVDPDEPVSRKITLAKFRRPFKLLAERSILFNLIFGGVIYAIWSMVTSSSTGLFKQNFGLSEQLIGLSFLSNGIGTIVGSTIIGKLLTRDYLAAEGAYKRHHNLPLDHKLPVRNIPVDFPIEQARLRQLPWIASLFVISTAAYGFSLALPNLVALRGWIAVPLTLQFFIAATSNAIFALNQTLVSDLAPGQGASSTAINNLVRCSLGAIGVGLVDIMIAALGIGPTFLGLAFVAVVCVPLVVGNWFWGMEWRQKKAAGKFTAGEKV

SEQ ID NO: 12108 - DNA, 192 bp, Muscodor strobelii
  misc_feature: SGI EST ID NO. CUFF.28744.0
  misc_feature: Variant of the nucleotide sequence at SEQ ID NO 12106
cgcctgtgatatggggctcattttctgacgcactcggtcgacggcccatttatatcgcatcttttgctgtttatataattgcgaatgttgtgctcagtttttctcccaacttcgcagtgctactgattttcagaggactacaagccgccggaagcgcttctactgtgagcattgggaatggcgtaatccagg

SEQ ID NO: 12109 - DNA, 726 bp, Muscodor strobelii
  misc_feature: SGI cDNA ID NO. 563917
  misc_feature: Encodes the peptide sequence at SEQ ID NO 12110
atggttggactacgaaccagccggagggcaccccctccaccacgcctcgaactcgcggtccctcacaatgaggacaacaagcatgcagtcttaagcctagatcagtcttctgattcgcatggtaatgcgttcgccatcttccatcgcactacatccaccacgtaccgcgacacctaccacaacatcatcacctatcgcaatatctaccggaacaccagccgtcacacctaccgccacacctaccgcaacatctatcacaacaccgatcacaacaacgactgcaacacctaccgtaacgccatcctcattacctcctacacccgtaaccgaagtggtaacgccaggacttgtgtccactttgtcacctactacgacccgggatgtagaggccccttcttcgagctctcaaacatcgactgtaacggtgtctccgacggtgactctattcggccctacaattacgagcttctcggtcgttactataacagcgcagaatccaagtctatctacgagatcaagcgcgacggctggggcagcgtcgtcagctccgcaacctacccaagtcggcaaagcagtatcaggtccagggactgccttcatcgccgccctcgggagcattgcgggtctttcagccctgatcacagcgttaatcatcctttatcggagacgaatagcgaagaaagacagagaaaaggtggccatagattcttgatcttttatcgataa

SEQ ID NO: 12110 - protein, 241 aa, Muscodor strobelii
  misc_feature: SGI Peptide ID NO. 563917
MVGLRTSRRAPPPPRLELAVPHNEDNKHAVLSLDQSSDSHGNAFAIFHRTTSTTYRDTYHNIITYRNIYRNTSRHTYRHTYRNIYHNTDHNNDCNTYRNAILITSYTRNRSGNARTCVHFVTYYDPGCRGPFFELSNIDCNGVSDGDSIRPYNYELLGRYYNSAESKSIYEIKRDGWGSVVSSATYPSRQSSIRSRDCLHRRPREHCGSFSPDHSVNHPLSETNSEERQRKGGHRFLIFYR

SEQ ID NO: 12111 - DNA, 951 bp, Muscodor strobelii
  misc_feature: SGI cDNA ID NO. 563918
  misc_feature: Encodes the peptide sequence at SEQ ID NO 12112
atgagccctaaaccagtgctcgaccctcagtatgttgaccttctcgaggggttagccctggcaaagcgaagcagttcgactgatgtctgggcactccgcacctcgaccaatgccgttacacaagccgcgggagacgctcttccctggccagagggtatcgaggtcagcgtgcattcatcaacctctttagacggaagtacgatcgagatccatcgcgttgtcccgctagccgcacagcccaaaggcagtggtactcagcgcgcgttggtcttcgcttttggtggtggattcatagccggcagcgtcagagtgtttaagggtttcatcgcaaccctcgctgagaaaagcagcacacaggtttttgcgactcaataccgcattgcaccagagcacccataccccgcagctgtagaagatgtgtactctactgtcgtctggctgcaggcgaacgcaccgtcatttgacgtcgatcccgctcgcattctgctgttcggccaaagctccggaggaggcatcgctgctggtgcggcgctcatggccagagacaaggaactgcagccagcaatagctggacaatgcttgcactacggagagttagacgatcgtaccacaatggcagagagcgatccaagatggaagtatctgacttggagtgtatcggacaacaaatcagggtggtactactatctagggggtgaggataatgttccatactacgccgcacctgcccgagccacgaacctgactaacttaccaagatcccacgtagacgtaggtggccttgacctttatagggatgaggatacgactctggcggcgagactggcaaagtccgatgtaaggactgagtttcacatgtatcccggagtcccgcatggcttcgacggaatgccatctcggactcgtgatatcatgtgggagaatgaggcacgatgcataaagaaattttga

SEQ ID NO: 12112 - protein, 316 aa, Muscodor strobelii
  misc_feature: SGI Peptide ID NO. 563918
  misc_feature (89)..(296): Pfam Id: PF07859 Pfam Desc: alpha/beta hydrolase fold
  misc_feature (23)..(295): NCBI GI: 119481471 Blast Desc: arylesterase/monoxygenase [Neosartorya fischeri NRRL 181] gi|119408918|gb|EAW18867.1| arylesterase/monoxygenase [Neosartorya fischeri NRRL 181]
  misc_feature (23)..(295): NCBI GI: 71001912 Blast Desc: arylesterase/monoxygenase [Aspergillus fumigatus Af293] gi|66853275|gb|EAL93599.1| arylesterase/monoxygenase [Aspergillus fumigatus Af293] gi|159129694|gb|EDP54808.1| A1163]
  misc_feature (58)..(316): NCBI GI: 110628925 Blast Desc: hormone-sensitive lipase [Magnaporthe grisea]
  misc_feature (58)..(316): NCBI GI: 145601891 Blast Desc: MGG_10755 [Magnaporthe grisea 70-15] gi|145010357|gb|EDJ95013.1| MGG_10755 [Magnaporthe grisea 70-15]
  misc_feature (7)..(316): NCBI GI: 85091131 Blast Desc: NCU09409 [Neurospora crassa OR74A] gi|28920135|gb|EAA29516.1| conserved [Neurospora crassa OR74A]
  misc_feature (7)..(297): NCBI GI: 256724238 Blast Desc: NECHADRAFT_87517 [Nectria haematococca mpVI 77-13-4]
  misc_feature (8)..(295): NCBI GI: 261354448 Blast Desc: alpha/beta hydrolase fold-3 domain-containing protein [Verticillium albo-atrum VaMs.102]
  misc_feature (28)..(316): NCBI GI: 145613782 Blast Desc: MGG_01369 [Magnaporthe grisea 70-15] gi|145020805|gb|EDK04934.1| MGG_01369 [Magnaporthe grisea 70-15]
  misc_feature (28)..(295): NCBI GI: 121715942 Blast Desc: arylesterase/monoxygenase [Aspergillus clavatus NRRL 1] gi|119403737|gb|EAW14154.1| arylesterase/monoxygenase [Aspergillus clavatus NRRL 1]
  misc_feature (48)..(310): NCBI GI: 46115000 Blast Desc: FG03342.1 [Gibberella zeae PH-1]
  misc_feature (81)..(313): SWISSPROT Homolog: EC 3.1.1.3 Triacylglycerol lipase
MSPKPVLDPQYVDLLEGLALAKRSSSTDVWALRTSTNAVTQAAGDALPWPEGIEVSVHSSTSLDGSTIEIHRVVPLAAQPKGSGTQRALVFAFGGGFIAGSVRVFKGFIATLAEKSSTQVFATQYRIAPEHPYPAAVEDVYSTVVWLQANAPSFDVDPARILLFGQSSGGGIAAGAALMARDKELQPAIAGQCLHYGELDDRTTMAESDPRWKYLTWSVSDNKSGWYYYLGGEDNVPYYAAPARATNLTNLPRSHVDVGGLDLYRDEDTTLAARLAKSDVRTEFHMYPGVPHGFDGMPSRTRDIMWENEARCIKKF

SEQ ID NO: 12113 - DNA, 990 bp, Muscodor strobelii
  misc_feature: SGI cDNA ID NO. 563919
  misc_feature: Encodes the peptide sequence at SEQ ID NO 12114
atgatcaacagaagatcgaagcgccaagccagtaagaaggccacaatgctgattaaggaagccgccccggtcgcgagattgaaaatcccgagtgagccagtcgaagctatgactgctgacgatatccttcgaacagcagccaaaacggagctcttcatgccgttggtccgcaacgatcccatccacgtgttcaatgaactgaatgaccaagaaaagaagcgcgtcatgaagaacctgcttctagcatttggaaagttccctgctcgggaggacgaaattcctcccccggcaaatctccagtatttttcggagaacgggtttccaatagccgatagagccttgacacaggccaatactcgtggaactgatcatgacgacgaagctcaaaacagccagaatggagacgagaacgatgaacaggcaagtgggatcaccctccagcacagcgatgacgatagctggatacatggaaaacgtcgctggccgccgaacgtagacatcagcggtctttgtgaccgacccgtgaaaggaaacgcctggggacgggtgagcttaaagcatgatgggtattgcctccgtcattatttcacgacgatatggggcgttttggaagatccagaagagtttgacccgccagcttcgggtgccagaatccggtggactgatacgaaatggtatctcgaggaagaggatgagtatcctggtttgcgagtttacgaagacaagattgggcgaatttcacatgttccaccaaaccgacaagacatatctctgcatcgcatgatatcatcgcctctactacagtatcgaatcatggcaaatttcgcggctccgccttctacagcaaacgatccacataaaggtgcgtggtctacaacctttggaacaaggacgaccccacgtgttacctacatattcttgattcaaaaggcgcttctagagtacagttctgtgggaatgagagggccagcaatgaggctctccagctga

SEQ ID NO: 12114 - protein, 329 aa, Muscodor strobelii
  misc_feature: SGI Peptide ID NO. 563919
MINRRSKRQASKKATMLIKEAAPVARLKIPSEPVEAMTADDILRTAAKTELFMPLVRNDPIHVFNELNDQEKKRVMKNLLLAFGKFPAREDEIPPPANLQYFSENGFPIADRALTQANTRGTDHDDEAQNSQNGDENDEQASGITLQHSDDDSWIHGKRRWPPNVDISGLCDRPVKGNAWGRVSLKHDGYCLRHYFTTIWGVLEDPEEFDPPASGARIRWTDTKWYLEEEDEYPGLRVYEDKIGRISHVPPNRQDISLHRMISSPLLQYRIMANFAAPPSTANDPHKGAWSTTFGTRTTPRVTYIFLIQKALLEYSSVGMRGPAMRLSS

SEQ ID NO: 12115 - DNA, 969 bp, Muscodor strobelii
  misc_feature: SGI cDNA ID NO. 563920
  misc_feature: Encodes the peptide sequence at SEQ ID NO 12116
atgtctcacaaagacagcgccctgtctggcatagtggccattagtttcgcatttgtctcgctcgccgccgcaggaccttgcgatatctttgccgagggtagaaccccttgtgtcgcagcgcatagcacgacgcgggcgctattctcggattacgacggtcctctttatcaagtcacacgctctgatcgtcggactgaaattatcaaccccggagccaagggtgggatagctgatatctacgaccaatctggcaatggtaatgacttgaccgcagctcccgcgggtggagcagccgttggcccaggagtcgacggcagcgaccaactcgcaatcgcttctgcggcacaggtgacgataaacggtaaaaccgtccatggtgtttatatatcgccaggcgtcggatatcggaacgacgcaacgcgcaacatgccaacaggtgacgacgcacaagggatctacgcggtgctggacgggacgcactacaacggtaattgctgcttcgactatggtaatgcggagacgaacaacaacgataacggccccgggcacatgcaagctctctattttgggagtcaaagtctcttcggctcgggcgcgggaagtggaccttgggtcttggctgatatggaagacggaacattttcaggacagtcaagagagagaaatccggacaatccgagtgccacatcccgttttgttacaggtatgataaacggagcgccggattattgggagattttagttggtgatgcgacgcaaggtgagctgacagtgggatatgccggtcctagacctaacgggtatgagctcatgcatcaagagggcgcgataattcttggtatcggaggtgataacagcaatagtggtgagggcacgttctacgaaggcgccataacggacggcgtcccatctgatgacacaagtcggaaagtccaggcagattttgtttctgcgaagtattcggcgtaa

SEQ ID NO: 12116 - protein, 322 aa, Muscodor strobelii
  misc_feature: SGI Peptide ID NO. 563920
  misc_feature (26)..(322): Pfam Id: PF09206 Pfam Desc: Alpha-L-arabinofuranosidase B, catalytic
  misc_feature (79)..(321): Pfam Id: PF09206 Pfam Desc: Alpha-L-arabinofuranosidase B, catalytic
  misc_feature (26)..(78): Pfam Id: PF09206 Pfam Desc: Alpha-L-arabinofuranosidase B, catalytic
  misc_feature (1)..(321): NCBI GI: 67522228 Blast Desc: AN1571.2 [Aspergillus nidulans FGSC A4] gi|3219553|emb|CAA74084.1| alpha-L-arabinofuranosidase [Emericella nidulans] gi|40745122|gb|EAA64278.1| AN1571.2 FGSC ;
  misc_feature (21)..(321): NCBI GI: 212528630 Blast Desc: fungal alpha-L-arabinofuranosidase, [Penicillium marneffei ATCC 18224] gi|210073870|gb|EEA27957.1| fungal alpha-L-arabinofuranosidase, [Penicillium marneffei ATCC 18224]
  misc_feature (10)..(321): NCBI GI: 238490130 Blast Desc: fungal alpha-L-arabinofuranosidase, [Aspergillus flavus NRRL3357] gi|220696715|gb|EED53056.1| fungal alpha-L-arabinofuranosidase, [Aspergillus flavus NRRL3357]
  misc_feature (20)..(321): NCBI GI: 121709492 Blast Desc: alpha-L-arabinofuranosidase B domain protein [Aspergillus clavatus NRRL 1] gi|119400586|gb|EAW11011.1| alpha-L-arabinofuranosidase B domain protein [Aspergillus NRRL 1]
  misc_feature (10)..(321): NCBI GI: 16754881 Blast Desc: alpha-L-arabinofuranosidase B [Aspergillus oryzae]
  misc_feature (9)..(321): NCBI GI: 256728095 Blast Desc: glycoside hydrolase family 54 [Nectria haematococca mpVI 77-13-4]
  misc_feature (10)..(321): NCBI GI: 169772253 Blast Desc: [Aspergillus oryzae RIB40] gi|83768456|dbj|BAE58593.1| protein product [Aspergillus oryzae]
  misc_feature (6)..(321): NCBI GI: 11991221 Blast Desc: AF306764_1 alpha-L-arabinofuranosidase [Cochliobolus carbonum]
  misc_feature (11)..(321): NCBI GI: 3023257 Blast Desc: ABF1_TRIRE RecName: Full=Alpha-N-arabinofuranosidase; Short=Arabinosidase; Flags: Precursor gi|1580814|emb|CAA93243.1| alpha-L-arabinofuranosidase [Hypocrea jecorina]
  misc_feature (11)..(321): NCBI GI: 1351443 Blast Desc: XYL1_TRIKO RecName: Full=Arabinofuranosidase/B-xylosidase; Includes: RecName: Full=Alpha-N-arabinofuranosidase; Short=Arabinosidase; Includes:
  misc_feature (11)..(321): SWISSPROT Homolog: EC 3.2.1.55 Alpha-N-arabinofuranosidase
MSHKDSALSGIVAISFAFVSLAAAGPCDIFAEGRTPCVAAHSTTRALFSDYDGPLYQVTRSDRRTEIINPGAKGGIADIYDQSGNGNDLTAAPAGGAAVGPGVDGSDQLAIASAAQVTINGKTVHGVYISPGVGYRNDATRNMPTGDDAQGIYAVLDGTHYNGNCCFDYGNAETNNNDNGPGHMQALYFGSQSLFGSGAGSGPWVLADMEDGTFSGQSRERNPDNPSATSRFVTGMINGAPDYWEILVGDATQGELTVGYAGPRPNGYELMHQEGAIILGIGGDNSNSGEGTFYEGAITDGVPSDDTSRKVQADFVSAKYSA

SEQ ID NO: 12117 - DNA, 902 bp, Muscodor strobelii
  misc_feature: SGI EST ID NO. CUFF.28765.0
  misc_feature: Variant of the nucleotide sequence at SEQ ID NO 12115
aaaatttcgacaaacaagatttggaactgattaatttgcaagatctacgaccaatctggcaatggtaatgacttgaccgcagctcccgcgggtggagcagccgttggcccaggagtcgacggcagcgaccaactcgcaatcgcttctgcggcacaggtgacgataaacggtaaaaccgtccatggtgtttatatatcgccaggcgtcggatatcggaacgacgcaacgcgcaacatgccaacaggtgacgacgcacaagggatctacgcggtgctggacgggacgcactacaacggtaattgctgcttcgactatggtaatgcggagacgaacaacaacgataacggccccgggcacatgcaagctctctattttgggagtcaaagtctcttcggctcgggcgcgggaagtggaccttgggtcttggctgatatggaagacggaacattttcaggacagtcaagagagagaaatccggacaatccgagtgccacatcccgttttgttacaggtatgataaacggagcgccggattattgggagattttagttggtgatgcgacgcaaggtgagctgacagtgggatatgccggtcctagacctaacgggtatgagctcatgcatcaagagggcgcgataattcttggtatcggaggtgataacagcaatagtggtgagggcacgttctacgaaggcgccataacggacggcgtcccatctgatgacacaagtcggaaagtccaggcagattttgtttctgcgaagtattcggcgtaatctgtctaggaggtatgcttatatatgattcgtttggcaggttggttaatattgcgggttgggatttattgatacaatacaacttttacgctacaacaggaaacaagattatggaatgggatgag

SEQ ID NO: 12118 - DNA, 639 bp, Muscodor strobelii
  misc_feature: SGI cDNA ID NO. 563921
  misc_feature: Encodes the peptide sequence at SEQ ID NO 12119
atgttttggttcgctatccttgccttcgcttcgcttgttgcgagtgctgccatcgacgtgcttccaaatgggatgtccatccagaacagcctcccagacaactacacaatctcagacatcacttggaccatgcccatcgttgaaggtggccagaactacactttcaagggcactgttcaggaggtcttcactcaagtcaatgagctccgagtccagcagaatcttcagccattgcctgatcctctcgcagattccatcactaagtccatcacacgcgatgtcgtcagtggccgcaactttgacaagaccatctgcaaagtcggtctgaaggactatgctcccttagtccgaatcgagcagggcattgattatctcaagaaactgaagggatcctgcacgaacggtgccgggcctggcaattgcggccgtatttcctgcagctggacttccgctatctactggtgcaacgacaataaccatcccgtcacgtatgactgctcgcattttgctgagtacgccgagtatgttgtcgatgattgtcactacaccggattcaacggtggcaagactatttacgtctggggtcaggcttttgacactgagaacttcaatgttctggtcggcaaggataattgctaa

SEQ ID NO: 12119 - protein, 212 aa, Muscodor strobelii
  misc_feature: SGI Peptide ID NO. 563921
  misc_feature (5)..(212): NCBI GI: 256723698 Blast Desc: NECHADRAFT_86628 [Nectria haematococca mpVI 77-13-4]
  misc_feature (7)..(211): NCBI GI: 171680404 Blast Desc: protein product [Podospora anserina] gi|170939829|emb|CAP65054.1| protein product [Podospora anserina]
  misc_feature (6)..(212): NCBI GI: 121717032 Blast Desc: conserved [Aspergillus clavatus NRRL 1] gi|119404141|gb|EAW14558.1| conserved [Aspergillus clavatus NRRL 1]
  misc_feature (24)..(212): NCBI GI: 170940149 Blast Desc: protein product [Podospora anserina]
  misc_feature (4)..(212): NCBI GI: 238497574 Blast Desc: conserved [Aspergillus flavus NRRL3357] gi|220693296|gb|EED49641.1| conserved [Aspergillus flavus NRRL3357]
  misc_feature (30)..(212): NCBI GI: 238839568 Blast Desc: [Microsporum canis CBS 113480]
  misc_feature (35)..(212): NCBI GI: 85111034 Blast Desc: NCU09372 [Neurospora crassa OR74A] gi|28925468|gb|EAA34507.1| [Neurospora crassa OR74A]
  misc_feature (4)..(209): NCBI GI: 171679114 Blast Desc: protein product [Podospora anserina] gi|170937628|emb|CAP62287.1| protein product [Podospora anserina]
  misc_feature (33)..(212): NCBI GI: 238506391 Blast Desc: conserved [Aspergillus flavus NRRL3357] gi|220689110|gb|EED45461.1| conserved [Aspergillus flavus NRRL3357]
  misc_feature (8)..(212): NCBI GI: 46133985 Blast Desc: FG09132.1 [Gibberella zeae PH-1]
MFWFAILAFASLVASAAIDVLPNGMSIQNSLPDNYTISDITWTMPIVEGGQNYTFKGTVQEVFTQVNELRVQQNLQPLPDPLADSITKSITRDVVSGRNFDKTICKVGLKDYAPLVRIEQGIDYLKKLKGSCTNGAGPGNCGRISCSWTSAIYWCNDNNHPVTYDCSHFAEYAEYVVDDCHYTGFNGGKTIYVWGQAFDTENFNVLVGKDNC

SEQ ID NO: 12120 - DNA, 330 bp, Muscodor strobelii
  misc_feature: SGI cDNA ID NO. 563922
  misc_feature: Encodes the peptide sequence at SEQ ID NO 12121
atgactccggaattgtggttgaggaacccttcggtatgtcctattctccccatgatgaaatggtcaactgaagacgacgtaattgaacgcgctaataagacggaatatggcttgggtgcctccgtgtggtccagagatacaaaacaggctgatcgaatggccaatcagctgcgagcagggaacatatggatcaactgccacggtgagctaaatccaaaagtagggtacacaggtcacaagagcagtggatatggcgtcgaactcggagtggaaggactgaaagcctattgtgcacttcagagtatgtacaagagacctgggagattgtga

SEQ ID NO: 12121 - protein, 109 aa, Muscodor strobelii
  misc_feature: SGI Peptide ID NO. 563922
  misc_feature (14)..(102): Pfam Id: PF00171 Pfam Desc: Aldehyde dehydrogenase family
  misc_feature (14)..(105): NCBI GI: 261354525 Blast Desc: betaine aldehyde dehydrogenase [Verticillium albo-atrum VaMs.102]
  misc_feature (14)..(106): NCBI GI: 119487483 Blast Desc: aldehyde dehydrogenase [Neosartorya fischeri NRRL 181] gi|119410691|gb|EAW20637.1| aldehyde dehydrogenase [Neosartorya fischeri NRRL 181]
  misc_feature (7)..(103): NCBI GI: 121714751 Blast Desc: aldehyde dehydrogenase [Aspergillus clavatus NRRL 1] gi|119403140|gb|EAW13560.1| aldehyde dehydrogenase [Aspergillus clavatus NRRL 1]
  misc_feature (14)..(103): NCBI GI: 145249146 Blast Desc: An14g02870 [Aspergillus niger] gi|134081589|emb|CAK41998.1| protein product [Aspergillus niger]
  misc_feature (14)..(103): NCBI GI: 238844608 Blast Desc: aldehyde dehydrogenase [Microsporum canis CBS 113480]
  misc_feature (14)..(106): NCBI GI: 70981881 Blast Desc: aldehyde dehydrogenase [Aspergillus fumigatus Af293] gi|66844092|gb|EAL84431.1| aldehyde dehydrogenase, [Aspergillus fumigatus Af293] gi|159122305|gb|EDP47427.1| aldehyde fumigatus
  misc_feature (14)..(103): NCBI GI: 169768486 Blast Desc: [Aspergillus oryzae RIB40] gi|238497792|ref|XP_002380131.1| aldehyde dehydrogenase, [Aspergillus flavus NRRL3357] gi|83766571|dbj|BAE56711.1| protein
  misc_feature (14)..(103): NCBI GI: 212540292 Blast Desc: aldehyde dehydrogenase, [Penicillium marneffei ATCC 18224] gi|210067600|gb|EEA21692.1| aldehyde dehydrogenase, [Penicillium marneffei ATCC 18224]
  misc_feature (7)..(103): NCBI GI: 255933588 Blast Desc: Pc12g13660 [Penicillium chrysogenum Wisconsin 54-1255] gi|211582792|emb|CAP80993.1| Pc12g13660 [Penicillium chrysogenum Wisconsin 54-1255]
  misc_feature (14)..(103): NCBI GI: 46110949 Blast Desc: FG02356.1 [Gibberella zeae PH-1]
  misc_feature (14)..(103): SWISSPROT Homolog: EC 1.2.1.3 Aldehyde dehydrogenase (NAD(+))
  misc_feature: Useful for introducing or modulating the production of volatile compounds
  misc_feature: Useful for fungicidal and/or biocontrol applications
MTPELWLRNPSVCPILPMMKWSTEDDVIERANKTEYGLGASVWSRDTKQADRMANQLRAGNIWINCHGELNPKVGYTGHKSSGYGVELGVEGLKAYCALQSMYKRPGRL

SEQ ID NO: 12122 - DNA, 543 bp, Muscodor strobelii
  misc_feature: SGI cDNA ID NO. 563923
  misc_feature: Encodes the peptide sequence at SEQ ID NO 12123
atgacatcctcaaacatgacaacagggctgaatttcgatgagttcttcaacgtgatagatgggaagcctgtgccatctatatcggggaaaacttaccatactgaaaatccttcaacgctggagacccttcccgaggtcccattgagtacactgcaagatgtcaaccaggccatcgccgcggcgaaacgagctacccgtccttgggcctcggtacattggtctacgagaaaggctaaactcgaagattttgccacggctctcgaaggtttaatggaagacttcgtgaccatgttagttaaggagaatggcaaacccaaacactgggcagaggatgaggtcaaacaatgtgttagatgggttcatgagacctgtattttgtctctgcccgattgcgtgattgaggatactgccgaatgctgtatcgtggagcgcttcgtgccactcggagtgtcggtcggtatagtgccgtggaatttccctctaatgctaacgttcttcaaactaccggcagcattattgacgggaaacgttttcattttttga

SEQ ID NO: 12123 - protein, 180 aa, Muscodor strobelii
  misc_feature: SGI Peptide ID NO. 563923
  misc_feature (24)..(180): Pfam Id: PF00171 Pfam Desc: Aldehyde dehydrogenase family
  misc_feature (10)..(180): NCBI GI: 46140055 Blast Desc: FG11542.1 [Gibberella zeae PH-1]
  misc_feature (3)..(179): NCBI GI: 46110677 Blast Desc: FG02220.1 [Gibberella zeae PH-1]
  misc_feature (10)..(180): NCBI GI: 256728282 Blast Desc: NECHADRAFT_54099 [Nectria haematococca mpVI 77-13-4]
  misc_feature (2)..(179): NCBI GI: 256724863 Blast Desc: NECHADRAFT_58675 [Nectria haematococca mpVI 77-13-4]
  misc_feature (6)..(179): NCBI GI: 154282809 Blast Desc: conserved [Ajellomyces capsulatus NAm1] gi|150410380|gb|EDN05768.1| conserved [Ajellomyces capsulatus NAm1]
  misc_feature (4)..(179): NCBI GI: 119483928 Blast Desc: aldehyde dehydrogenase [Neosartorya fischeri NRRL 181] gi|119410023|gb|EAW19970.1| aldehyde dehydrogenase [Neosartorya fischeri NRRL 181]
  misc_feature (6)..(180): NCBI GI: 226278777 Blast Desc: betaine aldehyde dehydrogenase [Paracoccidioides brasiliensis Pb01]
  misc_feature (15)..(180): NCBI GI: 67904422 Blast Desc: AN9198.2 [Aspergillus nidulans FGSC A4] gi|40742299|gb|EAA61489.1| AN9198.2 [Aspergillus nidulans FGSC A4] gi|259485373|tpe|CBF82342.1| TPA: conserved [Aspergillus FGSC
  misc_feature (10)..(179): NCBI GI: 212534176 Blast Desc: aldehyde dehydrogenase, [Penicillium marneffei ATCC 18224] gi|210069643|gb|EEA23733.1| aldehyde dehydrogenase, [Penicillium marneffei ATCC 18224]
  misc_feature (10)..(179): NCBI GI: 115401882 Blast Desc: conserved [Aspergillus terreus NIH2624] gi|114190470|gb|EAU32170.1| conserved [Aspergillus terreus NIH2624]
  misc_feature (17)..(180): SWISSPROT Homolog: EC 1.2.1.27 Methylmalonate-semialdehyde dehydrogenase (acylating)
  misc_feature (17)..(180): SWISSPROT Homolog: EC 1.2.1.18 Malonate-semialdehyde dehydrogenase (acetylating)
  misc_feature: Useful for introducing or modulating the production of volatile compounds
  misc_feature: Useful for fungicidal and/or biocontrol applications
MTSSNMTTGLNFDEFFNVIDGKPVPSISGKTYHTENPSTLETLPEVPLSTLQDVNQAIAAAKRATRPWASVHWSTRKAKLEDFATALEGLMEDFVTMLVKENGKPKHWAEDEVKQCVRWVHETCILSLPDCVIEDTAECCIVERFVPLGVSVGIVPWNFPLMLTFFKLPAALLTGNVFIF

SEQ ID NO: 12124 - DNA, 464 bp, Muscodor strobelii
  misc_feature: SGI EST ID NO. CUFF.28792.0
  misc_feature: Variant of the nucleotide sequence at SEQ ID NO 12122
ctcacgttttctgcgtacgactgctttgacctccagcatcaacatgacatcctcaaacatgacaacagggctgaatttcgatgagttcttcaacgtgatagatgggaagcctgtgccatctatatcggggaaaacttaccatactgaaaatccttcaacgctggagacccttcccgaggtcccattgagtacactgcaagatgtcaaccaggccatcgccgcggcgaaacgagctacccgtccttgggcctcggtacattggtctacgagaaaggctaaactcgaagattttgccacggctctcgaaggtttaatggaagacttcgtgaccatgttagttaaggagaatggcaaacccaaacactgggcagaggatgaggtcaaacaatgtgttagatgggttcatgagacctgtattttgtctctgcccgattgcgtgattgaggatactgccgaatgctgta

SEQ ID NO: 12125 - DNA, 675 bp, Muscodor strobelii
  misc_feature: SGI cDNA ID NO. 563924
  misc_feature: Encodes the peptide sequence at SEQ ID NO 12126
atggagactcagcgtacaaaccctactgttagtgtcttcaatggcgcatgcgttgggaggcaactcacccaaccagaccgttcctttgctttggacattacgctggatcttcaaaaaggacgccatgtctttaaccgtctaccacctactcattttcatatccaagaagaatatattcaagttctcagtgggaaactagtattggaactggaagaaaagaaggtcattttgacctcagatgatggagtgcgtacaataccaccctacacaaatcatcggtcatacccaatcccatatgacgaatcattggagcatattgtacgattccttctctctggcgagaagaccgcgaacgtctttgagctcagtccgattttcttcgaaaactggtacaaataccaagacgaaattgttaccaatggcatcgacccctcgatcattcaaatcttcagtacatttgacgcaggtggtccgtacttgtcatttccatcatgggttccattccgtcaaattgtctcgcgtgcagcgggcgtcgtgattggtcgatggataggcagttttcttggctaccagcctttttataaggagcggacaactgactgggtcctcgcttgtgagaagatggagtcgtctgttttcctccgacgattctctgatcgggcgaaattggactag

SEQ ID NO: 12126 - protein, 224 aa, Muscodor strobelii
  misc_feature: SGI Peptide ID NO. 563924
  misc_feature (10)..(224): NCBI GI: 46138199 Blast Desc: FG10614.1 [Gibberella zeae PH-1]
  misc_feature (5)..(220): NCBI GI: 242821297 Blast Desc: conserved [Talaromyces stipitatus ATCC 10500] gi|218712572|gb|EED11997.1| conserved [Talaromyces stipitatus ATCC 10500]
  misc_feature (9)..(222): NCBI GI: 116201113 Blast Desc: CHGG_08441 [Chaetomium globosum CBS 148.51] gi|88176959|gb|EAQ84427.1| CHGG_08441 [Chaetomium globosum CBS 148.51]
  misc_feature (10)..(221): NCBI GI: 145256060 Blast Desc: An10g00180 [Aspergillus niger CBS 513.88] gi|134078581|emb|CAK49109.1| protein product [Aspergillus niger]
  misc_feature (10)..(219): NCBI GI: 255939374 Blast Desc: Pc16g00330 [Penicillium chrysogenum Wisconsin 54-1255] gi|211585079|emb|CAP92703.1| Pc16g00330 [Penicillium chrysogenum Wisconsin 54-1255]
  misc_feature (6)..(221): NCBI GI: 238502251 Blast Desc: conserved [Aspergillus flavus NRRL3357] gi|220691169|gb|EED47517.1| conserved [Aspergillus flavus NRRL3357]
  misc_feature (48)..(219): NCBI GI: 238491836 Blast Desc: conserved [Aspergillus flavus NRRL3357] gi|220697568|gb|EED53909.1| conserved [Aspergillus flavus NRRL3357]
  misc_feature (48)..(219): NCBI GI: 159124821 Blast Desc: conserved [Aspergillus fumigatus A1163]
  misc_feature (48)..(217): NCBI GI: 115399716 Blast Desc: [Aspergillus terreus NIH2624] gi|114191120|gb|EAU32820.1| [Aspergillus terreus NIH2624]
  misc_feature (52)..(221): NCBI GI: 121710952 Blast Desc: conserved [Aspergillus clavatus NRRL 1] gi|119401242|gb|EAW11666.1| conserved [Aspergillus clavatus NRRL 1]
METQRTNPTVSVFNGACVGRQLTQPDRSFALDITLDLQKGRHVFNRLPPTHFHIQEEYIQVLSGKLVLELEEKKVILTSDDGVRTIPPYTNHRSYPIPYDESLEHIVRFLLSGEKTANVFELSPIFFENWYKYQDEIVTNGIDPSIIQIFSTFDAGGPYLSFPSWVPFRQIVSRAAGVVIGRWIGSFLGYQPFYKERTTDWVLACEKMESSVFLRRFSDRAKLD

SEQ ID NO: 12127 - DNA, 597 bp, Muscodor strobelii
  misc_feature: SGI cDNA ID NO. 563925
  misc_feature: Encodes the peptide sequence at SEQ ID NO 12128
atgggtgacatctctgagctcacaaagcctcatccttatggaaggaatgggatgcgacaatggttcctcgagcaatccgcccgacacaactcagcacttgtccaaatatttctggggccattcgcgcggcctgctgtgctcttatcggactaccgcgaagtgaatgatatcctgactcagcgcgatgctgacttcaatcgcggtaaaaaagtagatgtcttcaaaggacttctgccccatgccttcccagcgatggagtcatatgatcctgattttaaaccgactaggagcttgatgaaggacctcatggcgtcggcattcttgagaaaggcaagcattcaggaaaatagaccgagttacctttcgaacatgactcacgtgtccaaggtgtcctctcccgagatttacgatgccactagtcgtttgattgaactatggtcgatcaaattagcactagcacaaggacgtgctttcgacgttgtcagcgacatcagctacttctcatttgattctatcctgagctctgctatcggattgaccgatattggtggtgatcttgatgctcagacaacgcatctacgttcattggctcattga

SEQ ID NO: 12128 - protein, 198 aa, Muscodor strobelii
  misc_feature: SGI Peptide ID NO. 563925
  misc_feature (2)..(193): NCBI GI: 46138191 Blast Desc: FG10610.1 [Gibberella zeae PH-1]
  misc_feature (1)..(193): NCBI GI: 46138229 Blast Desc: FG10629.1 [Gibberella zeae PH-1]
  misc_feature (1)..(195): NCBI GI: 46116036 Blast Desc: FG03860.1 [Gibberella zeae PH-1]
  misc_feature (21)..(179): NCBI GI: 256730337 Blast Desc: NECHADRAFT_45102 [Nectria haematococca mpVI 77-13-4]
  misc_feature (19)..(179): NCBI GI: 256724036 Blast Desc: NECHADRAFT_51378 [Nectria haematococca mpVI 77-13-4]
  misc_feature (4)..(178): NCBI GI: 115390260 Blast Desc: [Aspergillus terreus NIH2624] gi|114195031|gb|EAU36731.1| [Aspergillus terreus NIH2624]
  misc_feature (19)..(195): NCBI GI: 39951421 Blast Desc: MGG_01353 [Magnaporthe grisea 70-15] gi|145020823|gb|EDK04952.1| MGG_01353 [Magnaporthe grisea 70-15]
  misc_feature (19)..(179): NCBI GI: 261354740 Blast Desc: cytochrome P450 [Verticillium albo-atrum VaMs.102]
  misc_feature (2)..(178): NCBI GI: 169610165 Blast Desc: SNOG_08178 [Phaeosphaeria nodorum SN15] gi|111063334|gb|EAT84454.1| SNOG_08178 [Phaeosphaeria nodorum SN15]
  misc_feature (1)..(178): NCBI GI: 170940310 Blast Desc: protein product [Podospora anserina]
MGDISELTKPHPYGRNGMRQWFLEQSARHNSALVQIFLGPFARPAVLLSDYREVNDILTQRDADFNRGKKVDVFKGLLPHAFPAMESYDPDFKPTRSLMKDLMASAFLRKASIQENRPSYLSNMTHVSKVSSPEIYDATSRLIELWSIKLALAQGRAFDVVSDISYFSFDSILSSAIGLTDIGGDLDAQTTHLRSLAH

SEQ ID NO: 12129 - DNA, 255 bp, Muscodor strobelii
  misc_feature: SGI EST ID NO. CUFF.28806.0
  misc_feature: Variant of the nucleotide sequence at SEQ ID NO 12127
ttggtggtgatcttgatgctcagacaacgcatctacgttcattggctcattgatcatcagtcagcttggaagataatcaagaatcagtcactttccctatcataaaagtttcagctgaactacaggcactgctgacaaatgaacagagccttttgaaatgcttctactttccttggccacggctttatcacctttttgatagctttaaaccatgtgttcgaagcgctcgtcggaccttgaggactcatatcgccg

SEQ ID NO: 12130 - DNA, 690 bp, Muscodor strobelii
  misc_feature: SGI cDNA ID NO. 563926
  misc_feature: Encodes the peptide sequence at SEQ ID NO 12131
atggaggtgtggtccaatccggctctgcacggcgtcaaaagcctcgaggccacgatgacgaagctcgctatcagcgacaaacaaacaatcatcatctccaagtccgaactgctagagtttccgtcctttcagttgcttcgcgcagagctccggctcatgatttggcaatattcactcacagaggagcttgagatcgactgggatagtcgtttttgcgcacgtaaagtgtatgacttcggcctccccgtgtaccgtgttccttggcctgggccattgcatgacttatataacgcctttgttaatttccttcgattggagaaggagaggagtggagcacccccatcagatctttctggacacagcgaggacgccaataacgtcaatgccggctcagacgtctacttcgacatgtttcgatggcttactacaaggctcatcgacatgattgaggtgcgcggagccaaggcgggtgtcatctggatcagtcccgcccacgatcagttcgttctgactggggagctccacggaggagctcggaataaggaacacagagaggcagtcagcgccctcgaacacttctggttcgaagccgccacgaagatgagcaaggaattggacacaagagcatctccgctctgccgattccaatggcaccatattgccgtgcgcattacaccatacgccctttga

SEQ ID NO: 12131 - protein, 229 aa, Muscodor strobelii
  misc_feature: SGI Peptide ID NO. 563926
MEVWSNPALHGVKSLEATMTKLAISDKQTIIISKSELLEFPSFQLLRAELRLMIWQYSLTEELEIDWDSRFCARKVYDFGLPVYRVPWPGPLHDLYNAFVNFLRLEKERSGAPPSDLSGHSEDANNVNAGSDVYFDMFRWLTTRLIDMIEVRGAKAGVIWISPAHDQFVLTGELHGGARNKEHREAVSALEHFWFEAATKMSKELDTRASPLCRFQWHHIAVRITPYAL

SEQ ID NO: 12132 - DNA, 1041 bp, Muscodor strobelii
  misc_feature: SGI cDNA ID NO. 563927
  misc_feature: Encodes the peptide sequence at SEQ ID NO 12133
atggcgggattcgctaattttcaagccttcccgaaggagctacgtttagagatttgggaacatgccctcgcagaagagacttcttccaagcgtttggtggtcctctacagctttcgagtcattccactgaaaaacctctgcagtgctctgctgtctgtcaacagagagagtcgagaatgtgcactaaaggtatacagcaccaggcttgaggtttaccaattgccagtccctgcctcatcggtggcgctacagagacgacttgtggatcgcactatcagtggtttgcgattcacggctcgcgatgtggataattatattgtgaccaacactaaagacaccatcaacaacatcgaaaatcgaggaacaagtgttggaaccgtctacgtcagtacccgatgcgatcggttcgtcatcaccaccgtaccatgtcagcgatggatggaatcttggcatataggcagagatgatgacaagttactcatccctttctacatcaacgcactccatcaaatcacaaataccgaaacacagtctggagaacggtcatgggaccagatcacttctaagcttgagacatcaacgttacagaccatccgaactgtggttctggctgaggatcgtgcccaatattgttacgagtttttgtatacgcctagcgatgatttgtacacttctattgataccagcttgtgcaagcccagcaggcagcgtggagttacaagccttgcagactacctgggccggcgagaacctcacaagatgactttggccgatgcaagcagactctggcgaacggaattctttccgagtctcaagttctgggatcacctatggtttcactgcgaccctacgcgttacactgtaaagttcgcgccatcgagcaatgggcagttggatattcgacgatgggacgttgtaaatgatgcttacgacgagtattttcctgagcatacccaattctttcaagacgcccgagctcttcaagagatctgctctcactatgaagagatgagggcaagattcccaagctggtataggtga

SEQ ID NO: 12133 - protein, 346 aa, Muscodor strobelii
  misc_feature: SGI Peptide ID NO. 563927
MAGFANFQAFPKELRLEIWEHALAEETSSKRLVVLYSFRVIPLKNLCSALLSVNRESRECALKVYSTRLEVYQLPVPASSVALQRRLVDRTISGLRFTARDVDNYIVTNTKDTINNIENRGTSVGTVYVSTRCDRFVITTVPCQRWMESWHIGRDDDKLLIPFYINALHQITNTETQSGERSWDQITSKLETSTLQTIRTVVLAEDRAQYCYEFLYTPSDDLYTSIDTSLCKPSRQRGVTSLADYLGRREPHKMTLADASRLWRTEFFPSLKFWDHLWFHCDPTRYTVKFAPSSNGQLDIRRWDVVNDAYDEYFPEHTQFFQDARALQEICSHYEEMRARFPSWYR

SEQ ID NO: 12134 - DNA, 1548 bp, Muscodor strobelii
  misc_feature: SGI EST ID NO. CUFF.28815.0
  misc_feature: Variant of the nucleotide sequence at SEQ ID NO 12132
gtttgaataagcagccttgtaatacggaccaggcagcattgacctttcatgccatcattcgtgtccctcctatcggtggccttcccctcacatcaccatcactcgcagccttcaatctttacatgtcccatgagaaggacccgttagtctcagatacggcaaccaatatttgactaaaatctcgttcaaaatcaactgaactcatgtcaacatggcgggattcgctaattttcaagccttcccgaaggagctacgtttagagatttgggaacatgccctcgcagaagagacttcttccaagcgtttggtggtcctctacagctttcgagtcattccactgaaaaacctctgcagtgctctgctgtctgtcaacagagagagtcgagaatgtgcactaaaggtatacagcaccaggcttgaggtttaccaattgccagtccctgcctcatcggtggcgctacagagacgacttgtggatcgcactatcagtggtttgcgattcacggctcgcgatgtggataattatattgtgaccaacactaaagacaccatcaacaacatcgaaaatcgaggaacaagtgttggaaccgtctacgtcagtacccgatgcgatcggttcgtcatcaccaccgtaccatgtcagcgatggatggaatcttggcatataggcagagatgatgacaagttactcatccctttctacatcaacgcactccatcaaatcacaaataccgaaacacagtctggagaacggtcatgggaccagatcacttctaagcttgagacatcaacgttacagaccatccgaactgtggttctggctgaggatcgtgcccaatattgttacgagtttttgtatacgcctagcgatgatttgtacacttctattgataccagcttgtgcaagcccagcaggcagcgtggagttacaagccttgcagactacctgggccggcgagaacctcacaagatgactttggccgatgcaagcagactctggcgaacggaattctttccgagtctcaagttctgggatcacctatggtttcactgcgaccctacgcgttacactgtaaagttcgcgccatcgagcaatgggcagttggatattcgacgatgggacgttgtaaatgatgcttacgacgagtattttcctgagcatacccaattctttcaagacgcccgagctcttcaagagatctgctctcactatgaagagatgagggcaagattcccaagctggtataggtgaagtgagaaactaatgaagtgtgtatttctctaactatcttggcatcgtgagcgtgtcccttcgaagcactgactttctagaaattgctaaccttccaacttcagctgtgcgatggctcttgctctcggacgggggcgagaaatctaatttcgcagattgtcgatgcataagtggttcgggtccctgggctgagatgatgaatataacaatgaacgactcgtcaaagattggtcaacggatgtacgcagttgagtcttgacctttgcctaaatatataccgtacaattacatctcgc

SEQ ID NO: 12135 - DNA, 1050 bp, Muscodor strobelii
  misc_feature: SGI cDNA ID NO. 563928
  misc_feature: Encodes the peptide sequence at SEQ ID NO 12136
atgtcgacccttactccgtccggcaattctttctcctctggcccagacatcaactcagagcctgacatgactgccgtactactcgagttcggtcctttctctacagagccaagtatcgctcccaatgaagaggcacgattcactctcttcaacaagctcccgtcggagttaagactcgtcaatgcagagagccgagcctgtgcgcttgctgtctacgataccaagatcgcggtctatcgtgtcccctcgccagagccggaggaggacctcgtagacctgtacccgctttggctggaacatcaacaagcgcttgagactatagccgatgatccggacgacgagatggacggagccaatgactccgatgactccaacgacgaggctgatgatggtcaagaccttgaagaattggataatacatctcctattctacataggtcaatggaagatttcatggagaaccctaataccgatccagcagattgggctacccttgccgtcctcagtggattaagtggaatgcgagagcgcgacttttccgattgggcaatgttcgaatgggatatacatcgcgatgtaagggacatcgagacattagggcgagtctcaggaactgtccgtatctccaccaaacacgatcgattcctaatagcgccgaaagataactacggtccgcatgcacctacttggcagcacacacaggctagcgatatgctgcaaccgttttgggccgaggctgcggttagattccgagaagtgccacctaccaacaagcaactgtcatggaaacacatcagttcaagactcagcgcgacggaccgccaaagtattgagacggtcatacttgccgagaacctgaatagttgttgtcgagcgaatgatgacctcgacttgtataatggatgggaaaatgaccgagaatacgatggatacagcgcaccgttttgtttcaccctgaacaacgcgaagttccggtggaacgtcaattgcttctcaggactcaagaactggtatcacatatggtaccgcaacggtatgcaaagtttctag

SEQ ID NO: 12136 - protein, 349 aa, Muscodor strobelii
  misc_feature: SGI Peptide ID NO. 563928
MSTLTPSGNSFSSGPDINSEPDMTAVLLEFGPFSTEPSIAPNEEARFTLFNKLPSELRLVNAESRACALAVYDTKIAVYRVPSPEPEEDLVDLYPLWLEHQQALETIADDPDDEMDGANDSDDSNDEADDGQDLEELDNTSPILHRSMEDFMENPNTDPADWATLAVLSGLSGMRERDFSDWAMFEWDIHRDVRDIETLGRVSGTVRISTKHDRFLIAPKDNYGPHAPTWQHTQASDMLQPFWAEAAVRFREVPPTNKQLSWKHISSRLSATDRQSIETVILAENLNSCCRANDDLDLYNGWENDREYDGYSAPFCFTLNNAKFRWNVNCFSGLKNWYHIWYRNGMQSF

SEQ ID NO: 12137 - DNA, 852 bp, Muscodor strobelii
  misc_feature: SGI cDNA ID NO. 563929
  misc_feature: Encodes the peptide sequence at SEQ ID NO 12138
atgtctcgcctcgttgacagactcccagagccgacgcaagtccttgacaagaaagtgattgtgctttctcgaagccgcgttgggaccttctcgctataccaagcactgaagatgcttgggtataagccatatcacatgtacgaagtggttacttcaggagcattgcatatgaacctattcgaagaggcactgagatgcaagtacatgaacggcggcaagccatatggcaaagccgagtttgataaatggcttgcgaactacgatgtcctgaagacggtggtcgagatcccgcaattcttcacggaagagttcatccagttctacccagacgcaaagttcatcctcacggagcgagacatcgactcttggtggacgtctatgctgaacactgccggtccaatgatgaaagctacacggaccttccctctcaccgcagtagctaggatcgatagctttactaaggctttctgttcgctgcatgttgtacttgagtcagtgtgcttcaacggtgagacgatcgagtcgaaggatggtgcagagcattcgaagagggatacaattgagataagtaagaaagcgaaagagctcgtacctgcagatcggttgctggtatgcaggctggaagacggctttggatgggagcagatctgtccgttcctaggacatgagatccctaaggacagatatccaaaaggcaatgcgccggccgagttccagaagatgggcaaagaagtattgatgcccggcatgctcaaattcggtgcagttgtattgtcagctatcgtgattcctgcagcgagtgctggtgcctactattacatgcagatgaaggacggcctcgagatagcatag

SEQ ID NO: 12138 - protein, 283 aa, Muscodor strobelii
  misc_feature: SGI Peptide ID NO. 563929
  misc_feature (1)..(263): NCBI GI: 119485288 Blast Desc: NFIA_099130 [Neosartorya fischeri NRRL 181] gi|119410332|gb|EAW20279.1| conserved [Neosartorya fischeri NRRL 181]
  misc_feature (1)..(261): NCBI GI: 159123570 Blast Desc: conserved [Aspergillus fumigatus A1163]
  misc_feature (1)..(262): NCBI GI: 115387419 Blast Desc: [Aspergillus terreus NIH2624] gi|114195299|gb|EAU36999.1| [Aspergillus terreus NIH2624]
  misc_feature (36)..(265): NCBI GI: 255951236 Blast Desc: Pc22g24970 [Penicillium chrysogenum Wisconsin 54-1255] gi|211593402|emb|CAP99785.1| Pc22g24970 [Penicillium chrysogenum Wisconsin 54-1255]
  misc_feature (1)..(280): NCBI GI: 145230489 Blast Desc: An01g11410 [Aspergillus niger] gi|134055671|emb|CAK44045.1| protein product [Aspergillus niger]
  misc_feature (38)..(260): NCBI GI: 238500822 Blast Desc: tubulin, [Aspergillus flavus NRRL3357] gi|220691882|gb|EED48229.1| tubulin, [Aspergillus flavus NRRL3357]
  misc_feature (1)..(272): NCBI GI: 255930393 Blast Desc: Pc06g01510 [Penicillium chrysogenum Wisconsin 54-1255] gi|211581369|emb|CAP79144.1| Pc06g01510 [Penicillium chrysogenum Wisconsin 54-1255]
  misc_feature (57)..(278): NCBI GI: 169782427 Blast Desc: [Aspergillus oryzae RIB40] gi|83774419|dbj|BAE64543.1| protein product [Aspergillus oryzae]
  misc_feature (3)..(238): NCBI GI: 256723179 Blast Desc: NECHADRAFT_94150 [Nectria haematococca mpVI 77-13-4]
  misc_feature (1)..(273): NCBI GI: 261188911 Blast Desc: conserved [Ajellomyces dermatitidis SLH14081] gi|239591872|gb|EEQ74453.1| conserved [Ajellomyces dermatitidis SLH14081] gi|239609147|gb|EEQ86134.1| conserved [Ajellomyces
MSRLVDRLPEPTQVLDKKVIVLSRSRVGTFSLYQALKMLGYKPYHMYEVVTSGALHMNLFEEALRCKYMNGGKPYGKAEFDKWLANYDVLKTVVEIPQFFTEEFIQFYPDAKFILTERDIDSWWTSMLNTAGPMMKATRTFPLTAVARIDSFTKAFCSLHVVLESVCFNGETIESKDGAEHSKRDTIEISKKAKELVPADRLLVCRLEDGFGWEQICPFLGHEIPKDRYPKGNAPAEFQKMGKEVLMPGMLKFGAVVLSAIVIPAASAGAYYYMQMKDGLEIA

SEQ ID NO: 12139 - DNA, 1323 bp, Muscodor strobelii
  misc_feature: SGI EST ID NO. CUFF.28821.0
  misc_feature: Variant of the nucleotide sequence at SEQ ID NO 12137
cttcatcagatcgagtatcagatataaggttcagatctctctgaagctatccaatatcctcaatgtttccaagctcgctgtcattcgtacaacctcttccaaactcatactcttctaattgataccaattgaggtctctttttccctggagcatcgtgaaccacataccatcatcatgtctcgcctcgttgacagactcccagagccgacgcaagtccttgacaagaaagtgattgtgctttctcgaagccgcgttgggaccttctcgctataccaagcactgaagatgcttgggtataagccatatcacatgtacgaagtggttacttcaggagcattgcatatgaacctattcgaagaggcactgagatgcaagtacatgaacggcggcaagccatatggcaaagccgagtttgataaatggcttgcgaactacgatggtacgcccctaagctcacaacgcatctcaagtggcttcacagctcgattcctcaatacccctaagatatgacgcatcactgacgagctcatagtgagtaaaaggaccgggataatgtataacagcgaaagaatctaacaagtcctgaagacggtggtcgagatcccgcaattcttcacggaagagttcatccagttctacccagacgcaaagttcatcctcacggagcgagacatcgactcttggtggacgtctatgctgaacactgccggtccaatgatgaaagctacacggaccttccctctcaccgcagtagctaggatcgatagctttactaaggctttctgttcgctgcatgttgtacttgagtcagtgtgcttcaacggtgagacgatcgagtcgaaggatggtgcagagcattcgaagagggatacaattgagataagtaagaaagcgaaagagctcgtacctgcagatcggttgctggtatgcaggctggaagacggctttggatgggagcagatctgtccgttcctaggacatgagatccctaaggacagatatccaaaaggcaatgcgccggccgagttccagaagatgggcaaagaagtattgatgcccggcatgctcaaattcggtgcagttgtattgtcagctatcgtgattcctgcagcgagtgctggtgcctactattacatgcagatgaaggacggcctcgagatagcataggtatcgcgtcatctctctgtacatatatcacataatccattctcgagtcttttacatcattaaacactacatcacactgctctcgaatgcgcagtgaatgcattgtgcttgttgtttgtcgctcaggttcatgcagtacttaccctgtaaatgcg

SEQ ID NO: 12140 - DNA, 1839 bp, Muscodor strobelii
  misc_feature: SGI cDNA ID NO. 563930
  misc_feature: Encodes the peptide sequence at SEQ ID NO 12141
atgggccaaaaccattcgagcgaggctagtcatgcctccaaagaggagctcacagcgtacctcgccgataagttcgcacgaaaatgcttcgaacctctcgaactgtactcgttcaaagacaacttccggtcgctagccgaccagcagagccatgtccgttacctcaaagaagacaccatcgctcggtttctcgagctccccgacatcctcgctgtatcacccgtgctattccatatgctatcatacatcggtgcctttccattcctccaagatgcacctgtcatcctgagctttgagcagatgatcatggtcgtggccatcatgacggagcgctacaagaacatcttggcaaaaggagccgcaaaccgggtaaagctattattcaagagtcttgctgtgtatgatcgcaagctctccgagatagagaaacagacacgcaccgccgagaagagcgaaacaggaaatggacacgctgcttctagaagccacgcgccaggcttcgacatagacgaaggccaggaggaatccgaggaagaagaagaagacggcgcagacgaactcgtcttagcagcgttaaactcgctcgatattaacgaagccttcaaagcaggcgatgcccactctgctaccacccacggtgctatgataccagcagataacttccgtcgcctcatcatgctactcctactcgtctccggtctaataccgcaagagaacctctccacacacaccgatcgtgtgaccggatccgatctagaaagtctacgagccaccgctgaaaatgtcctatcagcatttataaacgtagaaaaatcaccaggtatcacatacgcccagtttcgcaccgtactgccaacaaatttcccttatctcttcaacggcttcaaccccttatttgagaaattcctcttctccaaaaacctcgacctctctaaacgtaaggactccgttccccggcccctcgctcccgtggtcctccctcccatgttgcaggacaaaggtcaaatcctcgacctcaacatcctatcccaactctcattcttcatccccggcaacgaattattccgccgccttcgcctcctatactccggatccgacgccggcttctcaatgggatccttcgaaacacgagtcttcaactggcgggcccccaccatcttcttcgtctcaggaacgcgcctcgaacccggtacatcgcaccgcggttccgaagccgtattccaagactccctccctccccaacgcttccccaacggcagcacaccagaccgcgaccgtctcatcttcggcgtgctaatccgtcaagactggcgcctaacacacaaagaatgtttcggcgactcagacatggtactcttccaactctcacccacgcacgacgtattcccagcctcaactctgaacaaagactacgcctccttcacgaagccgcccgcccaccacgcaggaataaccatcgggtccccaccacctaaatccacatcccgtcgtgcatcactccagcatctcggtcccgtctccttatccatagactcatccttcgaatacggagtcttcaaccatgactatacgtcccgcggcggtgcattcagcacttcctcgacgcggaagtacgattttcaggaacggttcagagtcgaggatatagaagtctggggctgcgggggcgatgaggaagcgagggtacaacgagaaaggtgggagtgggaggctagagaggcggaggccagacgcagagtcaatctgggcaccggtgatattgaggcggatcgcgcgttgctggagatggcgggcttggtaggaggggcagggtcgaggagtggggggagcatgcattag

SEQ ID NO: 12141 - protein, 612 aa, Muscodor strobelii
  misc_feature: SGI Peptide ID NO. 563930
  misc_feature (1)..(611): NCBI GI: 46135755 Blast Desc: FG09393.1 [Gibberella zeae PH-1]
  misc_feature (1)..(611): NCBI GI: 256735550 Blast Desc: [Nectria haematococca mpVI 77-13-4]
  misc_feature (1)..(611): NCBI GI: 145612649 Blast Desc: MGG_07277 [Magnaporthe grisea 70-15] gi|145019781|gb|EDK04009.1| MGG_07277 [Magnaporthe grisea 70-15]
  misc_feature (1)..(611): NCBI GI: 116200582 Blast Desc: CHGG_10836 [Chaetomium globosum CBS 148.51] gi|88175550|gb|EAQ83018.1| CHGG_10836 [Chaetomium globosum CBS 148.51]
  misc_feature (1)..(611): NCBI GI: 171680885 Blast Desc: protein product [Podospora anserina] gi|27764337|emb|CAD60617.1| protein product [Podospora anserina] gi|170940070|emb|CAP65297.1| protein product [Podospora anserina]
  misc_feature (1)..(612): NCBI GI: 154289998 Blast Desc: BC1G_15811 [Botryotinia fuckeliana B05.10] gi|150848506|gb|EDN23699.1| BC1G_15811 [Botryotinia fuckeliana B05.10]
  misc_feature (1)..(597): NCBI GI: 261355388 Blast Desc: conserved [Verticillium albo-atrum VaMs.102]
  misc_feature (1)..(611): NCBI GI: 85092706 Blast Desc: NCU11385 [Neurospora crassa OR74A] gi|28920942|gb|EAA30271.1| conserved [Neurospora crassa OR74A]
  misc_feature (6)..(611): NCBI GI: 189202948 Blast Desc: TLDc domain containing protein 2 [Pyrenophora tritici-repentis Pt-1C-BFP] gi|187984909|gb|EDU50397.1| TLDc domain containing protein 2 [Pyrenophora tritici-repentis
  misc_feature (108)..(597): NCBI GI: 169596058 Blast Desc: SNOG_00779 [Phaeosphaeria nodorum SN15] gi|160701220|gb|EAT92274.2| SNOG_00779 [Phaeosphaeria nodorum SN15]
MGQNHSSEASHASKEELTAYLADKFARKCFEPLELYSFKDNFRSLADQQSHVRYLKEDTIARFLELPDILAVSPVLFHMLSYIGAFPFLQDAPVILSFEQMIMVVAIMTERYKNILAKGAANRVKLLFKSLAVYDRKLSEIEKQTRTAEKSETGNGHAASRSHAPGFDIDEGQEESEEEEEDGADELVLAALNSLDINEAFKAGDAHSATTHGAMIPADNFRRLIMLLLLVSGLIPQENLSTHTDRVTGSDLESLRATAENVLSAFINVEKSPGITYAQFRTVLPTNFPYLFNGFNPLFEKFLFSKNLDLSKRKDSVPRPLAPVVLPPMLQDKGQILDLNILSQLSFFIPGNELFRRLRLLYSGSDAGFSMGSFETRVFNWRAPTIFFVSGTRLEPGTSHRGSEAVFQDSLPPQRFPNGSTPDRDRLIFGVLIRQDWRLTHKECFGDSDMVLFQLSPTHDVFPASTLNKDYASFTKPPAHHAGITIGSPPPKSTSRRASLQHLGPVSLSIDSSFEYGVFNHDYTSRGGAFSTSSTRKYDFQERFRVEDIEVWGCGGDEEARVQRERWEWEAREAEARRRVNLGTGDIEADRALLEMAGLVGGAGSRSGGSMH

SEQ ID NO: 12142 - DNA, 3114 bp, Muscodor strobelii
  misc_feature: SGI EST ID NO. CUFF.29038.0
  misc_feature: Variant of the nucleotide sequence at SEQ ID NO 12140
cagcatttcaatgtttcatgtgaagaccacaaagcttcgttcaggacaccattccacgttccaatcgccttgcactagacgcctgagttgtgtactcagtggtatggctatctatcttcacagtccaatgaatcatgggccaaaaccattcgagcgaggctagtcatgcctccaaagaggagctcacagcgtacctcgccgataagttcgcacgaaaatgcttcgaacctctcgaactgtactcgttcaaagacaacttccggtcgctagccgaccagcagagccatgtccgttacctcaaagaagacaccatcgctcggtttctcgagctccccgacatcctcgctgtatcacccgtgctattccatatgctatcatacatcggtgcctttccattcctccaagatgcacctgtcatcctgagctttgagcagatgatcatggtcgtggccatcatgacggagcgctacaagaacatcttggcaaaaggagccgcaaaccgggtaaagctattattcaagagtcttgctgtgtatgatcgcaagctctccgagatagagaaacagacacgcaccgccgagaagagcgaaacaggaaatggacacgctgcttctagaagccacgcgccaggcttcgacatagacgaaggccaggaggaatccgaggaagaagaagaagacggcgcagacgaactcgtcttagcagcgttaaactcgctcgatattaacgaagccttcaaagcaggcgatgcccactctgctaccacccacggtgctatgataccagcagataacttccgtcgcctcatcatgctactcctactcgtctccggtctaataccgcaagagaacctctccacacacaccgatcgtgtgaccggatccgatctagaaagtctacgagccaccgctgaaaatgtcctatcagcatttataaacgtagaaaaatcaccaggtatcacatacgcccagtttcgcaccgtactgccaacaaatttcccttatctcttcaacggcttcaaccccttatttgagaaattcctcttctccaaaaacctcgacctctctaaacgtaaggactccgttccccggcccctcgctcccgtggtcctccctcccatgttgcaggacaaaggtcaaatcctcgacctcaacatcctatcccaactctcattcttcatccccggcaacgaattattccgccgccttcgcctcctatactccggatccgacgccggcttctcaatgggatccttcgaaacacgagtcttcaactggcgggcccccaccatcttcttcgtctcaggaacgcgcctcgaacccggtacatcgcaccgcggttccgaagccgtattccaagactccctccctccccaacgcttccccaacggcagcacaccagaccgcgaccgtctcatcttcggcgtgctaatccgtcaagactggcgcctaacacacaaagaatgtttcggcgactcagacatggtactcttccaactctcacccacgcacgacgtattcccagcctcaactctgaacaaagactacgcctccttcacgaagccgcccgcccaccacgcaggaataaccatcgggtccccaccacctaaatccacatcccgtcgtgcatcactccagcatctcggtcccgtctccttatccatagactcatccttcgaatacggagtcttcaaccatgactatacgtcccgcggcggtgcattcagcacttcctcgacgcggaagtacgattttcaggaacggttcagagtcgaggatatagaagtctggggctgcgggggcgatgaggaagcgagggtacaacgagaaaggtgggagtgggaggctagagaggcggaggccagacgcagagtcaatctgggcaccggtgatattgaggcggatcgcgcgttgctggagatggcgggcttggtaggaggggcagggtcgaggagtggggggagcatgcattagttgtggtgatgtctggatgtatggtcgatggcacttgggatgattgggtagtatgagaggtgtggcgtctggtatcggtatcaggattgggattggtatcgcgatggagttttgtatggaatggcgcatcgatgcgtattacagcatatattgcgttggtctatttgtcgcaactcacccatcaacatggcagtatcataatcgttttcatctttgctatgctttttgatcatgcaacttttgatctttcgtgatatattttatacaatagatgtacaaacaaaaaggggactcctgcctatatgccctgacccagcccacgactcatatgtacaaagtttcttgatctctacgacagaggttgagacatgtcacatcgacgtcacttcttcggcgacgcctccgtactcgtactcgtagcctcttccctcacggccttctccccattcttccccgtcccaaaccaactcccagactccttcaacgcatccacaaccttaccctccgccttcacaaccccctcaagtctttcaccaaccttctcagcaacccgttcagtcttctccccaatctccttccccaccctctccgcctcaagctgtccctcctcctgcctcacaaccgcatctttctccctatccaactcctgttttctctcgaccctctccctcttccgtctaatagcctccttaagaatcttatcctcctcatctctgacctctagttccttcagccacttctgatgtctctcctccgctctctgggtagcttccagcttgatgagctctttcctcttctcgcggtctgcgccgtagtatgcaccgccggccaccatggcgaggaccgtgaaggcttgggcgcctatgcgggctcggaacatgcgctggacgccttcgtggtcgccccggcgcattgcgcgccaggcgttgtagagcgcgaggcaggttagtgccgtgcctggattgaggaggtggttagtttgtgggtgcggtgttttgaggtaggagagtgtagtggtttgctttgaggttgctcgcagaagctggagagggtggaccgatgaagtggcatgcgggaggtgcggaggaggcggagacgcgtaccgagggggattaagggctcttcttttaattttcgggag

SEQ ID NO: 12143 - DNA, 684 bp, Muscodor strobelii
  misc_feature: SGI cDNA ID NO. 563931
  misc_feature: Reduced expression when VOC is produced
  misc_feature: Encodes the peptide sequence at SEQ ID NO 12144
atgtccgataaatccatgccgtcgtcttttgacgacaattctgaataccaagaaacaggctggcgaaaagtctcccgaaaattaaaagaagagcccttaatccccctcggcacggcactaacctgcctcgcgctctacaacgcctggcgcgcaatgcgccggggcgaccacgaaggcgtccagcgcatgttccgagcccgcataggcgcccaagccttcacggtcctcgccatggtggccggcggtgcatactacggcgcagaccgcgagaagaggaaagagctcatcaagctggaagctacccagagagcggaggagagacatcagaagtggctgaaggaactagaggtcagagatgaggaggataagattcttaaggaggctattagacggaagagggagagggtcgagagaaaacaggagttggatagggagaaagatgcggttgtgaggcaggaggagggacagcttgaggcggagagggtggggaaggagattggggagaagactgaacgggttgctgagaaggttggtgaaagacttgagggggttgtgaaggcggagggtaaggttgtggatgcgttgaaggagtctgggagttggtttgggacggggaagaatggggagaaggccgtgagggaagaggctacgagtacgagtacggaggcgtcgccgaagaagtga

SEQ ID NO: 12144 - protein, 227 aa, Muscodor strobelii
  misc_feature: SGI Peptide ID NO. 563931
  misc_feature (13)..(84): Pfam Id: PF04588 Pfam Desc: Hypoxia induced protein conserved region
  misc_feature (1)..(225): NCBI GI: 171680887 Blast Desc: protein product [Podospora anserina] gi|27764338|emb|CAD60618.1| protein product [Podospora anserina] gi|170940071|emb|CAP65298.1| protein product [Podospora anserina]
  misc_feature (1)..(135): NCBI GI: 164423452 Blast Desc: NCU02451 [Neurospora crassa OR74A] gi|157070101|gb|EAA30270.2| conserved [Neurospora crassa OR74A]
  misc_feature (16)..(136): NCBI GI: 116200580 Blast Desc: CHGG_10835 [Chaetomium globosum CBS 148.51] gi|88175549|gb|EAQ83017.1| CHGG_10835 [Chaetomium globosum CBS 148.51]
  misc_feature (4)..(137): NCBI GI: 261355387 Blast Desc: mitochondrial hypoxia responsive domain-containing protein [Verticillium albo-atrum VaMs.102]
  misc_feature (5)..(137): NCBI GI: 256734838 Blast Desc: NECHADRAFT_102404 [Nectria haematococca mpVI 77-13-4]
  misc_feature (1)..(123): NCBI GI: 238843248 Blast Desc: mitochondrial hypoxia responsive domain-containing protein [Microsporum canis CBS 113480]
  misc_feature (5)..(137): NCBI GI: 46135753 Blast Desc: FG09392.1 [Gibberella zeae PH-1]
  misc_feature (8)..(129): NCBI GI: 39971815 Blast Desc: MGG_07223 [Magnaporthe grisea 70-15] gi|145019718|gb|EDK03946.1| MGG_07223 [Magnaporthe grisea 70-15]
  misc_feature (1)..(123): NCBI GI: 115397953 Blast Desc: conserved [Aspergillus terreus NIH2624] gi|114192759|gb|EAU34459.1| conserved [Aspergillus terreus NIH2624]
  misc_feature (1)..(123): NCBI GI: 154289996 Blast Desc: BC1G_15810 [Botryotinia fuckeliana B05.10] gi|150848505|gb|EDN23698.1| BC1G_15810 [Botryotinia fuckeliana B05.10]
  misc_feature: Useful for introducing or modulating the production of volatile compounds
MSDKSMPSSFDDNSEYQETGWRKVSRKLKEEPLIPLGTALTCLALYNAWRAMRRGDHEGVQRMFRARIGAQAFTVLAMVAGGAYYGADREKRKELIKLEATQRAEERHQKWLKELEVRDEEDKILKEAIRRKRERVERKQELDREKDAVVRQEEGQLEAERVGKEIGEKTERVAEKVGERLEGVVKAEGKVVDALKESGSWFGTGKNGEKAVREEATSTSTEASPKK

SEQ ID NO: 12145 - DNA, 3451 bp, Muscodor strobelii
  misc_feature: SGI EST ID NO. CUFF.29039.1
  misc_feature: Variant of the nucleotide sequence at SEQ ID NO 12143
gagcttcttacccaaacaggcaagacgggccaaaccttgcatcgaatttcaacgcctatcagagcttcgagaagcaatcaatcgataagataaactacatgcaggcaattggagaccacctgcagctgaagcttcgcgcgtgcattcatggcatcatcgaaatcatacgcacattgagattgcctcacagtacaacatcacaacctaccacaacaccaatctattcacctaagccactagaaatttaccacaattccacaaatttgattgaaacttcaaaccaaatcctccattagtcgcccaggacagcatcccgccatgtccgataaatccatgccgtcgtcttttgacgacaattctgaataccaagaaacaggctggcgaaaagtctcccgaaaattaaaagaagagcccttaatccccctcggcacggcactaacctgcctcgcgctctacaacgcctggcgcgcaatgcgccggggcgaccacgaaggcgtccagcgcatgttccgagcccgcataggcgcccaagccttcacggtcctcgccatggtggccggcggtgcatactacggcgcagaccgcgagaagaggaaagagctcatcaagctggaagctacccagagagcggaggagagacatcagaagtggctgaaggaactagaggtcagagatgaggaggataagattcttaaggaggctattagacggaagagggagagggtcgagagaaaacaggagttggatagggagaaagatgcggttgtgaggcaggaggagggacagcttgaggcggagagggtggggaaggagattggggagaagactgaacgggttgctgagaaggttggtgaaagacttgagggggttgtgaaggcggagggtaaggttgtggatgcgttgaaggagtctgggagttggtttgggacggggaagaatggggagaaggccgtgagggaagaggctacgagtacgagtacggaggcgtcgccgaagaagtgacgtcgatgtgacatgtctcaacctctgtcgtagagatcaagaaactttgtacatatgagtcgtgggctgggtcagggcatataggcaggagtcccctttttgtttgtacatctattgtataaaatatatcacgaaagatcaaaagttgcatgatcaaaaagcatagcaaagatgaaaacgattatgatactgccatgttgatgggtgagttgcgacaaatagaccaacgcaatatatgctgtaatacgcatcgatgcgccattccatacaaaactccatcgcgataccaatcccaatcctgataccgataccagacgccacacctctcatactacccaatcatcccaagtgccatcgaccatacatccagacatcaccacaactaatgcatgctccccccactcctcgaccctgcccctcctaccaagcccgccatctccagcaacgcgcgatccgcctcaatatcaccggtgcccagattgactctgcgtctggcctccgcctctctagcctcccactcccacctttctcgttgtaccctcgcttcctcatcgcccccgcagccccagacttctatatcctcgactctgaaccgttcctgaaaatcgtacttccgcgtcgaggaagtgctgaatgcaccgccgcgggacgtatagtcatggttgaagactccgtattcgaaggatgagtctatggataaggagacgggaccgagatgctggagtgatgcacgacgggatgtggatttaggtggtggggacccgatggttattcctgcgtggtgggcgggcggcttcgtgaaggaggcgtagtctttgttcagagttgaggctgggaatacgtcgtgcgtgggtgagagttggaagagtaccatgtctgagtcgccgaaacattctttgtgtgttaggcgccagtcttgacggattagcacgccgaagatgagacggtcgcggtctggtgtgctgccgttggggaagcgttggggagggagggagtcttggaatacggcttcggaaccgcggtgcgatgtaccgggttcgaggcgcgttcctgagacgaagaagatggtgggggcccgccagttgaagactcgtgtttcgaaggatcccattgagaagccggcgtcggatccggagtataggaggcgaaggcggcggaataattcgttgccggggatgaagaatgagagttgggataggatgttgaggtcgaggatttgacctttgtcctgcaacatgggagggaggaccacgggagcgaggggccggggaacggagtccttacgtttagagaggtcgaggtttttggagaagaggaatttctcaaataaggggttgaagccgttgaagagataagggaaatttgttggcagtacggtgcgaaactgggcgtatgtgatacctggtgatttttctacgtttataaatgctgataggacattttcagcggtggctcgtagactttctagatcggatccggtcacacgatcggtgtgtgtggagaggttctcttgcggtattagaccggagacgagtaggagtagcatgatgaggcgacggaagttatctgctggtatcatagcaccgtgggtggtagcagagtgggcatcgcctgctttgaaggcttcgttaatatcgagcgagtttaacgctgctaagacgagttcgtctgcgccgtcttcttcttcttcctcggattcctcctggccttcgtctatgtcgaagcctggcgcgtggcttctagaagcagcgtgtccatttcctgtttcgctcttctcggcggtgcgtgtctgtttctctatctcggagagcttgcgatcatacacagcaagactcttgaataatagctttacccggtttgcggctccttttgccaagatgttcttgtagcgctccgtcatgatggccacgaccatgatcatctgctcaaagctcaggatgacaggtgcatcttggaggaatggaaaggcaccgatgtatgatagcatatggaatagcacgggtgatacagcgaggatgtcggggagctcgagaaaccgagcgatggtgtcttctttgaggtaacggacatggctctgctggtcggctagcgaccggaagttgtctttgaacgagtacagttcgagaggttcgaagcattttcgtgcgaacttatcggcctgtgtgatatcatccggattagccaactctcatttagaatagaggtgttcgtggacggcggggcccaggtgacgatgagatggtgaagcttacgaggtacgctgtgagctcctctttggaggcatgactagcctcgctcgaatggttttggcccatgattcattggactgtgaagatagatagccataccactgagtacacaactcaggcgtctagtgcaaggcgattggaacgtggaatggtgtcctgaacgaagctttgtggtcttcacatgaaacattgaaatgctg

SEQ ID NO: 12146 - DNA, 1770 bp, Muscodor strobelii
  misc_feature: SGI cDNA ID NO. 563932
  misc_feature: Reduced expression when VOC is produced
  misc_feature: Encodes the peptide sequence at SEQ ID NO 12147
atgggcatgaacagtcaagccatgccaggcgtaacagaagctgtgggcgaccgtccgactactcccgtgacaaacggcatccgcaacggcgtaaatggcaacggccactcccctcgaacgccgtcttatactggcctatctctcaccgagtacagtgcaaacccgtcaccacctcgcgagcccaaccgaagtcgagtctgctcgatcatccccgaggaattcatcttgcctaatggacatcctgattatcttcgattgatcttaacctcacgcgtctacgaagcatgcaaagagacatccttagctacggcaaccaacctctccaatcgtctcgagtgcaatgtccttctcaagagagaagacgagcagcccgtcttcagcttcaagctgcgcggcgcctacaacaagatggctcacctcgaccgaaacctgagttggaagggcgtcgtcgcatgcagcgccggaaaccatgctcagggtgttgcatattcggccagacagctcaagatccccgccaccatcgtcatgccccagggcacaccaagcatcaagcacatgaacgtctcgaggctgggcggatgcgtagtgttgcatggggctgactttgatgctgccaaggaagaatgttcgagactggagaagcaacacggtctgatcaacatccctccattcgacgatccatatgtcattgctggacagggcactataggtatggagctactacgacagacaaacatccaaaagctggaggccatcttctgctgcgtgggtggaggcggtctcattgctgggattggtgtctacgtcaagcgcattgcgccccacgtcaagatcatcggagtcgagaccgaggacgccaatgccatggtccagtcactgcgacagggcaagcgagttgtgctcaaggaggtcgggctctttgccgacggtgctgccgtcaagacggtgggcgaggagaacttccgcatatgccaggaagtcatcgacgagatcatccaagtcaacaccgacgagacttgtgctgccatcaaagacgtatttgaggatacccgatctatcgtcgagccagcaggcgctctgtcgctggcagggctgaagaagtgggttgcggctaacccgtcgagcgaccccaaccgcagcgtcattgccatcaccagcggtgctaacatgaacttcgatcggctacgattcgtggccgagcgcgccaccctcggcgaaggcaaagaagcattgctctgcgtcaagattcccgagcggccgggcgcctttgcctcgctcatcagccaggtcctgcctcacgccgtaaccgagttctcgtatcgctacgcaaccaacgaagtagccaacatcctcatctccatttcgctcaccgcctctgcatcggagagagggcatgagctccagactctgatggagcgcatcacgacggccggcatgacggtgacagacctgtccggtgacgagctggctaaatcccacatccgctaccttgtcggtgggcgctcggatgtgcccaatgagagactatacatgttcaattttccagaaaggccgggtgctttggagaagttcctgcggacgctcagactcaagttcaatatcagtctgttccagtatcgtaatggaggtagcgatgtgggcaagatccttacgggtattcagtgccctgatagtgagctgccggacttggagaggtcgttgagggagatcggatatccgtgggaggactgcactcagagcaccgtgttcaagactttcctgcggaattga

SEQ ID NO: 12147 - protein, 589 aa, Muscodor strobelii
  misc_feature: SGI Peptide ID NO. 563932
  misc_feature (92)..(387): Pfam Id: PF00291 Pfam Desc: Pyridoxal-phosphate dependent enzyme
  misc_feature (498)..(587): Pfam Id: PF00585 Pfam Desc: C-terminal regulatory domain of Threonine dehydratase
  misc_feature (400)..(494): Pfam Id: PF00585 Pfam Desc: C-terminal regulatory domain of Threonine dehydratase
  misc_feature (38)..(588): NCBI GI: 145257142 Blast Desc: An04g02580 [Aspergillus niger] gi|134058536|emb|CAL00745.1| protein product [Aspergillus niger]
  misc_feature (29)..(588): NCBI GI: 67526745 Blast Desc: AN3830.2 [Aspergillus nidulans FGSC A4] gi|40739905|gb|EAA59095.1| AN3830.2 [Aspergillus nidulans FGSC A4]
  misc_feature (46)..(589): NCBI GI: 238843249 Blast Desc: threonine dehydratase [Microsporum canis CBS 113480]
  misc_feature (18)..(589): NCBI GI: 189202566 Blast Desc: threonine dehydratase catabolic [Pyrenophora tritici-repentis Pt-1C-BFP] gi|187984718|gb|EDU50206.1| threonine dehydratase catabolic [Pyrenophora tritici-repentis Pt-1C-BFP]
  misc_feature (21)..(588): NCBI GI: 154275594 Blast Desc: threonine dehydratase, mitochondrial precursor [Ajellomyces capsulatus NAm1] gi|150415088|gb|EDN10450.1| threonine dehydratase, mitochondrial precursor [Ajellomyces NAm1]
  misc_feature (39)..(587): NCBI GI: 39971817 Blast Desc: MGG_07224 [Magnaporthe grisea 70-15] gi|145019719|gb|EDK03947.1| MGG_07224 [Magnaporthe grisea 70-15]
  misc_feature (19)..(589): NCBI GI: 46105336 Blast Desc: FG00296.1 [Gibberella zeae PH-1]
  misc_feature (32)..(588): NCBI GI: 116200578 Blast Desc: threonine ammonia-lyase precursor [Chaetomium globosum CBS 148.51] gi|88175548|gb|EAQ83016.1| threonine ammonia-lyase precursor [Chaetomium globosum CBS 148.51]
  misc_feature (29)..(588): NCBI GI: 256735525 Blast Desc: [Nectria haematococca mpVI 77-13-4]
  misc_feature (38)..(589): NCBI GI: 171680889 Blast Desc: protein product [Podospora anserina] gi|27764339|emb|CAD60619.1| protein product [Podospora anserina] gi|170940072|emb|CAP65299.1| protein product [Podospora anserina]
  misc_feature (40)..(586): SWISSPROT Homolog: EC 4.3.1.19 Threonine ammonia-lyase
  misc_feature: Useful for introducing or modulating the production of volatile compounds
MGMNSQAMPGVTEAVGDRPTTPVTNGIRNGVNGNGHSPRTPSYTGLSLTEYSANPSPPREPNRSRVCSIIPEEFILPNGHPDYLRLILTSRVYEACKETSLATATNLSNRLECNVLLKREDEQPVFSFKLRGAYNKMAHLDRNLSWKGVVACSAGNHAQGVAYSARQLKIPATIVMPQGTPSIKHMNVSRLGGCVVLHGADFDAAKEECSRLEKQHGLINIPPFDDPYVIAGQGTIGMELLRQTNIQKLEAIFCCVGGGGLIAGIGVYVKRIAPHVKIIGVETEDANAMVQSLRQGKRVVLKEVGLFADGAAVKTVGEENFRICQEVIDEIIQVNTDETCAAIKDVFEDTRSIVEPAGALSLAGLKKWVAANPSSDPNRSVIAITSGANMNFDRLRFVAERATLGEGKEALLCVKIPERPGAFASLISQVLPHAVTEFSYRYATNEVANILISISLTASASERGHELQTLMERITTAGMTVTDLSGDELAKSHIRYLVGGRSDVPNERLYMFNFPERPGALEKFLRTLRLKFNISLFQYRNGGSDVGKILTGIQCPDSELPDLERSLREIGYPWEDCTQSTVFKTFLRN

SEQ ID NO: 12148 - DNA, 3647 bp, Muscodor strobelii
  misc_feature: SGI EST ID NO. CUFF.29087.0
  misc_feature: Variant of the nucleotide sequence at SEQ ID NO 12146
cctagacatgccgtggtgacaatgatgcctgatccatttctacgatcacttcttcctgctcaatcggtgatcaattggctatgggcatgaacagtcaagccatgccaggcgtaacagaagctgtgggcgaccgtccgactactcccgtgacaaacggcatccgcaacggcgtaaatggcaacggccactcccctcgaacgccgtcttatactggcctatctctcaccgagtacagtgcaaacccgtcaccacctcgcgagcccaaccgaagtcgagtctgctcgatcatccccgaggaattcatcttgcctaatggacatcctgattatcttcgattgatcttaacctcacgcgtctacgaagcatgcaaagagacatccttagctacggcaaccaacctctccaatcgtctcgagtgcaatgtccttctcaagagagaagacgagcagcccgtcttcagcttcaagctgcgcggcgcctacaacaagatggctcacctcgaccgaaacctgagttggaagggcgtcgtcgcatgcagcgccggaaaccatgctcagggtgttgcatattcggccagacagctcaagatccccgccaccatcgtcatgccccagggcacaccaagcatcaagcacatgaacgtctcgaggctgggcggatgcgtagtgttgcatggggctgactttgatgctgccaaggaagaatgttcgagactggagaagcaacacggtctgatcaacatccctccattcgacgatccatatgtcattgctggacagggcactataggtatggagctactacgacagacaaacatccaaaagctggaggccatcttctgctgcgtgggtggaggcggtctcattgctgggattggtgtctacgtcaagcgcattgcgccccacgtcaagatcatcggagtcgagaccgaggacgccaatgccatggtccagtcactgcgacagggcaagcgagttgtgctcaaggaggtcgggctctttgccgacggtgctgccgtcaagacggtgggcgaggagaacttccgcatatgccaggaagtcatcgacgagatcatccaagtcaacaccgacgagacttgtgctgccatcaaagacgtatttgaggatacccgatctatcgtcgagccagcaggcgctctgtcgctggcagggctgaagaagtgggttgcggctaacccgtcgagcgaccccaaccgcagcgtcattgccatcaccagcggtgctaacatgaacttcgatcggctacgattcgtggccgagcgcgccaccctcggcgaaggcaaagaagcattgctctgcgtcaagattcccgagcggccgggcgcctttgcctcgctcatcagccaggtcctgcctcacgccgtaaccgagttctcgtatcgctacgcaaccaacgaagtagccaacatcctcatctccatttcgctcaccgcctctgcatcggagagagggcatgagctccagactctgatggagcgcatcacgacggccggcatgacggtgacagacctgtccggtgacgagctggctaaatcccacatccgctaccttgtcggtgggcgctcggatgtgcccaatgagagactatacatgttcaattttccagaaaggccgggtgctttggagaagttcctgcggacgctcagactcaagttcaatatcagtctgttccagtatcgtaatggaggtagcgatgtgggcaagatccttacgggtattcagtgccctgatagtgagctgccggacttggagaggtcgttgagggagatcggatatccgtgggaggactgcactcagagcaccgtgttcaagactttcctgcggaattgaggaggctgggaaatttatgggagaaaatgttggcggtccaggtacctatctagattggcgttgatggcgcatttcatgtcgtggttatatggcaaagactgcgtagatatcccctatcgtggtatggcaggcttagaaatctgtaaaatgttggaattgaggatcgaattattccttgccatcacaattgttgaaccggatccgctgtatctagtgaatgagctgtttaagtccttccattcgggtagtccccttcaacagtgaaggcagtcggaaatccaaagagtttagggtaacccacccgaagccaggagactcgcagctccacggccaatcaatcccatgcttaaactccactcttcaattcagagcctagaggactgtttttctagcgattgcaacatcaacattcgacagctgcattgcaatcaaatccaacaaccacatctccttccgcctacgctcgcgtcttccggtacagaagcgacacgatgccgctctccctcctaaactcgctacgggcgctgtccctccgatccaagcccgctaccagccgagcagcagccgccgcgataccgcgaaaacagacacaacccgccatccgacacatctgccagagcgccctggcctcgaaatgctctcacagacctgtgttggcagttgcggcgaagaggatagcggcagtcgagacggtgaagcagcagcagagggggatgaaggtccattcttctgttaagaagaggtgcgaacattgtaaggtcgtccgaagaaaagcgaataagcgacacagaggatatctgtatatcatctgcagtgcgaacccgagacataaacaacgccagggatagatggcatggtcgaacgatgaagggccccgccgaagacagacaatggattgacagcaatggataaccgacgggggacggtgtacgatactctctggggtgttatagaccataacgaacaagcgaagagttcgggtatggaaggatatagccgaggatagaggagcaggcgcgcatgcagaattgtacaatatgtcgtaaccagcataaggcgtgtgtgtctagctgttcaaatatgactagccagaaagaccccaatgctcatttgtccgagagcaatgtataatacaatacaatacaatacaatacaagaacctcacaacatcatacaacacgacctcaacatgtcaagcgtagcgtgatcatttgacatctctcttcctgtgtttcattgtctagcaacgactagcagttcattgaacagcatcttcctatccccttccctcacttccctgcccatccacgtagtctacaacccgccgatataccgctccatactctcccactcgattttcccggtactcattaaatagcgcacatgcgtcgggtcggtgacgcctctatgtctttcgaactccgcgcgggcaaattgccgggtttctgatttcgtcgtgggattggagatgtgggaggtgccgcgcaggatatgtcggtagaatgataggacgcgattgcgttgaagaaactgtatgtgcgtttatttgttactaatgcctgcttgattgtagatgtagtgtagtgagagggatacgcacgtgctccagactcagcgtcgtgccgagacggcttgttttgctgctcgtcgcatagctgcgatagatgttggagagagcggaggtggccggcattgccatgcgcttcggttatgtgatcagggatgcattgagaatgtgttcgaagatcgatagtcttcgattgtgattgtgtataccttagcggttcaagattggac

SEQ ID NO: 12149 - DNA, 780 bp, Muscodor strobelii
  misc_feature: SGI cDNA ID NO. 563933
  misc_feature: Encodes the peptide sequence at SEQ ID NO 12150
atggcggcatcgaggacacacctaaagcggaagcgcgccatcacggatccgatcgagaaggcaaatgcgaaaagtgacgaggtctttattaaagagcatttacatcccgactcatcatggacaacctggacacatccaaaaacacactcatattacagcgtctcgctccgccggtcagatgtcatgagcgaaagggatatggatgcatgttacagcctaatagaagagacaagtcgtgcggattacgaggcgtcgactacgggatggaaccaggagaagaaacgagctgagatgaagtctgttagtcttcggtacttactcgttaaagataggaaaagtaggaaggtggatggggaagatgaacatgaagaaggcaaagaggagagaaatggggaaaatgagcttgcggatggagggggtggagatgcgggaatggtgaagggcttctgctcattcatgccaacatacgaagagggcgaggcggtggtttactgttatgagattcacctcaagcctgaacttcagcgaacaggtcttggcaaaatcctcctctcgtacctagggaatgtcgcgatttgcacgccgccgattgaaaaagtcatgttgacgtgtttcctgagcaatcagaatgcgtataagttctacgaggggaatggtttcacacttgatccgatatcaccggagccaaggaagttgcggttcggcaaggagtttagacctgattacgctattttgagtaaagttgttcaggggagggagcgggggatggaggatgattga

SEQ ID NO: 12150 - protein, 259 aa, Muscodor strobelii
  misc_feature: SGI Peptide ID NO. 563933
  misc_feature (138)..(221): Pfam Id: PF00583 Pfam Desc: Acetyltransferase (GNAT) family
  misc_feature (9)..(250): NCBI GI: 171680743 Blast Desc: protein product [Podospora anserina] gi|170939999|emb|CAP65225.1| protein product [Podospora anserina]
  misc_feature (9)..(249): NCBI GI: 145612583 Blast Desc: MGG_07226 [Magnaporthe grisea 70-15] gi|145019722|gb|EDK03950.1| MGG_07226 [Magnaporthe grisea 70-15]
  misc_feature (2)..(247): NCBI GI: 256735438 Blast Desc: NECHADRAFT_75282 [Nectria haematococca mpVI 77-13-4]
  misc_feature (30)..(249): NCBI GI: 261355382 Blast Desc: conserved [Verticillium albo-atrum VaMs.102]
  misc_feature (16)..(246): NCBI GI: 156056605 Blast Desc: SS1G_04033 [Sclerotinia sclerotiorum 1980] gi|154701819|gb|EDO01558.1| SS1G_04033 [Sclerotinia sclerotiorum 1980]
  misc_feature (9)..(175): NCBI GI: 116200688 Blast Desc: CHGG_10889 [Chaetomium globosum CBS 148.51] gi|88175603|gb|EAQ83071.1| CHGG_10889 [Chaetomium globosum CBS 148.51]
  misc_feature (15)..(259): NCBI GI: 154296182 Blast Desc: BC1G_12918 [Botryotinia fuckeliana B05.10] gi|150843482|gb|EDN18675.1| BC1G_12918 [Botryotinia fuckeliana B05.10]
  misc_feature (7)..(253): NCBI GI: 226291525 Blast Desc: conserved [Paracoccidioides brasiliensis Pb18]
  misc_feature (7)..(253): NCBI GI: 225679772 Blast Desc: conserved [Paracoccidioides brasiliensis Pb03]
  misc_feature (41)..(253): NCBI GI: 226286042 Blast Desc: conserved [Paracoccidioides brasiliensis Pb01]
MAASRTHLKRKRAITDPIEKANAKSDEVFIKEHLHPDSSWTTWTHPKTHSYYSVSLRRSDVMSERDMDACYSLIEETSRADYEASTTGWNQEKKRAEMKSVSLRYLLVKDRKSRKVDGEDEHEEGKEERNGENELADGGGGDAGMVKGFCSFMPTYEEGEAVVYCYEIHLKPELQRTGLGKILLSYLGNVAICTPPIEKVMLTCFLSNQNAYKFYEGNGFTLDPISPEPRKLRFGKEFRPDYAILSKVVQGRERGMEDD

SEQ ID NO: 12151 - DNA, 1088 bp, Muscodor strobelii
  misc_feature: SGI EST ID NO. CUFF.28824.0
  misc_feature: Variant of the nucleotide sequence at SEQ ID NO 12149
aaaaaatcatcagatttgttgtcttaactgactattaatctcgactttcattttcattccttcatttattcgtgtatcccccgcgatcagtgttctcaatctcaatctcggtgttgcggcaggtcggagcacgggcgatggcggcatcgaggacacacctaaagcggaagcgcgccatcacggatccgatcgagaaggcaaatgcgaaaagtgacgaggtctttattaaagagcatttacatcccgactcatcatggacaacctggacacatccaaaaacacactcatattacagcgtctcgctccgccggtcagatgtcatgagcgaaagggatatggatgcatgttacagcctaatagaagagacaagtcgtgcggattacgaggcgtcgactacgggatggaaccaggagaagaaacgagctgagatgaagtctgttagtcttcggtacttactcgttaaagataggaaaagtaggaaggtggatggggaagatgaacatgaagaaggcaaagaggagagaaatggggaaaatgagcttgcggatggagggggtggagatgcgggaatggtgaagggcttctgctcattcatgccaacatacgaagagggcgaggcggtggtttactgttatgagattcacctcaagcctgaacttcagcgaacaggtcttggcaaaatcctcctctcgtacctagggaatgtcgcgatttgcacgccgccgattgaaaaagtcatgttgacgtgtttcctgagcaatcagaatgcgtataagttctacgaggggaatggtttcacacttgatccgatatcaccggagccaaggaagttgcggttcggcaaggagtttagacctgattacgctattttgagtaaagttgttcaggggagggagcgggggatggaggatgattgacggggagctagtggcactgttgcggttgcgacatttgaaagagccatttagatagaagttgcaaagtaggaggttatatggcgttgatgacgtgataagtacggtgctgtggttacgcctcctctagaaagacatattacaccaaatttcaaattctcatcgtttccatag

SEQ ID NO: 12152 - DNA, 834 bp, Muscodor strobelii
  misc_feature: SGI cDNA ID NO. 563934
  misc_feature: Encodes the peptide sequence at SEQ ID NO 12153
atggcggcatcgaggacacacctaaagcggaagcgcgccatcacggatccgatcgagaaggcaaatgcgaaaagtgacgaggtctttattaaagagcatttacatcccgaccatttctacatcagaatcgacgccaagctctcactaactcagttggcttgtagctcatcatggacaacctggacacatccaaaaacacactcatattacagcgtctcgctccgccggtcagatgtcatgagcgaaagggatatggatgcatgttacagcctaatagaagagacaagtcgtgcggattacgaggcgtcgactacgggatggaaccaggagaagaaacgagctgagatgaagtctgttagtcttcggtacttactcgttaaagataggaaaagtaggaaggtggatggggaagatgaacatgaagaaggcaaagaggagagaaatggggaaaatgagcttgcggatggagggggtggagatgcgggaatggtgaagggcttctgctcattcatgccaacatacgaagagggcgaggcggtggtttactgttatgagattcacctcaagcctgaacttcagcgaacaggtcttggcaaaatcctcctctcgtacctagggaatgtcgcgatttgcacgccgccgattgaaaaagtcatgttgacgtgtttcctgagcaatcagaatgcgtataagttctacgaggggaatggtttcacacttgatccgatatcaccggagccaaggaagttgcggttcggcaaggagtttagacctgattacgctattttgagtaaagttgttcaggggagggagcgggggatggaggatgattga

SEQ ID NO: 12153 - protein, 277 aa, Muscodor strobelii
  misc_feature: SGI Peptide ID NO. 563934
  misc_feature (156)..(239): Pfam Id: PF00583 Pfam Desc: Acetyltransferase (GNAT) family
  misc_feature (9)..(268): NCBI GI: 171680743 Blast Desc: protein product [Podospora anserina] gi|170939999|emb|CAP65225.1| protein product [Podospora anserina]
  misc_feature (9)..(267): NCBI GI: 145612583 Blast Desc: MGG_07226 [Magnaporthe grisea 70-15] gi|145019722|gb|EDK03950.1| MGG_07226 [Magnaporthe grisea 70-15]
  misc_feature (2)..(265): NCBI GI: 256735438 Blast Desc: NECHADRAFT_75282 [Nectria haematococca mpVI 77-13-4]
  misc_feature (47)..(267): NCBI GI: 261355382 Blast Desc: conserved [Verticillium albo-atrum VaMs.102]
  misc_feature (16)..(264): NCBI GI: 156056605 Blast Desc: SS1G_04033 [Sclerotinia sclerotiorum 1980] gi|154701819|gb|EDO01558.1| SS1G_04033 [Sclerotinia sclerotiorum 1980]
  misc_feature (9)..(193): NCBI GI: 116200688 Blast Desc: CHGG_10889 [Chaetomium globosum CBS 148.51] gi|88175603|gb|EAQ83071.1| CHGG_10889 [Chaetomium globosum CBS 148.51]
  misc_feature (15)..(277): NCBI GI: 154296182 Blast Desc: BC1G_12918 [Botryotinia fuckeliana B05.10] gi|150843482|gb|EDN18675.1| BC1G_12918 [Botryotinia fuckeliana B05.10]
  misc_feature (7)..(271): NCBI GI: 226291525 Blast Desc: conserved [Paracoccidioides brasiliensis Pb18]
  misc_feature (7)..(271): NCBI GI: 225679772 Blast Desc: conserved [Paracoccidioides brasiliensis Pb03]
  misc_feature (7)..(271): NCBI GI: 226286042 Blast Desc: conserved [Paracoccidioides brasiliensis Pb01]
MAASRTHLKRKRAITDPIEKANAKSDEVFIKEHLHPDHFYIRIDAKLSLTQLACSSSWTTWTHPKTHSYYSVSLRRSDVMSERDMDACYSLIEETSRADYEASTTGWNQEKKRAEMKSVSLRYLLVKDRKSRKVDGEDEHEEGKEERNGENELADGGGGDAGMVKGFCSFMPTYEEGEAVVYCYEIHLKPELQRTGLGKILLSYLGNVAICTPPIEKVMLTCFLSNQNAYKFYEGNGFTLDPISPEPRKLRFGKEFRPDYAILSKVVQGRERGMEDD

SEQ ID NO: 12154 - DNA, 1088 bp, Muscodor strobelii; identical to SEQ ID NO: 12151
  misc_feature: SGI EST ID NO. CUFF.28824.0
  misc_feature: Variant of the nucleotide sequence at SEQ ID NO 12152

SEQ ID NO: 12155 - DNA, 2925 bp, Muscodor strobelii
  misc_feature: SGI cDNA ID NO. 563935
  misc_feature: Encodes the peptide sequence at SEQ ID NO 12156
atggatccaatcagtggtattgggctggcggctgcgacagtcgaacttacgtctgccacgtttaaatgctattgccagatccgtgacctacacaaggctatcaagttcagcgagagagatttggctacggcgacgaagaaattggagcagcatgagaaattcattgatgagctgagcattagcttcgaacgggcttccggaagctcgatctcagcgtcgacccgtgatttgttccaagagtgcatcgcggactccaaagcagaagtccaagagttcaaggacttgcggaaacgtgtgggcaaacaacacttcacgagaaaggcattccaagctatcgagactggggcccgtctgcgcctcaatgatgagagcatccgaaaataccataggcttcttgagagccagatgcagcgcttcgcctttctgcagtcatcgctgcagtcttcttcacaaagtcatgctaccacacggctcgagtcttccatatcgaatattgaagcgctgatagcgcaacaaggcgcaatcgctacttcgttttactctaagattgagacagaaatatctgttactagaaaaaatgtcaccatagcgaagaccttattgagccaaagccagacttctgatctgtttcttaacggtagtactgctggggtagtatggcacgatctcaaccacaaaaaccacaatacgcatcgcagaagatactacacattatgcggcgtagtcactgtcttatcttcaacaccctatcgaacgaacaaaatcacggaaaacatccccgtggcttttcgcgtgatttttgagccatatcaatggctctcaaacaaatacattgagtggcgatgtatcagagctccggctgaaaaccctacgtggatatttgcatcgtcgacaagcgttctttgcgatgacgatgatgtactggaggcactgggtatagtgcgaagatcaccaggcgccagtcataactggacgggcaaaataccaaattccgagaaagtcaagtatttactcgatactggtcgtctcttgaaagagcacgtgatatattttccaagtctttgcccacaatctggcgtgacacgcgatgtgctcactgcctttattggatatcaccagccctacacatgtgccgaaactgcgtctcctgtcatagaccgattcgtagtctgtaagggccatcgaaagggccccaaataccaaacagaactctatgtccagatattagaagttgcaaatttgcttttgtgccaggggttcaaacctcatctttcaagttggcaactgcttcagatccaatcgcctccaaccgaacagactggaattccatctgtggtaacgcacatcttatggtctggagattacgtggagttggaggcatcctatctgggccatctaatcacatctgacaatattggtcgcaagctccgaacggagatagaagatctagaaattgccgatcttgcttacgacgaattcatgcttgaccggtggttgatagtactttacgcttccatccgccccgaagtcaactcattcctccaagagtacgcgagcgcgtatcagaatccagctactcgaggaaaattcaccctggattatgtttgcgatgaaatccggcaggcgcccaaagagcagtcaggttgcctaataagatttctgtcttctcacggcaatatatcactgctccagaacttcaaatgggcagactggaattactactcacgggcatcctggcaactgtgtgccgcgcagagtcaaaatccaagttcattagacttgttgatggatcaaggagcgcatgatctggaacttttgccacacacagcaggtgtgataaaaagggtggtaagcgatccttgttttgcgactgagtttgtggataaaagtatgtattcactgtcaaggtcatgggggtctggatatgagacaggaccattcatggaatttctcggtgccagcaacagtctacgtctgttgttcctggatgagaaatttccactgcctgactatatgcagattcacatttcctgcttcctgaggaaatatgagacagctccactcgttcaaccggatgatctttataacttgatgttcaacgcaatgaaacatcactgggaaaaccatgaagctgcagagtttctcttaagcgatcttcatttctacaaggtactttacaaggtcgtttgttcatcggcattccaatcctcaataaatgcatcaaatctatcgatcgaaagaaagtttccaaaatacatagaccacccaactacggtcaatacttatccacctgtcaatggccagtcagctttaatgcttactctgcatttcggcatgaaacctgcagtgaagattttggtcgatgccggagcttacataacggagccagcagcatgtgggaaatcagcgttacaaattgcccaggataatgcgaagggtaatcacccccgacaatgggttgcaagtttcaattccgacagtgaagagtttgttgagatgaacatagattcgcgccgtgtttattacataagagcggctgctgctaaagacctgtgggtctctgaagataccgacagagagatgctggagatcctcctccaagcactgagggatcgaggggaagaaatcatagaagttgcagatgagctgccacctagcaaatgggatgttctcaaatgcaagagccgcgaagtcatgaaatggttcttcaagcctcactacgaatatgacgcagatactcttcgagaggccggcatttacgtgcttctactgaccactttgtcactcgtttcaactttcaaggttcttaagtccgagttcggcgatttgaccgccaagatcgcgaggttcttttcgagacctattgtactgcttgctatatttggatggtttctctcatttttctttcgatccacatctacatag

SEQ ID NO: 12156 - protein, 974 aa, Muscodor strobelii
  misc_feature: SGI Peptide ID NO. 563935
MDPISGIGLAAATVELTSATFKCYCQIRDLHKAIKFSERDLATATKKLEQHEKFIDELSISFERASGSSISASTRDLFQECIADSKAEVQEFKDLRKRVGKQHFTRKAFQAIETGARLRLNDESIRKYHRLLESQMQRFAFLQSSLQSSSQSHATTRLESSISNIEALIAQQGAIATSFYSKIETEISVTRKNVTIAKTLLSQSQTSDLFLNGSTAGVVWHDLNHKNHNTHRRRYYTLCGVVTVLSSTPYRTNKITENIPVAFRVIFEPYQWLSNKYIEWRCIRAPAENPTWIFASSTSVLCDDDDVLEALGIVRRSPGASHNWTGKIPNSEKVKYLLDTGRLLKEHVIYFPSLCPQSGVTRDVLTAFIGYHQPYTCAETASPVIDRFVVCKGHRKGPKYQTELYVQILEVANLLLCQGFKPHLSSWQLLQIQSPPTEQTGIPSVVTHILWSGDYVELEASYLGHLITSDNIGRKLRTEIEDLEIADLAYDEFMLDRWLIVLYASIRPEVNSFLQEYASAYQNPATRGKFTLDYVCDEIRQAPKEQSGCLIRFLSSHGNISLLQNFKWADWNYYSRASWQLCAAQSQNPSSLDLLMDQGAHDLELLPHTAGVIKRVVSDPCFATEFVDKSMYSLSRSWGSGYETGPFMEFLGASNSLRLLFLDEKFPLPDYMQIHISCFLRKYETAPLVQPDDLYNLMFNAMKHHWENHEAAEFLLSDLHFYKVLYKVVCSSAFQSSINASNLSIERKFPKYIDHPTTVNTYPPVNGQSALMLTLHFGMKPAVKILVDAGAYITEPAACGKSALQIAQDNAKGNHPRQWVASFNSDSEEFVEMNIDSRRVYYIRAAAAKDLWVSEDTDREMLEILLQALRDRGEEIIEVADELPPSKWDVLKCKSREVMKWFFKPHYEYDADTLREAGIYVLLLTTLSLVSTFKVLKSEFGDLTAKIARFFSRPIVLLAIFGWFLSFFFRSTST

SEQ ID NO: 12157 - DNA, 1083 bp, Muscodor strobelii
  misc_feature: SGI EST ID NO. CUFF.28836.0
  misc_feature: Variant of the nucleotide sequence at SEQ ID NO 12155
gttttgcgactgagtttgtggataaaagtatgtattcactgtcaaggtcatgggggtctggatatgagacaggaccattcatggaatttctcggtgccagcaacagtctacgtctgttgttcctggatgagaaatttccactgcctgactatatgcagattcacatttcctgcttcctgaggaaatatgagacagctccactcgttcaaccggatgatctttataacttgatgttcaacgcaatgaaacatcactgggaaaaccatgaagctgcagagtttctcttaagcgatcttcatttctacaaggtactttacaaggtcgtttgttcatcggcattccaatcctcaataaatgcatcaaatctatcgatcgaaagaaagtttccaaaatacatagaccacccaactacggtcaatacttatccacctgtcaatggccagtcagctttaatgcttactctgcatttcggcatgaaacctgcagtgaagattttggtcgatgccggagcttacataacggagccagcagcatgtgggaaatcagcgttacaaattgcccaggataatgcgaagggtaatcacccccgacaatgggttgcaagtttcaattccgacagtgaagagtttgttgagatgaacatagattcgcgccgtgtttattacataagagcggctgctgctaaagacctgtgggtctctgaagataccgacagagagatgctggagatcctcctccaagcactgagggatcgaggggaagaaatcatagaagttgcagatgagctgccacctagcaaatgggatgttctcaaatgcaagagccgcgaagtcatgaaatggttcttcaagcctcactacgaatatgacgcagatactcttcgagaggccggcatttacgtgcttctactgaccactttgtcactcgtttcaactttcaaggttcttaagtccgagttcggcgatttgaccgccaagatcgcgaggttcttttcgagacctattgtactgcttgctatatttggatggtttctctcatttttctttcgatccacatctacatagtgtacggaatgcttcaaga

SEQ ID NO: 12158 - DNA, 639 bp, Muscodor strobelii
  misc_feature: SGI cDNA ID NO. 563936
  misc_feature: Encodes the peptide sequence at SEQ ID NO 12159
atgagttttcctaccaagctcgttataggcctcctcgcctttggccgagcatgggcgagcgagcttcagggcttcgattgccctggcgaaccaaataaccataccgtggcgcccacctactacattagcgatcaaatcgtgatcacgtggcatatggacttcacagatgccctgctgaagatacacgaaattgtagatgacaacatcacctcatgcgtgagtctttttaccgagcctaccaatgaaacaagctatacttggatcgtgtcgacatatggttttgacatcgacaacggcgactcggtgttttattttgccgtatatgccgcgagtgatgactttccatcattcatctcacgcaatgtctccattgtatcagcgaaagacgtcaagtctgcagatgacacctcaggttcggtgtcaacagctccggtaaaatcacagctagaaaaagcgacagatgattctgaaaatgaggacggacttgatactaccgagaaggatctcattatttcactaacaacagttgggggtccatccttggcgctaggaggagcattttggtatcgcagacgaaagaacaagaatagttcagagaaggatggagcacaaaatcagcagagtgctgaccaggcttga

SEQ ID NO: 12159 - protein, 212 aa, Muscodor strobelii
  misc_feature: SGI Peptide ID NO. 563936
MSFPTKLVIGLLAFGRAWASELQGFDCPGEPNNHTVAPTYYISDQIVITWHMDFTDALLKIHEIVDDNITSCVSLFTEPTNETSYTWIVSTYGFDIDNGDSVFYFAVYAASDDFPSFISRNVSIVSAKDVKSADDTSGSVSTAPVKSQLEKATDDSENEDGLDTTEKDLIISLTTVGGPSLALGGAFWYRRRKNKNSSEKDGAQNQQSADQA

SEQ ID NO: 12160 - DNA, 1002 bp, Muscodor strobelii
  misc_feature: SGI cDNA ID NO. 563937
  misc_feature: Encodes the peptide sequence at SEQ ID NO 12161
atgccaaaccagttaccgaccacacatgatgccgaggccctcaccggcgactcacaaccagactgttctatcactatgaacaacgaatcacagtcctcatcaacttctaaatttggcgcaggctacctccttctcaaaccaggcaactggagaaccctttgcttgatctacttggtgttgtttaagccgttcttatttttacgacatcctttcgatctagcatatgcgaagctccgaaacaagttctcaaaagactcaacagagacacgtcaaagccatgatgccctccaggctgaccgttgggtgacgaagctcgaggaccaaaagaacactcccaaaaaagatttcaccacgaagacttggtctcttttctggacattacggcttttaacacttctccatcgagacgaatttttcaatgaattctcagcggcatggaaagacaagtgccctgaatctgtggtgtctatattcatcaacaatgtatatcaattcgactggcattgcaaaacatctgagcatgagttcttgaggcagctgggaatgttgtatgcatactgcaaatttgatggcggccttgcaagccttttatcattgacctcgcttcgaagggttgacgtggtcaaggtgagtcagatttacgttcgacgaaccagaaacgaagggactgatcaagagtcgactcccaaggggttcgccctcgattttactgaaacctgggatagtagactcgtatttgcatccattatcacccctgcgctattcagtgcgatactctgcgttatctggcctgttgtagcggttcttagatttggagctgatgtccagacaagcattcagacgggcgtgacagtagcaggcttcatagtgacaacaggtgcattgctaatagcactgctggcttggtacgagactcttgtcaaagagaacgcgtctgctaaggtcgctctatttcgcaagccggatatccatcctgaccaagatacgcttcttgtgggctga

SEQ ID NO: 12161 - protein, 333 aa, Muscodor strobelii
  misc_feature: SGI Peptide ID NO. 563937
MPNQLPTTHDAEALTGDSQPDCSITMNNESQSSSTSKFGAGYLLLKPGNWRTLCLIYLVLFKPFLFLRHPFDLAYAKLRNKFSKDSTETRQSHDALQADRWVTKLEDQKNTPKKDFTTKTWSLFWTLRLLTLLHRDEFFNEFSAAWKDKCPESVVSIFINNVYQFDWHCKTSEHEFLRQLGMLYAYCKFDGGLASLLSLTSLRRVDVVKVSQIYVRRTRNEGTDQESTPKGFALDFTETWDSRLVFASIITPALFSAILCVIWPVVAVLRFGADVQTSIQTGVTVAGFIVTTGALLIALLAWYETLVKENASAKVALFRKPDIHPDQDTLLVG

SEQ ID NO: 12162 - DNA, 2031 bp, Muscodor strobelii
  misc_feature: SGI cDNA ID NO. 563938
  misc_feature: Encodes the peptide sequence at SEQ ID NO 12163
atgagtgacagcgtctatctgggtccctggatcaactggtcgcgcggagcagtccttggtcagactctgacgaccacgaagttcagtggcaatctcctcatcgcttttacagcatttttcatcgcatttgtagcaacacggttctggaaagtcatttgtttcttcttgcataactattactccactcagcgaccacagaccaccgtacatcagcaatgccaggtcattttacgaaactcgtcatccccagaggctggcttggcatcattgttgcagttactttgggcctggaagacacaccaaggacctatgatcgtggttcttttgccagtggtgctcgcgacattgtgtttatccgcttttacagtcgcaggtggcttctcgtcaagcatctcaactagcataggagatgacgtactagttaggagtgccaactgcggttttgtcctcggtagttgggatactctggcaccgtactatgcatccaccggtagaaagctgagcgatgcggcgaactacgcacaacaatgttacggtgcaaacaactctagtcttcatgattgtggtactttcgtcacgcctagcataccaattgctagtattaataccagctttgaatgtccctttcagggtggtatatgccgaactaacgactccaacatccatgtcgacactggatacatcgacagtaacgaccatcttggattgaatgcgcccaagtctgaaaggttcgagtataggtatgtgttgagttgtgcaccgcttaacactgaagggtatactagcgagtttgtcgcaaacaatgagacttgggtaagatatcattatgggacatttacagtaccggatggaaggaatcagaccacggtggattatgtccgcgtggccccaagcgcagaagttcagtatcgcgttgcaccgttcgcaactgaagatggaaataattatcaactgagtgaagtctctacatatacgatagatggtgaaccggattattccgactcgaacatgttcatacctgagttgagaagacgagatggcgacgtcgtgattgcatttttgtctggtaatggggtagttttcaatcaacagatggacgacgattggtatagggcgaagacagtgcagggtgatgcaaaggttggcaattatgtcgaagacctgaggatataccgacctattgatgccgcttcgccattaggctgtgtcgagcaatggcagtggtgtaattcagcatactcacgagagagcggctgtggaccgctagcaagtcgtcaagatgctgtgaatggcgcggcacctctgttcaatctgtctgtccaggatcttgaagtcgaccaaccatcctcaaacggagtcgatcaaacaaaccttatctggggtaacctcacccagattacgaatccagttcgtttgcctacaattctaggatttctcggcgcaaagtctctcaattctcaagaaaagttgttcgctggtgttcaatggcctctaccgaaaagccaatggcaactggatgttatacaatggcttgaaatcatacttgcgtcgctgcaggctgcgcaggtcgatacagtggctgggacgtatgtgcccgaactcgaaagaacccgtttaggacccctcaccgcgcaagaaagaaaattttgcaatagccaaaaaatacgaagcacggcatacgtttcagtttcgcttttaggcttatacatcatattcattgtcggcggtacaatcgtattattctcatatatgctagagcccatccacgccttctttcacatgtattttggatacagatcctatgcctatctcgaatggactgcgaactcaagtctacagctgcatcgtttggcgcacgaggacttcagtggtgagaaatgggcaagatgtaccggcactgtgccaattacgagtcctgacacgatgttggcggagttgaatattgacgacgcgactcatcctatcgttgggttggttactaagagcggcggtgtagataagcctgattgcagtgtgagatgcactatatag

SEQ ID NO: 12163 - protein, 676 aa, Muscodor strobelii
  misc_feature: SGI Peptide ID NO. 563938
  misc_feature (4)..(661): NCBI GI: 189194015 Blast Desc: conserved [Pyrenophora tritici-repentis Pt-1C-BFP] gi|187978910|gb|EDU45536.1| conserved [Pyrenophora tritici-repentis Pt-1C-BFP]
  misc_feature (5)..(654): NCBI GI: 169615058 Blast Desc: SNOG_10683 [Phaeosphaeria nodorum SN15] gi|111060957|gb|EAT82077.1| SNOG_10683 [Phaeosphaeria nodorum SN15]
  misc_feature (2)..(643): NCBI GI: 115399382 Blast Desc: [Aspergillus terreus NIH2624] gi|114192163|gb|EAU33863.1| [Aspergillus terreus NIH2624]
  misc_feature (2)..(643): NCBI GI: 119474227 Blast Desc: NFIA_004500 [Neosartorya fischeri NRRL 181] gi|119407142|gb|EAW17092.1| conserved [Neosartorya fischeri NRRL 181]
  misc_feature (2)..(650): NCBI GI: 70986226 Blast Desc: conserved [Aspergillus fumigatus Af293] gi|66846236|gb|EAL86569.1| conserved [Aspergillus fumigatus Af293]
  misc_feature (2)..(650): NCBI GI: 159128250 Blast Desc: conserved [Aspergillus fumigatus A1163]
  misc_feature (1)..(620): NCBI GI: 121699395 Blast Desc: ACLA_082720 [Aspergillus clavatus NRRL 1] gi|119396149|gb|EAW06581.1| ACLA_082720 [Aspergillus clavatus NRRL 1]
  misc_feature (2)..(620): NCBI GI: 169772941 Blast Desc: [Aspergillus oryzae RIB40] gi|83768800|dbj|BAE58937.1| protein product [Aspergillus oryzae]
  misc_feature (4)..(616): NCBI GI: 169618215 Blast Desc: SNOG_12297 [Phaeosphaeria nodorum SN15] gi|160703576|gb|EAT80110.2| SNOG_12297 [Phaeosphaeria nodorum SN15]
  misc_feature (5)..(655): NCBI GI: 256723662 Blast Desc: NECHADRAFT_86728 [Nectria haematococca mpVI 77-13-4]
MSDSVYLGPWINWSRGAVLGQTLTTTKFSGNLLIAFTAFFIAFVATRFWKVICFFLHNYYSTQRPQTTVHQQCQVILRNSSSPEAGLASLLQLLWAWKTHQGPMIVVLLPVVLATLCLSAFTVAGGFSSSISTSIGDDVLVRSANCGFVLGSWDTLAPYYASTGRKLSDAANYAQQCYGANNSSLHDCGTFVTPSIPIASINTSFECPFQGGICRTNDSNIHVDTGYIDSNDHLGLNAPKSERFEYRYVLSCAPLNTEGYTSEFVANNETWVRYHYGTFTVPDGRNQTTVDYVRVAPSAEVQYRVAPFATEDGNNYQLSEVSTYTIDGEPDYSDSNMFIPELRRRDGDVVIAFLSGNGVVFNQQMDDDWYRAKTVQGDAKVGNYVEDLRIYRPIDAASPLGCVEQWQWCNSAYSRESGCGPLASRQDAVNGAAPLFNLSVQDLEVDQPSSNGVDQTNLIWGNLTQITNPVRLPTILGFLGAKSLNSQEKLFAGVQWPLPKSQWQLDVIQWLEIILASLQAAQVDTVAGTYVPELERTRLGPLTAQERKFCNSQKIRSTAYVSVSLLGLYIIFIVGGTIVLFSYMLEPIHAFFHMYFGYRSYAYLEWTANSSLQLHRLAHEDFSGEKWARCTGTVPITSPDTMLAELNIDDATHPIVGLVTKSGGVDKPDCSVRCTI

SEQ ID NO: 12164 - DNA, 631 bp, Muscodor strobelii
  misc_feature: SGI EST ID NO. CUFF.28855.0
  misc_feature: Variant of the nucleotide sequence at SEQ ID NO 12162
tgagttgtgcaccgcttaacactgaagggtatactagcgagtttgtcgcaaacaatgagacttgggtaagatatcattatgggacatttacagtaccggatggaaggaatcagaccacggtggattatgtccgcgtggccccaagcgcagaagttcagtatcgcgttgcaccgttcgcaactgaagatggaaataattatcaactgagtgaagtctctacatatacgatagatggtgaaccggattattccgactcgaacatgttcatacctgagttgagaagacgagatggcgacgtcgtgattgcatttttgtctggtaatggggtagttttcaatcaacagatggacgacgattggtatagggcgaagacagtgcagggtgatgcaaaggttggcaattatgtcgaagacctgaggatataccgacctattgatgccgcttcgccattaggctgtgtcgagcaatggcagtggtgtaattcagcatactcacgagagagcggctgtggaccgctagcaagtcgtcaagatgctgtgaatggcgcggcacctctgttcaatctgtctgtccaggatcttgaagtcgaccaaccatcctcaaacggagtcgatcaaacaaaccttatctg

SEQ ID NO: 12165 - DNA, 2835 bp, Muscodor strobelii
  misc_feature: SGI cDNA ID NO. 563939
  misc_feature: Encodes the peptide sequence at SEQ ID NO 12166
atggaccctcttaccatacttacagttgcaacatctgctgtccaattcgtggatctcagctctaggttttataacgcgaatacccgattggaggctgcactggctgcaaagcgcctgaaaaggccgccgaccgaagccgaacgtgacgtcctcagcaccgctaccgaatgcgcgaagattggggcgactctgatcaaagccctcggagacctcaatttgaaaaacggcgattgctctgtctggaagaaaattcgggcaagtttcaaagccgtatataaccaggaaaagctagatgctctgcaacagagattgaaggatttgcgagatcagctcatgtttgtgattctgctgaatttgagagaagacgtggaaaaggttgcaactcaaatcaatacaaagcacactgaaagcgatgcgatatggggagagtcgtcaagtatagggaacgagatcttggcgcaggtcaagtctatgaaacagtggcagcttaatctcaatacggccttgctttacctcccagataaaaattcggctacagagttgtttgcggaagcaggagataagatcgaaatgccatcatggcccaatactgcggttgccaaatcccttgttggtagacttctgagccatctggagtttggggatatctcgacccgtgaacatcgggtttccgaagcgcacgccaaaaccttcgagtggatatttgtcgagccccaaagccagcgacctacaaattggtgcagctttgcacattggcttgagagcgacaattcactttattggataactggcaaggcaggctcgggcaagagtacacttatgaaatacattttgcttgatcaacgaacactagctcccttgcagtattggggaaatgggacacctgttatcacgccctcgttctatacctggctggccggttccgatgagcttcaacactgtcaacagggattactaaggacgctacttgctcaagcgctacacactttgatggaaatagctcctgaagcaacgctaagcaggtggaattcgtttgctctgtctaaaaatctaagtgggccgtgggatttggtcgagctccaacagaccttaagattcttgctggaagaccaagaattcgctgtgaagtactgtttcttcatcgatgggctagatgagctaaagggcgacatttcaggcgtgctttcactcattcgcaagatctcacagtacccgaatgtgaagctttgcatcagcagtcggccgtggataatatttgaggacgaattctgcacgagtccacagctcatgctgcaagacctgacatataatgacatcaaactgtatctcgagacggaacttggctcaagtgttgcattcagtgagctccggaggatggacgaaggtgaggccgacgctctgatccgagacgtcgcagacaaatcgtcaggggtctttctatgggtgatccttgtggctcgctctctgaaagatggtctgagagacggcgataggctcctggatctgcgaaagaaactcaatgccctccctctagagctggatgacctgttccggactatactgcatgattttgacggtaaatatatggaacaggcatccgctatattccagattgtgaaagcatcaccgtgttccttgtctctcctctgcctgtcgcttgcagacgaagaagacccggagattgctattcaagcccgcgtaacaccaactctctttttccctaaacaaagattctaccgggccctcaacatgagacaccggcttgatagtagatgtaaatggcttctcgaggttgcaccgattcggatcaaagcttctaacccatctgaggataaccgtcctgcggattcagacgcagttgcagataataaccaggatactgttcctgtaatcacaatcacaccggcaccaacctcagattgcgaccttgatgaccaaacaattctacgagatctggctcggcttccgcccgagagaggagatctcctagctaatgcggaagtcggatatttgcacagaactgtcaaagatttccttgaccaagaagatatatggaggcagatcacggctgccacaaatcccaaattcagtcctcaacttgcgttggctcgatcatacctgctccagctagaatgggtccactacaacttgagtatgatagttacagaccaagtctgggatgcgattctttgggtgttggatttgtcagtgatggccgagacttcgggattaatcgatatgcacctgttgaacgaattagaaaaagtcatggcaccattattctcgaacccggtccaatggccaagctccctaggatcgtctccgattgatttcttacatttcgcagtgcggtgcggtcttcatgaatatctggctgaaagacggagccttgcgcatcgttcagacgagtatatcaaggaactcttgacgactgccgtctctaattctgggctcaaatattatcgcccgagaggacccccattcatttgtgagagaccagttttggaaacagtcaaggcactactggataaaagcagcctaccagaggcagagaaactttcctggatccagcaagctcagcacgcgaatagaaagaaggaaacatcgaaagttgacgctgaagccggtgtgctcggactccctaccacatccagcgctttgaccagccccgaagatacactggtcggcataagtgagaagcagtcagttatcaagagtagaaacgttagttctagcgggactagcgatggaatttctagagctggaaggacgggcaattgggtgaagaagttattttcaaagatctcgctgaggcctggcggaaattcaaactaa

SEQ ID NO: 12166 - protein, 944 aa, Muscodor strobelii
  misc_feature: SGI Peptide ID NO. 563939
  misc_feature (1)..(848): NCBI GI: 261190024 Blast Desc: conserved [Ajellomyces dermatitidis SLH14081] gi|239591250|gb|EEQ73831.1| conserved [Ajellomyces dermatitidis SLH14081]
  misc_feature (1)..(848): NCBI GI: 225684243 Blast Desc: conserved [Paracoccidioides brasiliensis Pb03]
  misc_feature (1)..(848): NCBI GI: 226293863 Blast Desc: conserved [Paracoccidioides brasiliensis Pb18]
  misc_feature (46)..(791): NCBI GI: 238501160 Blast Desc: conserved [Aspergillus flavus NRRL3357] gi|220692051|gb|EED48398.1| conserved [Aspergillus flavus NRRL3357]
  misc_feature (1)..(597): NCBI GI: 169768460 Blast Desc: [Aspergillus oryzae RIB40] gi|238497764|ref|XP_002380117.1| conserved [Aspergillus flavus NRRL3357] gi|83766558|dbj|BAE56698.1| protein product oryzae]
  misc_feature (219)..(601): NCBI GI: 171682584 Blast Desc: protein product [Podospora anserina] gi|170941251|emb|CAP66901.1| protein product [Podospora anserina]
  misc_feature (1)..(797): NCBI GI: 256726514 Blast Desc: NECHADRAFT_79534 [Nectria haematococca mpVI 77-13-4]
  misc_feature (145)..(542): NCBI GI: 154298433 Blast Desc: BC1G_11401 [Botryotinia fuckeliana B05.10] gi|150857997|gb|EDN33189.1| BC1G_11401 [Botryotinia fuckeliana B05.10]
  misc_feature (1)..(599): NCBI GI: 154293653 Blast Desc: BC1G_14084 [Botryotinia fuckeliana B05.10] gi|150845240|gb|EDN20433.1| BC1G_14084 [Botryotinia fuckeliana B05.10]
  misc_feature (1)..(599): NCBI GI: 116195412 Blast Desc: CHGG_04304 [Chaetomium globosum CBS 148.51] gi|88180217|gb|EAQ87685.1| CHGG_04304 [Chaetomium globosum CBS 148.51]
MDPLTILTVATSAVQFVDLSSRFYNANTRLEAALAAKRLKRPPTEAERDVLSTATECAKIGATLIKALGDLNLKNGDCSVWKKIRASFKAVYNQEKLDALQQRLKDLRDQLMFVILLNLREDVEKVATQINTKHTESDAIWGESSSIGNEILAQVKSMKQWQLNLNTALLYLPDKNSATELFAEAGDKIEMPSWPNTAVAKSLVGRLLSHLEFGDISTREHRVSEAHAKTFEWIFVEPQSQRPTNWCSFAHWLESDNSLYWITGKAGSGKSTLMKYILLDQRTLAPLQYWGNGTPVITPSFYTWLAGSDELQHCQQGLLRTLLAQALHTLMEIAPEATLSRWNSFALSKNLSGPWDLVELQQTLRFLLEDQEFAVKYCFFIDGLDELKGDISGVLSLIRKISQYPNVKLCISSRPWIIFEDEFCTSPQLMLQDLTYNDIKLYLETELGSSVAFSELRRMDEGEADALIRDVADKSSGVFLWVILVARSLKDGLRDGDRLLDLRKKLNALPLELDDLFRTILHDFDGKYMEQASAIFQIVKASPCSLSLLCLSLADEEDPEIAIQARVTPTLFFPKQRFYRALNMRHRLDSRCKWLLEVAPIRIKASNPSEDNRPADSDAVADNNQDTVPVITITPAPTSDCDLDDQTILRDLARLPPERGDLLANAEVGYLHRTVKDFLDQEDIWRQITAATNPKFSPQLALARSYLLQLEWVHYNLSMIVTDQVWDAILWVLDLSVMAETSGLIDMHLLNELEKVMAPLFSNPVQWPSSLGSSPIDFLHFAVRCGLHEYLAERRSLAHRSDEYIKELLTTAVSNSGLKYYRPRGPPFICERPVLETVKALLDKSSLPEAEKLSWIQQAQHANRKKETSKVDAEAGVLGLPTTSSALTSPEDTLVGISEKQSVIKSRNVSSSGTSDGISRAGRTGNWVKKLFSKISLRPGGNSN

SEQ ID NO: 12167 - DNA, 748 bp, Muscodor strobelii
  misc_feature: SGI EST ID NO. CUFF.28876.0
  misc_feature: Variant of the nucleotide sequence at SEQ ID NO 12165
ctctgatcaaagccctcggagacctcaatttgaaaaacggcgattgctctgtctggaagaaaattcgggcaagtttcaaagccgtatataaccaggaaaagctagatgctctgcaacagagattgaaggatttgcgagatcagctcatgtttgtgattctgctgaatttgagagaagacgtggaaaaggttgcaactcaaatcaatacaaagcacactgaaagcgatgcgatatggggagagtcgtcaagtatagggaacgagatcttggcgcaggtcaagtctatgaaacagtggcagcttaatctcaatacggccttgctttacctcccagataaaaattcggctacagagttgtttgcggaagcaggagataagatcgaaatgccatcatggcccaatactgcggttgccaaatcccttgttggtagacttctgagccatctggagtttggggatatctcgacccgtgaacatcgggtttccgaagcgcacgccaaaaccttcgagtggatatttgtcgagccccaaagccagcgacctacaaattggtgcagctttgcacattggcttgagagcgacaattcactttattggataactggcaaggcaggctcgggcaagagtacacttatgaaatacattttgcttgatcaacgaacactagctcccttgcagtattggggaaatgggacacctgttatcacgccctcgttctatacctggctggccggttccgatgagcttca

SEQ ID NO: 12168 - DNA, 789 bp, Muscodor strobelii
  misc_feature: SGI cDNA ID NO. 563940
  misc_feature: Encodes the peptide sequence at SEQ ID NO 12169
atgtccaacaaaggtaacaccctccaccgcgacacggctctcgggccaaatgactatctcactagctccaacggcaagttcaagctgatcatgcaaaccgatggcaacatcgtgctgtacgcgtcaagcgggtcgaatgacgctgcggcattcacaaatgccgcaacttgggcttcaaataccgttggcaagcacatcacccggctggtcatgcaaggagacggcaacctcgtggggtacgattcgccgggcaagccgcattgggccacgaacacgttttctgtcgggcaggacggaccgcgcctcgtgatgcaagacgatggcaatcttgtggtctatccgagcggaggagacgacaacgcctcgtgggccagcggcaccttcaacccggtgcccttctacaaagtcaattttgagaaccattgcgacggcattagcgtctatccatctgtccgtgaccgaacggggagtaaagaactgtggacaggtcgctggaacggcttatattggctgatctcgcaaaatcgatcgatggagtgcaatctcagtgaggatctagacgaacaaaatctacccgatcaaagtaacaagatcgggaaacgcattggcggggacaacgctgtagtatgcttggggtttaatgccctcgatggcaacgatcgctgggtcgcagcttcaacacaacaattcgtatataagcccgattgtggtatcctggtcactgtccacgcgtcgggatgggcacaaaacaaggagagcgctacatacgatggccaaaaacgtggttga

SEQ ID NO: 12169 - protein, 262 aa, Muscodor strobelii
  misc_feature: SGI Peptide ID NO. 563940
  misc_feature (6)..(130): Pfam Id: PF01453 Pfam Desc: D-mannose binding lectin
  misc_feature (6)..(78): Pfam Id: PF01453 Pfam Desc: D-mannose binding lectin
  misc_feature (80)..(128): Pfam Id: PF01453 Pfam Desc: D-mannose binding lectin
  misc_feature (8)..(127): NCBI GI: 256393277 Blast Desc: Curculin domain protein (mannose-binding) lectin [Catenulispora acidiphila DSM 44928] gi|256359503|gb|ACU73000.1| Curculin domain protein (mannose-binding) lectin [Catenulispora
  misc_feature (3)..(127): NCBI GI: 221108746 Blast Desc: [Hydra magnipapillata] gi|221112593|ref|XP_002169060.1| [Hydra magnipapillata]
  misc_feature (5)..(113): NCBI GI: 146161312 Blast Desc: TTHERM_00037370 [Tetrahymena thermophila] gi|146146807|gb|EAR86248.2| TTHERM_00037370 [Tetrahymena thermophila SB210]
  misc_feature (6)..(127): NCBI GI: 227980927 Blast Desc: D-mannose binding lectin family protein [Tsukamurella paurometabola DSM 20162] gi|227963485|gb|EEJ98796.1| D-mannose binding lectin family protein [Tsukamurella paurometabola DSM
  misc_feature (6)..(125): NCBI GI: 218931110 Blast Desc: Mannose-specific lectin [Salmo salar] gi|209733484|gb|ACI67611.1| Mannose-specific lectin precursor [Salmo salar] gi|209735058|gb|ACI68398.1| Mannose-specific lectin
  misc_feature (7)..(130): NCBI GI: 116662219 Blast Desc: curculin domain-containing protein [Arthrobacter sp. FB24] gi|116612971|gb|ABK05693.1| Curculin domain protein (mannose-binding) lectin [Arthrobacter sp. FB24]
  misc_feature (18)..(128): NCBI GI: 242761114 Blast Desc: TSTA_062180 [Talaromyces stipitatus ATCC 10500] gi|218723313|gb|EED22730.1| TSTA_062180 [Talaromyces stipitatus ATCC 10500]
  misc_feature (6)..(125): NCBI GI: 185132409 Blast Desc: lectin [Oncorhynchus mykiss] gi|51949904|gb|AAU14874.1| lectin [Oncorhynchus mykiss]
  misc_feature (6)..(114): NCBI GI: 87080658 Blast Desc: lily-type lectin [Platycephalus indicus]
  misc_feature (6)..(130): NCBI GI: 94448672 Blast Desc: mannose-binding lectin [Lubomirskia baicalensis]
MSNKGNTLHRDTALGPNDYLTSSNGKFKLIMQTDGNIVLYASSGSNDAAAFTNAATWASNTVGKHITRLVMQGDGNLVGYDSPGKPHWATNTFSVGQDGPRLVMQDDGNLVVYPSGGDDNASWASGTFNPVPFYKVNFENHCDGISVYPSVRDRTGSKELWTGRWNGLYWLISQNRSMECNLSEDLDEQNLPDQSNKIGKRIGGDNAVVCLGFNALDGNDRWVAASTQQFVYKPDCGILVTVHASGWAQNKESATYDGQKRG

SEQ ID NO: 12170 - DNA, 1026 bp, Muscodor strobelii
  misc_feature: SGI cDNA ID NO. 563941
  misc_feature: Encodes the peptide sequence at SEQ ID NO 12171
atggctcaaattatggattctccaatagtcacgcagctcttccgccagctatttcggcaccccgcttgtcaatcaaggaagaatcaagctgcattgagcgcatgtctacaccatggccgtcgaccccagcaccgaaacgagcagcagaggagaggtctggcgagtcgccgagatgctacgcgtggtgaaaagccaatagagaagaataatgaagccaattggcaacagagaaccgagcttttctcggtggatatgacggacgagtacaagaaatatcccatggtcacagccaacgacttgcgatcgcgcagagatcggccgaggagagtcaagatgttgatgcgggactttatagaagacagtttatacaacccgcactacggctacttctccaaacaagtcgtaatcttcagtcccggcgaacccttccacttcaactccctccccgacgagcccaccttccacacccaagtaggggaccgctacactgagttcgagaacctcctcgacgcaaaacaatacgacgaaacacgacagctctggcacacacccaccgagctcttccgcccctactacggagaagcaatcgcccgctatctaatgtctaactacataatgtccacatacccctatcacgacctaataatctacgagatgggcgccggccgcggaaccctcatgctcaacatcctcgattatatcagagacgtcgagccctcagtctacgacagaacaaaatacaaaatcatcgagatctctccgtctctcgccgccttacaaagcagtcaaatgatggctgatgcgcaatctcgcggccatgcttccaaggtggaaatcatcaataaatcaatctttgactgggactctccagtcccgtctccttgcttcttcttagccatggaagtcttcgacaatttcgcccacgacatcgtgcggtacgacttagcgaccgaggagccgcttcaaggcacagtactcatcgatgaactgggtgatttctatgagtttttacgagccggttcttga

SEQ ID NO: 12171 - protein, 341 aa, Muscodor strobelii
  misc_feature: SGI Peptide ID NO. 563941
  misc_feature (195)..(341): Pfam Id: PF02636 Pfam Desc: Uncharacterized ACR, COG1565
  misc_feature (195)..(336): Pfam Id: PF02636 Pfam Desc: Uncharacterized ACR, COG1565
  misc_feature (5)..(336): NCBI GI: 171687677 Blast Desc: protein product [Podospora anserina] gi|170943800|emb|CAP69452.1| protein product [Podospora anserina]
  misc_feature (5)..(336): NCBI GI: 261355166 Blast Desc: conserved [Verticillium albo-atrum VaMs.102]
  misc_feature (5)..(336): NCBI GI: 85119707 Blast Desc: NCU02565 [Neurospora crassa OR74A] gi|28927508|gb|EAA36460.1| conserved [Neurospora crassa OR74A] gi|38567141|emb|CAE76436.1| conserved [Neurospora crassa]
  misc_feature (5)..(336): NCBI GI: 261197878 Blast Desc: conserved [Ajellomyces dermatitidis SLH14081] gi|239595304|gb|EEQ77885.1| conserved [Ajellomyces dermatitidis SLH14081] gi|239607731|gb|EEQ84718.1| conserved [Ajellomyces
  misc_feature (5)..(336): NCBI GI: 225561951 Blast Desc: conserved [Ajellomyces capsulatus G186AR]
  misc_feature (5)..(336): NCBI GI: 240275566 Blast Desc: conserved [Ajellomyces capsulatus H143]
  misc_feature (5)..(339): NCBI GI: 169766396 Blast Desc: [Aspergillus oryzae RIB40] gi|238483107|ref|XP_002372792.1| conserved [Aspergillus flavus NRRL3357] gi|83765524|dbj|BAE55667.1| protein product oryzae]
  misc_feature (5)..(336): NCBI GI: 226278188 Blast Desc: conserved [Paracoccidioides brasiliensis Pb01]
  misc_feature (2)..(336): NCBI GI: 225679300 Blast Desc: conserved [Paracoccidioides brasiliensis Pb03]
  misc_feature (5)..(336): NCBI GI: 226291020 Blast Desc: conserved [Paracoccidioides brasiliensis Pb18]
MAQIMDSPIVTQLFRQLFRHPACQSRKNQAALSACLHHGRRPQHRNEQQRRGLASRRDATRGEKPIEKNNEANWQQRTELFSVDMTDEYKKYPMVTANDLRSRRDRPRRVKMLMRDFIEDSLYNPHYGYFSKQVVIFSPGEPFHFNSLPDEPTFHTQVGDRYTEFENLLDAKQYDETRQLWHTPTELFRPYYGEAIARYLMSNYIMSTYPYHDLIIYEMGAGRGTLMLNILDYIRDVEPSVYDRTKYKIIEISPSLAALQSSQMMADAQSRGHASKVEIINKSIFDWDSPVPSPCFFLAMEVFDNFAHDIVRYDLATEEPLQGTVLIDELGDFYEFLRAGS

SEQ ID NO: 12172 - DNA, 1997 bp, Muscodor strobelii
  misc_feature: SGI EST ID NO. CUFF.28894.0
  misc_feature: Variant of the nucleotide sequence at SEQ ID NO 12170
cgacttcaaaaaacgacgtcgatcacccgaacatctcgacttaatcagcttcaagctcacgagaccttggcgcaatcctctttttgcgcgccatggctcaaattatggattctccaatagtcacgcagctcttccgccagctatttcggcaccccgcttgtcaatcaaggaagaatcaagctgcattgagcgcatgtctacaccatggccgtcgaccccagcaccgaaacgagcagcagaggagaggtctggcgagtcgccgagatgctacgcgtggtgaaaagccaatagagaagaataatgaagccaattggcaacagagaaccgagcttttctcggtggatatgacggacgagtacaagaaatatcccatggtcacagccaacgacttgcgatcgcgcagagatcggccgaggagagtcaagatgttgatgcgggactttatagaagacagtttatacaacccgcactacggctacttctccaaacaagtcgtaatcttcagtcccggcgaacccttccacttcaactccctccccgacgagcccaccttccacacccaagtaggggaccgctacactgagttcgagaacctcctcgacgcaaaacaatacgacgaaacacgacagctctggcacacacccaccgagctcttccgcccctactacggagaagcaatcgcccgctatctaatgtctaactacataatgtccacatacccctatcacgacctaataatctacgagatgggcgccggccgcggaaccctcatgctcaacatcctcgattatatcagagacgtcgagccctcagtctacgacagaacaaaatacaaaatcatcgagatctctccgtctctcgccgccttacaaagcagtcaaatgatggctgatgcgcaatctcgcggccatgcttccaaggtggaaatcatcaataaatcaatctttgactgggactctccagtcccgtctccttgcttcttcttagccatggaagtcttcgacaatttcgcccacgacatcgtgcggtacgacttagcgaccgaggagccgcttcaaggcacagtactcatcgatgaactgggtgatttctatgagtttttacgagccggttcttgatcccgtggctgcgagatatatgcgagtccggcatgctgcgacggggggtagatacccggcaccgtatgcctcgagtaaggtgttgagaagcttgaagagaagtttatccttctcggcgaatttgagtgagccggagttcctgccgacgaggttgatgcagttcttcgatattttggagaagtacttcccagcacataggttgcttacgagtgattttcatacgttgcctgatgcgatcaagggactcaatagtccggtcgtgcagacgaggtatcagaggaggatggttcctgtttctacgcccttggtgcatcaagggtatttcgatattctatttccgacagatttccgtataatggagtctgtgtacggcgccatcacggggaaactcacaagagtcatgtctcatgaggatttcatgcgctcttgggcgtatctggaggatacgcagacccagagtggggaaaatccgttattgagctggtataagaatgcgagtatgatggttactgtataaaacttgcatctactgcgacaggtgcgggtgtgtcgatgtttgtgtatagaataggggctcgatagaaggtgtgcacgatgaacacgcatggtgagaggataaggccatggagttgactatgtgctgtcgatcggctgtgtatataaattagtaagatcttaccgatatgggcacctttacaattcctgccgtcgaaaagtcgtctctcgtatgaacccccagttgactctcgttgacctaatctaactacaaacccgcaaacgtctatctgcaaagctgattgagtcaatccgtgtagcttacgacggtggtagagatacgctgctgtagtgtcgtcatagtcgaggtggtttgggaataaa

SEQ ID NO: 12173 - DNA, 1371 bp, Muscodor strobelii
  misc_feature: SGI cDNA ID NO. 563942
  misc_feature: Encodes the peptide sequence at SEQ ID NO 12174
atgtctctaggcgaccaccccagagcctatggcacagccgccatagccatcgccttcgcggcggggataatagtaacactaggcttcaaagacctctacccagacttagaaaggcgatatcaacaacgccgtctaaacacccgcagaacgcggcgcaactcaacctcaacggtcgcatcagaccaccgtagatcaagtctcttctggggacccgtctcgctcgaagaccatgaaacatcaaccatctcagccctcactcagcggtcatcaggcatctcctccggaatatcaggaaccataggaaacacacccctcatagaaatccactccctctccctagcaaccggccgtacaatcctcgccaaagccgaatttctcaacggcgcgggaaacagtcccaaggaccgcgtggcactatccatgatcgaaaccgccgaggcagcaggtctcttggtcccctggcgtggcgacacaatctacgaaggaaccgtaggtagcacaggaatcagcatcgctgccctcgcgcgggctcgcgggtacaaagcacatatctgcatgccagacgaccaagcgcatgaaaaatccgatttactgcatcacttaggcgctactgtagagagggtccccgtagctcctatcacatcgccagaacactacgtcaaccgagcaaggagactcgcagaggaacacactgcctctaaactagatagcagcgtaggattcttcgcagaccaattcgaaaacccctcaaactacaccgcgcacgaaaccaccaccgggccagagatcctctcgcaatgcggcggaaacatctccgccttcgtagcaggcgccggaacaggcgggaccatcacaggcgtagcccgatatctaaaactcaccaccaaacttcccctcctcaaaataatcctcgcagatccgcaaggttccggtctatacaacaaagtccggcacggcgtgatgtactcacccacggaacgcgaggggtctcgtcgccgaacacaagtcgattccatcgtggaaggcgtcggcgtgaaccgcatcacggccaatttcagtgtcggtcaggatctaatcgatgacgctgtacgagttacggatgaacaggctatgaagatggctaggtggttggtggagaatgatgggatattctgcgggagtagtagtgccgtgaactgtgctgctgctgttgtagcagctatgaatttaccgaagggaagcacggtcgtcactgtgctttgtgactcgggcacgagacatttgagtaaattctggaagaagattggggagttgggattagaagatgaggatggggtgggtgaggatgatttatttacgatattggggatagagaacctcaaggggaaatga

SEQ ID NO: 12174 - protein, 456 aa, Muscodor strobelii
  misc_feature: SGI Peptide ID NO. 563942
  misc_feature (96)..(415): Pfam Id: PF00291 Pfam Desc: Pyridoxal-phosphate dependent enzyme
  misc_feature (1)..(434): NCBI GI: 171687679 Blast Desc: protein product [Podospora anserina] gi|170943801|emb|CAP69453.1| protein product [Podospora anserina]
  misc_feature (1)..(454): NCBI GI: 46108042 Blast Desc: FG00903.1 [Gibberella zeae PH-1]
  misc_feature (1)..(428): NCBI GI: 256734712 Blast Desc: [Nectria haematococca mpVI 77-13-4]
  misc_feature (1)..(436): NCBI GI: 156054682 Blast Desc: SS1G_06189 [Sclerotinia sclerotiorum 1980] gi|154703969|gb|EDO03708.1| SS1G_06189 [Sclerotinia sclerotiorum 1980]
  misc_feature (1)..(454): NCBI GI: 116180544 Blast Desc: CHGG_00900 [Chaetomium globosum CBS 148.51] gi|88185197|gb|EAQ92665.1| CHGG_00900 [Chaetomium globosum CBS 148.51]
  misc_feature (1)..(454): NCBI GI: 85119702 Blast Desc: cysteine synthase 2 [Neurospora crassa OR74A] gi|28927507|gb|EAA36459.1| cysteine synthase 2 [Neurospora crassa OR74A] gi|38567142|emb|CAE76437.1| related to cysteine synthase
  misc_feature (1)..(436): NCBI GI: 154296396 Blast Desc: BC1G_13024 [Botryotinia fuckeliana B05.10] gi|150843385|gb|EDN18578.1| BC1G_13024 [Botryotinia fuckeliana B05.10]
  misc_feature (17)..(451): NCBI GI: 145616050 Blast Desc: MGG_13510 [Magnaporthe grisea 70-15] gi|145009819|gb|EDJ94475.1| MGG_13510 [Magnaporthe grisea 70-15]
  misc_feature (3)..(432): NCBI GI: 261197876 Blast Desc: cysteine synthase 2 [Ajellomyces dermatitidis SLH14081] gi|239595303|gb|EEQ77884.1| cysteine synthase 2 [Ajellomyces dermatitidis SLH14081]
  misc_feature (3)..(432): NCBI GI: 239607730 Blast Desc: cysteine synthase 2 [Ajellomyces dermatitidis ER-3]
  misc_feature (102)..(427): SWISSPROT Homolog: EC 2.5.1.47 Cysteine synthase
MSLGDHPRAYGTAAIAIAFAAGIIVTLGFKDLYPDLERRYQQRRLNTRRTRRNSTSTVASDHRRSSLFWGPVSLEDHETSTISALTQRSSGISSGISGTIGNTPLIEIHSLSLATGRTILAKAEFLNGAGNSPKDRVALSMIETAEAAGLLVPWRGDTIYEGTVGSTGISIAALARARGYKAHICMPDDQAHEKSDLLHHLGATVERVPVAPITSPEHYVNRARRLAEEHTASKLDSSVGFFADQFENPSNYTAHETTTGPEILSQCGGNISAFVAGAGTGGTITGVARYLKLTTKLPLLKIILADPQGSGLYNKVRHGVMYSPTEREGSRRRTQVDSIVEGVGVNRITANFSVGQDLIDDAVRVTDEQAMKMARWLVENDGIFCGSSSAVNCAAAVVAAMNLPKGSTVVTVLCDSGTRHLSKFWKKIGELGLEDEDGVGEDDLFTILGIENLKGK

SEQ ID NO: 12175 - DNA, 921 bp, Muscodor strobelii
  misc_feature: SGI cDNA ID NO. 563943
  misc_feature: Encodes the peptide sequence at SEQ ID NO 12176
atgctgtcccagcgagaactcgagtcccggatcaaggccctgcagaaggcccaggcgaacaaggagccctcctctagcatcatcgctctcctggagggcttgaaggccgaggcccaccccaccgaggaagttctgcgcacaaccaaggccggtatcgctattggcaagcttaggggtcacagcgacaaggctatcggtcgggccgccaacgaggttgtggctaaatggaagaaggccgttgaggctgagaaaaaggcaaaaggcctgggcgtcaacagcgcccgtccccgcgagtccgcctctcctgccggcaagggtgcttctcccgcgcccgccaagtcgactccccagccagccagccgcgaggcttacacaggcgatcctgagaagcgcaagtttgccaccgacggcgtcgacatcaaccgcaccgactccaagatccgcaacaactgcatcggtgtcatctacaatgggctcgcctaccgctcgcgtgaaccgacgcaatctgttatgatcaaggctcaggaggtagaagcagctggtttcaagctgttcaacggcgagggcaacgcgtaccgagagaagataagatcgctctttgcgaacctcaagaacccaaacaacggcgacctgcgcaagaacgtcatgtccggcctcatcacacccgataagttcgtgtctatgtcctcgaaagagctgctgtcggatatgcagcgcaggatcgacgccaaactggaggaggagaacatgaagaaggcacaggtcccgatggcggagaagagcgtcagcgactccctcgagtgctcgaattgcaagaagaagatggtcagctacacgcaggcccagactcgtagtgctgatgagccgatgacgaccttctgcgaatgcatgaattgcggcaagcgctggaagttctcttga

SEQ ID NO: 12176 - protein, 306 aa, Muscodor strobelii
  misc_feature: SGI Peptide ID NO. 563943
  misc_feature (1)..(90): Pfam Id: PF08711 Pfam Desc: Transcription elongation factor S-II protein N terminal
  misc_feature (266)..(304): Pfam Id: PF01096 Pfam Desc: Transcription factor S-II (TFIIS)
  misc_feature (143)..(255): Pfam Id: PF07500 Pfam Desc: Transcription factor S-II (TFIIS), central domain
  misc_feature (2)..(306): NCBI GI: 46108040 Blast Desc: FG00902.1 [Gibberella zeae PH-1]
  misc_feature (2)..(306): NCBI GI: 154320754 Blast Desc: transcription elongation factor S-II [Botryotinia fuckeliana B05.10] gi|150853538|gb|EDN28730.1| transcription elongation factor S-II [Botryotinia fuckeliana B05.10]
  misc_feature (2)..(306): NCBI GI: 156040461 Blast Desc: transcription elongation factor s-ii [Sclerotinia sclerotiorum 1980] gi|154696303|gb|EDN96041.1| transcription elongation factor s-ii [Sclerotinia sclerotiorum 1980]
  misc_feature (7)..(306): NCBI GI: 116180542 Blast Desc: CHGG_00899 [Chaetomium globosum CBS 148.51] gi|88185196|gb|EAQ92664.1| CHGG_00899 [Chaetomium globosum CBS 148.51]
  misc_feature (2)..(306): NCBI GI: 171687673 Blast Desc: protein product [Podospora anserina] gi|170943798|emb|CAP69450.1| protein product [Podospora anserina]
  misc_feature (2)..(305): NCBI GI: 145616052 Blast Desc: MGG_13511 [Magnaporthe grisea 70-15] gi|145009820|gb|EDJ94476.1| MGG_13511 [Magnaporthe grisea 70-15]
  misc_feature (2)..(306): NCBI GI: 85119699 Blast Desc: NCU02563 [Neurospora crassa OR74A] gi|28927506|gb|EAA36458.1| conserved [Neurospora crassa OR74A] gi|38567143|emb|CAE76438.1| related to transcription elongation
  misc_feature (2)..(304): NCBI GI: 212536338 Blast Desc: transcription elongation factor S-II [Penicillium marneffei ATCC 18224] gi|210070724|gb|EEA24814.1| transcription elongation factor S-II [Penicillium marneffei ATCC 18224]
  misc_feature (2)..(304): NCBI GI: 169780530 Blast Desc: [Aspergillus oryzae RIB40] gi|238505302|ref|XP_002383880.1| transcription elongation factor S-II [Aspergillus flavus NRRL3357] gi|83773469|dbj|BAE63596.1|
  misc_feature (2)..(306): NCBI GI: 169602463 Blast Desc: SNOG_04233 [Phaeosphaeria nodorum SN15] gi|111066873|gb|EAT87993.1| SNOG_04233 [Phaeosphaeria nodorum SN15]
MLSQRELESRIKALQKAQANKEPSSSIIALLEGLKAEAHPTEEVLRTTKAGIAIGKLRGHSDKAIGRAANEVVAKWKKAVEAEKKAKGLGVNSARPRESASPAGKGASPAPAKSTPQPASREAYTGDPEKRKFATDGVDINRTDSKIRNNCIGVIYNGLAYRSREPTQSVMIKAQEVEAAGFKLFNGEGNAYREKIRSLFANLKNPNNGDLRKNVMSGLITPDKFVSMSSKELLSDMQRRIDAKLEEENMKKAQVPMAEKSVSDSLECSNCKKKMVSYTQAQTRSADEPMTTFCECMNCGKRWKFS

SEQ ID NO: 12177 - DNA, 3402 bp, Muscodor strobelii
  misc_feature: SGI EST ID NO. CUFF.29024.0
  misc_feature: Variant of the nucleotide sequence at SEQ ID NO 12175
gtgaacttcagcccaatcgatagcgcgataatggacgtagcttgccttcattgtcgcatgcttgccttacttccaagtgctctgattgatctcttcagtttctcgccgcccacctcccacctcccgcctcacatctctataactctctcggccgccaccgcgcacggcgtgcattccccaagcccattgcattcgtgtcacctgccgactacctctctttctcgatccagcctctggggttctccggagccgcctgcgtttcaatctctccgctcaaaaccagctgcgcatcgagtcgacgtcgacgttatttgcgcctccgtctgtcattctacgcaggctcgcggccatataggcagtcacctgatccacgtttctcctctcactgcgccatcatgctgtcccagcgagaactcgagtcccggatcaaggccctgcagaaggcccaggcgaacaaggagccctcctctagcatcatcgctctcctggagggcttgaaggccgaggcccaccccaccgaggaagttctgcgcgtgagttctgttgtttcacccctctatcctgcaattatctgccgcatgctcctgcctcgtccttgctagtctatctacaaactcacaggtcttctgcattttgagtcacatgatctaaacttggcacagacaaccaaggccggtatcgctattggcaagcttaggggtcacagcgacaaggctatcggtcgggccgccaacgaggttgtggctaaatggaagaaggccgttgaggctgagaaaaaggcaaaaggcctgggcgtcaacagcgcccgtccccgcgagtccgcctctcctgccggcaagggtgcttctcccgcgcccgccaagtcgactccccagccagccagccgcgaggcttacacaggcgatcctgagaagcgcaagtttgccaccgacggcgtcgacatcaaccgcaccgactccaagatccgcaacaactgcatcggtgtcatctacaatgggctcgcctaccgctcgcgtgaaccgacgcaatctgttatgatcaaggctcaggaggtagaagcagctggtttcaagctgttcaacggcgagggcaacgcgtaccgagagaagataagatcgctctttgcgaacctcaagaacccaaacaacggcgacctgcgcaagaacgtcatgtccggcctcatcacacccgataagttcgtgtctatgtcctcgaaagagctgctgtcggatatgcagcgcaggatcgacgccaaactggaggaggagaacatgaagaaggcacaggtcccgatggcggagaagagcgtcagcgactccctcgagtgctcgaattgcaagaagaagatggtcagctacacgcaggcccagactcgtagtgctgatgagccgatgacgaccttctgcgaatgcatgaattgcggcaagcgctggaagttctcttgatattctcgcagtcttttgtacacaccattctactcatcatagtcattggctaccgtcgatttgggcgaaaccagtggctttcttcgtttgttccttcacgattcatgaggttagacggcaggcgtttggaggggacgggcgggagtactatcatccacaagtccgggaatgggctttgccggactttgtaactatcagtactataccgttcagaattgagccgggctttacgttgtattttggcccgtctcctattcgaatgtgatgaatcgcgaatatgacttattatgcgcctatcaatttcctgattgcgccaatagccccatcaaggacggcagagacgagtccggtgacagtcggcactcatgaagttgaacacagacatcgtggataagtaaccaattcatttccccttgaggttctctatccccaatatcgtaaataaatcatcctcacccaccccatcctcatcttctaatcccaactccccaatcttcttccagaatttactcaaatgtctcgtgcccgagtcacaaagcacagtgacgaccgtgcttcccttcggtaaattcatagctgctacaacagcagcagcacagttcacggcactactactcccgcagaatatcccatcattctccaccaaccacctagccatcttcatagcctgttcatccgtaactcgtacagcgtcatcgattagatcctgaccgacactgaaattggccgtgatgcggttcacgccgacgccttccacgatggaatcgacttgtgttcggcgacgagacccctcgcgttccgtgggtgagtacatcacgccgtgccggactttgttgtatagaccggaaccttgcggatctgcgaggattattttgaggaggggaagtttggtggtgagttttagatatcgggctacgcctgtgatggtcccgcctgttccggcgcctgctacgaaggcggagatgtttccgccgcattgcgagaggatctctggcccggtggtggtttcgtgcgcggtgtagtttgaggggttttcgaattggtctgcgaagaatcctacgctgctatctagtttagaggcagtgtgttcctctgcgagtctccttgctcggttgacgtagtgttctggcgatgtgataggagctacggggaccctctctacagtagcgcctaagtgatgcagtaaatcggatttttcatgcgcttggtcgtctggcatgcagatatgtgctttgtacccgcgagcccgcgcgagggcagcgatgctgattcctgtgctacctacggttccttcgtagattgtgtcgccacgccaggggaccaagagacctgctgcctcggcggtttcgatcatggatagtgccacgcggtccttgggactgtttcccgcgccgttgagaaattcggctttggcgaggattgtacggccggttgctagggagagggagtggatttctatgaggggtgtgtttcctatggttcctgatattccggaggagatgcctgatgaccgctgagtgagggctgagatggttgatgtttcatggtcttcgagcgagacgggtccccagaagagacttgatctacggtggtctgatgcgaccgttgaggttgagttgcgccgcgttctgcgggtgtttagacggcgttgttgatatcgcctttctaagtctgggtagaggtctttgaagcctagtgttactattatccccgccgcgaaggcgatggctatggcggctgtgccataggctctggggtggtcgcctagagacatgttttggtttggtggatgtgagactgtgagtttgagggtgtcttataaggttggtgtctcataagctttgccttgctaggcagaactcttcaggaatgttcattggactttcaatactaaggtgtttcgtctcatttgaacatgagtctcttctgctcatatatttttaaagtgagaattgac

SEQ ID NO: 12178 - DNA, 1620 bp, Muscodor strobelii
  misc_feature: SGI cDNA ID NO. 563944
  misc_feature: Encodes the peptide sequence at SEQ ID NO 12179
atggcagacaagatcacggtcatgcctgtattggcagcttcggcagccgcatcgctactttgggctcgtcaggccgagctgcccatagcaccaactgtcgcaagttcggttgccattgcattcgctctatatgtagttgtctggctcagttggctgtttcccttctacttctcagagatgaggagtatcccaactgtacccgggttcccgctctggggccagttcttcgacatcatcactacagaatgtggtgtgccgcaaagacagtggcacaaagaccatggcacaattgtccgatatttcttcccatttggtgctgagcgcctatccatcgccgacgatggagctcttaaacatatgactgtcaagaacccctacaactatcccaagccagttcgcgctaagctttggatggttcgcattctcggcgagggtgttctcctcgctgagggaccagaacacgtccatcagcgcaagtctctcacgcctggcttctcaattcaggccattcgtggcttgacacccgttttctggcagaagtctttgcttcttgctaagctgtggcgtgaggaaatgaccgccgagaatgtgaccaccaagtcgtttgaggtgttggagtggctaaaccgcaccacgctcgacattatcggtggcgcgggattcggatacgacatcaactctctcgagaatcccgaaactcccatccgtgaggcatatcgtttggtgttcgctttcgacatcttctctcgcatgctgcatggcattcaggcttttatccctgcctcgaagtacattcctgcgaagatgaacagagacatggaaacatcgcgtggaatcatcatcgacaaggccacgactatcattcgtgagaagcaggaagaagcggagacgaacaccaacagcaaggatatcctggcccttgttgcccgcgacaacaagaagatgaaggagatgggcgaggctggtctctctttcgagaccatgcgcgatcaagtcatgactttcttaggtgctggtcacgatacgactgccactggtgtcgcatggaccatccatcttctctccactcaccctgaaatccagtctcgccttcgtgaagagatcaaggacttcatgccattcctgttcgacaaggaggcgcgattcgatgccgagaacttcgccaatgcagaccctgatcatcttcccttcctcgacaacgtctgccgcgaatctctccgctacatccccccgattcccatgactgtccgtcaatctattgccgacgatatgcttggtgaatacaaggtcccggctggcacagttgtgtatgtgctcgccaatgccatcaaccgcttgccaatgtactggggtcccacagccgatgagtttgaccctgatcgatgggataacctccctgagagcttcaccaccaatgccttcatgaccttcttgcagggtcctcgcagctgtatcggtcgcaagttcgccgagaccgagatgaagattcttctgtgctgcttgttgtccatgtatgagttcaagcgagactttgataccccggaccctgaggagtggaagatgtggcgtctcgtgcttcgaccaaaggagggtgtcacagtcaaggtcacagccatctaa

SEQ ID NO: 12179 - protein, 539 aa, Muscodor strobelii
  misc_feature: SGI Peptide ID NO. 563944
  misc_feature (64)..(536): Pfam Id: PF00067 Pfam Desc: Cytochrome P450
  misc_feature (142)..(536): Pfam Id: PF00067 Pfam Desc: Cytochrome P450
  misc_feature (1)..(539): NCBI GI: 171687669 Blast Desc: protein product [Podospora anserina] gi|170943796|emb|CAP69448.1| protein product [Podospora anserina]
  misc_feature (1)..(539): NCBI GI: 156032423 Blast Desc: SS1G_13909 [Sclerotinia sclerotiorum 1980] gi|154699311|gb|EDN99049.1| SS1G_13909 [Sclerotinia sclerotiorum 1980]
  misc_feature (1)..(539): NCBI GI: 154296071 Blast Desc: BC1G_12765 [Botryotinia fuckeliana B05.10] gi|150843726|gb|EDN18919.1| BC1G_12765 [Botryotinia fuckeliana B05.10]
  misc_feature (8)..(539): NCBI GI: 212526040 Blast Desc: cytochrome P450, [Penicillium marneffei ATCC 18224] gi|210072575|gb|EEA26662.1| cytochrome P450, [Penicillium marneffei ATCC 18224]
  misc_feature (8)..(539): NCBI GI: 242779870 Blast Desc: cytochrome P450, [Talaromyces stipitatus ATCC 10500] gi|218719624|gb|EED19043.1| cytochrome P450, [Talaromyces stipitatus ATCC 10500]
  misc_feature (26)..(531): NCBI GI: 116180540 Blast Desc: CHGG_00898 [Chaetomium globosum CBS 148.51] gi|88185195|gb|EAQ92663.1| CHGG_00898 [Chaetomium globosum CBS 148.51]
  misc_feature (7)..(539): NCBI GI: 169772597 Blast Desc: [Aspergillus oryzae RIB40] gi|83768628|dbj|BAE58765.1| protein product [Aspergillus oryzae]
  misc_feature (7)..(539): NCBI GI: 238490512 Blast Desc: cytochrome P450, [Aspergillus flavus NRRL3357] gi|220696906|gb|EED53247.1| cytochrome P450, [Aspergillus flavus NRRL3357]
  misc_feature (10)..(539): NCBI GI: 189201141 Blast Desc: cytochrome P450 78A3 [Pyrenophora tritici-repentis Pt-1C-BFP] gi|187984006|gb|EDU49494.1| cytochrome P450 78A3 [Pyrenophora tritici-repentis Pt-1C-BFP]
  misc_feature (46)..(539): NCBI GI: 46108332 Blast Desc: FG01048.1 [Gibberella zeae PH-1]
  misc_feature (142)..(536): SWISSPROT Homolog: EC 1.14.14.1 Unspecific monooxygenase
MADKITVMPVLAASAAASLLWARQAELPIAPTVASSVAIAFALYVVVWLSWLFPFYFSEMRSIPTVPGFPLWGQFFDIITTECGVPQRQWHKDHGTIVRYFFPFGAERLSIADDGALKHMTVKNPYNYPKPVRAKLWMVRILGEGVLLAEGPEHVHQRKSLTPGFSIQAIRGLTPVFWQKSLLLAKLWREEMTAENVTTKSFEVLEWLNRTTLDIIGGAGFGYDINSLENPETPIREAYRLVFAFDIFSRMLHGIQAFIPASKYIPAKMNRDMETSRGIIIDKATTIIREKQEEAETNTNSKDILALVARDNKKMKEMGEAGLSFETMRDQVMTFLGAGHDTTATGVAWTIHLLSTHPEIQSRLREEIKDFMPFLFDKEARFDAENFANADPDHLPFLDNVCRESLRYIPPIPMTVRQSIADDMLGEYKVPAGTVVYVLANAINRLPMYWGPTADEFDPDRWDNLPESFTTNAFMTFLQGPRSCIGRKFAETEMKILLCCLLSMYEFKRDFDTPDPEEWKMWRLVLRPKEGVTVKVTAI

SEQ ID NO: 12180 - DNA, 780 bp, Muscodor strobelii
  misc_feature: SGI EST ID NO. CUFF.28902.0
  misc_feature: Variant of the nucleotide sequence at SEQ ID NO 12178
gaagtctttgcttcttgctaagctgtggcgtgaggaaatgaccgccgagaatgtgaccaccaagtcgtttgaggtgttggagtggctaaaccgcaccacgctcgacattatcggtggcgcgggattcggatacgacatcaactctctcgagaatcccgaaactcccatccgtgaggcatatcgtttggtgttcgctttcgacatcttctctcgcatgctgcatggcattcaggcttttatccctgcctcgaagtacattcctgcgaagatgaacagagacatggaaacatcgcgtggaatcatcatcgacaaggccacgactatcattcgtgagaagcaggaagaagcggagacgaacaccaacagcaaggatatcctggcccttgttgcccgcgacaacaagaagatgaaggagatgggcgaggctggtctctctttcgagaccatgcgcgatcaagtcatgactttcttaggtgctggtcacgatacgactgccactggtgtcgcatggaccatccatcttctctccactcaccctgaaatccagtctcgccttcgtgaagagatcaaggacttcatgccattcctgttcgacaaggaggcgcgattcgatgccgagaacttcgccaatgcagaccctgatcatcttcccttcctcgacaacgtctgccgcgaatctctccgctacatccccccgattcccatgactgtccgtcaatctattgccgacgatatgcttggtgaatacaaggtcccggctggcacagttgtgtatgtgct

SEQ ID NO: 12181 - DNA, 1047 bp, Muscodor strobelii
  misc_feature: SGI cDNA ID NO. 563945
  misc_feature: Encodes the peptide sequence at SEQ ID NO 12182
atgaccgccgagaatgtgaccaccaagtcgtttgaggtgttggagtggctaaaccgcaccacgctcgacattatcggtggcgcgggattcggatacgacatcaactctctcgagaatcccgaaactcccatccgtgaggcatatcgtttggtgttcgctttcgacatcttctctcgcatgctgcatggcattcaggcttttatccctgcctcgaagtacattcctgcgaagatgaacagagacatggaaacatcgcgtggaatcatcatcgacaaggccacgactatcattcgtgagaagcaggaagaagcggagacgaacaccaacagcaaggatatcctggcccttgttgcccgcgacaacaagaagatgaaggagatgggcgaggctggtctctctttcgagaccatgcgcgatcaagtcatgactttcttaggtgctggtcacgatacgactgccactggtgtcgcatggaccatccatcttctctccactcaccctgaaatccagtctcgccttcgtgaagagatcaaggacttcatgccattcctgttcgacaaggaggcgcgattcgatgccgagaacttcgccaatgcagaccctgatcatcttcccttcctcgacaacgtctgccgcgaatctctccgctacatccccccgattcccatgactgtccgtcaatctattgccgacgatatgcttggtgaatacaaggtcccggctggcacagttgtgtatgtgctcgccaatgccatcaaccgcttgccaatgtactggggtcccacagccgatgagtttgaccctgatcgatgggataacctccctgagagcttcaccaccaatgccttcatgaccttcttgcagggtcctcgcagctgtatcggtcgcaagttcgccgagaccgagatgaagattcttctgtgctgcttgttgtccatgtatgagttcaagcgagactttgataccccggaccctgaggagtggaagatgtggcgtctcgtgcttcgaccaaaggagggtgtcacagtcaaggtcacagccatctaa

SEQ ID NO: 12182 - protein, 348 aa, Muscodor strobelii
  misc_feature: SGI Peptide ID NO. 563945
  misc_feature (1)..(345): Pfam Id: PF00067 Pfam Desc: Cytochrome P450
  misc_feature (4)..(345): Pfam Id: PF00067 Pfam Desc: Cytochrome P450
  misc_feature (1)..(348): NCBI GI: 171687669 Blast Desc: protein product [Podospora anserina] gi|170943796|emb|CAP69448.1| protein product [Podospora anserina]
  misc_feature (1)..(348): NCBI GI: 156032423 Blast Desc: SS1G_13909 [Sclerotinia sclerotiorum 1980] gi|154699311|gb|EDN99049.1| SS1G_13909 [Sclerotinia sclerotiorum 1980]
  misc_feature (1)..(348): NCBI GI: 154296071 Blast Desc: BC1G_12765 [Botryotinia fuckeliana B05.10] gi|150843726|gb|EDN18919.1| BC1G_12765 [Botryotinia fuckeliana B05.10]
  misc_feature (3)..(348): NCBI GI: 212526040 Blast Desc: cytochrome P450, [Penicillium marneffei ATCC 18224] gi|210072575|gb|EEA26662.1| cytochrome P450, [Penicillium marneffei ATCC 18224]
  misc_feature (3)..(348): NCBI GI: 242779870 Blast Desc: cytochrome P450, [Talaromyces stipitatus ATCC 10500] gi|218719624|gb|EED19043.1| cytochrome P450, [Talaromyces stipitatus ATCC 10500]
  misc_feature (1)..(340): NCBI GI: 116180540 Blast Desc: CHGG_00898 [Chaetomium globosum CBS 148.51] gi|88185195|gb|EAQ92663.1| CHGG_00898 [Chaetomium globosum CBS 148.51]
  misc_feature (10)..(348): NCBI GI: 169772597 Blast Desc: [Aspergillus oryzae RIB40] gi|83768628|dbj|BAE58765.1| protein product [Aspergillus oryzae]
  misc_feature (10)..(348): NCBI GI: 238490512 Blast Desc: cytochrome P450, [Aspergillus flavus NRRL3357] gi|220696906|gb|EED53247.1| cytochrome P450, [Aspergillus flavus NRRL3357]
  misc_feature (11)..(345): NCBI GI: 156058097 Blast Desc: SS1G_04780 [Sclerotinia sclerotiorum 1980] gi|154702565|gb|EDO02304.1| SS1G_04780 [Sclerotinia sclerotiorum 1980]
  misc_feature (11)..(348): NCBI GI: 154299019 Blast Desc: BC1G_11822 [Botryotinia fuckeliana B05.10] gi|150857525|gb|EDN32717.1| BC1G_11822 [Botryotinia fuckeliana B05.10]
  misc_feature (8)..(345): SWISSPROT Homolog: EC 1.14.14.1 Unspecific monooxygenase
MTAENVTTKSFEVLEWLNRTTLDIIGGAGFGYDINSLENPETPIREAYRLVFAFDIFSRMLHGIQAFIPASKYIPAKMNRDMETSRGIIIDKATTIIREKQEEAETNTNSKDILALVARDNKKMKEMGEAGLSFETMRDQVMTFLGAGHDTTATGVAWTIHLLSTHPEIQSRLREEIKDFMPFLFDKEARFDAENFANADPDHLPFLDNVCRESLRYIPPIPMTVRQSIADDMLGEYKVPAGTVVYVLANAINRLPMYWGPTADEFDPDRWDNLPESFTTNAFMTFLQGPRSCIGRKFAETEMKILLCCLLSMYEFKRDFDTPDPEEWKMWRLVLRPKEGVTVKVTAI

SEQ ID NO: 12183 - DNA, 780 bp, Muscodor strobelii; identical to SEQ ID NO: 12180
  misc_feature: SGI EST ID NO. CUFF.28902.0
  misc_feature: Variant of the nucleotide sequence at SEQ ID NO 12181

SEQ ID NO: 12184 - DNA, 987 bp, Muscodor strobelii
  misc_feature: SGI cDNA ID NO. 563946
  misc_feature: Encodes the peptide sequence at SEQ ID NO 12185
atgtcgtttaatcccattcatactttccagccttcatcaggcgtgatccccttgaagccatggcaggcattcgacaaggcttggacatcggtaatgggctaccatgcagacgagttccaattcacacccggtaaaaccccgatgtcaacattgacggagacagtatccatgatcgttttatatgttgtcgtcatatttggaggtcgcgagttcatgcgcaaccgggagcctttgaagctcaacggcctgttcaaagctcacaacttattcctcactttattgagtggcggtctgcttgttctcttcgcagggcagctacttcccactctgtggaagcatggtgtatatgagaacatctgcggtcaaagtggctggacgccgcagttggtcaccctctactacctcaactatatcaccaaatacatcgaattgatcgacactgtctttttgatggtcaagaagaagcctcttactttcctccacacataccaccatccggcaacagcccttctctgctacacacagttgattggccatacgcctgtatcatgggttcccatcaccttgaatctgacagtgcatgtcgtgatgtactggtactatttccagtccgcccgtggcgtcaaggtctggtggaaggagtggattactcgcctccagatcacccagttcatcattgatcttggctttgtgtatttcgcatcctgggactactttacgagtgtctatgcgcctcagctcccacatgtcgggcgatgccaaggcgagccttttgctgccgtatgcggatgtgtcattcttagctcttacttggttctcttcatcatgttctacattgccacctaccggaaggcctcgaagcgggcagccggcaagaaaggcgagaagcctgcaattacctccatgaaagcaagcgccgtcaagatggtcgatagctgcaccagtggagcacaacacgcgaacggtaagatcgtgtcgcgaaagtaa

SEQ ID NO: 12185 - protein, 328 aa, Muscodor strobelii
  misc_feature: SGI Peptide ID NO. 563946
  misc_feature (1)..(298): Pfam Id: PF01151 Pfam Desc: GNS1/SUR4 family
  misc_feature (21)..(298): Pfam Id: PF01151 Pfam Desc: GNS1/SUR4 family
  misc_feature (11)..(296): NCBI GI: 156032421 Blast Desc: SS1G_13908 [Sclerotinia sclerotiorum 1980] gi|154699310|gb|EDN99048.1| SS1G_13908 [Sclerotinia sclerotiorum 1980]
  misc_feature (11)..(295): NCBI GI: 154296069 Blast Desc: BC1G_12764 [Botryotinia fuckeliana B05.10] gi|150843725|gb|EDN18918.1| BC1G_12764 [Botryotinia fuckeliana B05.10]
  misc_feature (21)..(324): NCBI GI: 258571247 Blast Desc: elongation of fatty acids protein 2 [Uncinocarpus reesii 1704] gi|237904697|gb|EEP79098.1| elongation of fatty acids protein 2 [Uncinocarpus reesii 1704]
  misc_feature (21)..(311): NCBI GI: 240109460 Blast Desc: Elongation of fatty acids protein 2 , [Coccidioides posadasii C735 delta SOWgp]
  misc_feature (20)..(312): NCBI GI: 242779875 Blast Desc: elongation of fatty acids protein, [Talaromyces stipitatus ATCC 10500] gi|242779880|ref|XP_002479479.1| elongation of fatty acids protein, [Talaromyces stipitatus ATCC
  misc_feature (21)..(311): NCBI GI: 119182974 Blast Desc: CIMG_06474 [Coccidioides immitis RS]
  misc_feature (15)..(323): NCBI GI: 212526042 Blast Desc: elongation of fatty acids protein, [Penicillium marneffei ATCC 18224] gi|210072576|gb|EEA26663.1| elongation of fatty acids protein, [Penicillium marneffei ATCC 18224]
  misc_feature (18)..(319): NCBI GI: 193507489 Blast Desc: fatty acid elongase A [Hortaea werneckii]
  misc_feature (21)..(326): NCBI GI: 145233493 Blast Desc: An02g09910 [Aspergillus niger] gi|134057050|emb|CAK37859.1| protein product [Aspergillus niger]
  misc_feature (21)..(321): NCBI GI: 116199203 Blast Desc: CHGG_07757 [Chaetomium globosum CBS 148.51] gi|88179036|gb|EAQ86504.1| CHGG_07757 [Chaetomium globosum CBS 148.51]
MSFNPIHTFQPSSGVIPLKPWQAFDKAWTSVMGYHADEFQFTPGKTPMSTLTETVSMIVLYVVVIFGGREFMRNREPLKLNGLFKAHNLFLTLLSGGLLVLFAGQLLPTLWKHGVYENICGQSGWTPQLVTLYYLNYITKYIELIDTVFLMVKKKPLTFLHTYHHPATALLCYTQLIGHTPVSWVPITLNLTVHVVMYWYYFQSARGVKVWWKEWITRLQITQFIIDLGFVYFASWDYFTSVYAPQLPHVGRCQGEPFAAVCGCVILSSYLVLFIMFYIATYRKASKRAAGKKGEKPAITSMKASAVKMVDSCTSGAQHANGKIVSRK

SEQ ID NO: 12186 - DNA, 171 bp, Muscodor strobelii
  misc_feature: SGI EST ID NO. CUFF.28911.0
  misc_feature: Variant of the nucleotide sequence at SEQ ID NO 12184
tggcgtcaaggtctggtggaaggagtggattactcgcctccagatcacccagttcatcattgatcttggctttgtgtatttcgcatcctgggactactttacgagtgtctatgcgcctcagctcccacatgtcgggcgatgccaaggcgagccttttgctgccgtatgcgg

SEQ ID NO: 12187 - DNA, 1140 bp, Muscodor strobelii
  misc_feature: SGI cDNA ID NO. 563947
  misc_feature: Encodes the peptide sequence at SEQ ID NO 12188
atgtcgacgactcttcttcttggctctatcaacaatagccataagtccgcatttcagtcagcctatgatggagtgccacagtctgtgtcagaggtgcatcataccgtagttggtagttcatcgcctcagataccagattttatatactctcatttttttacttggtcgacgctatggttctcgctgctatgtgtgttcattctcgctaatgcgaagaatatgccgtttatgtggcatatgcgcatcctaaacgcattccgcttcacactacgaacacaacgacccaaggtcccaataacgccatcacatctctttcagcccataataacgacctcgacggcacagctcggggagttagatttcaacctccataaatccaactcatcatatttcgccgatgtagatatcgcgcgaacacatctggtctgtacgctcttcaccaagggtatcgagcagatgcgcggcggcacaggatcttacacgggcgcgaagaaaccattgttcggactcgcgcttggtggtgtgtcatgcacgtttaagaaagaggttaagccgtaccaggagtatgagatgtggtctaagatcttgacttgggatgaaaaatggatttacatcgttacacatttcgtccgaaagggcgtgaagccggcaaattattcgttgtaccctcagcaatctccagcttctaccagaccatcgagtcgtcggaatagcgatgccgcggaaacggaagccgaggtgcttcgtcgctcgagtattgatagtgagacggaagcggaggagaaccccgataagcatatttttgcgacgtgtctgagtaaatgcgtcttcaagtctggtcgcaagaccatctcgccgaaggacatgatggatatgtctggtctactacctactgcggaatcttcagacgataaggacatgaaagtcacaaatgaggaacaggaaatcattgaggaacaacgattaaagggtatgaagatggcgcggctccttggcgcacagaaccagcaaagtcttgaagctgagttcgagggtagtggttgtgaagcgcttgggagacatacggatgggacagggacggctggcgtcgtgagcacgttgatgcaattgggacatttgaaacgttctcagttgttatga

SEQ ID NO: 12188 - protein, 379 aa, Muscodor strobelii
  misc_feature: SGI Peptide ID NO. 563947
  misc_feature (50)..(379): NCBI GI: 156032419 Blast Desc: SS1G_13907 [Sclerotinia sclerotiorum 1980] gi|154699309|gb|EDN99047.1| SS1G_13907 [Sclerotinia sclerotiorum 1980]
  misc_feature (53)..(312): NCBI GI: 242779885 Blast Desc: conserved [Talaromyces stipitatus ATCC 10500] gi|218719627|gb|EED19046.1| conserved [Talaromyces stipitatus ATCC 10500]
  misc_feature (53)..(304): NCBI GI: 212526044 Blast Desc: conserved [Penicillium marneffei ATCC 18224] gi|210072577|gb|EEA26664.1| conserved [Penicillium marneffei ATCC 18224]
  misc_feature (47)..(353): NCBI GI: 85090354 Blast Desc: NCU09852 [Neurospora crassa OR74A] gi|28919734|gb|EAA29140.1| conserved [Neurospora crassa OR74A]
  misc_feature (65)..(356): NCBI GI: 156056218 Blast Desc: SS1G_05461 [Sclerotinia sclerotiorum 1980] gi|154703245|gb|EDO02984.1| SS1G_05461 [Sclerotinia sclerotiorum 1980]
  misc_feature (59)..(357): NCBI GI: 261357934 Blast Desc: conserved [Verticillium albo-atrum VaMs.102]
  misc_feature (65)..(353): NCBI GI: 240276954 Blast Desc: capsule polysaccharide biosynthesis protein [Ajellomyces capsulatus H143]
  misc_feature (62)..(356): NCBI GI: 169777831 Blast Desc: [Aspergillus oryzae RIB40] gi|83772118|dbj|BAE62248.1| protein product [Aspergillus oryzae]
  misc_feature (58)..(356): NCBI GI: 189194994 Blast Desc: conserved [Pyrenophora tritici-repentis Pt-1C-BFP] gi|187979714|gb|EDU46340.1| conserved [Pyrenophora tritici-repentis Pt-1C-BFP]
  misc_feature (62)..(356): NCBI GI: 238495060 Blast Desc: conserved [Aspergillus flavus NRRL3357] gi|220695416|gb|EED51759.1| conserved [Aspergillus flavus NRRL3357]
MSTTLLLGSINNSHKSAFQSAYDGVPQSVSEVHHTVVGSSSPQIPDFIYSHFFTWSTLWFSLLCVFILANAKNMPFMWHMRILNAFRFTLRTQRPKVPITPSHLFQPIITTSTAQLGELDFNLHKSNSSYFADVDIARTHLVCTLFTKGIEQMRGGTGSYTGAKKPLFGLALGGVSCTFKKEVKPYQEYEMWSKILTWDEKWIYIVTHFVRKGVKPANYSLYPQQSPASTRPSSRRNSDAAETEAEVLRRSSIDSETEAEENPDKHIFATCLSKCVFKSGRKTISPKDMMDMSGLLPTAESSDDKDMKVTNEEQEIIEEQRLKGMKMARLLGAQNQQSLEAEFEGSGCEALGRHTDGTGTAGVVSTLMQLGHLKRSQLL

SEQ ID NO: 12189 - DNA, 2259 bp, Muscodor strobelii
  misc_feature: SGI cDNA ID NO. 563948
  misc_feature: Encodes the peptide sequence at SEQ ID NO 12190
atggctaggagaacgaacaagcccagccaacatcgcgatggtgatcgcatgactgacgacgaagatgccacgtcggtctaccccgactcggagccgtctgcggaatcagatcaggatggctacgaaaagggtgacgatgcctcagatgagtgggatgatgaaacagagtcaaacgccttttcccatccgccttcgacgcctggcttgactagcaggcaagagcgacaaatctcgattgcacaggagctcattgaggctgcacggattgcaaaatcgacaggcaaaagtgatgaagaaattcaaagggatttgaatgccatcctagaccaatatgatagcaagtttgagccaaagcaggttgtggaaactcaaccacctaccaattcggaatttaatcgatcaagtatcttagcagatctcttgatcgcatcagcacctcggctgcggcacttggcgtcgtctagctctatcgacacaacttcatcagttcggagcaagacatctggaaatcatcgcaggaccagcagtggtagtgttattccaatagtcgagcagagacatcccggtaaacctggtgtcaggctctcgaaatttcacagacctttcgagccagatattgaggaggaggaggaggaagatgaatgggcgcttcgtgatcctgctacagtcacaaagccggatgctggagtgtctgatgaaggcctcgtaactggcaagcccctaatcctgctcatcattggtctatccctagttgtgttcttgatctcgatagatagaactatcattactactgccaccccatatatcactgctgaattcaagtcaactagcgatataggctggtatggatctgcctatctcctgacagcatgcgcgtttcaaccagtctatggccgtgtcttcaccctttttgacgtgaagtggtcgtttttgggcgccatgttcgtttttgagataggttccatcatcagcggattctctcctaactcagaagccttgatcattggtcgcgccattgccggcttaggaagtgctggtattttgacaggtagcttcgttattgtagcaacggctgtccccctgactgttcgccccatatatacagcagtagttgggttgatgttcggtgttggggctacgattggccccttaattggtggtgtgttcacggatctagcgacatggagatggtgtttctggatcaacttacctgtaggtgccgtgacgatcatcgtcatgttccttgttttccatcctaaaccacacctgggcccaaggcgaggcttcgtagataggcttattgatcttgacctcatcggaaatcttatcctgttgatatcttcagtcatgctcttccttgcgcttgagttctcccttaccggttctgcatggagcagtgccaagatcattggtcttttggtcgggacgatcctaacagctatattgttcggtacttggctatggtggaagcaagacggcgcaatcataccaccagctatcatcaatcaacgcagcgtcggcgctgcctgtctcatggcattctttacgtacggcgcgctgctcatccagtcgtatttcttgcccatttggttccaagcaatattaggatacagcgcaattcaatccggcgtcgccatgatcccgtattttgtggcgaacgctctgttgtccgtgttcggaggtgtgtttgtctcagctgttggctacttcaatccgcccgctattatcggcagtgcaatcgcgacgatcggatgtggcgtgctcacgctatttaacccaaagatcacgactggccaatttgtcggctatgagattctcgttgctgctggatttggtctctcgattcaacagggcttcacagctgtgcagaccgtattgaagggcgatgatctcgccgttggtaccgctgccgtcgttgcatcgcagtcgcttggtggtgccctgttcatctcagttggcaacactgtcttcgaaagccgcctcagctccctcatcactgcttctggccctcagctggacggtgtcgaccctcgcactctcatcgaggcaggtgcaatcgcctttcgaaagttagtctccgatgagcagctgccgattcttatcaatatatacaacgaggcgctacatcaagttctgatcattgctattccgcttgcggcactgtcattcctcgcatgttgctgctttgagtggaggtctgtcaagcccccgccgacaccgaaggctgaagatggcaagagtggagttgtggaggcttga

SEQ ID NO: 12190 - protein, 752 aa, Muscodor strobelii
  misc_feature: SGI Peptide ID NO. 563948
  misc_feature (248)..(650): Pfam Id: PF07690 Pfam Desc: Major Facilitator Superfamily
  misc_feature (307)..(343): Pfam Id: PF00083 Pfam Desc: Sugar (and other) transporter
  misc_feature (134)..(735): NCBI GI: 156032417 Blast Desc: SS1G_13906 [Sclerotinia sclerotiorum 1980] gi|154699308|gb|EDN99046.1| SS1G_13906 [Sclerotinia sclerotiorum 1980]
  misc_feature (196)..(735): NCBI GI: 154296063 Blast Desc: BC1G_12761 [Botryotinia fuckeliana B05.10] gi|150843722|gb|EDN18915.1| BC1G_12761 [Botryotinia fuckeliana B05.10]
  misc_feature (155)..(745): NCBI GI: 38567144 Blast Desc: related to major facilitator (MFS1) transporter [Neurospora crassa]
  misc_feature (265)..(735): NCBI GI: 171687671 Blast Desc: protein product [Podospora anserina] gi|170943797|emb|CAP69449.1| protein product [Podospora anserina]
  misc_feature (223)..(747): NCBI GI: 242779890 Blast Desc: conserved [Talaromyces stipitatus ATCC 10500] gi|218719628|gb|EED19047.1| conserved [Talaromyces stipitatus ATCC 10500]
  misc_feature (258)..(743): NCBI GI: 212526046 Blast Desc: conserved [Penicillium marneffei ATCC 18224] gi|210072578|gb|EEA26665.1| conserved [Penicillium marneffei ATCC 18224]
  misc_feature (196)..(735): NCBI GI: 238844737 Blast Desc: major facilitator superfamily transporter [Microsporum canis CBS 113480]
  misc_feature (333)..(745): NCBI GI: 164427878 Blast Desc: NCU02562 [Neurospora crassa OR74A] gi|157071920|gb|EAA36457.2| NCU02562 [Neurospora crassa OR74A]
  misc_feature (193)..(748): NCBI GI: 212541604 Blast Desc: conserved [Penicillium marneffei ATCC 18224] gi|210068256|gb|EEA22348.1| conserved [Penicillium marneffei ATCC 18224]
  misc_feature (203)..(735): NCBI GI: 50355603 Blast Desc: conserved [Penicillium marneffei ATCC 18224] gi|210068256|gb|EEA22348.1| conserved [Penicillium marneffei ATCC 18224]
MARRTNKPSQHRDGDRMTDDEDATSVYPDSEPSAESDQDGYEKGDDASDEWDDETESNAFSHPPSTPGLTSRQERQISIAQELIEAARIAKSTGKSDEEIQRDLNAILDQYDSKFEPKQVVETQPPTNSEFNRSSILADLLIASAPRLRHLASSSSIDTTSSVRSKTSGNHRRTSSGSVIPIVEQRHPGKPGVRLSKFHRPFEPDIEEEEEEDEWALRDPATVTKPDAGVSDEGLVTGKPLILLIIGLSLVVFLISIDRTIITTATPYITAEFKSTSDIGWYGSAYLLTACAFQPVYGRVFTLFDVKWSFLGAMFVFEIGSIISGFSPNSEALIIGRAIAGLGSAGILTGSFVIVATAVPLTVRPIYTAVVGLMFGVGATIGPLIGGVFTDLATWRWCFWINLPVGAVTIIVMFLVFHPKPHLGPRRGFVDRLIDLDLIGNLILLISSVMLFLALEFSLTGSAWSSAKIIGLLVGTILTAILFGTWLWWKQDGAIIPPAIINQRSVGAACLMAFFTYGALLIQSYFLPIWFQAILGYSAIQSGVAMIPYFVANALLSVFGGVFVSAVGYFNPPAIIGSAIATIGCGVLTLFNPKITTGQFVGYEILVAAGFGLSIQQGFTAVQTVLKGDDLAVGTAAVVASQSLGGALFISVGNTVFESRLSSLITASGPQLDGVDPRTLIEAGAIAFRKLVSDEQLPILINIYNEALHQVLIIAIPLAALSFLACCCFEWRSVKPPPTPKAEDGKSGVVEA

SEQ ID NO: 12191 - DNA, 2877 bp, Muscodor strobelii
  misc_feature: SGI EST ID NO. CUFF.28935.0
  misc_feature: Variant of the nucleotide sequence at SEQ ID NO 12189
cttggcgtcgtctagctctatcgacacaacttcatcagttcggagcaagacatctggaaatcatcgcaggaccagcagtggtagtgttattccaatagtcgagcagagacatcccggtaaacctggtgtcaggctctcgaaatttcacagacctttcgagccagatattgaggaggaggaggaggaagatgaatgggcgcttcgtgatcctgctacagtcacaaagccggatgctggagtgtctgatgaaggcctcgtaactggcaagcccctaatcctgctcatcattggtctatccctagttgtgttcttgatctcgatagatagaactatcattactactgccaccccatatatcactgctgaattcaagtcaactagcgatataggctggtatggatctgcctatctcctgacagcatgcgcgtttcaaccagtctatggccgtgtcttcaccctttttgacgtgaagtggtcgtttttgggcgccatgttcgtttttgagataggttccatcatcagcggattctctcctaactcagaagccttgatcattggtcgcgccattgccggcttaggaagtgctggtattttgacaggtagcttcgttattgtagcaacggctgtccccctgactgttcgccccatatatacagcagtagttgggttgatgttcggtgttggggctacgattggccccttaattggtggtgtgttcacggatctagcgacatggagatggtgtttctggatcaacttacctgtaggtgccgtgacgatcatcgtcatgttccttgttttccatcctaaaccacacctgggcccaaggcgaggcttcgtagataggcttattgatcttgacctcatcggaaatcttatcctgttgatatcttcagtcatgctcttccttgcgcttgagttctcccttaccggttctgcatggagcagtgccaagatcattggtcttttggtcgggacgatcctaacagctatattgttcggtacttggctatggtggaagcaagacggcgcaatcataccaccagctatcatcaatcaacgcagcgtcggcgctgcctgtctcatggcattctttacgtacggcgcgctgctcatccagtcgtatttcttgcccatttggttccaagcaatattaggatacagcgcaattcaatccggcgtcgccatgatcccgtattttgtggcgaacgctctgttgtccgtgttcggaggtgtgtttgtctcagctgttggctacttcaatccgcccgctattatcggcagtgcaatcgcgacgatcggatgtggcgtgctcacgctatttaacccaaagatcacgactggccaatttgtcggctatgagattctcgttgctgctggatttggtctctcgattcaacagggcttcacagctgtgcagaccgtattgaagggcgatgatctcgccgttggtaccgctgccgtcgttgcatcgcagtcgcttggtggtgccctgttcatctcagttggcaacactgtcttcgaaagccgcctcagctccctcatcactgcttctggccctcagctggacggtgtcgaccctcgcactctcatcgaggcaggtgcaatcgcctttcgaaagttagtctccgatgagcagctgccgattcttatcaatatatacaacgaggcgctacatcaagttctgatcattgctattccgcttgcggcactgtcattcctcgcatgttgctgctttgagtggaggtctgtcaagcccccgccgacaccgaaggctgaagatggcaagagtggagttgtggaggcttgattcgaacataagtctctgttcaaaatgtcactttattttgcatttgagcgtctcattgcgtaattgttcgggggttttgatgtttttggtcgcatttcgcgttggggcatcaggacatagttgacatagcgttgcattttgcaatcagttttcatccagtaatcattattagttttgtgagttaacttcacactcgctgtcaattgatatgacatatgtgcaccaatacagagagagaaaggctagcacgcaagaatatggccaattcagctatgccgcatctgaacacaatctattaagttacatctcggttgctatagtactaagaagggattccatctcgaaaaaattcccagtaaataaacactgtaattaaaagtatgattattaagacgctggggttttcgctagacgctttcaaaaactgaactaagtttttcatttgccattgttgttgttcgagccttgggtacccccgacgttgatcgggtcacacgcggaaattccaattccgaagcagtcgttgctgctgcttaggtcaaggtccggtgaaatagtcgggctcagattgatgagcgaactatccttagactcgcccttagttgtagatgtgggcttctcggaagacgagtcctcattgttgttgttagagttttgagtcccgtcaacattaatgggatcgcaaactgagatgccaacgccgaagcaatcgttactgctgctgagatcgacctcaggcgacacatccggactgatattgatgagagattcactgttggagtccttgttggaagatgtgctagtctctttggtggacttagctggtgtctccacgttattgttgtttgaattctgggttccgcccacattgatgggatcgcagacggagacaccaacaccgacgcagtcattgctgctgcttgcgtctattttcggatcgatatcaatgttgacgtcaacaagtccgagcagatttaagtctacatcgagagctttggtgtcatcgctgggctcggcggacttctcaatgttgttgtttgagttctgagtaccgttgacattgatag

SEQ ID NO: 12192 - DNA, 639 bp, Muscodor strobelii
  misc_feature: SGI cDNA ID NO. 563949
  misc_feature: Reduced expression when VOC is produced
  misc_feature: Encodes the peptide sequence at SEQ ID NO 12193
cgttgcgatcctatcaatgtcaacggtactcagaactcaaacaacaacattgagaagtccgccgagcccagcgatgacaccaaagctctcgatgtagacttaaatctgctcggacttgttgacgtcaacattgatatcgatccgaaaatagacgcaagcagcagcaatgactgcgtcggtgttggtgtctccgtctgcgatcccatcaatgtgggcggaacccagaattcaaacaacaataacgtggagacaccagctaagtccaccaaagagactagcacatcttccaacaaggactccaacagtgaatctctcatcaatatcagtccggatgtgtcgcctgaggtcgatctcagcagcagtaacgattgcttcggcgttggcatctcagtttgcgatcccattaatgttgacgggactcaaaactctaacaacaacaatgaggactcgtcttccgagaagcccacatctacaactaagggcgagtctaaggatagttcgctcatcaatctgagcccgactatttcaccggaccttgacctaagcagcagcaacgactgcttcggaattggaatttccgcgtgtgacccgatcaacgtcgggggtacccaaggctcgaacaacaacaatggcaaatga

SEQ ID NO: 12193 - protein, 212 aa, Muscodor strobelii
  misc_feature: SGI Peptide ID NO. 563949
  misc_feature: Useful for introducing or modulating the production of volatile compounds
RCDPINVNGTQNSNNNIEKSAEPSDDTKALDVDLNLLGLVDVNIDIDPKIDASSSNDCVGVGVSVCDPINVGGTQNSNNNNVETPAKSTKETSTSSNKDSNSESLINISPDVSPEVDLSSSNDCFGVGISVCDPINVDGTQNSNNNNEDSSSEKPTSTTKGESKDSSLINLSPTISPDLDLSSSNDCFGIGISACDPINVGGTQGSNNNNGK

SEQ ID NO: 12194 - DNA, 621 bp, Muscodor strobelii
  misc_feature: SGI cDNA ID NO. 563950
  misc_feature: Reduced expression when VOC is produced
  misc_feature: Encodes the peptide sequence at SEQ ID NO 12195
gtccgcacccgcctcatcctcacctccacctccacctccacccaacgcggctcccgtcgcaccctcgccgccctgcgcgccctgccctcgtggctctgccatccctcgctcgtcgccccgaccatcctcaactcgctcatccaccccttcctcaccctgtccacgcccctcgtcctgcgctcccagttcctcatcgacagagacttctccccgaccgccttctccgtcgccaagttctgcacctcgtgtgtctcgctgttcgtcaagcttccgctggagaccgtcttgcgccgaggtcaggccgccgtcttcgccgagccctcgtatctgcacgccctcgacaaggccggccagatggataccgtcatgcagccggggccctatcacggcgttgtcggcaccatgtacgccattgtctccgacgagggttcccgcgccgtcacggtgcctgctaagagctcgcagcgtggccgcaaggggaagactaagacgtccgaagtcgtctacaagaagggtcaaggcctcgacggcttgtggcgtggctggaaggtcagttggtggggcctcgtaggtctgtggaccgcaggcgtcgctggggctggtggcgagggcgaattctaa

SEQ ID NO: 12195 - protein, 206 aa, Muscodor strobelii
  misc_feature: SGI Peptide ID NO. 563950
  misc_feature (1)..(206): NCBI GI: 261357956 Blast Desc: mitochondrial fusion and transport protein Ugo1 [Verticillium albo-atrum VaMs.102]
  misc_feature (1)..(206): NCBI GI: 171692955 Blast Desc: protein product [Podospora anserina] gi|170946426|emb|CAP73227.1| protein product [Podospora anserina]
  misc_feature (1)..(195): NCBI GI: 85089733 Blast Desc: NCU07793 [Neurospora crassa OR74A] gi|12718357|emb|CAC28592.1| conserved [Neurospora crassa] gi|28919404|gb|EAA28848.1| conserved [Neurospora crassa OR74A]
  misc_feature (1)..(206): NCBI GI: 46123467 Blast Desc: FG06111.1 [Gibberella zeae PH-1]
  misc_feature (1)..(206): NCBI GI: 256731433 Blast Desc: [Nectria haematococca mpVI 77-13-4]
  misc_feature (1)..(206): NCBI GI: 116198877 Blast Desc: CHGG_07594 [Chaetomium globosum CBS 148.51] gi|88178873|gb|EAQ86341.1| CHGG_07594 [Chaetomium globosum CBS 148.51]
  misc_feature (1)..(206): NCBI GI: 39976217 Blast Desc: MGG_05965 [Magnaporthe grisea 70-15] gi|145011763|gb|EDJ96419.1| MGG_05965 [Magnaporthe grisea 70-15]
  misc_feature (2)..(206): NCBI GI: 154290874 Blast Desc: BC1G_15369 [Botryotinia fuckeliana B05.10] gi|150847188|gb|EDN22381.1| BC1G_15369 [Botryotinia fuckeliana B05.10]
  misc_feature (1)..(206): NCBI GI: 156059512 Blast Desc: SS1G_03768 [Sclerotinia sclerotiorum 1980] gi|154701555|gb|EDO01294.1| SS1G_03768 [Sclerotinia sclerotiorum 1980]
  misc_feature (1)..(193): NCBI GI: 169624361 Blast Desc: SNOG_15440 [Phaeosphaeria nodorum SN15] gi|160705154|gb|EAT77105.2| SNOG_15440 [Phaeosphaeria nodorum SN15]
  misc_feature: Useful for introducing or modulating the production of volatile compounds
VRTRLILTSTSTSTQRGSRRTLAALRALPSWLCHPSLVAPTILNSLIHPFLTLSTPLVLRSQFLIDRDFSPTAFSVAKFCTSCVSLFVKLPLETVLRRGQAAVFAEPSYLHALDKAGQMDTVMQPGPYHGVVGTMYAIVSDEGSRAVTVPAKSSQRGRKGKTKTSEVVYKKGQGLDGLWRGWKVSWWGLVGLWTAGVAGAGGEGEF

SEQ ID NO: 12196 - DNA, 1102 bp, Muscodor strobelii
  misc_feature: SGI EST ID NO. CUFF.28938.0
  misc_feature: Variant of the nucleotide sequence at SEQ ID NO 12194
cgtccgcacccgcctcatcctcacctccacctccacctccacccaacgcggctcccgtcgcaccctcgccgccctgcgcgccctgccctcgtggctctgccatccctcgctcgtcgccccgaccatcctcaactcgctcatccaccccttcctcaccctgtccacgcccctcgtcctgcgctcccagttcctcatcgacagagacttctccccgaccgccttctccgtcgccaagttctgcacctcgtgtgtctcgctgttcgtcaagcttccgctggagaccgtcttgcgccgaggtcaggccgccgtcttcgccgagccctcgtatctgcacgccctcgacaaggccggccagatggataccgtcatgcagccggggccctatcacggcgttgtcggcaccatgtacgccattgtctccgacgagggttcccgcgccgtcacggtgcctgctaagagctcgcagcgtggccgcaaggggaagactaagacgtccgaagtcgtctacaagaagggtcaaggcctcgacggcttgtggcgtggctggaaggtcagttggtggggcctcgtaggtctgtggaccgcaggcgtcgctggggctggtggcgagggcgaattctaatgtcgttctctcgtggaaaaggaacgtgggcgcggatgcattggcaaatatgcatctctattgtacgaacagggtcggagaagagactgccatctcccatgaccgccatgtgcgaatgacaggaagggctggcagcatgttggaatttttggggagttcacagcgcgcttttatgagatacggcacatttgatatccctcgtcacttggtactatattgtatgtatgaaattttctcgattgtacaagagcagaccttgctttggagatagtatataagatccattctcatctcgacttgcatttcgatcgtcatcttgatctcatagctaggtatgcacatatgtattgaacgtcttcgtattcttatttgttgctagcacgtgtgaccactagctcaatctacttggcgagctgtgggtagaatcgatgagatgattcttgtaggtattcttcgctgaggagtcaatatcctcacccc

SEQ ID NO: 12197 - DNA, 1176 bp, Muscodor strobelii
  misc_feature: SGI cDNA ID NO. 563951
  misc_feature: Encodes the peptide sequence at SEQ ID NO 12198
atgccaggcttccgatcctccgccttgctcgctgctctcgcatcggtgactcgcgtatcggcccacgggcacgtcaccaacattgtcatcaatggactgtcctatcaaggctatgatcccttcactttcccttaccagtccgacccgcataccgtcgtcggctggacggccagcgatacggacaatggcttcgttgctcccgatgcctatacaacaggcgacattatctgccacaagaccgccaccaacgcaggcggtcatgctcaagtagctgctggcgatagcatttcgctgcaatgggacacctggcccgagtctcacaagggccccatgatcgactatctcgctgcctgcaacggcaattgtgagtctgtcgacaaggcgaccctggaattcttcaagatcgacgaggttggtcttttggattctaccactgcgccaggaacttggggttccgatgttctgatccagaacaacaatacctggctcgtgcaaatccccgcggacttgaaggccggtaactacgtattgagacacgagaccatcgcgctgcactccgccggtagtgaaaatggcgcacagaattatccccagtgttttaatctccaagtgactggttctggcaccaacgtgccagacggtgttctgggtacggagctgtacacacccacggatgcaggcatcgaagtcaatatctacacgacaggtatcagctacgtgattcccggccctacgctgattgcgggcgtcagtgcttctgtcgagcaagtgagctccgagatcacggcgagtgctagtgctatcgtgggcagtgggacaggagctgcctcttcaccagcttctgcggcgacgactacatcctcgccggtttcggcggcgacaaccaccaaggctgcgcagaccactacatccgcagcccaggctgctacctcgaccgcagtgaagcctactactacgctaatcacttcgacgcgtgccgcctccccaactaccgcgtcgccaactaccgctgctgtcacctcagctcctgcctgtggtgcttcggcgaccggtgcggttgacgctcagtcgctctatggacagtgtggaggtagcaactggtccgggcctaccgtctgcggcgagggatcttgtacctcctataacccatactaccatcagtgtgtctcggcgtaa

SEQ ID NO: 12198 - protein, 391 aa, Muscodor strobelii
  misc_feature: SGI Peptide ID NO. 563951
  misc_feature (358)..(385): Pfam Id: PF00734 Pfam Desc: Fungal cellulose binding domain
  misc_feature (6)..(241): Pfam Id: PF03443 Pfam Desc: Glycosyl hydrolase family 61
  misc_feature (1)..(391): NCBI GI: 115401906 Blast Desc: conserved [Aspergillus terreus NIH2624] gi|114190482|gb|EAU32182.1| conserved [Aspergillus terreus NIH2624]
  misc_feature (17)..(389): NCBI GI: 119501521 Blast Desc: Glycosyl hydrolase family 61 [Neosartorya fischeri NRRL 181] gi|119415683|gb|EAW25620.1| Glycosyl hydrolase family 61 [Neosartorya fischeri NRRL 181]
  misc_feature (8)..(389): NCBI GI: 85090094 Blast Desc: endoglucanase IV precursor [Neurospora crassa OR74A] gi|28919596|gb|EAA29018.1| endoglucanase IV precursor [Neurospora crassa OR74A]
  misc_feature (6)..(390): NCBI GI: 201066457 Blast Desc: endoglucanase IV [Trichoderma sp. SSL]
  misc_feature (6)..(390): NCBI GI: 21263647 Blast Desc: GUN4_TRIRE RecName: Full=Endoglucanase-4; AltName: Full=Endoglucanase IV; AltName: Full=Endo-1,4-beta-glucanase IV; Short=EGIV; AltName: Full=Cellulase IV; AltName: AltName: Flags:
  misc_feature (6)..(385): NCBI GI: 284451272 Blast Desc: type IV endoglucanase [Trichoderma saturnisporum]
  misc_feature (5)..(389): NCBI GI: 121711880 Blast Desc: endo-1,4-beta-glucanase, [Aspergillus clavatus NRRL 1] gi|119401707|gb|EAW12129.1| endo-1,4-beta-glucanase, [Aspergillus clavatus NRRL 1]
  misc_feature (17)..(371): NCBI GI: 159122044 Blast Desc: endoglucanase/cellulase, [Aspergillus fumigatus A1163]
  misc_feature (1)..(325): NCBI GI: 171682270 Blast Desc: protein product [Podospora anserina] gi|170941094|emb|CAP66744.1| protein product [Podospora anserina]
  misc_feature (1)..(273): NCBI GI: 119474543 Blast Desc: endo-1,4-beta-glucanase, [Neosartorya fischeri NRRL 181] gi|119407300|gb|EAW17250.1| endo-1,4-beta-glucanase, [Neosartorya fischeri NRRL 181]
  misc_feature (17)..(256): SWISSPROT Homolog: EC 3.2.1.4 Cellulase
MPGFRSSALLAALASVTRVSAHGHVTNIVINGLSYQGYDPFTFPYQSDPHTVVGWTASDTDNGFVAPDAYTTGDIICHKTATNAGGHAQVAAGDSISLQWDTWPESHKGPMIDYLAACNGNCESVDKATLEFFKIDEVGLLDSTTAPGTWGSDVLIQNNNTWLVQIPADLKAGNYVLRHETIALHSAGSENGAQNYPQCFNLQVTGSGTNVPDGVLGTELYTPTDAGIEVNIYTTGISYVIPGPTLIAGVSASVEQVSSEITASASAIVGSGTGAASSPASAATTTSSPVSAATTTKAAQTTTSAAQAATSTAVKPTTTLITSTRAASPTTASPTTAAVTSAPACGASATGAVDAQSLYGQCGGSNWSGPTVCGEGSCTSYNPYYHQCVSA

SEQ ID NO: 12199 - DNA, 528 bp, Muscodor strobelii
  misc_feature: SGI cDNA ID NO. 563952
  misc_feature: Encodes the peptide sequence at SEQ ID NO 12200
atggcccaaccaaccgtcgtcgatctcttcgcgagaagcgaagaatacactgcgaaacatattcctgctccgatgatgcttgacgtgcctatcgagtatcgaccacataccgtcattttatgctgcgcagacggaagaatcaaccccttggcgcttttcaatctaggtgtcgcagatgccgtcgtgatccgcaatatcggatgtgttctgtcgcgtctgatcgaggattttctcgtcattgatcaactcgtccagataaacgaagttttgatcatctcacacacagattgtggcctgacccatgccacggatgaaggtgtgcacgcgagcatgaagagccgagtacctggccatgatcacgagtttgatagcatcgttgtcggatcattcagggacaatgtgattagagtgcagagcgatgtggaatacttcattaaccatccctgcatccgtaaagaactcgtcggtcatgtcttcggggctgtgtatgatattcagaccggcaagttgacaaaagctgatgtctga

SEQ ID NO: 12200 - protein, 175 aa, Muscodor strobelii
  misc_feature: SGI Peptide ID NO. 563952
  misc_feature (34)..(174): Pfam Id: PF00484 Pfam Desc: Carbonic anhydrase
  misc_feature (35)..(173): NCBI GI: 242783861 Blast Desc: conserved [Talaromyces stipitatus ATCC 10500] gi|218720418|gb|EED19837.1| conserved [Talaromyces stipitatus ATCC 10500]
  misc_feature (4)..(171): NCBI GI: 212545609 Blast Desc: conserved [Penicillium marneffei ATCC 18224] gi|210064478|gb|EEA18573.1| conserved [Penicillium marneffei ATCC 18224]
  misc_feature (5)..(170): NCBI GI: 242789964 Blast Desc: conserved [Talaromyces stipitatus ATCC 10500] gi|218718058|gb|EED17478.1| conserved [Talaromyces stipitatus ATCC 10500]
  misc_feature (1)..(172): NCBI GI: 240110170 Blast Desc: Carbonic anhydrase family protein [Coccidioides posadasii C735 delta SOWgp]
  misc_feature (1)..(174): NCBI GI: 39958173 Blast Desc: MGG_09234 [Magnaporthe grisea 70-15] gi|145013326|gb|EDJ97967.1| MGG_09234 [Magnaporthe grisea 70-15]
  misc_feature (1)..(172): NCBI GI: 119179664 Blast Desc: CIMG_08543 [Coccidioides immitis RS]
  misc_feature (5)..(172): NCBI GI: 162449584 Blast Desc: carbonate hydratase [Sorangium cellulosum 'So ce 56'] gi|161160166|emb|CAN91471.1| carbonate hydratase [Sorangium cellulosum 'So ce 56']
  misc_feature (16)..(175): NCBI GI: 70994070 Blast Desc: carbonic anhydrase [Aspergillus fumigatus Af293] gi|66849516|gb|EAL89844.1| carbonic anhydrase, [Aspergillus fumigatus Af293] gi|143024603|gb|ABO93149.1| carbonic anhydrase
  misc_feature (16)..(175): NCBI GI: 159125203 Blast Desc: carbonic anhydrase, [Aspergillus fumigatus A1163]
  misc_feature (39)..(172): NCBI GI: 126134315 Blast Desc: PICST_57799 [Pichia stipitis CBS 6054] gi|126095831|gb|ABN65653.1| [Pichia stipitis CBS 6054]
MAQPTVVDLFARSEEYTAKHIPAPMMLDVPIEYRPHTVILCCADGRINPLALFNLGVADAVVIRNIGCVLSRLIEDFLVIDQLVQINEVLIISHTDCGLTHATDEGVHASMKSRVPGHDHEFDSIVVGSFRDNVIRVQSDVEYFINHPCIRKELVGHVFGAVYDIQTGKLTKADV

SEQ ID NO: 12201 - DNA, 2768 bp, Muscodor strobelii
  misc_feature: SGI EST ID NO. CUFF.28942.0
  misc_feature: Variant of the nucleotide sequence at SEQ ID NO 12199
gcaatatcggatgtgttctgtcgcgtctgatcgaggattttctcgtcattgatcaactcgtccagataaacgaagttttgatcatctcacacacagattgtggcctgacccatgccacggatgaaggtgtgcacgcgagcatgaagagccgagtacctggccatgatcacgagtttgatagcatcgttgtcggatcattcagggacaatgtgattagagtgcagagcgatgtggaatacttcattaaccatccctgcatccgtaaagaactcgtcggtcatgtcttcggggctgtgtatgatattcagaccggcaagttgacaaaagctgatgtctgagagattacggctgttcttcgtccacgggtatgtcttgtagtcagtgcttataagaatgcactatcgtgtgatgcatagaccgtcagatgacggtaagagaaacaccccaatcttgaaattctgtccacaaaatcacacgcgaattctagaacaatattggtaactcatgggcattgtacatcttatcgggactattcgtaccatcgctaaagccagtctgaatgatcatatacaagaagcaaacccaactctgtgatcccccatatctcatctaatgtacaatcccgtatcagatcgtcatcctttggctcgtactcctcattgccgccgctcggcgaaaaacacaagagtcttatgcactttcagcgcggtatcgaactcgcattacgccgagacacactgatggtagtatgggttataggaggtacaagatccctcgccgcagacggtaggcccggaccagttgctacctccacactgtccatagagcgactgagcgtcaaccgcaccggtcgccgaagcaccacaggcaggagctgaggtgacagcagcggtagttggcgacgcggtagttggggaggcggcacgcgtcgaagtgattagcgtagtagtaggcttcactgcggtcgaggtagcagcctgggctgcggatgtagtggtctgcgcagccttggtggttgtcgccgccgaaaccggcgaggatgtagtcgtcgccgcagaagctggtgaagaggcagctcctgtcccactgcccacgatagcactagcactcgccgtgatctcggagctcacttgctcgacagaagcactgacgcccgcaatcagcgtagggccgggaatcacgtagctgatacctgtcgtgtagatattgacttcgatgcctgcatccgtgggtgtgtacagctccgtacccagaacaccgtctggcacgttggtgccagaaccagtcacttggagattaaaacactggggataattctgtgcgccattttcactaccggcggagtgcagcgcgatggtctcgtgtctcaatacgtagttaccggccttcaagtccgcggggatttgcacgagccaggtattgttgttctggatcagaacatcggaaccccaagttcctggcgcagtggtagaatccaaaagaccaacctcgtcgatcttgaagaattccagggtcgccttgtcgacagactcacaattgccgttgcaggcagcgagatagtcgatcatggggcccttgtgagactcgggccaggtgtcccattgcagcgaaatgctatcgccagcagctacttgagcatgaccgcctgcgttggtggcggtcttgtggcagataatgtcgcctgttgtataggcatcgggagcaacgaagccattgtccgtatcgctggccgtccagccgacgacggtatgcgggtcggactggtaagggaaagtgaagggatcatagccttgataggacagtccattgatgacaatgttggtgacgtgcccgtgggccgatacgcgagtcaccgatgcgagagcagcgagcaaggcggaggatcggaagcctggcatgttggatagattcggtctctagtgtcgattgtataaaacgggaaagagtgtgacgctcggcgtgattcgaagagtagcacttggcaagtctagagagacaaaagatgggttcgatagttggaatcaccaatgcttgttctcaccaggagcacgaaagagagactgtaaagagagacagtgtatggaatacaaagaaggcagaagagaaaaccaacaccggatgaagacgatggtgagaagaagaacggagggcatgccacctgagggcctcatgatttatatagacatataggcttgccacgcagtagggtaggagaatacttaaacccatgcataggtacctacctaggcattcaagatgacttcacttacctcatgtcgggtatcgtctgggttcgccgcgtaatttacctgtccagcagctccaccatatccgaagcgagggctgttgaggctcaaaatccctgtatcctacggtgtattccttggagtcttatgtcgatctctagatgaaggagagcgtgcgggcttacaggttgacaggctcggaatacggccagcaagctctgggagattgtggattcattcttgctagtgggcggcatcccaaacgctcatcgatgtcggttctagacaaggacacgaagaggtgaccgtacatggcctagtcagtcccttttgttggaataacgaaatgtgagtatcagggcggtaatatggccaagccgcgacagctgagcgttcggaaacccggtaaggatttccaggcggatttgctgcgaactttggagaaccgctacactatattccaaacgccacggacaagcggtggccagtccgtctgcttgagattgcaaattgggtcgtgaa

SEQ ID NO: 12202 - DNA, 555 bp, Muscodor strobelii
  misc_feature: SGI cDNA ID NO. 563953
  misc_feature: Reduced expression when VOC is produced
  misc_feature: Encodes the peptide sequence at SEQ ID NO 12203
atggacggcctcgacgactttgaaaggagcctagcagcggagaaggcacagagagagcgcgaggagggccaggcggaacgcaaacaccgacaccaccactcgcatcggaaccgcgaccacgcccgcgaccacgcccacacgcgccatcacgattccgaccgatcaagagaccacggtcgccacaggcatcaccgctcccgcgaccacgatgacgatgacgagcacgatgatgagcgcgaccgagatggccaccgaagcaagcggtcgcgacactccaaagacgacgacgacggccacgaccatgacgcccatgacgcccacgcccacgcacacgcacatgcccatcgcagggaaagagacagggacagggacagaggcagggacagaggcagtgatagggtcagaggcaaggagaccaagccgaagatgtccgacgccaagaaagacctgcccctgcccgacgaagagctcaccgcccacgactacaacaagacacctgcagactcagagtcagaaccaccaccgctcgtcagagacgcctggatggctgccccg

SEQ ID NO: 12203 - protein, 185 aa, Muscodor strobelii
  misc_feature: SGI Peptide ID NO. 563953
  misc_feature (1)..(185): NCBI GI: 261352907 Blast Desc: cell cycle control protein cwf19 [Verticillium albo-atrum VaMs.102]
  misc_feature (1)..(185): NCBI GI: 39975503 Blast Desc: MGG_00102 [Magnaporthe grisea 70-15] gi|145019058|gb|EDK03337.1| MGG_00102 [Magnaporthe grisea 70-15]
  misc_feature (54)..(185): NCBI GI: 116195382 Blast Desc: CHGG_04289 [Chaetomium globosum CBS 148.51] gi|88180202|gb|EAQ87670.1| CHGG_04289 [Chaetomium globosum CBS 148.51]
  misc_feature (1)..(185): NCBI GI: 46116268 Blast Desc: FG03976.1 [Gibberella zeae PH-1]
  misc_feature (1)..(185): NCBI GI: 256723492 Blast Desc: [Nectria haematococca mpVI 77-13-4]
  misc_feature: Useful for introducing or modulating the production of volatile compounds
MDGLDDFERSLAAEKAQREREEGQAERKHRHHHSHRNRDHARDHAHTRHHDSDRSRDHGRHRHHRSRDHDDDDEHDDERDRDGHRSKRSRHSKDDDDGHDHDAHDAHAHAHAHAHRRERDRDRDRGRDRGSDRVRGKETKPKMSDAKKDLPLPDEELTAHDYNKTPADSESEPPPLVRDAWMAAP

SEQ ID NO: 12204 - DNA, 707 bp, Muscodor strobelii
  misc_feature: SGI EST ID NO. CUFF.28947.0
  misc_feature: Variant of the nucleotide sequence at SEQ ID NO 12202
cacctctcaagcattattaggttaggctggtttgcatgtcctcaagtccaacgccaggtccacagccaggtccaccgccagccccaacgtcttcaggtacctttgaattatacttgtctgcagtgcgcgcagctggcacagtcgttcgttgcaatggacggcctcgacgactttgaaaggagcctagcagcggagaaggcacagagagagcgcgaggagggccaggcggaacgcaaacaccgacaccaccactcgcatcggaaccgcgaccacgcccgcgaccacgcccacacgcgccatcacgattccgaccgatcaagagaccacggtcgccacaggcatcaccgctcccgcgaccacgatgacgatgacgagcacgatgatgagcgcgaccgagatggccaccgaagcaagcggtcgcgacactccaaagacgacgacgacggccacgaccatgacgcccatgacgcccacgcccacgcacacgcacatgcccatcgcagggaaagagacagggacagggacagaggcagggacagaggcagtgatagggtcagaggcaaggagaccaagccgaagatgtccgacgccaagaaagacctgcccctgcccgacgaagagctcaccgcccacgactacaacaagacacctgcagactcagagtcagaaccaccaccgctcgtcagagacgcctggatggctgcccc

SEQ ID NO: 12205 - DNA, 2334 bp, Muscodor strobelii
  misc_feature: SGI cDNA ID NO. 563954
  misc_feature: Encodes the peptide sequence at SEQ ID NO 12206
atgtcttcttccttccccatcaacaagtccaaacggcccggggccaagcgcacgcaaattcgccctcccagtcgcctccaggaggccctgcagcgctcacgggcccagtctgagagagcgatgagtctgcagcccgcgtcaaccagtcactccaagaaagacaggccttcatgtcccaaccctagatgtctcaacccttctgcacccatccaagatggcttctgttcatcttgtggccgcgagatcgacgcttccaacatcgtcgctgaggttcaattcggtgagacctcatctggagccgccatggtccagggaagctacatcgccgccgatcaaggcactagccgctctctagctcctggcatgcgccgaatgggtggtctcgccggcgataatagatcaaagacaatccaggacgccaaaactctcatgaagggcttccagacacgtctcccgattagcgagagcgctatcgaatgtggcgtcatgatcttcaagcttctcctcggtgagaactggctacagggccgtggcatagaaaaggtggttgccgtatgcctctacaccgcctgtcgcaaagaggagcattgcaacgtcatgcttatcgactttgccgatgtttctcatatcaacgtctatgaactcggccacgtcttcaaggacctgagcaacatctactccttccagaccaaccacatcagggccgttattcccgaagatctcattctgcggtttgccgagaaactcgactttggcaccttcacacccagagttgctgccgatgcgtcaagactctgccagaggatggccaaggactggatggttatgggccgtcgtccttccggcgtctgtggtgcgtgtctgctcatggctgcgcgcatgtggaacttccgtcgcacggtaaaagagatcgtctacgttgtcaaggtcaccagcgccaccattatgcaacgccttgaagagtttacggtcacagagagcagcaatctatctattgagcagttcctcactaacgagttcttggagtcccgacacgatcctccctctttctacaagcaaagccaagcatggaaagagaaggtagcagccagcggtcgaaaacgcaaaagagggctcgaggacatcggcgaacaggatgatgagccggaagctggcacccaacggagtgcatctgccagcttgatgccaccccctccgaaacctttgccgcctcctgatttctccagggtgacatataaagtcactgacaatctccctacgtcttttgaccacgccgagagcagacaaatcatcgagccatttgatcctacacatgttccgcagttcgcacgcagacctcgagagattgtggagggcctcatgtccgaagacccaaccagcgagcaagccgtcgacgacctcgtgtcgatttatggtcctccgactagcgcaaacgcaggggaagaagaagagactgtcgacgctgaggactacgaagaagaagaggaagaggaagaggccaacgaagagcagcacgcgacagagccgcagcgcaagacaggtcgtcgaaagaaaggcgagacggagcctatgattcgcttcgacgaagagtgggaggatgacgagaagcaactagagaagcagatcggcgaaatcgtcaacgacccacacagttcatcgcatgctaaggccctcgccactgcagctcacatcgctcacatcaaggctgaatgggcgcgctcgcttctacctggccgcgtccttaagatggatgctatcgtgggagaagatgaattcgcggatgatccagaggtccaattctgtgagcttggccccgccgaagtcaagatcaaagaggagatctggctcaacgccaaccgcgactggatccggaagcaacaagagaaggaatatcgcaagcagatggaggcattgggcccgccgaagcgcaagcgcaatcgtcaaaagaaacctcggatgggcgagggtcaactgacacctgcttcgtcccctagcgaggcggcgatcgaggtgatgaagaagcgaaacatcgtctcgaagcgaatcaactacgatgcgattcacaaactcttcgacacgggaggcgagcgacgcggcccaggctcagtcgcatcgcgcatggagagtgacaaagacagccgcggcacgtccccggtctctcgtgtcagtgcgcgaacgtcggttgagaagatgcagccacccgcgaagccagccgacgaccaggaccagtcggaagaggaggagaataacgagtactcagaggaggagggtgactacgaggaccaatgggagcagaatggtcaggacgatggcgaaggagaagagtactactag

SEQ ID NO: 12206 - protein, 777 aa, Muscodor strobelii
  misc_feature: SGI Peptide ID NO. 563954
  misc_feature (591)..(691): Pfam Id: PF07741 Pfam Desc: Brf1-like TBP-binding domain
  misc_feature (242)..(315): Pfam Id: PF00382 Pfam Desc: Transcription factor TFIIB repeat
  misc_feature (144)..(215): Pfam Id: PF00382 Pfam Desc: Transcription factor TFIIB repeat
  misc_feature (607)..(691): Pfam Id: PF07741 Pfam Desc: Brf1-like TBP-binding domain
  misc_feature (40)..(720): NCBI GI: 154314754 Blast Desc: BC1G_04086 [Botryotinia fuckeliana B05.10] gi|150848708|gb|EDN23901.1| BC1G_04086 [Botryotinia fuckeliana B05.10]
  misc_feature (47)..(705): NCBI GI: 256723053 Blast Desc: NECHADRAFT_1589 [Nectria haematococca mpVI 77-13-4]
  misc_feature (40)..(705): NCBI GI: 156062930 Blast Desc: SS1G_01581 [Sclerotinia sclerotiorum 1980] gi|154696917|gb|EDN96655.1| SS1G_01581 [Sclerotinia sclerotiorum 1980]
  misc_feature (51)..(370): NCBI GI: 46116324 Blast Desc: FG04004.1 [Gibberella zeae PH-1]
  misc_feature (58)..(692): NCBI GI: 119186801 Blast Desc: CIMG_03448 [Coccidioides immitis RS]
  misc_feature (58)..(692): NCBI GI: 240108437 Blast Desc: Transcription factor TFIIB repeat containing protein [Coccidioides posadasii C735 delta SOWgp]
  misc_feature (31)..(358): NCBI GI: 39975473 Blast Desc: MGG_00117 [Magnaporthe grisea 70-15] gi|145019039|gb|EDK03318.1| MGG_00117 [Magnaporthe grisea 70-15]
  misc_feature (18)..(364): NCBI GI: 225560369 Blast Desc: transcription factor tfiiib complex subunit brf1 [Ajellomyces capsulatus G186AR]
  misc_feature (18)..(364): NCBI GI: 154276374 Blast Desc: conserved [Ajellomyces capsulatus NAm1] gi|150414105|gb|EDN09470.1| conserved [Ajellomyces capsulatus NAm1]
  misc_feature (18)..(364): NCBI GI: 240278695 Blast Desc: transcription factor tfiiib complex subunit brf1 [Ajellomyces capsulatus H143]
MSSSFPINKSKRPGAKRTQIRPPSRLQEALQRSRAQSERAMSLQPASTSHSKKDRPSCPNPRCLNPSAPIQDGFCSSCGREIDASNIVAEVQFGETSSGAAMVQGSYIAADQGTSRSLAPGMRRMGGLAGDNRSKTIQDAKTLMKGFQTRLPISESAIECGVMIFKLLLGENWLQGRGIEKVVAVCLYTACRKEEHCNVMLIDFADVSHINVYELGHVFKDLSNIYSFQTNHIRAVIPEDLILRFAEKLDFGTFTPRVAADASRLCQRMAKDWMVMGRRPSGVCGACLLMAARMWNFRRTVKEIVYVVKVTSATIMQRLEEFTVTESSNLSIEQFLTNEFLESRHDPPSFYKQSQAWKEKVAASGRKRKRGLEDIGEQDDEPEAGTQRSASASLMPPPPKPLPPPDFSRVTYKVTDNLPTSFDHAESRQIIEPFDPTHVPQFARRPREIVEGLMSEDPTSEQAVDDLVSIYGPPTSANAGEEEETVDAEDYEEEEEEEEANEEQHATEPQRKTGRRKKGETEPMIRFDEEWEDDEKQLEKQIGEIVNDPHSSSHAKALATAAHIAHIKAEWARSLLPGRVLKMDAIVGEDEFADDPEVQFCELGPAEVKIKEEIWLNANRDWIRKQQEKEYRKQMEALGPPKRKRNRQKKPRMGEGQLTPASSPSEAAIEVMKKRNIVSKRINYDAIHKLFDTGGERRGPGSVASRMESDKDSRGTSPVSRVSARTSVEKMQPPAKPADDQDQSEEEENNEYSEEEGDYEDQWEQNGQDDGEGEEYY

SEQ ID NO: 12207 - DNA, 3248 bp, Muscodor strobelii
  misc_feature: SGI EST ID NO. CUFF.28950.0
  misc_feature: Variant of the nucleotide sequence at SEQ ID NO 12205
atacaacgtataaccagagtaggaaagaggaaatgcacgagatgagatgggcgtctgcgcgaatgcataattcaatctggccattcaaaagagcaaaacatgcatggcgactgcctatcgccaggctcgaactctgtgccataattgcaggtgcgcgccacaagtacctaggtactccacagcaaacgtccactgatcaacctgcgtgagtcacctgctgagccacaggtgacccacacttaatatggtttttttcaattttgcaaagctctgcgcactacccctcggccattctgtttgacaacttcctcaccccacctattctcacactcattcattccgctctgcatgtacatcctccagtcccgccgcgcaattcgtctgctcacctccgactaccacatctcacttacacgcacttgcgcagcactttacactttacacatcaggcatacggcgcatgaccagagatacactatgtagccatgtcttcttccttccccatcaacaagtccaaacggcccggggccaagcgcacgcaaattcgccctcccagtcgcctccaggaggccctgcagcgctcacgggcccagtctgagagagcgatgagtctgcagcccgcgtcaaccagtcactccaagaaagacaggccttcatgtcccaaccctagatgtctcaacccttctgcacccatccaagatggcttctgttcatcttgtggccgcgagatcgacgcttccaacatcgtcgctgaggttcaattcggtgagacctcatctggagccgccatggtccagggaagctacatcgccgccgatcaaggcactagccgctctctagctcctggcatgcgccgaatgggtggtctcgccggcgataatagatcaaagacaatccaggacgccaaaactctcatgaagggcttccagacacgtctcccgattagcgagagcgctatcgaatgtggcgtcatgatcttcaagcttctcctcggtgagaactggctacagggccgtggcatagaaaaggtggttgccgtatgcctctacaccgcctgtcgcaaagaggagcattgcaacgtcatgcttatcgactttgccgatgtttctcatatcaacgtctatgaactcggccacgtcttcaaggacctgagcaacatctactccttccagaccaaccacatcagggccgttattcccgaagatctcattctgcggtttgccgagaaactcgactttggcaccttcacacccagagttgctgccgatgcgtcaagactctgccagaggatggccaaggactggatggttatgggccgtcgtccttccggcgtctgtggtgcgtgtctgctcatggctgcgcgcatgtggaacttccgtcgcacggtaaaagagatcgtctacgttgtcaaggtcaccagcgccaccattatgcaacgccttgaagagtttacggtcacagagagcagcaatctatctattgagcagttcctcactaacgagttcttggagtcccgacacgatcctccctctttctacaagcaaagccaagcatggaaagagaaggtagcagccagcggtcgaaaacgcaaaagagggctcgaggacatcggcgaacaggatgatgagccggaagctggcacccaacggagtgcatctgccagcttgatgccaccccctccgaaacctttgccgcctcctgatttctccagggtgacatataaagtcactgacaatctccctacgtcttttgaccacgccgagagcagacaaatcatcgagccatttgatcctacacatgttccgcagttcgcacgcagacctcgagagattgtggagggcctcatgtccgaagacccaaccagcgagcaagccgtcgacgacctcgtgtcgatttatggtcctccgactagcgcaaacgcaggggaagaagaagagactgtcgacgctgaggactacgaagaagaagaggaagaggaagaggccaacgaagagcagcacgcgacagagccgcagcgcaagacaggtcgtcgaaagaaaggcgagacggagcctatgattcgcttcgacgaagagtgggaggatgacgagaagcaactagagaagcagatcggcgaaatcgtcaacgacccacacagttcatcgcatgctaaggccctcgccactgcagctcacatcgctcacatcaaggctgaatgggcgcgctcgcttctacctggccgcgtccttaagatggatgctatcgtgggagaagatgaattcgcggatgatccagaggtccaattctgtgagcttggccccgccgaagtcaagatcaaagaggagatctggctcaacgccaaccgcgactggatccggaagcaacaagagaaggaatatcgcaagcagatggaggcattgggcccgccgaagcgcaagcgcaatcgtcaaaagaaacctcggatgggcgagggtcaactgacacctgcttcgtcccctagcgaggcggcgatcgaggtgatgaagaagcgaaacatcgtctcgaagcgaatcaactacgatgcgattcacaaactcttcgacacgggaggcgagcgacgcggcccaggctcagtcgcatcgcgcatggagagtgacaaagacagccgcggcacgtccccggtctctcgtgtcagtgcgcgaacgtcggttgagaagatgcagccacccgcgaagccagccgacgaccaggaccagtcggaagaggaggagaataacgagtactcagaggaggagggtgactacgaggaccaatgggagcagaatggtcaggacgatggcgaaggagaagagtactactagcggtacaacacgatgatggcatcttgttttcggcgcgaactagcatttcggaacggactgtaacaaaaaaaaggggggggacatgcataggccaggtcaagggccggttcggcgtttgttggcgttggggatagggatccgggtccaagtgagccctttggtgaattttgtaagattaaggctggcatcatgcggcgtgattgaggagcgagctgctcaaggcccatgtctaaggggcagatgaggctggtatatagatatgtcgcaatggagactatggtacattgcatttggctggtctatgatgcgtgtaatgctagcaagcacttcgtaagtacagactcgctgttcccggcacgatgcggctggcaggccgttgatgaaataactaagtactaagtacctaagtacacgccatttgggaagtcg

SEQ ID NO: 12208 - DNA, 1425 bp, Muscodor strobelii
  misc_feature: SGI cDNA ID NO. 563955
  misc_feature: Reduced expression when VOC is produced
  misc_feature: Encodes the peptide sequence at SEQ ID NO 12209
atgggtatcttcaacgccacgtgcccgttgccgaaggacgagatccagggtggtccagcagagtcacctatcgtcggcaacgtcacgtttcagaatttgctattttacataagtctagttttcaccggtctcgcggtattgtcctgtctttccatcgccattacgcatctgcgctgttatgttcgaccccgagaacaacgacaggttcttcgaatcctcttctatcctattgttctcgccgtgaccagttctttctccatacttgattacgaagcttatttgtatctgtggcccgctgctggtctttatgaaccgatttcgctcgcggctatcttcttcttgtttgtcgagttcgcggcacctgactcaacaacaagagagcaatacttcaatgatctggatgctaaacggcagaagggtggccgcttcgagctgaagcaggcgtggactattgtgcctggcggcagcctgagatggtatcagagcaaatatgttggactctatctttatttcatcacctctatcatcattaggatcgtagaggagattactcaggccacgggacgatactgccaatactcgttctctccagcttttgcgcacatctgggttcttgttatttcgaatatcgcactccctgtcggtgttattgccattgtccaattctatgtgcgaatgcttgaagagcctcattttaaggagcgacatcctacggccaagatcctgagttttaaagcagtggttctattgacattcgtgcaaactattattttcgccatcctcaccaacacccatgcattcaagaacaccgacacgacgaaagtcaaggacttctcaattggacttctgagcttactcgtctgtgtggaacagctcggcgtttcgatttggtttcaatggacattctcagcgaaggaataccgccagatccagcacaatactggtgcagagagaatgagcatgttcagggctacactcgatgctctcaactgcatagatctatttgcaggggcgatatatgctctgcggcttttggttgccggtgtcggtcccaaaggaaacggtagctggaagaggactgcgaaagcgtatgagccgatgaaagccccggcaagcgcacgattacatggagtgacctcgtatcaaggctcatctgcctcatcaatgatggacgatctggaggcttcaaacaagtacgaccgtccaaattatgatacaagcctgcgcccagaagatgcagattatggatataacatgcctgaccgttcgagatcgccaagcccttatggcgatgatcgaaggtcatacggagaacctagtcagtatggcggacatgcgtacagtgacgaccaaacaattgctgtaccagcgagcagtcttggaagaccgcaggatcgggatcagtttcaccacggcggtgtatga

SEQ ID NO: 12209 - protein, 474 aa, Muscodor strobelii
  misc_feature: SGI Peptide ID NO. 563955
  misc_feature (20)..(450): NCBI GI: 212530560 Blast Desc: DUF300 domain protein, [Penicillium marneffei ATCC 18224] gi|210074835|gb|EEA28922.1| DUF300 domain protein, [Penicillium marneffei ATCC 18224]
  misc_feature (26)..(400): NCBI GI: 240109133 Blast Desc: CPC735_026380 [Coccidioides posadasii C735 delta SOWgp]
  misc_feature (26)..(431): NCBI GI: 255956117 Blast Desc: Pc21g18160 [Penicillium chrysogenum Wisconsin 54-1255] gi|211590522|emb|CAP96713.1| Pc21g18160 [Penicillium chrysogenum Wisconsin 54-1255]
  misc_feature (8)..(349): NCBI GI: 85108706 Blast Desc: NCU06987 [Neurospora crassa OR74A] gi|28924237|gb|EAA33391.1| [Neurospora crassa OR74A]
  misc_feature (20)..(466): NCBI GI: 242818353 Blast Desc: DUF300 domain protein, [Talaromyces stipitatus ATCC 10500] gi|218713565|gb|EED12989.1| DUF300 domain protein, [Talaromyces stipitatus ATCC 10500]
  misc_feature (5)..(436): NCBI GI: 156061313 Blast Desc: SS1G_02799 [Sclerotinia sclerotiorum 1980] gi|154700203|gb|EDN99941.1| SS1G_02799 [Sclerotinia sclerotiorum 1980]
  misc_feature (26)..(387): NCBI GI: 121712878 Blast Desc: DUF300 domain protein, [Aspergillus clavatus NRRL 1] gi|119402203|gb|EAW12624.1| DUF300 domain protein, [Aspergillus clavatus NRRL 1]
  misc_feature (26)..(348): NCBI GI: 145253569 Blast Desc: An17g00680 [Aspergillus niger] gi|134083865|emb|CAK42996.1| protein product [Aspergillus niger]
  misc_feature (8)..(357): NCBI GI: 39951649 Blast Desc: MGG_01467 [Magnaporthe grisea 70-15] gi|145020694|gb|EDK04823.1| MGG_01467 [Magnaporthe grisea 70-15]
  misc_feature (18)..(436): NCBI GI: 154319638 Blast Desc: BC1G_02300 [Botryotinia fuckeliana B05.10] gi|150855958|gb|EDN31150.1| BC1G_02300 [Botryotinia fuckeliana B05.10]
  misc_feature: Useful for introducing or modulating the production of volatile compounds
MGIFNATCPLPKDEIQGGPAESPIVGNVTFQNLLFYISLVFTGLAVLSCLSIAITHLRCYVRPREQRQVLRILFYPIVLAVTSSFSILDYEAYLYLWPAAGLYEPISLAAIFFLFVEFAAPDSTTREQYFNDLDAKRQKGGRFELKQAWTIVPGGSLRWYQSKYVGLYLYFITSIIIRIVEEITQATGRYCQYSFSPAFAHIWVLVISNIALPVGVIAIVQFYVRMLEEPHFKERHPTAKILSFKAVVLLTFVQTIIFAILTNTHAFKNTDTTKVKDFSIGLLSLLVCVEQLGVSIWFQWTFSAKEYRQIQHNTGAERMSMFRATLDALNCIDLFAGAIYALRLLVAGVGPKGNGSWKRTAKAYEPMKAPASARLHGVTSYQGSSASSMMDDLEASNKYDRPNYDTSLRPEDADYGYNMPDRSRSPSPYGDDRRSYGEPSQYGGHAYSDDQTIAVPASSLGRPQDRDQFHHGGV

SEQ ID NO: 12210 - DNA, 3008 bp, Muscodor strobelii
  misc_feature: SGI EST ID NO. CUFF.28956.0
  misc_feature: Variant of the nucleotide sequence at SEQ ID NO 12208
cgatcattcatacttgtcgtcctcgcctacgcggatagagagagtaataagtcgctacatatgctgcttccgatgacgcagtgcagaaagtatcggctttcttcctctccaggccgggcactttgaagtcctagcgagtctggtattattatagaagttgtggtgttagcggtggattgtgcttgagctaaaatagatgacgtgccaattctaaggcggcagatcatctaattggtcattatccttctcttagcaaagcccagtcaaacagagcagtccgaggggtatcgtctacttcttattgcttgtttcagcgaattttcctctttctcaattctttctaagccgtaagttgcgggtcacagccgatagtcaaccgccgtatgtatgtaaggatacgccgtatgctagccactgcagatccctgccaaggccctggttagctgctggagatcgccatgacatctcgcattcatcggattcggatccatgtcaggaaaagtcgagcgccgctctgcgcaggctcgcagagggctcggtctaggcattcacgccccatgcatgacgagcatggtctgtagccaacctatcttatcctatcatgggtttagtctcatgtttggtctgccgatggctgtgttaaaaacagaattggctcgtggcgcaactacccaacaccctgcacgacgtaatgaatatcgatttaattattgcagaatatctcctctgagtctttagctaaggtcaagttatgtcatccatgcaagatggaggactccgtgctctactcagccctgcagggtcctttgtctagtccaccaggattaggacttgggttgaagaaagtgagaagctggctgaagataaatattggcttcgttgcccgtgagccaagagtagccaagagtccctgaattcccaacacacgatacaccaagacgcttccttcgcacgaaccgccacgagccatgggtatcttcaacgccacgtgcccgttgccgaaggacgagatccagggtggtccagcagagtcacctatcgtcggcaacgtcacgtttcagaatttgctattttacataagtctagttttcaccggtctcgcggtattgtcctgtctttccatcgccattacgcatctgcgctgttatgttcgaccccgagaacaacgacaggttcttcgaatcctcttctatcctattgttctcgccgtgaccagttctttctccatacttgattacgaagcttatttgtatctgtggcccgctgctggtctttatgaaccgatttcgctcgcggctatcttcttcttgtttgtcgagttcgcggcacctgactcaacaacaagagagcaatacttcaatgatctggatgctaaacggcagaagggtggccgcttcgagctgaagcaggcgtggactattgtgcctggcggcagcctgagatggtatcagagcaaatatgttggactctatctttatttcatcacctctatcatcattaggatcgtagaggagattactcaggccacgggacgatactgccaatactcgttctctccagcttttgcgcacatctgggttcttgttatttcgaatatcgcactccctgtcggtgttattgccattgtccaattctatgtgcgaatgcttgaagagcctcattttaaggagcgacatcctacggccaagatcctgagttttaaagcagtggttctattgacattcgtgcaaactattattttcgccatcctcaccaacacccatgcattcaagaacaccgacacgacgaaagtcaaggacttctcaattggacttctgagcttactcgtctgtgtggaacagctcggcgtttcgatttggtttcaatggacattctcagcgaaggaataccgccagatccagcacaatactggtgcagagagaatgagcatgttcagggctacactcgatgctctcaactgcatagatctatttgcaggggcgatatatgctctgcggcttttggttgccggtgtcggtcccaaaggaaacggtagctggaagaggactgcgaaagcgtatgagccgatgaaagccccggcaagcgcacgattacatggagtgacctcgtatcaaggctcatctgcctcatcaatgatggacgatctggaggcttcaaacaagtacgaccgtccaaattatgatacaagcctgcgcccagaagatgcagattatggatataacatgcctgaccgttcgagatcgccaagcccttatggcgatgatcgaaggtcatacggagaacctagtcagtatggcggacatgcgtacagtgacgaccaaacaattgctgtaccagcgagcagtcttggaagaccgcaggatcgggatcagtttcaccacggcggtgtatgatcttggaaagtgtttgtcagtctgatttaggttcattcccatagatatcttgaggttagcatagtaagccacttgtcaaaaattaaatgatagcgaacgtttcaaatctcgggttgttgcatttaataattcagacaccctaataatcgtcttgtctccgccggcccccaccatctttcctagtctcacagagtccaagtcaagaatgaacacacgatgttgcttgtcagcagcgaagcaatcctgctccgccgccagacaatggtgtcagtcatttcgaaagggttgtgccaaagcactaggggctgttcacttggataatctggctccagaatcattaccttgccacagaaatatgcttggcgtttattcggcaatacatttacaagaattgtacggcgaatatctctagaaactttgatgttcaatatgagcaaattttcgaagagttcatggaatagtaatcagggcagcaatttgtctgtccttccggacaacgcacgaattaactaaatgggaagtggttcgatcaccagatccacaaagtcgtagagataagtcggtgcgctacattatagtcaagtaagtcgagttcaactagctactcgaagatag

SEQ ID NO: 12211 - DNA, 1791 bp, Muscodor strobelii
  misc_feature: SGI cDNA ID NO. 563956
  misc_feature: Elevated expression when VOC is produced
  misc_feature: Encodes the peptide sequence at SEQ ID NO 12212
atgggcgtcatcgactacatcacgcaagcaacatacctcgtccccgtttcctgtctcctggcagcagtagctacagcaataggccatcatgaattctaccaaggtctacagggcacgccgccgccaacagacgaatatgagatcttccaacatacatttcccacccgggtctcgaggcaacagatcaacactgcgattggtgtcatattcgcggcggtcgtcaaagcgctgctaggtattgctgtgggttacgctcagcagcagcttatttggagagccatcaagaagcaccctactgaattgagcacaattgacggcttattttcatcaaagaatattgtcacttatatcctcgacttccgtctctggtggcgatttcctttcatcatgcttctggctgtcatatattggcttttgccctttggtgctgtgatagctccatcgacactgagcataaatccatcaacgctcgtgaccacgtacacgttgatggctgttcctacaatcgattttgcggagggaagctttgcagattctctggaaggtactgtaccgggatcagtggtcagattcaacgagccactagcaccggctacgagagctgtggcaaaatccgtactcggtcgtaatgttgtatcaattgaagccccttttccgaactcgacctaccaaactacgtttcagggaccagtgcttcgctgcgaggaggtaaaaaaaggcagcgaggcttggaaagcccaatccaagacgatatataacatctccaataattattactacgaaggtagcgcagactgggcatcagggtctgggaaagttaagtgtgaagtttggaatgcgacttatggtgtagaattccactaccaggagggcatacaaagtgtctactctcgcatctcgtcttacgaggctcccttcaacccctcgagcgagttcgattcagacggcttctttatcacttcgcagaattggacgccgtaccatgcatatcaggctgttatgaaggtgctccaagactacattaccggttccatcatagaagactccattaacacatcgatcaattcaagcgtggttctcacagcgctacccttcatgaacgagctaaggtatctccaaagtcgagttgagggcttgaccggcggccaactaatgagcgacgggcgcaacgtttcgctgaaagatgcattggaagatatgtccaggaacgcgacaatcagcttggcgtctgagcccctgttgctaaaaaattctacacagaagaatactaacgtgacatattattcctatgagagcgtatacagctatagcgcacccatcctttgggtagtctatgggctcgcaatcggggccacggcgctcagcgtggcagcgggctgtgtcatagctgcgatagctcgtggtggctacagtcctaagttctcgactatccttcgcgttgcgcacaacgtgcgtcttagcgacgagattgagatctcggacacgacgggtcaagatcctttaccagcacggctcgaaaagacgctcgtgtacttcccatctgaggatgtctcggcgctaccggacactccacattcggctgtcagcgatgcgcaattcgaccatgactgggacgatatgaagacagacatgaggattggtgcgatgggtgaagcgccagtgagaagtcatgggtgtcccttttcacctatggggttgagatatgatcatgaagccgcgcatgttcaaactgaacaaatagacgaggtttacgataatgcaacgtactactacgagtatccgagtcgctaa

SEQ ID NO: 12212 - protein, 596 aa, Muscodor strobelii
  misc_feature: SGI Peptide ID NO. 563956
  misc_feature (18)..(526): NCBI GI: 67522186 Blast Desc: AN1550.2 [Aspergillus nidulans FGSC A4] gi|40745101|gb|EAA64257.1| AN1550.2 [Aspergillus nidulans FGSC A4] gi|259486876|tpe|CBF85091.1| TPA: conserved [Aspergillus FGSC
  misc_feature (26)..(512): NCBI GI: 67525573 Blast Desc: AN3244.2 [Aspergillus nidulans FGSC A4] gi|40743963|gb|EAA63145.1| AN3244.2 [Aspergillus nidulans FGSC A4] gi|259485791|tpe|CBF83110.1| TPA: conserved [Aspergillus FGSC
  misc_feature (9)..(512): NCBI GI: 255954279 Blast Desc: Pc21g08530 [Penicillium chrysogenum Wisconsin 54-1255] gi|211589603|emb|CAP95750.1| Pc21g08530 [Penicillium chrysogenum Wisconsin 54-1255]
  misc_feature (26)..(512): NCBI GI: 67539038 Blast Desc: AN5689.2 [Aspergillus nidulans FGSC A4] gi|40743592|gb|EAA62782.1| AN5689.2 [Aspergillus nidulans FGSC A4] gi|259484837|tpe|CBF81400.1| TPA: conserved [Aspergillus FGSC
  misc_feature (13)..(240): NCBI GI: 121706606 Blast Desc: ACLA_046040 [Aspergillus clavatus NRRL 1] gi|119399713|gb|EAW10139.1| ACLA_046040 [Aspergillus clavatus NRRL 1]
  misc_feature (16)..(512): NCBI GI: 119466981 Blast Desc: NFIA_047350 [Neosartorya fischeri NRRL 181] gi|119405449|gb|EAW15400.1| conserved [Neosartorya fischeri NRRL 181]
  misc_feature (19)..(512): NCBI GI: 121704407 Blast Desc: conserved [Aspergillus clavatus NRRL 1] gi|119398612|gb|EAW09041.1| conserved [Aspergillus clavatus NRRL 1]
  misc_feature (19)..(516): NCBI GI: 154313165 Blast Desc: BC1G_05584 [Botryotinia fuckeliana B05.10] gi|150849669|gb|EDN24862.1| BC1G_05584 [Botryotinia fuckeliana B05.10]
  misc_feature (16)..(512): NCBI GI: 238508002 Blast Desc: conserved [Aspergillus flavus NRRL3357] gi|220688721|gb|EED45073.1| conserved [Aspergillus flavus NRRL3357]
  misc_feature (177)..(512): NCBI GI: 256720670 Blast Desc: NECHADRAFT_85610 [Nectria haematococca mpVI 77-13-4]
  misc_feature: Useful for introducing or modulating the production of volatile compounds
MGVIDYITQATYLVPVSCLLAAVATAIGHHEFYQGLQGTPPPTDEYEIFQHTFPTRVSRQQINTAIGVIFAAVVKALLGIAVGYAQQQLIWRAIKKHPTELSTIDGLFSSKNIVTYILDFRLWWRFPFIMLLAVIYWLLPFGAVIAPSTLSINPSTLVTTYTLMAVPTIDFAEGSFADSLEGTVPGSVVRFNEPLAPATRAVAKSVLGRNVVSIEAPFPNSTYQTTFQGPVLRCEEVKKGSEAWKAQSKTIYNISNNYYYEGSADWASGSGKVKCEVWNATYGVEFHYQEGIQSVYSRISSYEAPFNPSSEFDSDGFFITSQNWTPYHAYQAVMKVLQDYITGSIIEDSINTSINSSVVLTALPFMNELRYLQSRVEGLTGGQLMSDGRNVSLKDALEDMSRNATISLASEPLLLKNSTQKNTNVTYYSYESVYSYSAPILWVVYGLAIGATALSVAAGCVIAAIARGGYSPKFSTILRVAHNVRLSDEIEISDTTGQDPLPARLEKTLVYFPSEDVSALPDTPHSAVSDAQFDHDWDDMKTDMRIGAMGEAPVRSHGCPFSPMGLRYDHEAAHVQTEQIDEVYDNATYYYEYPSR

SEQ ID NO: 12213 - DNA, 2583 bp, Muscodor strobelii
  misc_feature: SGI EST ID NO. CUFF.28960.0
  misc_feature: Variant of the nucleotide sequence at SEQ ID NO 12211
tcagccccgtgtttccctggtttcatatccgtcattgccctgaccgttggcatgatccaacatcgggaaaggagggggtctaaatgcatgcttgacacggtactttctctctatcccaactttgcagcctaatcaacaatagacataatgggcgtcatcgactacatcacgcaagcaacatacctcgtccccgtttcctgtctcctggcagcagtagctacagcaataggccatcatgaattctaccaaggtctacagggcacgccgccgccaacagacgaatatgagatcttccaacatacatttcccacccgggtctcgaggcaacagatcaacactgcgattggtgtcatattcgcggcggtcgtcaaagcgctgctaggtattgctgtgggttacgctcagcagcagcttatttggagagccatcaagaagcaccctactgaattgagcacaattgacggcttattttcatcaaagaatattgtcacttatatcctcgacttccgtctctggtggcgatttcctttcatcatgcttctggctgtcatatattggcttttgccctttggtgctgtgatagctccatcgacactgagcataaatccatcaacgctcgtgaccacgtacacgttgatggctgttcctacaatcgattttgcggagggaagctttgcagattctctggaaggtactgtaccgggatcagtggtcagattcaacgagccactagcaccggctacgagagctgtggcaaaatccgtactcggtcgtaatgttgtatcaattgaagccccttttccgaactcgacctaccaaactacgtttcagggaccagtgcttcgctgcgaggaggtaaaaaaaggcagcgaggcttggaaagcccaatccaagacgatatataacatctccaataattattactacgaaggtagcgcagactgggcatcagggtctgggaaagttaagtgagtattaagtgttaatccagtcgttgactacaagaagtttcacttgtgtgccaagcagctgagttaatgctgtattggcttgatactatttttaacgcgacgtagtatgatgtatctctcctggccaggtaatgatacgtttccttgggccagaagtaacggaacttctggaaattggactttcagccctccagaagggttagttggtatgccgacaagcatcactgtcctggctatacctatagatagccagaattcgtacgacgaacccctggaaataacatgggtacagtgtgaagtttggaatgcgacttatggtgtagaattccactaccaggagggcatacaaagtgtctactctcgcatctcgtcttacgaggctcccttcaacccctcgagcgagttcgattcagacggcttctttatcacttcgcagaattggacgccgtaccatgcatatcaggctgttatgaaggtgctccaagactacattaccggttccatcatagaagactccattaacacatcgatcaattcaagcgtggttctcacagcgctacccttcatgaacgagctaaggtatctccaaagtcgagttgagggcttgaccggcggccaactaatgagcgacgggcgcaacgtttcgctgaaagatgcattggaagatatgtccaggaacgcgacaatcagcttggcgtctgagcccctgttgctaaaaaattctacacagaagaatactaacgtgacatattattcctatgagagcgtatacagctatagcgcacccatcctttgggtagtctatgggctcgcaatcggggccacggcgctcagcgtggcagcgggctgtgtcatagctgcgatagctcgtggtggctacagtcctaagttctcgactatccttcgcgttgcgcacaacgtgcgtcttagcgacgagattgagatctcggacacgacgggtcaagatcctttaccagcacggctcgaaaagacgctcgtgtacttcccatctgaggatgtctcggcgctaccggacactccacattcggctgtcagcgatgcgcaattcgaccatgactgggacgatatgaagacagacatgaggattggtgcgatgggtgaagcgccagtgagaagtcatgggtgtcccttttcacctatggggttgagatatgatcatgaagccgcgcatgttcaaactgaacaaatagacgaggtttacgataatgcaacgtactactacgagtatccgagtcgctaaaggacgatacggggagtccgcgaacatccactgtacattgtaacaaagttggaatggtctgcctctgttaaggcatagatgcttgctagcaatgctgtccctctcgcccaccgtccagaaacaacgtttcacagattgttgtcgtgcccggacattccaagaatatgacagacgcgacatgtctgtcttcgtcttcgttcgtccttctgctttggctctaagcactcccaccgccaccggctccgtttcatgaatcgccgctgttgtcaaagcactttccatccacgtcatgaatgctacctctatgtgacatgtttatttggggttgtggatcgcgtaggttaattgtaa

SEQ ID NO: 12214 - DNA, 2883 bp, Muscodor strobelii
  misc_feature: SGI cDNA ID NO. 563957
  misc_feature: Reduced expression when VOC is produced
  misc_feature: Encodes the peptide sequence at SEQ ID NO 12215
atgacgacgttcctcgaaaatgcatacagcctggtgcaccaggacaacgcggcagacgtgccgtcgatgtcggagctgcggacgcagctggagaagggcacggacgagaccaaggtcgagacgatgaagcggatcctcacggtgatgctcaacggcgacccgatgccgcagctgctgatgcacatcatccgcttcgtgatgccgtcgcgcagcaagcagctcaagaagctgctgtacttctactacgagatctgccccaagcacgacggcgccggcaagctcaagcaggagatgatcctcgtctgcaacggcatccgcaacgacctgcagcaccccaacgagtacatccgcggcaacaccctgcgcttcctgaccaagctgcgcgacgacgagctgatcgagcccctgctgtcctccgcccgccagtgcctcgagcaccgccacgcctacgtccgcaagaacgccgtctacgccgtcgcctccatcttccagcactccccccacctcatccccgacgccgccgacctcatcgccaccttcctcgacggcgagaacgacgccacctgcaagcgcaacgccttcgtcgccctctccagcatcgaccacgccaaggccctcgccttcctcagccaagtcttcgacggcatccccaacgccgaggagctgctgcagctcgtcgagctcgagttcatccgcaaggacgccgtccagaacgcgcagcacaagggccgctacctgcgcctcatcttcgacctgctcgaggccaccaccgccaccgtcgtctacgaggccgcctcctcgctgaccgccctcaccagcaaccccgtcgccgtcaaggccgccgccgccaagttcatcgagctcagcatcaaggagtccgacaacaacgtcaagctcatcgtcctcgaccgcgtcaaccagctgcgcatgcgcaacgagggcgtcctcgacgacctcatcatggagatcctgcgcgtgctgtccagccccgacatcgacgtccgccgcaagggcctcgccatcgccatggacatggtctcgagcaagaacgtcgaggaggtcatcctgctgctcaagaaggagctctccaagacggtcgaccaggactacgagaagaacgccgagtaccgccagctgctcatccagtccatccaccagtgcgccatcaagttctccgaggtcgccgccagcgtcgtcgacctgctcatggacttcatcgccgacttcagcaactcctccgccgtcgacgtcatcagcttcgtcaaggaggtcgtcgagaagttccccaagctgcggccctccatcgtcgcccgcctcgtcgacaccctcagcgaggtgcgcgccggcaaggtgtaccgcggcatcatctggatcgtgggcgagtactctctcgaagaaagtgacattagggatgcatggaagaagatacgcgccagtctcggtgagatccccatcctcgcctccgagcaacgcctgctcgacaacgtcgacggtgaagacgacaaggaaaaggacaaggaccaggtcaacggccactcgaagccggctcagccttccggctcgcgccgtgtcttggctgatggtacatatgcaaccgagaccgcattgacgagcgcatccgctgctgctgcgaagctcgaggccgtcaaggctgcccagaagcctccattgcgacagctcattctcgatggcgactactatctggccactgttctgtctgctaccctcaccaagctcgtcatgcgtcactccgagatttctgccgacaaggcacggaccaatgctctcaaggccgaagccatgctcatcatgatctccatcatccgtgtcggccagtcccagttcgtcaaggctcccattgatgaggactccgtcgaccgaatcatgtcttgcgttcgatcattagccgagttctccgagaagaaggagctcgagtccgtattccttgacgacactcgcaaggcctttcgggctatggtccaggtcgaggagaagaagcgtgctgccaaggaggcatttgagaaggcaaagactgctatccaggtcgacgatgtcgtccagatccgccagctctccaagaagaacaacggagatggtgccgatgagattgagctagatctcgagagggcgactggtggcgagtccacgtctgaggatctctcctcgaagctcagccgcgttgtgcagcttacgggattctccgatcctgtatatgccgaggcttacgtcaaggttcaccaattcgatatcgtgttggatgtcctcctggtcaatcagaccaccgagacgctacagaatctttcagtagagttcgctacgttaggtgatctcaaggttgtagagagaccgacgacgcagaacctgggcccacacgacttccacaatgtgcagtgcacaatcaaggtctcgtcaacagatacgggtgtcatcttcggcaacgttgtctacgacggtgcgcacagcacagatacgaacgttgtcatcctcaacgatttacatgtcgatattatggactacatccagcccgcgacctgcacagaaacccagttccgcacgatgtggacggagttcgaatgggagaacaaggtgaacatcaacagcaaggccaagagcttgcgggagttcctcgaacagttgcttgcggctacgaacatgaactgtcttacgcctgaggcgtccatgaagggcgattgtggattcttgagcgctaatctatatgcccggagtgtattcggcgaggatgctttggccaacttgagtatagaaaaggaaggcgaagatgggccgatcacaggctttgtccgcataagaagcaggtcacagggtctcgcactcagcctcgggtcactaaaggggctgaataagattggtacgacggcgtaa

SEQ ID NO: 12215 - protein, 960 aa, Muscodor strobelii
  misc_feature: SGI Peptide ID NO. 563957
  misc_feature (18)..(565): Pfam Id: PF01602 Pfam Desc: Adaptin N terminal region
  misc_feature (680)..(954): Pfam Id: PF07718 Pfam Desc: Coatamer beta C-terminal region
  misc_feature (18)..(178): Pfam Id: PF01602 Pfam Desc: Adaptin N terminal region
  misc_feature (258)..(485): Pfam Id: PF01602 Pfam Desc: Adaptin N terminal region
  misc_feature (1)..(953): NCBI GI: 121701799 Blast Desc: Coatomer subunit beta, [Aspergillus clavatus NRRL 1] gi|119397307|gb|EAW07738.1| Coatomer subunit beta, [Aspergillus clavatus NRRL 1]
  misc_feature (1)..(953): NCBI GI: 238498358 Blast Desc: Coatomer subunit beta, [Aspergillus flavus NRRL3357] gi|220693688|gb|EED50033.1| Coatomer subunit beta, [Aspergillus flavus NRRL3357]
  misc_feature (1)..(953): NCBI GI: 258568962 Blast Desc: coatomer beta subunit [Uncinocarpus reesii 1704] gi|237906671|gb|EEP81072.1| coatomer beta subunit [Uncinocarpus reesii 1704]
  misc_feature (1)..(953): NCBI GI: 240109816 Blast Desc: Coatomer beta subunit, [Coccidioides posadasii C735 delta SOWgp]
  misc_feature (1)..(953): NCBI GI: 119184223 Blast Desc: CIMG_06935 [Coccidioides immitis RS]
  misc_feature (1)..(953): NCBI GI: 238839073 Blast Desc: coatomer subunit beta [Microsporum canis CBS 113480]
  misc_feature (1)..(957): NCBI GI: 189210794 Blast Desc: coatomer subunit beta [Pyrenophora tritici-repentis Pt-1C-BFP] gi|187977821|gb|EDU44447.1| coatomer subunit beta [Pyrenophora tritici-repentis Pt-1C-BFP]
  misc_feature (118)..(956): NCBI GI: 154299992 Blast Desc: conserved [Botryotinia fuckeliana B05.10] gi|150856798|gb|EDN31990.1| conserved [Botryotinia fuckeliana B05.10]
  misc_feature (1)..(957): NCBI GI: 169623680 Blast Desc: SNOG_15084 [Phaeosphaeria nodorum SN15] gi|160705025|gb|EAT77627.2| SNOG_15084 [Phaeosphaeria nodorum SN15]
  misc_feature (1)..(802): NCBI GI: 261352883 Blast Desc: coatomer subunit beta [Verticillium albo-atrum VaMs.102]
  misc_feature: Useful for introducing or modulating the production of volatile compounds
MTTFLENAYSLVHQDNAADVPSMSELRTQLEKGTDETKVETMKRILTVMLNGDPMPQLLMHIIRFVMPSRSKQLKKLLYFYYEICPKHDGAGKLKQEMILVCNGIRNDLQHPNEYIRGNTLRFLTKLRDDELIEPLLSSARQCLEHRHAYVRKNAVYAVASIFQHSPHLIPDAADLIATFLDGENDATCKRNAFVALSSIDHAKALAFLSQVFDGIPNAEELLQLVELEFIRKDAVQNAQHKGRYLRLIFDLLEATTATVVYEAASSLTALTSNPVAVKAAAAKFIELSIKESDNNVKLIVLDRVNQLRMRNEGVLDDLIMEILRVLSSPDIDVRRKGLAIAMDMVSSKNVEEVILLLKKELSKTVDQDYEKNAEYRQLLIQSIHQCAIKFSEVAASVVDLLMDFIADFSNSSAVDVISFVKEVVEKFPKLRPSIVARLVDTLSEVRAGKVYRGIIWIVGEYSLEESDIRDAWKKIRASLGEIPILASEQRLLDNVDGEDDKEKDKDQVNGHSKPAQPSGSRRVLADGTYATETALTSASAAAAKLEAVKAAQKPPLRQLILDGDYYLATVLSATLTKLVMRHSEISADKARTNALKAEAMLIMISIIRVGQSQFVKAPIDEDSVDRIMSCVRSLAEFSEKKELESVFLDDTRKAFRAMVQVEEKKRAAKEAFEKAKTAIQVDDVVQIRQLSKKNNGDGADEIELDLERATGGESTSEDLSSKLSRVVQLTGFSDPVYAEAYVKVHQFDIVLDVLLVNQTTETLQNLSVEFATLGDLKVVERPTTQNLGPHDFHNVQCTIKVSSTDTGVIFGNVVYDGAHSTDTNVVILNDLHVDIMDYIQPATCTETQFRTMWTEFEWENKVNINSKAKSLREFLEQLLAATNMNCLTPEASMKGDCGFLSANLYARSVFGEDALANLSIEKEGEDGPITGFVRIRSRSQGLALSLGSLKGLNKIGTTA

SEQ ID NO: 12216 - DNA, 3480 bp, Muscodor strobelii
  misc_feature: SGI EST ID NO. CUFF.29467.1
  misc_feature: Variant of the nucleotide sequence at SEQ ID NO 12214
gtgggattaccttaccttaatgagagatgtcactgcccctgctgaagggaaggcgtatcaccatctctctcgtaactgtgctttctttctttcttgaggggggaggagctacgtagtcagtcacttactactactgctgctcttgctactgctgctactaccaacaccactcccacactcccacactcccacacacccacacatcacccatcgcgggcacacaccagtaaccaacccatcgacgaggcaggcggtcgtgcaccgcgagagagagccggcccagcatgacgacgttcctcgaaaatgcatacagcctggtgcaccaggacaacgcggcagacgtgccgtcgatgtcggagctgcggacgcagctggagaagggcacggacgagaccaaggtcgagacgatgaagcggatcctcacggtgatgctcaacggcgacccgatgccgcagctgctgatgcacatcatccgcttcgtgatgccgtcgcgcagcaagcagctcaagaagctgctgtacttctactacgagatctgccccaagcacgacggcgccggcaagctcaagcaggagatgatcctcgtctgcaacggcatccgcaacgacctgcagcaccccaacgagtacatccgcggcaacaccctgcgcttcctgaccaagctgcgcgacgacgagctgatcgagcccctgctgtcctccgcccgccagtgcctcgagcaccgccacgcctacgtccgcaagaacgccgtctacgccgtcgcctccatcttccagcactccccccacctcatccccgacgccgccgacctcatcgccaccttcctcgacggcgagaacgacgccacctgcaagcgcaacgccttcgtcgccctctccagcatcgaccacgccaaggccctcgccttcctcagccaagtcttcgacggcatccccaacgccgaggagctgctgcagctcgtcgagctcgagttcatccgcaaggacgccgtccagaacgcgcagcacaagggccgctacctgcgcctcatcttcgacctgctcgaggccaccaccgccaccgtcgtctacgaggccgcctcctcgctgaccgccctcaccagcaaccccgtcgccgtcaaggccgccgccgccaagttcatcgagctcagcatcaaggagtccgacaacaacgtcaagctcatcgtcctcgaccgcgtcaaccagctgcgcatgcgcaacgagggcgtcctcgacgacctcatcatggagatcctgcgcgtgctgtccagccccgacatcgacgtccgccgcaagggcctcgccatcgccatggacatggtctcgagcaagaacgtcgaggaggtcatcctgctgctcaagaaggagctctccaagacggtcgaccaggactacgagaagaacgccgagtaccgccagctgctcatccagtccatccaccagtgcgccatcaagttctccgaggtcgccgccagcgtcgtcgacctgctcatggacttcatcgccgacttcagcaactcctccgccgtcgacgtcatcagcttcgtcaaggaggtcgtcgagaagttccccaagctgcggccctccatcgtcgcccgcctcgtcgacaccctcagcgaggtgcgcgccggcaaggtgtaccgcggcatcatctggatcgtgggcgagtactctctcgaagaaagtgacattagggatgcatggaagaagatacgcgccagtctcggtgagatccccatcctcgcctccgagcaacgcctgctcgacaacgtcgacggtgaagacgacaaggaaaaggacaaggaccaggtcaacggccactcgaagccggctcagccttccggctcgcgccgtgtcttggctgatggtacatatgcaaccgagaccgcattgacgagcgcatccgctgctgctgcgaagctcgaggccgtcaaggctgcccagaagcctccattgcgacagctcattctcgatggcgactactatctggccactgttctgtctgctaccctcaccaagctcgtcatgcgtcactccgagatttctgccgacaaggcacggaccaatgctctcaaggccgaagccatgctcatcatgatctccatcatccgtgtcggccagtcccagttcgtcaaggctcccattgatgaggactccgtcgaccgaatcatgtcttgcgttcgatcattagccgagttctccgagaagaaggagctcgagtccgtattccttgacgacactcgcaaggcctttcgggctatggtccaggtcgaggagaagaagcgtgctgccaaggaggcatttgagaaggcaaagactgctatccaggtcgacgatgtcgtccagatccgccagctctccaagaagaacaacggagatggtgccgatgagattgagctagatctcgagagggcgactggtggcgagtccacgtctgaggatctctcctcgaagctcagccgcgttgtgcagcttacgggattctccgatcctgtatatgccgaggcttacgtcaaggttcaccaattcgatatcgtgttggatgtcctcctggtcaatcagaccaccgagacgctacagaatctttcagtagagttcgctacgttaggtgatctcaaggttgtagagagaccgacgacgcagaacctgggcccacacgacttccacaatgtgcagtgcacaatcaaggtctcgtcaacagatacgggtgtcatcttcggcaacgttgtctacgacggtgcgcacagcacagatacgaacgttgtcatcctcaacgatttacatgtcgatattatggactacatccagcccgcgacctgcacagaaacccagttccgcacgatgtggacggagttcgaatgggagaacaaggtgaacatcaacagcaaggccaagagcttgcgggagttcctcgaacagttgcttgcggctacgaacatgaactgtcttacgcctgaggcgtccatgaagggcgattgtggattcttgagcgctaatctatatgcccggagtgtattcggcgaggatgctttggccaacttgagtatagaaaaggaaggcgaagatgggccgatcacaggctttgtccgcataagaagcaggtcacagggtctcgcactcagcctcgggtcactaaaggggctgaataagattggtacgacggcgtaaggggcatgaacagaattaattgaaactgtgcgagatgatagggatttgtgtccaagtagacttaggttgggaaaatggaaaggaaagacctgattagcttgaactgcgtagaaaaggtgttcctggtgtcctaggaggtggtcaggccattgacaaaataggtgatatatcaatcaagctctacattcatgaacgttaacagcggtctatctaacgccagctagacagctggagccgaggagtagtcctttcaccactaaaatccttccctgtctgctccaacatttcaaattgaagcataacaaggtatctc

SEQ ID NO: 12217 - DNA, 501 bp, Muscodor strobelii
  misc_feature: SGI cDNA ID NO. 563958
  misc_feature: Encodes the peptide sequence at SEQ ID NO 12218
atggccagcaccgccaacgccaacaactcctcctcctcctccagcgccgagcccttctacatccgctactactcgggccactcgggccgcttcggccacgagttcctcgagttcgacatccgtctcgtcggcgatggccgcagcgccgtcgcccgctacgccaacaactccaactaccgcaacgacagcctcatccgcaaagaaatgtgcatctcctccctcgtgacagacgagatccgccgcatcgtcaagacctccgagatcatgaaggaggacgacagcaagtggccccagaagaacaaggacggccgccaagagctcgagatccgcctcggaaacgaccacatctccttcgagaccgccaagatcggctccctcatcgacgtcaccgagtccgccgatcccgagggcctgcgcgtcttctactacctcgtccaagacctcaaggctctggtcttctctttgacgagcctgcatttcaagattaaacctatcggctga

SEQ ID NO: 12218 - protein, 166 aa, Muscodor strobelii
  misc_feature: SGI Peptide ID NO. 563958
  misc_feature (18)..(165): Pfam Id: PF02792 Pfam Desc: Mago nashi protein
  misc_feature (19)..(165): Pfam Id: PF02792 Pfam Desc: Mago nashi protein
  misc_feature (13)..(165): NCBI GI: 261352882 Blast Desc: Mago nashi protein [Verticillium albo-atrum VaMs.102]
  misc_feature (13)..(165): NCBI GI: 256721977 Blast Desc: [Nectria haematococca mpVI 77-13-4]
  misc_feature (13)..(165): NCBI GI: 226285874 Blast Desc: conserved [Paracoccidioides brasiliensis Pb01] gi|226291348|gb|EEH46776.1| mago nashi domain-containing protein [Paracoccidioides brasiliensis Pb18]
  misc_feature (13)..(165): NCBI GI: 46140243 Blast Desc: FG11636.1 [Gibberella zeae PH-1]
  misc_feature (13)..(165): NCBI GI: 171690974 Blast Desc: protein product [Podospora anserina] gi|170945435|emb|CAP71547.1| protein product [Podospora anserina]
  misc_feature (13)..(165): NCBI GI: 70995410 Blast Desc: Mago nashi domain protein [Aspergillus fumigatus Af293] gi|66850096|gb|EAL90423.1| Mago nashi domain protein [Aspergillus fumigatus Af293] gi|159131216|gb|EDP56329.1| Mago
  misc_feature (17)..(165): NCBI GI: 242768316 Blast Desc: Mago nashi domain protein [Talaromyces stipitatus ATCC 10500] gi|218724740|gb|EED24157.1| Mago nashi domain protein [Talaromyces stipitatus ATCC 10500]
  misc_feature (13)..(165): NCBI GI: 212542543 Blast Desc: Mago nashi domain protein [Penicillium marneffei ATCC 18224] gi|210066333|gb|EEA20426.1| Mago nashi domain protein [Penicillium marneffei ATCC 18224]
  misc_feature (13)..(162): NCBI GI: 225679613 Blast Desc: mago nashi domain-containing protein [Paracoccidioides brasiliensis Pb03]
  misc_feature (11)..(165): NCBI GI: 39977949 Blast Desc: mago nashi domain protein [Magnaporthe grisea 70-15] gi|145013581|gb|EDJ98222.1| mago nashi domain protein [Magnaporthe grisea 70-15]
MASTANANNSSSSSSAEPFYIRYYSGHSGRFGHEFLEFDIRLVGDGRSAVARYANNSNYRNDSLIRKEMCISSLVTDEIRRIVKTSEIMKEDDSKWPQKNKDGRQELEIRLGNDHISFETAKIGSLIDVTESADPEGLRVFYYLVQDLKALVFSLTSLHFKIKPIG

SEQ ID NO: 12219 - DNA, 4085 bp, Muscodor strobelii
  misc_feature: SGI EST ID NO. CUFF.29124.0
  misc_feature: Variant of the nucleotide sequence at SEQ ID NO 12217
agtgctggctaggcaatgcaactgataggtacatgtatctgagtctctgccccgccaattcggggaagcagactggggttgtcactatagtatcataagctacctactacttaggggccctgaattgaaccatcccatccattaaccaactcagcacgaggcagctttgcttcgtcgcgcctcgttgtcaaaccactttctttcacaccacagacagcagtcttaacaacgcaacaacacaacaacgaggataagagacaagacaggaaccccattgtcattcgagtggtccatgcatatcgagaccccgcgccgcgacccgaccgcgaccatggccagcaccgccaacgccaacaactcctcctcctcctccagcgccgagcccttctacatccgctactactcgggccactcgggccgcttcggccacgagttcctcgagttcgacatccgtctcgtcggcgatggccgcagcgccgtcgcccgctacgccaacaactccaactaccgcaacgacagcctcatccgcaaagaaatgtgcatctcctccctcgtgacagacgagatccgccgcatcgtcaagacctccgagatcatgaaggaggacgacagcaagtggccccagaagaacaaggacggccgccaagagctcgagatccgcctcggaaacgaccacatctccttcgagaccgccaagatcggctccctcatcgacgtcaccgagtccgccgatcccgagggcctgcgcgtcttctactacctcgtccaagacctcaaggctctggtcttctctttgacgagcctgcatttcaagattaaacctatcggctgatcctgcgagggaaatggggaaaagacaaggaatgtagaacgatgaggaattgggggaagatataggcagctgagatgtgtctatcacgccacgaatgaaccacgaaggcgggccgagtaaaggttgccacatgcccagcactgaagaacggcaggagaaacagtaagaggcttgtatgtgctcatcgcagtacgagtcaccaggggaacgccatacgccgttgtctcggcccctgtgccaagtgcccagcaaataataccccatgccccaagaggcacaagaagattagacagtatctttcctcattcatacttcgtgatttgttcccgccttacaatgctatgctatgtggggaacccctcctcctgctatatcctatagctgccttggttccctgaccagactctcgtggtatcgtatatacatgtgccagcccaaggtactgggaagcactcatcgtggttctcccggttgggctgtcattcgctagccactaacacacgcgctcgatggttcgcctagctactcacttggttattcgaatcatcgcgaatttgattattcggaaaacacgagtgcgaaagccaatagtgcatgccagatgggagcgctggtgcccgagatgtaggtgtcactccatgccgtggatgaagtgatcttgattttctcctttcctttcctcctataaccccctttcgcctgtccttcagcggaactcgaacgcgctatgacagccacggtcctccacgtgcttcagctccagttgttggaatctgccccaggtagtcagtattcgcacgagcctctattcaacgtagggcacaagtactcacttctcgctcttactatggaagtaaatcccactgacgctgccctccttggcattgaagcagatgtagtagaacccctcgaagctcgcgcccgtgatcgtcgtcaccctgtggtccggcacgaggaagtgctccttccaccgcatgaagacgttctccttgttgggcaggttcgggatcgtgacgtggtggcccttgcgcacggctttcgagtattgccggaacgcgctgaacttgctccagtgcgacacgtcttctttctccgtggcgccccacgacgggtgcttggtcaggaatgtgtaccggctgccgatgatctcgccctcgaagtaggtcgtgagggtcgggttgtcgggggtcagacctgtgggtcgtgagtgagtgggcgattgagtgaacgagtacatataaccgagttggagttgtgggtaaaagtgcgcaagatggcagggtggtgattcgaaaatgccgttgtcccgagacgtgaaaacgtaccttgaatcttgagatatccacataagaacgattcgcgcaaatcgacatacttgatgtccacttgcacgtcgtagacctgccgttctgattgctgtgtgccatggaacttgctacctgggcgcaagtacgatgaaaaagtcgtggggatgatctgaaaatcactacgttagtaagagctaggtaattaattggagatgcgccgcgtggcaaaacacaacggcaatagcgatgtaattgaaacatactctgatattggaaacatcccagcccatggtcggctcgtcttcgtcgcggggtgcaggtccgtacccgacgtcatcgtccttgtcctggtcaacggcatttgcatcgttgtctcgggatgcgcccgacgcatctgcgactctatgccggtcgctcgcgtcgtctgagggcttgtgcgacgcctcgacggcttgggggccggaagggtcgacgccaccaccgctccgagagtcgggacgcggcgactcggtagcggaccgcgacgacgacatgtcgtctatcgtcgctgttgtcggctggctcgtgttctcgggtgatgacgtagtcgcatcagattccatattggcgtcctcctcggccgtccagctttcgggagaccggatgtcctcagggcatgatgagctatgggtccgaggtggcagctctggtgggggtggagggttgctggatggggtaggcattatggcgattaggttggcgatgatggctgatgaagtcggcgatgggtatcaaatttggtggtaaatatgaggggtgctctgggtctggggtatgggtatttaagacggcgacacttgtattcagaatgataggatatttgcccaagataaggaaaaagcggccgttgcaatctcatatgtacaaagagagaatgcgacgatgacgattaaagtcgatgcgacgtgactagactataataaatgaagagtagatggtcaaggaggtgaaggtggtgatggactacagtcctagaaggacaagggagacgagaaaggacggcaaccaggggtcacgttatgatgtcaaaactagaatacaccagacaggagaatcatgatcgaatagcgacaacaaggcctgaagagatagatcacagaatcatcgaaagacgatgtatctagccctatgccgtgtccttgtcttgtatcacaggtgtcgttgtgcgatgggtcgtcagaggatggaggatgggcgatggggcggtcgtgtaggaccgaaggcggtagacgagacgaagacggggagtctagaatctggagaaacgaagagcgccagacccagcggcgggtaaggatttgataaaaagatggagaagaggcttgggaaggatgcaggccgatagaccagctgaaccttgtctttattcgtgaagctctaccccataccacacgcgcacacctctccaactcccaatcatcttgggctgaggacctgtcacctaatcaattatctgtcacttcacatgcggagtgcgtttgggtcgcaggaatcactggatcgtcgctgtctcttttcacagcaatggactgctttgtggctgcgaaggacaaggcaatttctggcagcttgacgactcatgcagttaactacatgtattgcacaaactcgagttgttaacttgggacatgtcatcttgaccaaatatctggtgttattcatgagttggcgcaatcaatgtagactgcaatataactgcaacccggttcctggtgcccgttttctgatatgtaaatacccaagcatcgctaatagagtatagaaaagacggatagaagaaacaagacttcaaaggctgttgtcagccctctctgagacacgggatcggtaacggccacaacggccactgatttgccgttagcatccatctcatgattcagtgccacatgcggctatgtctcatccag

SEQ ID NO: 12220 - DNA, 1038 bp, Muscodor strobelii
  misc_feature: SGI cDNA ID NO. 563959
  misc_feature: Encodes the peptide sequence at SEQ ID NO 12221
atgcctaccccatccagcaaccctccacccccaccagagctgccacctcggacccatagctcatcatgccctgaggacatccggtctcccgaaagctggacggccgaggaggacgccaatatggaatctgatgcgactacgtcatcacccgagaacacgagccagccgacaacagcgacgatagacgacatgtcgtcgtcgcggtccgctaccgagtcgccgcgtcccgactctcggagcggtggtggcgtcgacccttccggcccccaagccgtcgaggcgtcgcacaagccctcagacgacgcgagcgaccggcatagagtcgcagatgcgtcgggcgcatcccgagacaacgatgcaaatgccgttgaccaggacaaggacgatgacgtcgggtacggacctgcaccccgcgacgaagacgagccgaccatgggctgggatgtttccaatatcagaatcatccccacgactttttcatcgtacttgcgcccaggtagcaagttccatggcacacagcaatcagaacggcaggtctacgacgtgcaagtggacatcaagtatgtcgatttgcgcgaatcgttcttatgtggatatctcaagattcaaggtctgacccccgacaacccgaccctcacgacctacttcgagggcgagatcatcggcagccggtacacattcctgaccaagcacccgtcgtggggcgccacggagaaagaagacgtgtcgcactggagcaagttcagcgcgttccggcaatactcgaaagccgtgcgcaagggccaccacgtcacgatcccgaacctgcccaacaaggagaacgtcttcatgcggtggaaggagcacttcctcgtgccggaccacagggtgacgacgatcacgggcgcgagcttcgaggggttctactacatctgcttcaatgccaaggagggcagcgtcagtgggatttacttccatagtaagagcgagaaattccaacaactggagctgaagcacgtggaggaccgtggctgtcatagcgcgttcgagttccgctga

SEQ ID NO: 12221 - protein, 345 aa, Muscodor strobelii
  misc_feature: SGI Peptide ID NO. 563959
  misc_feature (1)..(345): NCBI GI: 46140245 Blast Desc: FG11637.1 [Gibberella zeae PH-1]
  misc_feature (122)..(345): NCBI GI: 156062878 Blast Desc: SS1G_01555 [Sclerotinia sclerotiorum 1980] gi|154696891|gb|EDN96629.1| SS1G_01555 [Sclerotinia sclerotiorum 1980]
  misc_feature (143)..(345): NCBI GI: 154299986 Blast Desc: BC1G_11182 [Botryotinia fuckeliana B05.10] gi|150856795|gb|EDN31987.1| BC1G_11182 [Botryotinia fuckeliana B05.10]
  misc_feature (112)..(345): NCBI GI: 145605798 Blast Desc: MGG_06858 [Magnaporthe grisea 70-15] gi|145013584|gb|EDJ98225.1| MGG_06858 [Magnaporthe grisea 70-15]
  misc_feature (1)..(345): NCBI GI: 171690976 Blast Desc: protein product [Podospora anserina] gi|170945436|emb|CAP71548.1| protein product [Podospora anserina]
  misc_feature (1)..(345): NCBI GI: 261203615 Blast Desc: vesicle-mediated transporter Vid24 [Ajellomyces dermatitidis SLH14081] gi|239586806|gb|EEQ69449.1| vesicle-mediated transporter Vid24 [Ajellomyces dermatitidis
  misc_feature (1)..(345): NCBI GI: 70995408 Blast Desc: vesicle-mediated transport protein Vid24 [Aspergillus fumigatus Af293] gi|66850095|gb|EAL90422.1| vesicle-mediated transport protein Vid24, [Aspergillus fumigatus Af293]
  misc_feature (1)..(345): NCBI GI: 119495791 Blast Desc: vesicle-mediated transport protein Vid24, [Neosartorya fischeri NRRL 181] gi|119412835|gb|EAW22776.1| vesicle-mediated transport protein Vid24, [Neosartorya fischeri NRRL 181]
  misc_feature (1)..(345): NCBI GI: 159131215 Blast Desc: vesicle-mediated transport protein Vid24, [Aspergillus fumigatus A1163]
  misc_feature (145)..(345): NCBI GI: 40882215 Blast Desc: conserved [Neurospora crassa]
MPTPSSNPPPPPELPPRTHSSSCPEDIRSPESWTAEEDANMESDATTSSPENTSQPTTATIDDMSSSRSATESPRPDSRSGGGVDPSGPQAVEASHKPSDDASDRHRVADASGASRDNDANAVDQDKDDDVGYGPAPRDEDEPTMGWDVSNIRIIPTTFSSYLRPGSKFHGTQQSERQVYDVQVDIKYVDLRESFLCGYLKIQGLTPDNPTLTTYFEGEIIGSRYTFLTKHPSWGATEKEDVSHWSKFSAFRQYSKAVRKGHHVTIPNLPNKENVFMRWKEHFLVPDHRVTTITGASFEGFYYICFNAKEGSVSGIYFHSKSEKFQQLELKHVEDRGCHSAFEFR

SEQ ID NO: 12222 - DNA, 3864 bp, Muscodor strobelii
  misc_feature: SGI EST ID NO. CUFF.29125.1
  misc_feature: Variant of the nucleotide sequence at SEQ ID NO 12220
ctggatgagacatagccgcatgtggcactgaatcatgagatggatgctaacggcaaatcagtggccgttgtggccgttaccgatcccgtgtctcagagagggctgacaacagcctttgaagtcttgtttcttctatccgtcttttctatactctattagcgatgcttgggtatttacatatcagaaaacgggcaccaggaaccgggttgcagttatattgcagtctacattgattgcgccaactcatgaataacaccagatatttggtcaagatgacatgtcccaagttaacaactcgagtttgtgcaatacatgtagttaactgcatgagtcgtcaagctgccagaaattgccttgtccttcgcagccacaaagcagtccattgctgtgaaaagagacagcgacgatccagtgattcctgcgacccaaacgcactccgcatgtgaagtgacagataattgattaggtgacaggtcctcagcccaagatgattgggagttggagaggtgtgcgcgtgtggtatggggtagagcttcacgaataaagacaaggttcagctggtctatcggcctgcatccttcccaagcctcttctccatctttttatcaaatccttacccgccgctgggtctggcgctcttcgtttctccagattctagactccccgtcttcgtctcgtctaccgccttcggtcctacacgaccgccccatcgcccatcctccatcctctgacgacccatcgcacaacgacacctgtgatacaagacaaggacacggcatagggctagatacatcgtctttcgatgattctgtgatctatctcttcaggccttgttgtcgctattcgatcatgattctcctgtctggtgtattctagttttgacatcataacgtgacccctggttgccgtcctttctcgtctcccttgtccttctaggactgtagtccatcaccaccttcacctccttgaccatctactcttcatttattatagtctagtcacgtcgcatcgactttaatcgtcatcgtcgcattctctctttgtacatatgagattgcaacggccgctttttccttatcttgggcaaatatcctatcattctgaatacaagtgtcgccgtcttaaatacccataccccagacccagagcacccctcatatttaccaccaaatttgatacccatcgccgacttcatcagccatcatcgccaacctaatcgccataatgcctaccccatccagcaaccctccacccccaccagagctgccacctcggacccatagctcatcatgccctgaggacatccggtctcccgaaagctggacggccgaggaggacgccaatatggaatctgatgcgactacgtcatcacccgagaacacgagccagccgacaacagcgacgatagacgacatgtcgtcgtcgcggtccgctaccgagtcgccgcgtcccgactctcggagcggtggtggcgtcgacccttccggcccccaagccgtcgaggcgtcgcacaagccctcagacgacgcgagcgaccggcatagagtcgcagatgcgtcgggcgcatcccgagacaacgatgcaaatgccgttgaccaggacaaggacgatgacgtcgggtacggacctgcaccccgcgacgaagacgagccgaccatgggctgggatgtttccaatatcagaatcatccccacgactttttcatcgtacttgcgcccaggtagcaagttccatggcacacagcaatcagaacggcaggtctacgacgtgcaagtggacatcaagtatgtcgatttgcgcgaatcgttcttatgtggatatctcaagattcaaggtctgacccccgacaacccgaccctcacgacctacttcgagggcgagatcatcggcagccggtacacattcctgaccaagcacccgtcgtggggcgccacggagaaagaagacgtgtcgcactggagcaagttcagcgcgttccggcaatactcgaaagccgtgcgcaagggccaccacgtcacgatcccgaacctgcccaacaaggagaacgtcttcatgcggtggaaggagcacttcctcgtgccggaccacagggtgacgacgatcacgggcgcgagcttcgaggggttctactacatctgcttcaatgccaaggagggcagcgtcagtgggatttacttccatagtaagagcgagaaattccaacaactggagctgaagcacgtggaggaccgtggctgtcatagcgcgttcgagttccgctgaaggacaggcgaaagggggttataggaggaaaggaaaggagaaaatcaagatcacttcatccacggcatggagtgacacctacatctcgggcaccagcgctcccatctggcatgcactattggctttcgcactcgtgttttccgaataatcaaattcgcgatgattcgaataaccaagtgagtagctaggcgaaccatcgagcgcgtgtgttagtggctagcgaatgacagcccaaccgggagaaccacgatgagtgcttcccagtaccttgggctggcacatgtatatacgataccacgagagtctggtcagggaaccaaggcagctataggatatagcaggaggaggggttccccacatagcatagcattgtaaggcgggaacaaatcacgaagtatgaatgaggaaagatactgtctaatcttcttgtgcctcttggggcatggggtattatttgctgggcacttggcacaggggccgagacaacggcgtatggcgttcccctggtgactcgtactgcgatgagcacatacaagcctcttactgtttctcctgccgttcttcagtgctgggcatgtggcaacctttactcggcccgccttcgtggttcattcgtggcgtgatagacacatctcagctgcctatatcttcccccaattcctcatcgttctacattccttgtcttttccccatttccctcgcaggatcagccgataggtttaatcttgaaatgcaggctcgtcaaagagaagaccagagccttgaggtcttggacgaggtagtagaagacgcgcaggccctcgggatcggcggactcggtgacgtcgatgagggagccgatcttggcggtctcgaaggagatgtggtcgtttccgaggcggatctcgagctcttggcggccgtccttgttcttctggggccacttgctgtcgtcctccttcatgatctcggaggtcttgacgatgcggcggatctcgtctgtcacgagggaggagatgcacactgttttgtggagttgctcattagcgattcgttctcgtcaggtctagttgttctgggttcatactttctttgcggatgaggctgtcgttgcggtagttggagttgttggcgtagcgggcgacggcgctgcggccatcgccgacgagacggatgtcgaactcgaggaactcgtggccgaagcggcccgagtggcccgagtagtagcggatgtagaagggctcggcgctggaggaggaggaggagttgttggcgttggcggtgctggccatggtcgcggtcgggtcgcggcgcggggtctcgatatgcatggaccactcgaatgacaatggggttcctgtcttgtctcttatcctcgttgttgtgttgttgcgttgttaagactgctgtctgtggtgtgaaagaaagtggtttgacaacgaggcgcgacgaagcaaagctgcctcgtgctgagttggttaatggatgggatggttcaattcagggcccctaagtagtaggtagcttatgatactatagtgacaaccccagtctgcttccccgaattggcggggcagagactcagatacatgtacctatcagttgcattgcctagccagcact

SEQ ID NO: 12223 - DNA, 1374 bp, Muscodor strobelii
  misc_feature: SGI cDNA ID NO. 563960
  misc_feature: Encodes the peptide sequence at SEQ ID NO 12224
atgcagtatctcatacgatttacgcagtggcatgagagttttcgcttagccgaaatacaagctcttgccgtgttagcgggggtggatttgaagatcgtatcttacgaagacgaatctccgttctgtatagttgagcttccttctgacgaagctgcacgtgctgttatcaagcgctcgatattggcacatagcattcacgagcactgggctacagctgataccctagaccaactgcatgccaatatacggagagacacagctcatctttggcgacactatgacgaaccatctttcaagatcagcgtcgactgctatcggggcactcggtctcagaagcagaaagttgctctgatagagacattctcatatcttgatttcaagggccccatcaaaatgaaagcgccagaccacgaattcacactctttgaacagtggacactagagtctatgccccagaacctacctgcgcccatcaaagtccatttcggcaaactactcgggcatggggcgagggatataattaatacctatgatctaaagaaacgcggctacatctccacaacgtctatggactccgagctcgcgcttgtcaccgccaacctcgcgcttgcgggaccaggcaagatcttctacgacccgttcgccggcacaggtagctttcctgtcgcttgcgcccattttggggccgtcgcgtggggtagcgatatcgatggccgtagcatgcgaggcgatggcggaaaaaagagtctgaaaggcaactttgagcaatacgggcttgaaaatctccttggtggtttattcgtaagcgatttgaccaacacgccaatacgcaaagcgagacttcttgatggtattctgtgcgatcctccgtacggcgtaagggagggtctgaaggtccttggctatagtgacccagagaaaactgcccgaagcctaaagagggggaaagatgcatatctagatccggcgttcgtcccgccgaagaaagcatatagcttcatggctatgctagacgacatcctcaatttcgcaaccgatatgctcgtcgagaacggtcgtttgtctttctggatgcccaccgcaaatgccgaggatcaagtgatcgacactcctacgcatccatgccttgaacttgtagctgtttgcacacaggttttcaacaaatggtcgagacgactgatcacttatcggcgtattcccgactctgaggtcgacctgacagctcttgcggagcgactgaagcaagagaacaagactaatggacgttccgctgatgatctcaacccattccgccgccaatatttcagaggcttcaagtcagataaggaggcaggagatggcgtagtaccggagttgggcaatctgcagacgtga

SEQ ID NO: 12224 - protein, 457 aa, Muscodor strobelii
  misc_feature: SGI Peptide ID NO. 563960
  misc_feature (180)..(344): Pfam Id: PF01170 Pfam Desc: RNA methylase family UPF0020
  misc_feature (180)..(314): Pfam Id: PF01170 Pfam Desc: RNA methylase family UPF0020
  misc_feature (1)..(442): NCBI GI: 46140235 Blast Desc: FG11632.1 [Gibberella zeae PH-1]
  misc_feature (1)..(442): NCBI GI: 261352880 Blast Desc: tRNA guanosine-2'-O-methyltransferase TRM11 [Verticillium albo-atrum VaMs.102]
  misc_feature (1)..(440): NCBI GI: 85085331 Blast Desc: NCU04407 [Neurospora crassa OR74A] gi|28918576|gb|EAA28248.1| conserved [Neurospora crassa OR74A] gi|40882214|emb|CAF06039.1| conserved [Neurospora crassa]
  misc_feature (1)..(440): NCBI GI: 156053157 Blast Desc: SS1G_06746 [Sclerotinia sclerotiorum 1980] gi|154704524|gb|EDO04263.1| SS1G_06746 [Sclerotinia sclerotiorum 1980]
  misc_feature (1)..(440): NCBI GI: 154318253 Blast Desc: BC1G_03294 [Botryotinia fuckeliana B05.10] gi|150842817|gb|EDN18010.1| BC1G_03294 [Botryotinia fuckeliana B05.10]
  misc_feature (1)..(446): NCBI GI: 116195728 Blast Desc: CHGG_04462 [Chaetomium globosum CBS 148.51] gi|88180375|gb|EAQ87843.1| CHGG_04462 [Chaetomium globosum CBS 148.51]
  misc_feature (1)..(450): NCBI GI: 226285244 Blast Desc: tRNA guanosine-2'-O-methyltransferase TRM11 [Paracoccidioides brasiliensis Pb01]
  misc_feature (1)..(435): NCBI GI: 119500128 Blast Desc: RNA methylase family protein [Neosartorya fischeri NRRL 181] gi|119414986|gb|EAW24924.1| RNA methylase family protein [Neosartorya fischeri NRRL 181]
  misc_feature (1)..(443): NCBI GI: 145605800 Blast Desc: MGG_06857 [Magnaporthe grisea 70-15] gi|145013585|gb|EDJ98226.1| MGG_06857 [Magnaporthe grisea 70-15]
  misc_feature (1)..(441): NCBI GI: 225682741 Blast Desc: RNA methylase family protein [Paracoccidioides brasiliensis Pb03]
MQYLIRFTQWHESFRLAEIQALAVLAGVDLKIVSYEDESPFCIVELPSDEAARAVIKRSILAHSIHEHWATADTLDQLHANIRRDTAHLWRHYDEPSFKISVDCYRGTRSQKQKVALIETFSYLDFKGPIKMKAPDHEFTLFEQWTLESMPQNLPAPIKVHFGKLLGHGARDIINTYDLKKRGYISTTSMDSELALVTANLALAGPGKIFYDPFAGTGSFPVACAHFGAVAWGSDIDGRSMRGDGGKKSLKGNFEQYGLENLLGGLFVSDLTNTPIRKARLLDGILCDPPYGVREGLKVLGYSDPEKTARSLKRGKDAYLDPAFVPPKKAYSFMAMLDDILNFATDMLVENGRLSFWMPTANAEDQVIDTPTHPCLELVAVCTQVFNKWSRRLITYRRIPDSEVDLTALAERLKQENKTNGRSADDLNPFRRQYFRGFKSDKEAGDGVVPELGNLQT

SEQ ID NO: 12225 - DNA, 2542 bp, Muscodor strobelii
  misc_feature: SGI EST ID NO. CUFF.29129.1
  misc_feature: Variant of the nucleotide sequence at SEQ ID NO 12223
ccaagtcaaaacaggccagtgcgctagtgctagtgcgcaaatggaattaatccagaacttctttgattgacacacccctccccatcactaggccgctgcctgcgcaaacccgttccacacgtacaaaaggcttgaaaatgactgcgattcgggaatcttagagcagtctcgcgccctggaaagaatttgcatgttgaacggcagtattctcttgtaacaacttgaagatctccactattctaattctcgacgcaacatgcagtatctcatacgatttacgcagtggcatgagagttttcgcttagccgaaatacaagctcttgccgtgttagcgggggtggatttgaagatcgtatcttacgaagacgaatctccgttctgtatagttgagcttccttctgacgaagctgcacgtgctgttatcaagcgctcgatattggcacatagcattcacgagcactgggctacagctgataccctagaccaactgcatgccaatatacggagagacacagctcatctttggcgacactatgacgaaccatctttcaagatcagcgtcgactgctatcggggcactcggtctcagaagcagaaagttgctctgatagagacattctcatatcttgatttcaagggccccatcaaaatgaaagcgccagaccacgaattcacactctttgaacagtggacactagagtctatgccccagaacctacctgcgcccatcaaagtccatttcggcaaactactcgggcatggggcgagggatataattaatacctatgatctaaagaaacgcggctacatctccacaacgtctatggactccgagctcgcgcttgtcaccgccaacctcgcgcttgcgggaccaggcaagatcttctacgacccgttcgccggcacaggtagctttcctgtcgcttgcgcccattttggggccgtcgcgtggggtagcgatatcgatggccgtagcatgcgaggcgatggcggaaaaaagagtctgaaaggcaactttgagcaatacgggcttgaaaatctccttggtggtttattcgtaagcgatttgaccaacacgccaatacgcaaagcgagacttcttgatggtattctgtgcgatcctccgtacggcgtaagggagggtctgaaggtccttggctatagtgacccagagaaaactgcccgaagcctaaagagggggaaagatgcatatctagatccggcgttcgtcccgccgaagaaagcatatagcttcatggctatgctagacgacatcctcaatttcgcaaccgatatgctcgtcgagaacggtcgtttgtctttctggatgcccaccgcaaatgccgaggatcaagtgatcgacactcctacgcatccatgccttgaacttgtagctgtttgcacacaggttttcaacaaatggtcgagacgactgatcacttatcggcgtattcccgactctgaggtcgacctgacagctcttgcggagcgactgaagcaagagaacaagactaatggacgttccgctgatgatctcaacccattccgccgccaatatttcagaggcttcaagtcagataaggaggcaggagatggcgtagtaccggagttgggcaatctgcagacgtgaagtaagagaggcttaagtaggccattttactgtatatctcaagggggccatggaaattagttggcccgtctcgttttattgagcgagcgtgtacgcatcatggtctatcgccattgcgatgcatcgaacccatgctgcctcgtggctcagatgtctcctgcgttagagatggaacttgccaatatgctgtggcctctttccgaccaggccctttatggtgaacgcgaacttccatttgaaatatgtttcttggaagctgttacccatctctcgggatcggagagattgtgccaggcgtgcgaagcgatcgattgggatacggaggttccgaaagcgcgacgtcaagttgccgtaaccgtcagccgtgaaaaactactaccaagcataagcttcgacatcgccgttttgccgttatacgtagatcgcaaatgagagctgatagactttcgagatggttctctttccgctgccagctcgtaggcagctcgagtaattgataaatgctcagattgagctggcaatcagcatcgattgcagcttccattcaaagttgcgaccatatcgtctacatttccgctgcggtattactaatcaatctgatgtgaactctactcaatacactactggagtcgagacgataggtaaggtcacggcatttgcggcgttttgaggttagccaccattggtacatcagcccttggacgttagctcaggttccaaggcttgtgtatgagccaacatctagggaaatgtcttcaagttatccaaatccaatacaaattctaatgctcgattgcttcagtcttggtttcctgcagtttttcaaaactgttgattagtaaaatcaaccgcaatagttgctgtccggggatttcctggtctgcacaacacctgaatgcgacactgcaaagc

SEQ ID NO: 12226 - DNA, 1608 bp, Muscodor strobelii
  misc_feature: SGI cDNA ID NO. 563961
  misc_feature: Encodes the peptide sequence at SEQ ID NO 12227
atgccactgacgactatatccttgatcacgaaggcggtcatctttgtgggagctctccttgtaactggtattgccgttgaggcaacgtcattctctgtgaacacatccagtggtcagattatcggacatgctgcgcctaacagatcagaagtgatagagtttttgggtattcgttacgcgaaagctcctattggcgagctgcgctttgctccgcctgagcgataccttgctgccgagggaactgtttacgaggcgtcggattgggctcctgactgtctatcaaataagcccgctgttagcagctttcccaacttctctgatccctcgggttttcgagtatggaacaatttcgcggcacagacgggaaatccgtcaagtgaagactgtctcatgctgaatatatggactaagagtcttgatacaagtgctctcaagccagttctcgtatggatacatgggggccgtttcacaatacccgggcctcatagccatttctataacggccaatatctctctgcatcgcaagatgttgtcgtcgtgacgctgaactatcgtcttggaatctttggcttctcaggagccccaaatctacaacaaaatgttgcacttcgcgatcatcgatcggtaattgaatggactagagacaatattttagaatttggtggtgacccttctctgatcaccatattcggtcagagtgctggcggtgcctctgttgattactattcatttgcctggaaagatgatcctatagtggccggaataatttctcaatcaggaacctctctaagcttcaacccgaacacgccagagtacgcagagaagattttcttcaacgtgtcgcaatcaatcggctgcggtggtcttgacgacgactacaatctagtggtcaactgtgtacgacaagcgaacgcttcagatgtactggcggcagctgctaaagcccctccgttgcctaccatggtccttaatcaggcaactttccatcccactatagacaacgaattagtcttcacggattatcaggccttggcaagcaatggttcattctctgcagtaccatatcttctgggaaacaatgatttcgaagctggatggtacaagctgtcagcatgggcagccaagataaacttgacggaatctgagtgggatttgttcaaccagcgtgcatttacctgcccgacgggactttccgccaaatatcgggttgattctagcgtacctacctggaggtacagataccacggccagttcaaaaatctgcgtctatacaatgggaccgccggtcttgggcctcaaggtagcggtgcctaccatggctcggacatagagatgatattcggcacgagtcaggatgtttcaggcgtaccaagtacagagaaggaagatgtcatatcgcaatatatgatgggcgcatggtccgcgtttgcaagagatccagtgaacggcttgacagcttatggttggccaccatatgacgaagtccgagaaacactggttgagcttcccatacgcaccaagccaaatcctgtcttcgtcaatcccaaagtatacgaccgtgattgtcctatcgtcaacaacccatctcccggtcaaggtgcattctga

SEQ ID NO: 12227 - protein, 535 aa, Muscodor strobelii
  misc_feature: SGI Peptide ID NO. 563961
  misc_feature (8)..(513): Pfam Id: PF00135 Pfam Desc: Carboxylesterase
  misc_feature (8)..(366): Pfam Id: PF00135 Pfam Desc: Carboxylesterase
  misc_feature (384)..(478): Pfam Id: PF00135 Pfam Desc: Carboxylesterase
  misc_feature (16)..(535): NCBI GI: 189205463 Blast Desc: cholinesterase precursor [Pyrenophora tritici-repentis Pt-1C-BFP] gi|187975159|gb|EDU41785.1| cholinesterase precursor [Pyrenophora tritici-repentis Pt-1C-BFP]
  misc_feature (26)..(533): NCBI GI: 238486482 Blast Desc: lipase/esterase, [Aspergillus flavus NRRL3357] gi|220699358|gb|EED55697.1| lipase/esterase, [Aspergillus flavus NRRL3357]
  misc_feature (6)..(535): NCBI GI: 238839300 Blast Desc: carboxylesterase [Microsporum canis CBS 113480]
  misc_feature (19)..(525): NCBI GI: 225684981 Blast Desc: cholinesterase [Paracoccidioides brasiliensis Pb03]
  misc_feature (32)..(535): NCBI GI: 121706328 Blast Desc: carboxylesterase [Aspergillus clavatus NRRL 1] gi|119399573|gb|EAW10001.1| carboxylesterase [Aspergillus clavatus NRRL 1]
  misc_feature (9)..(525): NCBI GI: 240106614 Blast Desc: cholinesterase, [Coccidioides posadasii C735 delta SOWgp]
  misc_feature (101)..(535): NCBI GI: 115388557 Blast Desc: [Aspergillus terreus NIH2624] gi|114195868|gb|EAU37568.1| [Aspergillus terreus NIH2624]
  misc_feature (3)..(500): NCBI GI: 226294291 Blast Desc: carboxylesterase [Paracoccidioides brasiliensis Pb18]
  misc_feature (11)..(527): NCBI GI: 226279398 Blast Desc: cholinesterase [Paracoccidioides brasiliensis Pb01]
  misc_feature (31)..(527): NCBI GI: 225685167 Blast Desc: cholinesterase [Paracoccidioides brasiliensis Pb03]
  misc_feature (25)..(478): SWISSPROT Homolog: EC 3.1.1.7 Acetylcholinesterase
MPLTTISLITKAVIFVGALLVTGIAVEATSFSVNTSSGQIIGHAAPNRSEVIEFLGIRYAKAPIGELRFAPPERYLAAEGTVYEASDWAPDCLSNKPAVSSFPNFSDPSGFRVWNNFAAQTGNPSSEDCLMLNIWTKSLDTSALKPVLVWIHGGRFTIPGPHSHFYNGQYLSASQDVVVVTLNYRLGIFGFSGAPNLQQNVALRDHRSVIEWTRDNILEFGGDPSLITIFGQSAGGASVDYYSFAWKDDPIVAGIISQSGTSLSFNPNTPEYAEKIFFNVSQSIGCGGLDDDYNLVVNCVRQANASDVLAAAAKAPPLPTMVLNQATFHPTIDNELVFTDYQALASNGSFSAVPYLLGNNDFEAGWYKLSAWAAKINLTESEWDLFNQRAFTCPTGLSAKYRVDSSVPTWRYRYHGQFKNLRLYNGTAGLGPQGSGAYHGSDIEMIFGTSQDVSGVPSTEKEDVISQYMMGAWSAFARDPVNGLTAYGWPPYDEVRETLVELPIRTKPNPVFVNPKVYDRDCPIVNNPSPGQGAF

SEQ ID NO: 12228 - DNA, 945 bp, Muscodor strobelii
  misc_feature: SGI cDNA ID NO. 563962
  misc_feature: Encodes the peptide sequence at SEQ ID NO 12229
atgtcgcgaggttttgtccggttcaaggactactttcgcggttctgagaaccttgattgggatgctaaactcaagaggcatgaggaattcgtcgccaagtctcgtcaacaaagggagtacgaagacgaagaatatggagacaatgaagacgaggacacggaatccgacgaacgaaatgcgcgccgagaattggacgagctacagggctactggttcattcagtgtgacaatgcctcacagtcatgcggtcatgatgacttcaggctcatcatcggtctacagggagagtgggaaaaggcggctggaaaattcgactttggttgtttagagggcatcatgcacttttcctatcgcctctcgaagctgccgcacagaacggtgggcccggacagctcagatgaagacagtgaccgcgacgaaacggttcaaggagatatcaacgctctcaaatgtcagatcgcgaccttgcaagaccgcttaatctcgactgaaacggcgctaggagctctacttgatagtatctcgaacgcgaataacctcaacgatctcaagagttcaatccaaggtgatgatttgctaaatcagcgccaccttccgaacgttgcagagctatctttaaggcaaaagcattcgacaaatgacgagaagccgaagatgaaacaagatgtcaaacctcgacggattttcttcctctggcgcgatcgcgagaccggagaaggcgaaacacagcgcggctgcgacagggagcgtcggggctatgtcgaattcgagaacgaagagttctatgtcattcatggtgtgctcaaaggctcattcttgggaaaggacgtcgcattcagcgggtacaagatctcagacaaaccaccacctcctggaaccatcccgctctgggaccgctttggcgaagcaagatacgagacacaacgagcggcgcgatggaaatag

SEQ ID NO: 12229 - protein, 314 aa, Muscodor strobelii
  misc_feature: SGI Peptide ID NO. 563962
  misc_feature (223)..(314): NCBI GI: 226287081 Blast Desc: conserved [Paracoccidioides brasiliensis Pb18]
  misc_feature (223)..(313): NCBI GI: 239612133 Blast Desc: conserved [Ajellomyces dermatitidis ER-3]
  misc_feature (223)..(313): NCBI GI: 261202222 Blast Desc: conserved [Ajellomyces dermatitidis SLH14081] gi|239590422|gb|EEQ73003.1| conserved [Ajellomyces dermatitidis SLH14081]
  misc_feature (223)..(313): NCBI GI: 240277773 Blast Desc: conserved [Ajellomyces capsulatus H143]
MSRGFVRFKDYFRGSENLDWDAKLKRHEEFVAKSRQQREYEDEEYGDNEDEDTESDERNARRELDELQGYWFIQCDNASQSCGHDDFRLIIGLQGEWEKAAGKFDFGCLEGIMHFSYRLSKLPHRTVGPDSSDEDSDRDETVQGDINALKCQIATLQDRLISTETALGALLDSISNANNLNDLKSSIQGDDLLNQRHLPNVAELSLRQKHSTNDEKPKMKQDVKPRRIFFLWRDRETGEGETQRGCDRERRGYVEFENEEFYVIHGVLKGSFLGKDVAFSGYKISDKPPPPGTIPLWDRFGEARYETQRAARWK

SEQ ID NO: 12230 - DNA, 495 bp, Muscodor strobelii
  misc_feature: SGI EST ID NO. CUFF.29002.0
  misc_feature: Variant of the nucleotide sequence at SEQ ID NO 12228
gttcaaggagatatcaacgctctcaaatgtcagatcgcgaccttgcaagaccgcttaatctcgactgaaacggcgctaggagctctacttgatagtatctcgaacgcgaataacctcaacgatctcaagagttcaatccaaggtgatgatttgctaaatcagcgccaccttccgaacgttgcagagctatctttaaggcaaaagcattcgacaaatgacgagaagccgaagatgaaacaagatgtcaaacctcgacggattttcttcctctggcgcgatcgcgagaccggagaaggcgaaacacagcgcggctgcgacagggagcgtcggggctatgtcgaattcgagaacgaagagttctatgtcattcatggtgtgctcaaaggctcattcttgggaaaggacgtcgcattcagcgggtacaagatctcagacaaaccaccacctcctggaaccatcccgctctgggaccgctttggcgaagcaagatacgag

SEQ ID NO: 12231 - DNA, 1248 bp, Muscodor strobelii
  misc_feature: SGI cDNA ID NO. 563963
  misc_feature: Reduced expression when VOC is produced
  misc_feature: Encodes the peptide sequence at SEQ ID NO 12232
atggcagcaaacgcccagccaaattccgtcgccgtgcaagaccaacccgcgctcatcgacatccggcccttactacagcgtctgtggcccgacccggccaagcagaatgtcacggccgacgagatctcagaggctctatcgtacatcttcgtcaacaagctgagccccgtccagacgggctcgctgctcacagccctacacttcaccggctgggaccgccgcgccgatgtcctcgctggcacctcggccgccatgcgccaccacgccgcccagatcgactttgctgccctagagagcgccatctccaagcggaagagacccgagggacgatacaacggcggcctcgtcgacatcgtcgggacgggcggcgactcgcaccacaccttcaacatcagcaccacgtcctccatcctcgcctcgtcgctgctcctcctcgccaagcacggcaaccgcgcctcgacgtccaagtccgggtccgccgacctgctcatgtcgatgcagccccagcccgcccagctcgcgcgcatcacccccgacaccatcgccaccgtctacggccgcacctcgtacgccttcctcttcgcccccatcttccacccgggcatgaagtacgtcgcccccatccgcaaggagcttggctggcgcaccatcttcaacctgctcggccccctgtccaacccgcttagtagggtcatcgaggcccgcatgctcggcgtggcccgcgacgacctgggtcccgtgttcgcagaggctttgagactgggtggcgcaaggaagggactggtggtctgtggtaaggagcagttggacgagatctcctgcgccggcggcaccctctgctggcaacttgtagacaagaatggtgtcgtggaggtagagcatttcgagctcgaacccgaaaacttcggtctcagcgctcaccctctgagcaccgtgtcaccaggcaaggaaccccacgagaacgctgagattctgcgcaagatcttgcaaggcgagctacctgacaacgaccccatccttgaattcatcctcatgaacaccgccgccctcttcgtcgtctcggggatttgtgacgccgagacgagtagcatggggcctggcgacgacgggcaagtcattactgaacggggaccaggaggcggacgctggaaggaaggtgtcaggagagcaaggtggacgatcaagagtggcaaggcgtggaggcagtggagtgcttttgccgaggttacgaacgagctacctgcttga

SEQ ID NO: 12232 - protein, 415 aa, Muscodor strobelii
  misc_feature: SGI Peptide ID NO. 563963
  misc_feature (20)..(90): Pfam Id: PF02885 Pfam Desc: Glycosyl transferase family, helical bundle domain
  misc_feature (112)..(400): Pfam Id: PF00591 Pfam Desc: Glycosyl transferase family, a/b domain
  misc_feature (191)..(358): Pfam Id: PF00591 Pfam Desc: Glycosyl transferase family, a/b domain
  misc_feature (112)..(163): Pfam Id: PF00591 Pfam Desc: Glycosyl transferase family, a/b domain
  misc_feature (1)..(413): NCBI GI: 154318283 Blast Desc: BC1G_03309 [Botryotinia fuckeliana B05.10] gi|150842832|gb|EDN18025.1| BC1G_03309 [Botryotinia fuckeliana B05.10]
  misc_feature (12)..(415): NCBI GI: 116195736 Blast Desc: CHGG_04466 [Chaetomium globosum CBS 148.51] gi|88180379|gb|EAQ87847.1| CHGG_04466 [Chaetomium globosum CBS 148.51]
  misc_feature (19)..(415): NCBI GI: 46107430 Blast Desc: FG00598.1 [Gibberella zeae PH-1]
  misc_feature (19)..(414): NCBI GI: 171690986 Blast Desc: protein product [Podospora anserina] gi|170945441|emb|CAP71553.1| protein product [Podospora anserina]
  misc_feature (10)..(415): NCBI GI: 256735204 Blast Desc: [Nectria haematococca mpVI 77-13-4]
  misc_feature (14)..(413): NCBI GI: 189189716 Blast Desc: anthranilate phosphoribosyltransferase [Pyrenophora tritici-repentis Pt-1C-BFP] gi|187972803|gb|EDU40302.1| anthranilate phosphoribosyltransferase [Pyrenophora Pt-1C-BFP]
  misc_feature (19)..(415): NCBI GI: 85085349 Blast Desc: NCU04411 [Neurospora crassa OR74A] gi|28918580|gb|EAA28252.1| NCU04411 [Neurospora crassa OR74A] gi|40882210|emb|CAF06035.1| related to anthranilate [Neurospora
  misc_feature (19)..(413): NCBI GI: 39940144 Blast Desc: MGG_05168 [Magnaporthe grisea 70-15] gi|145010570|gb|EDJ95226.1| MGG_05168 [Magnaporthe grisea 70-15]
  misc_feature (9)..(413): NCBI GI: 169608011 Blast Desc: SNOG_07071 [Phaeosphaeria nodorum SN15] gi|160701537|gb|EAT85722.2| SNOG_07071 [Phaeosphaeria nodorum SN15]
  misc_feature (1)..(365): NCBI GI: 156053129 Blast Desc: SS1G_06732 [Sclerotinia sclerotiorum 1980] gi|154704510|gb|EDO04249.1| SS1G_06732 [Sclerotinia sclerotiorum 1980]
  misc_feature (45)..(412): SWISSPROT Homolog: EC 2.4.2.18 Anthranilate phosphoribosyltransferase
  misc_feature: Useful for introducing or modulating the production of volatile compounds
MAANAQPNSVAVQDQPALIDIRPLLQRLWPDPAKQNVTADEISEALSYIFVNKLSPVQTGSLLTALHFTGWDRRADVLAGTSAAMRHHAAQIDFAALESAISKRKRPEGRYNGGLVDIVGTGGDSHHTFNISTTSSILASSLLLLAKHGNRASTSKSGSADLLMSMQPQPAQLARITPDTIATVYGRTSYAFLFAPIFHPGMKYVAPIRKELGWRTIFNLLGPLSNPLSRVIEARMLGVARDDLGPVFAEALRLGGARKGLVVCGKEQLDEISCAGGTLCWQLVDKNGVVEVEHFELEPENFGLSAHPLSTVSPGKEPHENAEILRKILQGELPDNDPILEFILMNTAALFVVSGICDAETSSMGPGDDGQVITERGPGGGRWKEGVRRARWTIKSGKAWRQWSAFAEVTNELPA

SEQ ID NO: 12233 - DNA, 1777 bp, Muscodor strobelii
  misc_feature: SGI EST ID NO. CUFF.29017.0
  misc_feature: Variant of the nucleotide sequence at SEQ ID NO 12231
ctaccgcgcccttcacgagagaccttcccattgggttcaactcgccggtcgcaatcggtcgctcatttgaaattggatgagtaggatactacatagatagatttagaaggtgacttgtcattcttatcttttttgtataactctcctcctctgagagcgtcaggaagtcgactggaataggaatatcaacagcaacagctcctttgctctaacttatctctcacttttactcatccgaaacagtgacgacatcgcgtcgctgcgacaaacaatggcagcaaacgcccagccaaattccgtcgccgtgcaagaccaacccgcgctcatcgacatccggcccttactacagcgtctgtggcccgacccggccaagcagaatgtcacggccgacgagatctcagaggctctatcgtacatcttcgtcaacaagctgagccccgtccagacgggctcgctgctcacagccctacacttcaccggctgggaccgccgcgccgatgtcctcgctggcacctcggccgccatgcgccaccacgccgcccagatcgactttgctgccctagagagcgccatctccaagcggaagagacccgagggacgatacaacggcggcctcgtcgacatcgtcgggacgggcggcgactcgcaccacaccttcaacatcagcaccacgtcctccatcctcgcctcgtcgctgctcctcctcgccaagcacggcaaccgcgcctcgacgtccaagtccgggtccgccgacctgctcatgtcgatgcagccccagcccgcccagctcgcgcgcatcacccccgacaccatcgccaccgtctacggccgcacctcgtacgccttcctcttcgcccccatcttccacccgggcatgaagtacgtcgcccccatccgcaaggagcttggctggcgcaccatcttcaacctgctcggccccctgtccaacccgcttagtagggtcatcgaggcccgcatgctcggcgtggcccgcgacgacctgggtcccgtgttcgcagaggctttgagactgggtggcgcaaggaagggactggtggtctgtggtaaggagcagttggacgagatctcctgcgccggcggcaccctctgctggcaacttgtagacaagaatggtgtcgtggaggtagagcatttcgagctcgaacccgaaaacttcggtctcagcgctcaccctctgagcaccgtgtcaccaggcaaggaaccccacgagaacgctgagattctgcgcaagatcttgcaaggcgagctacctgacaacgaccccatccttgaattcatcctcatgaacaccgccgccctcttcgtcgtctcggggatttgtgacgccgagacgagtagcatggggcctggcgacgacgggcaagtcattactgaacggggaccaggaggcggacgctggaaggaaggtgtcaggagagcaaggtggacgatcaagagtggcaaggcgtggaggcagtggagtgcttttgccgaggttacgaacgagctacctgcttgatcaccgcggaggacatagatgaatgtaaacagaagcatagatactattatggaaggaaatctgataccagggcgtttaggatggaaaaatcgggttggatataaatcgaatgagcgaagaacaggagttggccaaatgcctgtgaatcgatttcagtggcaaaagcaccatgtcacatcttccaatggcacttcatgcatgtgcttggtactctacgtttctgcacttataaattcaggatactatatgaatcagtcg

SEQ ID NO: 12234 - DNA, 2418 bp, Muscodor strobelii
  misc_feature: SGI cDNA ID NO. 563964
  misc_feature: Reduced expression when VOC is produced
  misc_feature: Encodes the peptide sequence at SEQ ID NO 12235
atggagtccaccaaagcgccttacagcgaacaagaccctcaggttgtgctcgagctggtccagagcctcaacggttcgaataaagctgccaaacccaccaaagggttcagagccaagaagactactttcaaggtcgctggttctcctgacaatatttccgtcgactcatggcgtttccaagaatgggattacaagcgacgcgatctgcccatctatgcacgcggcctcttcacaactagaaaccgacataatgatcacgagattgccatcagaggctacgacaagttcttcaacaccggagaggtaaacgagacccggtgggagaacatcaaaagcaacaccagaggcccatatgagctcacactaaaagagaacggttgcatcatcttcattagtggtctcgaggatgagacactgctcgtgtgtagcaagcactctacgggtgcacgcagtgacgtcgaggtgagccacgctagtgcaggcgacagatgggtcgacaggcagttggcatcaatcggcaagactcgagaagaatttgctcgagagctcagaagcaagaatatcacagcagttgccgagctttgcgatgatgactttgaggagcatatcctggcttatggtgcagataaggctggactatacttacatggtatcaacctcaatctacccgacttcacgacatacccaagcagtcaagttcaagaatttgccgacaagtggggattccgcaaggttggactgacactcttcaacgatattgatgccgtcaagaccttcttggacaacattgcagagactggagcacacgaaggccgcgacgttgaaggcttcgttgttcgttgtcagagatcacccaaccccggcggcaaacttccatatggcgactggttcttcaaatacaagttcgaagagccataccttctgtaccgccagtggcgcgagtgcaccaaggctctcattggtggaagggttcccaaatacaagaagcatgtcaagattaccgaagagtatctgtattacgcacgcaagaccttggctagcaacccgggactcgccaaggcttacaatcagaaccatggcattatcaagctacgagacgatttccttgccttcaagaacatgaagggatcagatgccgccaattgggaggtcgagttcggtgaagacacctcggccgtcacaaacgacattgttcttgttcccatttccacgcttggctgtggcaagacgactgtcggcgtggcactcacccatctttttggctggggaattgttcaaaacgacaacatccaaggcaaaggccggccagctcggatggttgctttagtgatgcaagagttgatgaaatacccagtggtcatttccgatcgcaacaactcggagcgtcgagagcgggaccaaattatcaaggatatcctcgctcagcataagtcagcacgtctcgtggctcttaactttgcgcatggagacatagacgaagtcagaagggtgacaagagagcgggtcatcaaacgtggcgacaatcaccagacaatccaggctgcaaccgacgagaacaaggtcatcggcatcatggagaatttcatacatcgatttcagccttgcgatcccgaaaatagccccgacaactcgtttgacctcatcatcgacttggaccccgccaaagaaagtcgagttaatgtagagacagtgatccgtgagctcaagcagaagtatcccgctctcatccccgaaatgccctgcgccgaagacatggacgctgctgtcaagggtgcgatcgaagactacaagcctgatatccgccatacaatccccgaccgtgcggataagaggaatcagaacaagtcgcagaaacagaaccaacacgttgtacctgctgccgcatcggctgcacctgccaagaagaaaccattggaatacatgtctgtctccgtgcctgccagggatgtacgaagcgcactggactccgtcttcaacaagaccgatgcgcagacccagcagttctacagactcttggaccagacgcgtcgtattcaaccacatttccacgtcacccttatgcacagattcactgcaaaacagcatccggaactatgggcccggtacacagctctcgaggctgctaacaccaataatgttgatgacagactgggagagtgcgaggtggtgttggacagcgttgtgtgggatgatcgcattatggcaatcgccgtgagcctcgtcgatcccgaaggcaagtggacttgcgtcaacaaggttcctcatattaccattggcacccgcgatgacagaatcaagccaaaggaaagcaatgatctactggcaggacgagaccaaggggcaacgggaattttggaaagggtgttcgagaccaaacccacgctgaaggggaccgtccgagccgtgctgtccagataa

SEQ ID NO: 12235 - protein, 805 aa, Muscodor strobelii
  misc_feature: SGI Peptide ID NO. 563964
  misc_feature (557)..(805): Pfam Id: PF08302 Pfam Desc: Fungal tRNA ligase phosphodiesterase domain
  misc_feature (398)..(554): Pfam Id: PF08303 Pfam Desc: tRNA ligase kinase domain
  misc_feature (12)..(395): Pfam Id: PF08304 Pfam Desc: Fungal tRNA ligase adenylyltransferase
  misc_feature (557)..(774): Pfam Id: PF08302 Pfam Desc: Fungal tRNA ligase phosphodiesterase domain
  misc_feature (5)..(805): NCBI GI: 171690984 Blast Desc: protein product [Podospora anserina] gi|170945440|emb|CAP71552.1| protein product [Podospora anserina]
  misc_feature (5)..(805): NCBI GI: 116195734 Blast Desc: CHGG_04465 [Chaetomium globosum CBS 148.51] gi|88180378|gb|EAQ87846.1| CHGG_04465 [Chaetomium globosum CBS 148.51]
  misc_feature (6)..(805): NCBI GI: 46140159 Blast Desc: FG11594.1 [Gibberella zeae PH-1]
  misc_feature (5)..(805): NCBI GI: 85085345 Blast Desc: NCU04410 [Neurospora crassa OR74A] gi|28918579|gb|EAA28251.1| NCU04410 [Neurospora crassa OR74A]
  misc_feature (5)..(805): NCBI GI: 40882211 Blast Desc: related to tRNA ligase [Neurospora crassa]
  misc_feature (2)..(805): NCBI GI: 154318259 Blast Desc: BC1G_03297 [Botryotinia fuckeliana B05.10] gi|150842820|gb|EDN18013.1| BC1G_03297 [Botryotinia fuckeliana B05.10]
  misc_feature (6)..(805): NCBI GI: 156053151 Blast Desc: SS1G_06743 [Sclerotinia sclerotiorum 1980] gi|154704521|gb|EDO04260.1| SS1G_06743 [Sclerotinia sclerotiorum 1980]
  misc_feature (1)..(805): NCBI GI: 145602135 Blast Desc: MGG_05169 [Magnaporthe grisea 70-15] gi|145010569|gb|EDJ95225.1| MGG_05169 [Magnaporthe grisea 70-15]
  misc_feature (10)..(805): NCBI GI: 238489809 Blast Desc: tRNA ligase [Aspergillus flavus NRRL3357] gi|220698530|gb|EED54870.1| tRNA ligase [Aspergillus flavus NRRL3357]
  misc_feature (6)..(805): NCBI GI: 169623732 Blast Desc: SNOG_15109 [Phaeosphaeria nodorum SN15] gi|111056532|gb|EAT77652.1| SNOG_15109 [Phaeosphaeria nodorum SN15]
  misc_feature (19)..(773): SWISSPROT Homolog: EC 6.5.1.3 RNA ligase (ATP)
  misc_feature: Useful for introducing or modulating the production of volatile compounds
MESTKAPYSEQDPQVVLELVQSLNGSNKAAKPTKGFRAKKTTFKVAGSPDNISVDSWRFQEWDYKRRDLPIYARGLFTTRNRHNDHEIAIRGYDKFFNTGEVNETRWENIKSNTRGPYELTLKENGCIIFISGLEDETLLVCSKHSTGARSDVEVSHASAGDRWVDRQLASIGKTREEFARELRSKNITAVAELCDDDFEEHILAYGADKAGLYLHGINLNLPDFTTYPSSQVQEFADKWGFRKVGLTLFNDIDAVKTFLDNIAETGAHEGRDVEGFVVRCQRSPNPGGKLPYGDWFFKYKFEEPYLLYRQWRECTKALIGGRVPKYKKHVKITEEYLYYARKTLASNPGLAKAYNQNHGIIKLRDDFLAFKNMKGSDAANWEVEFGEDTSAVTNDIVLVPISTLGCGKTTVGVALTHLFGWGIVQNDNIQGKGRPARMVALVMQELMKYPVVISDRNNSERRERDQIIKDILAQHKSARLVALNFAHGDIDEVRRVTRERVIKRGDNHQTIQAATDENKVIGIMENFIHRFQPCDPENSPDNSFDLIIDLDPAKESRVNVETVIRELKQKYPALIPEMPCAEDMDAAVKGAIEDYKPDIRHTIPDRADKRNQNKSQKQNQHVVPAAASAAPAKKKPLEYMSVSVPARDVRSALDSVFNKTDAQTQQFYRLLDQTRRIQPHFHVTLMHRFTAKQHPELWARYTALEAANTNNVDDRLGECEVVLDSVVWDDRIMAIAVSLVDPEGKWTCVNKVPHITIGTRDDRIKPKESNDLLAGRDQGATGILERVFETKPTLKGTVRAVLSR

SEQ ID NO: 12236 - DNA, 3191 bp, Muscodor strobelii
  misc_feature: SGI EST ID NO. CUFF.30356.0
  misc_feature: Variant of the nucleotide sequence at SEQ ID NO 12234
attactcctttgttaattcaattgattattcggaagaccatacgctttattagttgggggattaagacgggacggcggaaagggtgccacttattctcaattgaatgtgtaggtaggtagcgactcccgcctaggtattgccccaccatcgtagctgccatcaagcacgcagatgagtttgccagagtttgcaagagaagaactatgagagtttctgaattagtctcaataagtgcccgtgtgtcaggctacctacgtacagtctctcatgaaccgaagacacacgcctacggaatacgatgtcagtgtgccatcgcggggtgactcacgccgccagcggccaaagctccttgtcacctgagattccatcgtaggtccccattcctcattttcatggccacaacccattgtcacaccgcgctatgaaagcagatgagaacgacatatattctccatgccccttcgaccatcttcttcattccatcctacagttatactcctccgttgtgggcatctagttgtatgcgaggcacaggcacagacactgagacgctcgagggtgtctaactcactgactaaccgtcgtaaccacagtcagcaatcaacagtcaccaagatggagtccaccaaagcgccttacagcgaacaagaccctcaggttgtgctcgagctggtccagagcctcaacggttcgaataaagctgccaaacccaccaaagggttcagagccaagaagactactttcaaggtcgctggttctcctgacaatatttccgtcgactcatggcgtttccaagaatgggattacaagcgacgcgatctgcccatctatgcacgcggcctcttcacaactagaaaccgacataatgatcacgagattgccatcagaggctacgacaagttcttcaacaccggagaggtaaacgagacccggtgggagaacatcaaaagcaacaccagaggcccatatgagctcacactaaaagagaacggttgcatcatcttcattagtggtctcgaggatgagacactgctcgtgtgtagcaagcactctacgggtgcacgcagtgacgtcgaggtgagccacgctagtgcaggcgacagatgggtcgacaggcagttggcatcaatcggcaagactcgagaagaatttgctcgagagctcagaagcaagaatatcacagcagttgccgagctttgcgatgatgactttgaggagcatatcctggcttatggtgcagataaggctggactatacttacatggtatcaacctcaatctacccgacttcacgacatacccaagcagtcaagttcaagaatttgccgacaagtggggattccgcaaggttggactgacactcttcaacgatattgatgccgtcaagaccttcttggacaacattgcagagactggagcacacgaaggccgcgacgttgaaggcttcgttgttcgttgtcagagatcacccaaccccggcggcaaacttccatatggcgactggttcttcaaatacaagttcgaagagccataccttctgtaccgccagtggcgcgagtgcaccaaggctctcattggtggaagggttcccaaatacaagaagcatgtcaagattaccgaagagtatctgtattacgcacgcaagaccttggctagcaacccgggactcgccaaggcttacaatcagaaccatggcattatcaagctacgagacgatttccttgccttcaagaacatgaagggatcagatgccgccaattgggaggtcgagttcggtgaagacacctcggccgtcacaaacgacattgttcttgttcccatttccacgcttggctgtggcaagacgactgtcggcgtggcactcacccatctttttggctggggaattgttcaaaacgacaacatccaaggcaaaggccggccagctcggatggttgctttagtgatgcaagagttgatgaaatacccagtggtcatttccgatcgcaacaactcggagcgtcgagagcgggaccaaattatcaaggatatcctcgctcagcataagtcagcacgtctcgtggctcttaactttgcgcatggagacatagacgaagtcagaagggtgacaagagagcgggtcatcaaacgtggcgacaatcaccagacaatccaggctgcaaccgacgagaacaaggtcatcggcatcatggagaatttcatacatcgatttcagccttgcgatcccgaaaatagccccgacaactcgtttgacctcatcatcgacttggaccccgccaaagaaagtcgagttaatgtagagacagtgatccgtgagctcaagcagaagtatcccgctctcatccccgaaatgccctgcgccgaagacatggacgctgctgtcaagggtgcgatcgaagactacaagcctgatatccgccatacaatccccgaccgtgcggataagaggaatcagaacaagtcgcagaaacagaaccaacacgttgtacctgctgccgcatcggctgcacctgccaagaagaaaccattggaatacatgtctgtctccgtgcctgccagggatgtacgaagcgcactggactccgtcttcaacaagaccgatgcgcagacccagcagttctacagactcttggaccagacgcgtcgtattcaaccacatttccacgtcacccttatgcacagattcactgcaaaacagcatccggaactatgggcccggtacacagctctcgaggctgctaacaccaataatgttgatgacagactgggagagtgcgaggtggtgttggacagcgttgtgtgggatgatcgcattatggcaatcgccgtgagcctcgtcgatcccgaaggcaagtggacttgcgtcaacaaggttcctcatattaccattggcacccgcgatgacagaatcaagccaaaggaaagcaatgatctactggcaggacgagaccaaggggcaacgggaattttggaaagggtgttcgagaccaaacccacgctgaaggggaccgtccgagccgtgctgtccagataaggtggtggtggtggtggcctgacggcgtgtgctagactcgtcgatagcttagttagtcgtaatattgctctaatagcaagagagcaaaataagaacatcggtctgaacataagtcttgttgcatagatttgcgaatagccaggcgagtaatacttcg

SEQ ID NO: 12237 - DNA, 1041 bp, Muscodor strobelii
  misc_feature: SGI cDNA ID NO. 563965
  misc_feature: Reduced expression when VOC is produced
  misc_feature: Encodes the peptide sequence at SEQ ID NO 12238
atgccgccgaggcttcattgctcggcgcgcagcagcttgaggagagctctgcagacgtccgcgacctcgacaagacggccactcctcaacattcagaacaccacagccgctgctgcatcgaggcaatatgcaagcgcttcctctcccatacccatgggtggccttgccggcctcagcttgcccgacgactacatccccccgacgcagccgccgaccgccagacgacccgaccagcggaaagcacagatgatccgctcctacacggccatgcttcgctcgacgcccgtcatgctcttcttccagcacaacaacctcactgccgtcgaatgggccgctgtgcgcagagagttgcgtgcctcgttggcccaggtcgaggttcccgccgccggccccgatggcgctgcgcccgtcgacatctccaccgccatcgagttccaggtgttgcgcacccgcatgttcaatgtcgcctgcaagatcgtcgactacttcgaccccgaagccggcgagcacgagtccaacgcctacacccacgacctgtccaagacggcctaccaggccatctccgacgccgagcccgacgagaactcgatgcacgcccagctcgaccccatcctcatcggccccgtcgccgccatcaccttcccctccgtctcccctgcgcacctcgctgctgtgctcagagtccttgccccccaggcgccagcgtaccctgcaccgccgcgcaagaagaacccgggctactacgaccccatcgcccaggccggcttccagaagctgctgctcgtcggtggcaggatagagggcaaggccttcgaccaggccggcgtcagatgggtcggcggcatcagcggagggctcgacggactgcgcgctcagctcgtacatctgctgcagaacgccggtctgggtctcacgacggctctcgaaggccatagcaagggcctgtggctggcgctcgagagtagacggacgcagttggatgaggaggccaaccctaagaaggaggccggggttgagggagagggcgagaccaaggcttaa

SEQ ID NO: 12238 - protein, 346 aa, Muscodor strobelii
  misc_feature: SGI Peptide ID NO. 563965
  misc_feature (1)..(331): NCBI GI: 171690988 Blast Desc: protein product [Podospora anserina] gi|170945442|emb|CAP71554.1| protein product [Podospora anserina]
  misc_feature (1)..(331): NCBI GI: 39940146 Blast Desc: MGG_05167 [Magnaporthe grisea 70-15] gi|145010571|gb|EDJ95227.1| MGG_05167 [Magnaporthe grisea 70-15]
  misc_feature (45)..(332): NCBI GI: 85085353 Blast Desc: NCU04412 [Neurospora crassa OR74A] gi|28918581|gb|EAA28253.1| conserved [Neurospora crassa OR74A] gi|40882209|emb|CAF06034.1| related to ribosomal protein YmL11
  misc_feature (61)..(337): NCBI GI: 256722012 Blast Desc: [Nectria haematococca mpVI 77-13-4]
  misc_feature (13)..(337): NCBI GI: 46140163 Blast Desc: FG11596.1 [Gibberella zeae PH-1]
  misc_feature (1)..(335): NCBI GI: 258567840 Blast Desc: conserved [Uncinocarpus reesii 1704] gi|237906110|gb|EEP80511.1| conserved [Uncinocarpus reesii 1704]
  misc_feature (61)..(346): NCBI GI: 240276337 Blast Desc: conserved [Ajellomyces capsulatus H143]
  misc_feature (59)..(346): NCBI GI: 225559789 Blast Desc: conserved [Ajellomyces capsulatus G186AR]
  misc_feature (66)..(329): NCBI GI: 212542397 Blast Desc: conserved [Penicillium marneffei ATCC 18224] gi|210066260|gb|EEA20353.1| conserved [Penicillium marneffei ATCC 18224]
  misc_feature (68)..(346): NCBI GI: 261191823 Blast Desc: conserved [Ajellomyces dermatitidis SLH14081] gi|239589635|gb|EEQ72278.1| conserved [Ajellomyces dermatitidis SLH14081] gi|239608623|gb|EEQ85610.1| conserved [Ajellomyces
  misc_feature: Useful for introducing or modulating the production of volatile compounds
MPPRLHCSARSSLRRALQTSATSTRRPLLNIQNTTAAAASRQYASASSPIPMGGLAGLSLPDDYIPPTQPPTARRPDQRKAQMIRSYTAMLRSTPVMLFFQHNNLTAVEWAAVRRELRASLAQVEVPAAGPDGAAPVDISTAIEFQVLRTRMFNVACKIVDYFDPEAGEHESNAYTHDLSKTAYQAISDAEPDENSMHAQLDPILIGPVAAITFPSVSPAHLAAVLRVLAPQAPAYPAPPRKKNPGYYDPIAQAGFQKLLLVGGRIEGKAFDQAGVRWVGGISGGLDGLRAQLVHLLQNAGLGLTTALEGHSKGLWLALESRRTQLDEEANPKKEAGVEGEGETKA

SEQ ID NO: 12239 - DNA, 1595 bp, Muscodor strobelii
  misc_feature: SGI EST ID NO. CUFF.30359.0
  misc_feature: Variant of the nucleotide sequence at SEQ ID NO 12237
tctcatctaagtgactagcgaccatcacgaattcgcttttgcgtccgccgcgacaggattggtgccgacaattgaacaccggaggagctgctgtgaagaaataagagcgatttggggtcaagcaagacattaacatgccgccgaggcttcattgctcggcgcgcagcagcttgaggagagctctgcagacgtccgcgacctcgacaagacggccactcctcaacattcagaacaccacagccgctgctgcatcgaggcaatatgcaagcgcttcctctcccatacccatgggtggccttgccggcctcagcttgcccgacgactacatccccccgacgcagccgccgaccgccagacgacccgaccagcggaaagcacagatgatccgctcctacacggccatgcttcgctcgacgcccgtcatgctcttcttccagcacaacaacctcactgccgtcgaatgggccgctgtgcgcagagagttgcgtgcctcgttggcccaggtcgaggttcccgccgccggccccgatggcgctgcgcccgtcgacatctccaccgccatcgagttccaggtgttgcgcacccgcatgttcaatgtcgcctgcaagatcgtcgactacttcgaccccgaagccggcgagcacgagtccaacgcctacacccacgacctgtccaagacggcctaccaggccatctccgacgccgagcccgacgagaactcgatgcacgcccagctcgaccccatcctcatcggccccgtcgccgccatcaccttcccctccgtctcccctgcgcacctcgctgctgtgctcagagtccttgccccccaggcgccagcgtaccctgcaccgccgcgcaagaagaacccgggctactacgaccccatcgcccaggccggcttccagaagctgctgctcgtcggtggcaggatagagggcaaggccttcgaccaggccggcgtcagatgggtcggcggcatcagcggagggctcgacggactgcgcgctcagctcgtacatctgctgcagaacgccggtctgggtctcacgacggctctcgaaggccatagcaagggcctgtggctggcgctcgagagtagacggacgcagttggatgaggaggccaaccctaagaaggaggccggggttgagggagagggcgagaccaaggcttaattcaggcctttgtgctactagatatgtgtatatcctacgacgactacaactactactaccacccatgtgcaatagcgctgtacaacagagaagaacgaaaccatatatatctgcgaatgtatagaatggacggacgtatatgacatagacttgacgtcctaaggtcgcatcagcccagcatagtgtcttttggtgtcctctgcctcgagcgatgtgcgtcgtgtggtgatgaaagtgacggtattggccttgtggtctcgaagccgtttggtaaccgcgttcatgtctgcggcgctaggcacctcgaggttgaaggcgcggtctttatgcgtgagcaattaatctacgaatagtataagccatggccggtgaagctctgagtggtatgtcgtgagacggatgaggcatgctgtgctgcta

SEQ ID NO: 12240 - DNA, 609 bp, Muscodor strobelii
  misc_feature: SGI cDNA ID NO. 563966
  misc_feature: Encodes the peptide sequence at SEQ ID NO 12241
atggacttcgcgccctaccagtcctccccacccgagaacaatcgacccttctccccgccaatctcgccccgcgcctcccaagacggcagacgaccattctcccctccccagcgaacctcgttctcatctccacctccattgcaacatccacagccacagcgttcatggcgcgctgactcagtcgccgaggagggcttcagtaatggctatggtcaaggaagtggtggcggttatgcacagggaagtggaggtttggccatcggtggaagagaggagttcgacacgagtctggggttgagattagactacgaagctgtgttggcgtatgttgcgctgccgccgctaggtgccatcattcttttgatcttggagagggggagtgactacgttcgattccacgcctggcaatcaagtctggtcttcaccgtcatattcatcctgcacctcatattctcgtggtctacgttccttagctgggtcatagcgctcggtgatattgctctgatcgcgtttcttgcgttgagagcctaccgggatgctgatacccttgatcgattcgaggttccggtctttggacagattgctagtcggatcctcgatgatgaataa

SEQ ID NO: 12241 - protein, 202 aa, Muscodor strobelii
  misc_feature: SGI Peptide ID NO. 563966
  misc_feature (107)..(200): Pfam Id: PF03675 Pfam Desc: Uncharacterised protein family (UPF0132)
  misc_feature (1)..(202): NCBI GI: 46140161 Blast Desc: FG11595.1 [Gibberella zeae PH-1]
  misc_feature (1)..(202): NCBI GI: 256722011 Blast Desc: [Nectria haematococca mpVI 77-13-4]
  misc_feature (1)..(202): NCBI GI: 164429439 Blast Desc: NCU04413 [Neurospora crassa OR74A] gi|40882207|emb|CAF06033.1| conserved [Neurospora crassa] gi|157073479|gb|EAA28254.2| [Neurospora crassa OR74A]
  misc_feature (1)..(202): NCBI GI: 261352875 Blast Desc: conserved [Verticillium albo-atrum VaMs.102]
  misc_feature (1)..(202): NCBI GI: 116195740 Blast Desc: CHGG_04468 [Chaetomium globosum CBS 148.51] gi|88180381|gb|EAQ87849.1| CHGG_04468 [Chaetomium globosum CBS 148.51]
  misc_feature (1)..(202): NCBI GI: 171690990 Blast Desc: protein product [Podospora anserina] gi|170945443|emb|CAP71555.1| protein product [Podospora anserina]
  misc_feature (1)..(185): NCBI GI: 145602137 Blast Desc: MGG_05166 [Magnaporthe grisea 70-15] gi|145010572|gb|EDJ95228.1| MGG_05166 [Magnaporthe grisea 70-15]
  misc_feature (1)..(202): NCBI GI: 261194242 Blast Desc: UPF0132 domain-containing protein [Ajellomyces dermatitidis SLH14081] gi|239588540|gb|EEQ71183.1| UPF0132 domain-containing protein [Ajellomyces dermatitidis SLH14081]
  misc_feature (1)..(202): NCBI GI: 159127606 Blast Desc: UPF0132 domain protein [Aspergillus fumigatus A1163]
  misc_feature (1)..(202): NCBI GI: 226284135 Blast Desc: conserved [Paracoccidioides brasiliensis Pb01]
MDFAPYQSSPPENNRPFSPPISPRASQDGRRPFSPPQRTSFSSPPPLQHPQPQRSWRADSVAEEGFSNGYGQGSGGGYAQGSGGLAIGGREEFDTSLGLRLDYEAVLAYVALPPLGAIILLILERGSDYVRFHAWQSSLVFTVIFILHLIFSWSTFLSWVIALGDIALIAFLALRAYRDADTLDRFEVPVFGQIASRILDDE

SEQ ID NO: 12242 - DNA, 2097 bp, Muscodor strobelii
  misc_feature: SGI EST ID NO. CUFF.30493.1
  misc_feature: Variant of the nucleotide sequence at SEQ ID NO 12240
gcttcctcgacaattaatctccagctcatgacgccagcagctctccctatcagacattgagtcatcggcaactgaaaccagagccattacggctgcttcgtatgtctattttccttctcttgacactcccctcagcaataccgacagatctacggaactgaacacatcccgtctgcctggacagcttggacctcacctccctggctcccgatcccacttcccagctacgactcacgagcagcaaacctattcgtcactcggacaaacatacaagaccaattgcccgtcacacaaaatggacttcgcgccctaccagtcctccccacccgagaacaatcgacccttctccccgccaatctcgccccgcgcctcccaagacggcagacgaccattctcccctccccagcgaacctcgttctcatctccacctccattgcaacatccacagccacagcgttcatggcgcgctgactcagtcgccgaggagggcttcagtaatggctatggtcaaggaagtggtggcggttatgcacagggaagtggaggtttggccatcggtggaagagaggagttcgacacgagtctggggttgagattagactacgaagctgtgttggcgtatgttgcgctgccgccgctaggtgccatcattcttttgatcttggagagggggagtgactacgttcgattccacgcctggcaatcaagtctggtcttcaccgtcatattcatcctgcacctcatattctcgtggtctacgttccttagctgggtcatagcgctcggtgatattgctctgatcgcgtttcttgcgttgagagcctaccgggatgctgatacccttgatcgattcgaggttccggtctttggacagattgctagtcggatcctcgatgatgaataaggatattggagatggtactcaagggaagatcgtcgtctttgatttggtactggagcatggagggcataatggggggcatggagaaaaacacggacggaagcttgctattgagggcgtcaatcgtcgatgttttgtgtgcgtatatacccctgccatcacatgtcggatggcttgacactggaatacaacgttttgattgtggcccgcgcgcactgaatcatatttaggcatctatccagatatgatcgcagtaaaatcgaagtaaccttcgatatgtgaagtcatctccgagctagcagtctagtatgccaaccaacttcctttagcggcgcgtcgcataggactattacagtttggagcgcgaatgatataaaggcagtttggctgtttctccgtgacgcactaacgctactcactggaagtataaatatcttgtcaagcctacatctatcgtctctcattattttagtctctgttcatgacacgcacacacaatctgttacatctattaagtcaatctccatcatccccgctacttgatactccatagatatcgactttacaaactcctcacaatagcagtatctccttacatacctacacgttcattctctattaccggcattcaacactcatcatcggcaacagtcacaagctaagccccccatcatatcgatccccaccttgttcacaacaccaggaacaccttctgaccatggctcgtatcacagatttgccccgccaattgatcaacaacatcttgaggaatctagatagcctttgggatcttgatagctgtgtacgcacctgccgtctcttccatgcatgctaccacgagaacccacgcctagtgattgagattgtaaagcgaatggtgcctcctcagatgcttgttagattaatcgcattatcagaactatatgtccacccgagtacacttccggcgctcacccagaagcagatcttccgatccctggagaggcatccaaggaagttactcaaccggctaaagcaatatccaccatgggcgctaaggcagcttgtcggcaaacggatgatagcagcgcaagcggaaggctttcccccaagtcctcgtccaggaactgtagtttggcacgccaagtcttggacctaccttgagaaagaacaactctgcgacctggtcggagaggtatttttcgatgaggacccag

SEQ ID NO: 12243 - DNA, 954 bp, Muscodor strobelii
  misc_feature: SGI cDNA ID NO. 563967
  misc_feature: Encodes the peptide sequence at SEQ ID NO 12244
atggagcaattatcctccaaactgccaccggaggagactctgtccctaccggatgggcgagtcataagctacgctatttatggggaccgaagtgactcagcaaaggggacaatattcttcaatcacgggctaccgggaagtcacatcgaggcttttgggtacaatgctgcagcagcacgtcacaatctacggatcatcgcggctgatcggccgggcatgggcaaatctacgtttgtggctgatcgcacagtcttgagctgggcggatgatatatctcgtctcgctgatgctttgaaggtagataagtttgcggtattaggtgtatctggaggcgcgccttacacactcgcctgtctgcatgctatccctcgcacgcgctgtgtgggcggagggctcgtcgcggggatatatcctatgagcttggggattaaagacatggtgctttcggcgaaagtgttattcaaactcgcgtcgtggtcgagctggttggtcgaaaaagcgttcgacttggaaatgggagccaccgtgcgcgcagccgaaaatggaaatctggagggccttgagaatatgcttgagaagacgttgtcatcaagatcagcggcggactacgctgcttggtctactgcgacacgtgaggagcgaacgctcgtcgttgaggatatgaggagagggatgatgcaggggagtaaaggttcagcctccgaactgcatcttgatgcgaaagactggaggtttggacttgatgagttgagctttgggaaggaagggaaaggacggttggtgatgtggcatggaggaaaggatgtgaattgtccgactaatatggcgaggaaggctgccgcgttgatgcaaggctcggagctgaggatcagtgacgaagatgggcatttgagcatgagtttgcattcttttgacaaggtagttgatacaatgtatgacatcttgatatcttaa

SEQ ID NO: 12244 - protein, 317 aa, Muscodor strobelii
  misc_feature: SGI Peptide ID NO. 563967
  misc_feature (11)..(299): NCBI GI: 256733373 Blast Desc: NECHADRAFT_35689 [Nectria haematococca mpVI 77-13-4]
  misc_feature (11)..(315): NCBI GI: 46127753 Blast Desc: FG08254.1 [Gibberella zeae PH-1]
  misc_feature (12)..(311): NCBI GI: 39974049 Blast Desc: MGG_00829 [Magnaporthe grisea 70-15] gi|145018232|gb|EDK02511.1| MGG_00829 [Magnaporthe grisea 70-15]
  misc_feature (12)..(311): NCBI GI: 189211733 Blast Desc: alpha/beta hydrolase fold domain containing protein [Pyrenophora tritici-repentis Pt-1C-BFP] gi|187979394|gb|EDU46020.1| alpha/beta hydrolase fold domain
  misc_feature (12)..(315): NCBI GI: 39966483 Blast Desc: MGG_01903 [Magnaporthe grisea 70-15] gi|145009600|gb|EDJ94256.1| MGG_01903 [Magnaporthe grisea 70-15]
  misc_feature (12)..(308): NCBI GI: 169609935 Blast Desc: SNOG_08059 [Phaeosphaeria nodorum SN15] gi|111063215|gb|EAT84335.1| SNOG_08059 [Phaeosphaeria nodorum SN15]
  misc_feature (10)..(299): NCBI GI: 238839490 Blast Desc: hydrolase [Microsporum canis CBS 113480]
  misc_feature (3)..(245): NCBI GI: 116178782 Blast Desc: CHGG_00019 [Chaetomium globosum CBS 148.51] gi|88184316|gb|EAQ91784.1| CHGG_00019 [Chaetomium globosum CBS 148.51]
  misc_feature (12)..(302): NCBI GI: 119180110 Blast Desc: CIMG_08725 [Coccidioides immitis RS]
  misc_feature (12)..(302): NCBI GI: 240110272 Blast Desc: alpha/beta hydrolase fold family protein [Coccidioides posadasii C735 delta SOWgp]
MEQLSSKLPPEETLSLPDGRVISYAIYGDRSDSAKGTIFFNHGLPGSHIEAFGYNAAAARHNLRIIAADRPGMGKSTFVADRTVLSWADDISRLADALKVDKFAVLGVSGGAPYTLACLHAIPRTRCVGGGLVAGIYPMSLGIKDMVLSAKVLFKLASWSSWLVEKAFDLEMGATVRAAENGNLEGLENMLEKTLSSRSAADYAAWSTATREERTLVVEDMRRGMMQGSKGSASELHLDAKDWRFGLDELSFGKEGKGRLVMWHGGKDVNCPTNMARKAAALMQGSELRISDEDGHLSMSLHSFDKVVDTMYDILIS

SEQ ID NO: 12245 - DNA, 1280 bp, Muscodor strobelii
  misc_feature: SGI EST ID NO. CUFF.30496.0
  misc_feature: Variant of the nucleotide sequence at SEQ ID NO 12243
cgcggattgctccatgaggaaactgtgctaaggtgaccttaacctcacgccataaccaactcggccatcttgccttgagccatctccaagcgaagaggcagatgttcgacggatcctaaatcaaactcatatcttcccaaggaaaattttattgcgcggacgtattgaaccgatggagcaattatcctccaaactgccaccggaggagactctgtccctaccggatgggcgagtcataagctacgctatttatggggaccgaagtgactcagcaaaggggacaatattcttcaatcacgggctaccgggaagtcacatcgaggcttttgggtacaatgctgcagcagcacgtcacaatctacggatcatcgcggctgatcggccgggcatgggcaaatctacgtttgtggctgatcgcacagtcttgagctgggcggatgatatatctcgtctcgctgatgctttgaaggtagataagtttgcggtattaggtgtatctggaggcgcgccttacacactcgcctgtctgcatgctatccctcgcacgcgctgtgtgggcggagggctcgtcgcggggatatatcctatgagcttggggattaaagacatggtgctttcggcgaaagtgttattcaaactcgcgtcgtggtcgagctggttggtcgaaaaagcgttcgacttggaaatgggagccaccgtgcgcgcagccgaaaatggaaatctggagggccttgagaatatgcttgagaagacgttgtcatcaagatcagcggcggactacgctgcttggtctactgcgacacgtgaggagcgaacgctcgtcgttgaggatatgaggagagggatgatgcaggggagtaaaggttcagcctccgaactgcatcttgatgcgaaagactggaggtttggacttgatgagttgagctttgggaaggaagggaaaggacggttggtgatgtggcatggaggaaaggatgtgaattgtccgactaatatggcgaggaaggctgccgcgttgatgcaaggctcggagctgaggatcagtgacgaagatgggcatttgagcatgagtttgcattcttttgacaaggtagttgatacaatgtatgacatcttgatatcttaacgatgctcgaagtactgggtctaggcaaacactcttttgaattgacatttcatagacaattagagagcgccggcactgatcatactattattcatgaggtgatacatgtcgaaagaagcgtggcatctattacgaatctcatcttcgagtattt

SEQ ID NO: 12246 - DNA, 327 bp, Muscodor strobelii
  misc_feature: SGI cDNA ID NO. 563968
  misc_feature: Reduced expression when VOC is produced
  misc_feature: Encodes the peptide sequence at SEQ ID NO 12247
atggctgccaccgagactcccgccgcccgcagcggccttcgtcgcggaatcaaccacggccacaaaaccacacgccgcaccgttgcccgcaagccaagccacaccaagggccacctcagcaagcgcactgctttcacccgtgacatcatctccgaggttgctggtctcgccccctacgagcgccgcatcgtcgagttgttgcgcaacggtcgtgataagcgtgcccgcaagctcgccaagaagagactcggtaccttcaagcgtggcttcgccagagtcgagaagatgcagcgtgtcattgccgagtcccgccgtgctggtcactaa

SEQ ID NO: 12247 - protein, 108 aa, Muscodor strobelii
  misc_feature: SGI Peptide ID NO. 563968
  misc_feature (8)..(106): Pfam Id: PF01158 Pfam Desc: Ribosomal protein L36e
  misc_feature (3)..(108): NCBI GI: 46108712 Blast Desc: RL36_TRIHM 60S ribosomal protein L36 (TRP36) [Gibberella zeae PH-1]
  misc_feature (3)..(108): NCBI GI: 256735052 Blast Desc: [Nectria haematococca mpVI 77-13-4]
  misc_feature (1)..(108): NCBI GI: 156036474 Blast Desc: 60S ribosomal protein L36 [Sclerotinia sclerotiorum 1980] gi|154698331|gb|EDN98069.1| 60S ribosomal protein L36 [Sclerotinia sclerotiorum 1980]
  misc_feature (1)..(108): NCBI GI: 154308480 Blast Desc: 60S ribosomal protein L36 [Botryotinia fuckeliana B05.10] gi|150852841|gb|EDN28033.1| 60S ribosomal protein L36 [Botryotinia fuckeliana B05.10]
  misc_feature (1)..(108): NCBI GI: 39942948 Blast Desc: MGG_03554 [Magnaporthe grisea 70-15] gi|145009883|gb|EDJ94539.1| MGG_03554 [Magnaporthe grisea 70-15]
  misc_feature (4)..(108): NCBI GI: 225680860 Blast Desc: ribosomal protein L36 [Paracoccidioides brasiliensis Pb03]
  misc_feature (3)..(106): NCBI GI: 17865559 Blast Desc: RL36_TRIHM RecName: Full=60S ribosomal protein L36; AltName: Full=TRP36 gi|11066975|gb|AAG28787.1|AF308443_1 60S ribosomal protein [Trichoderma hamatum]
  misc_feature (9)..(108): NCBI GI: 85113200 Blast Desc: NCU03302 [Neurospora crassa OR74A] gi|28926263|gb|EAA35243.1| [Neurospora crassa OR74A]
  misc_feature (10)..(108): NCBI GI: 226282278 Blast Desc: PAAG_00765 [Paracoccidioides brasiliensis Pb01] gi|226292561|gb|EEH47981.1| PADG_04065 [Paracoccidioides brasiliensis Pb18]
  misc_feature (10)..(108): NCBI GI: 240279214 Blast Desc: 60S ribosomal protein L36 [Ajellomyces capsulatus H143]
  misc_feature: Useful for introducing or modulating the production of volatile compounds
MAATETPAARSGLRRGINHGHKTTRRTVARKPSHTKGHLSKRTAFTRDIISEVAGLAPYERRIVELLRNGRDKRARKLAKKRLGTFKRGFARVEKMQRVIAESRRAGH

SEQ ID NO: 12248 - DNA, 1202 bp, Muscodor strobelii
  misc_feature: SGI EST ID NO. CUFF.30898.1
  misc_feature: Variant of the nucleotide sequence at SEQ ID NO 12246
ccaggtcccactaaccacaaaaaaatcacaatctgggaaacattgcccgccatcccgaccgcccatcacgaccgacctcagtcaatcctctcgacaatcacgacgacatcactaaccaacaggatggctgccaccgagactcccgccgcccgcagcggccttcgtcgcggaatcaaccacggccacaaaaccacacgccgcaccgttgcccgcaagccaagccacaccaagggccacctcagcaagcgcactgctttcacccgtgacatcatctccgaggttgctggtctcgccccctacgagcgccgcatcgtcgagttgttgcgcaacggtcgtgataagcgtgcccgcaagctcgccaagaagagactcggtaccttcaagcgtggcttcgccagagtcgagaagatgcagcgtgtcattgccgagtcccgccgtgctggtcactaaacgctaaataacgaccgagaaaacacagtgttctggggaggcaacgagagtcggaccgatggtcgctggacaccgcgatggtagggtggtcatacccatacgacatacacattgcgtggtggcgagaaacaaaaggatgggatagggtcgctaatctggcgctcgggagatgagcaatgaaaatgactctacggttcataccaatcagtactatacccatcgccactgccaagagagtgctagaggataaatgaggattgtggctctcacaaatcatgaaatcaatttttaaaagtgttctcatgtctttatctatgtcatacgggcatgtataattcgagactgtgattatcggacagtcagtgggagttcggtcagatcgcggttggaatcatcaggacatcaaatgagcaactgaacacagttacgagctgcagattttcaactactcgttccacggacaatgaggcatatcctggaatgtgtactactccgacgtgaccaacctgctgctcaatgcgcatgtcatgatactgactttcggccttcttgcagtacatattgcgcagagatctgtttttacgagggctgtcgatgatgccaaggagatagcacatctttctgctcgtccgcctgatatcttccgggtgagtaggttcctcaaatggtggtgtttgtattgtttcgtctattaaaatcagatggcccttactacctattctgaagacttgcgatttagcctctactggtca

SEQ ID NO: 12249 - DNA, 1839 bp, Muscodor strobelii
  misc_feature: SGI cDNA ID NO. 563969
  misc_feature: Elevated expression when VOC is produced
  misc_feature: Encodes the peptide sequence at SEQ ID NO 12250
atggacaccgcgaggcccgagcccaaatgccgcttggtgctattgcaagatccagagccagaggcgaaaagcacgtttggaaataaatgtgttgaggagccggaatcattcaaggctccgctatctcgtgatgatacccatagcctacacgagaatcatcctttcaacgaaaacgcgtcgttgaaagaattgattctgcaatggcaaatgcagaccaacctagaggccggggaggaggagtactttccattgatcggacggcagtatggcttgattgttcaactgttcaaacaggcactaaaggtcgcatccttcgaagccgactttaacgaatacatgaagcgtcttaaacggacgtttgaggcgattctactttggggccagcaatataaagtttcaacagggaatgtggataggttaacctccaaatcatggcgcctccggaaatctgtcctgagaacgttaagttgcattggaagagttctgacaacccgcctgatgcctcgtatccagcaaccattgcccgacagtttacaagaaatcattccgagactagagaagtctggcgaagaggccacatcaatactcagagacgacaaatcgctagggtacgagggccacatctcgagtgatgaggacgatagcgatacttcatctatatttgaagatgactctctatccgaaattgcggaagatctaagatgcaatattgaaaacttgctagatcttgatacgctctaccaggctgcagaagaggacgcttctcatgcaatagaagagcctcctgacatcacaggcgcaacagtcttcaccgacatatttcaaagaagatttcctaaagcagattatgagctcgttgactttctcggccgggaaaattacaaaagattcgtgagaggcatggagatgcggtcaatgaacgaggaccaggccgaagccgatccagaggcgcataaaccggcagctactatgattgatggaagcaaattccacgattcagcagtgggaacatctctccatacaagcaactatcctgagacgatcatgtcattccaccacgacaatggaaatattaatcgagtgcccgcgcttcccgaagctggtcggtgtggtttgcctttcccgtgtctcgcgtgcggaaaaacagtcagaatagattctactaaagcttggaagcgccatatatttctggatctttctccttataactgccttgagaaatcatgccgacgagatattaccctattgagtagtcgtgatgattgggtcgagcaccttagagcgcattatggaaaagaagacatttggttaagcttctcgtgtacgctgtgcttgaagcaaactggatatggggaggccaatattttgacccaccttgaaaagcacctgcaagatatcgcacttacggcccttcctaggagtgatgatgattatgagtctgaggcccagggactaccatcttctgtgtccttgaacgactgggaaacacacaaggacttgataatacgtctctatcttgaagagaagttacgtcttgatgatattttagtctatatgaaggaggggcacgatttcatcaagaagtacgtttctcttactttgttgtcgtcgatgctaacaacttgcagaaagtctcagtatgagtaccaattgaagaaatggggtgtcaagaaaaactcttcgaaggaactctggggctacatgagtcagactcttcaccgtcggcaaagggaacgaagctcgccgcgtttcagcgatgtagaattggtaaaagtcgaacaggacgaggtccagggcatcgaagtcttgccagaaagaatgccacaagagaagcaatag

SEQ ID NO: 12250 - protein, 612 aa, Muscodor strobelii
  misc_feature: SGI Peptide ID NO. 563969
  misc_feature (61)..(499): NCBI GI: 256725340 Blast Desc: NECHADRAFT_83115 [Nectria haematococca mpVI 77-13-4]
  misc_feature (84)..(489): NCBI GI: 46123133 Blast Desc: FG05944.1 [Gibberella zeae PH-1]
  misc_feature (223)..(484): NCBI GI: 189198666 Blast Desc: conserved [Pyrenophora tritici-repentis Pt-1C-BFP] gi|187982769|gb|EDU48257.1| conserved [Pyrenophora tritici-repentis Pt-1C-BFP]
  misc_feature (108)..(495): NCBI GI: 169599529 Blast Desc: SNOG_02585 [Phaeosphaeria nodorum SN15] gi|111068196|gb|EAT89316.1| SNOG_02585 [Phaeosphaeria nodorum SN15]
  misc_feature (131)..(473): NCBI GI: 255955455 Blast Desc: Pc21g14660 [Penicillium chrysogenum Wisconsin 54-1255] gi|211590191|emb|CAP96363.1| Pc21g14660 [Penicillium chrysogenum Wisconsin 54-1255]
  misc_feature (342)..(482): NCBI GI: 255941880 Blast Desc: Pc16g14110 [Penicillium chrysogenum Wisconsin 54-1255] gi|211586332|emb|CAP94081.1| Pc16g14110 [Penicillium chrysogenum Wisconsin 54-1255]
  misc_feature (229)..(481): NCBI GI: 169624732 Blast Desc: SNOG_15627 [Phaeosphaeria nodorum SN15] gi|160705228|gb|EAT77002.2| SNOG_15627 [Phaeosphaeria nodorum SN15]
  misc_feature (322)..(475): NCBI GI: 242795325 Blast Desc: conserved [Talaromyces stipitatus ATCC 10500] gi|218719150|gb|EED18570.1| conserved [Talaromyces stipitatus ATCC 10500]
  misc_feature (271)..(473): NCBI GI: 169786546 Blast Desc: [Aspergillus oryzae RIB40] gi|83776483|dbj|BAE66600.1| protein product [Aspergillus oryzae]
  misc_feature (267)..(471): NCBI GI: 145251846 Blast Desc: An16g01230 [Aspergillus niger] gi|134082976|emb|CAK42740.1| protein product [Aspergillus niger]
  misc_feature: Useful for introducing or modulating the production of volatile compounds
MDTARPEPKCRLVLLQDPEPEAKSTFGNKCVEEPESFKAPLSRDDTHSLHENHPFNENASLKELILQWQMQTNLEAGEEEYFPLIGRQYGLIVQLFKQALKVASFEADFNEYMKRLKRTFEAILLWGQQYKVSTGNVDRLTSKSWRLRKSVLRTLSCIGRVLTTRLMPRIQQPLPDSLQEIIPRLEKSGEEATSILRDDKSLGYEGHISSDEDDSDTSSIFEDDSLSEIAEDLRCNIENLLDLDTLYQAAEEDASHAIEEPPDITGATVFTDIFQRRFPKADYELVDFLGRENYKRFVRGMEMRSMNEDQAEADPEAHKPAATMIDGSKFHDSAVGTSLHTSNYPETIMSFHHDNGNINRVPALPEAGRCGLPFPCLACGKTVRIDSTKAWKRHIFLDLSPYNCLEKSCRRDITLLSSRDDWVEHLRAHYGKEDIWLSFSCTLCLKQTGYGEANILTHLEKHLQDIALTALPRSDDDYESEAQGLPSSVSLNDWETHKDLIIRLYLEEKLRLDDILVYMKEGHDFIKKYVSLTLLSSMLTTCRKSQYEYQLKKWGVKKNSSKELWGYMSQTLHRRQRERSSPRFSDVELVKVEQDEVQGIEVLPERMPQEKQ

SEQ ID NO: 12251 - DNA, 1330 bp, Muscodor strobelii
  misc_feature: SGI EST ID NO. CUFF.30902.0
  misc_feature: Variant of the nucleotide sequence at SEQ ID NO 12249
catctctccatacaagcaactatcctgagacgatcatgtcattccaccacgacaatggaaatattaatcgagtgcccgcgcttcccgaagctggtcggtgtggtttgcctttcccgtgtctcgcgtgcggaaaaacagtcagaatagattctactaaagcttggaagcgccatatatttctggatctttctccttataactgccttgagaaatcatgccgacgagatattaccctattgagtagtcgtgatgattgggtcgagcaccttagagcgcattatggaaaagaagacatttggttaagcttctcgtgtacgctgtgcttgaagcaaactggatatggggaggccaatattttgacccaccttgaaaagcacctgcaagatatcgcacttacggcccttcctaggagtgatgatgattatgagtctgaggcccagggactaccatcttctgtgtccttgaacgactgggaaacacacaaggacttgataatacgtctctatcttgaagagaagttacgtcttgatgatattttagtctatatgaaggaggggcacgatttcatcaagaagtacgtttctcttactttgttgtcgtcgatgctaacaacttgcagaaagtctcagtatgagtaccaattgaagaaatggggtgtcaagaaaaactcttcgaaggaactctggggctacatgagtcagactcttcaccgtcggcaaagggaacgaagctcgccgcgtttcagcgatgtagaattggtaaaagtcgaacaggacgaggtccagggcatcgaagtcttgccagaaagaatgccacaagagaagcaatagaagccaagtggggaaaagatctcgaagcggaaagtgagtcaacaccgcgacgaaaccacacaaagagattcgtagaaaaagcagactgttgatgatacaaaaaacgccgtccgagaagcggagtagagcaagaatttcgaggataccgacgaactatatgcagggggttgcgagttcttttcccacattaccatactaccctcattatgcaaccaatgatggaagacaagaagaaggaagcggatgatgttgcagtaactacacaggagtcaaagaaaccagacgaacttagtagggaacagccaatcgaagaagctcctcaagcagaaaaggaagattcacatcgaagcacagatcttcatgatgttagtattgttacgcagcaggggatgaacaatgatccttattttagtgatattacaaagagctttgtgtatagaccgaggaatgcgagcaagaaaaatagatgaaaaaggcgactcgacatgacctattaaaac

SEQ ID NO: 12252 - DNA, 1803 bp, Muscodor strobelii
  misc_feature: SGI cDNA ID NO. 563970
  misc_feature: Elevated expression when VOC is produced
  misc_feature: Encodes the peptide sequence at SEQ ID NO 12253
atggcggatcctgtttcccttgctctgggtatatcgccccttgttattgaggtgcttaaggggtatcgaaaactcaagtctaagctgaatatattttgtcattattcacgagaaatagttcggctccgaaggaaatttacgactcagcgagattgctttctgtccgagtgcgaaatactgttcaggaaagttatcagtgatcggtcacatattcaagaattattaacatcccgggaatctaatcatcagttccaagaggccattgaacgactgtgtgtatatctaggagagcgacagtcgattttccaaggcacatttgaggagataaatgaagtaatacaggacttggaaaccgagctacttgattttgagcagatcgagtcaagaagagaacatggcgaaactcttgaagatgccatcaggcgtctaaggcgccgagtcaagatcacgatcaaaaagaatacttacgacaaagctttggaaggattgagacagtccaatgacgatcttcagaatttgcgaaaacatgtcgaagaactacgagacgaggaaatgaacctaaaagaggttgctaaggtagtcaaaccacttcctttggagtgtaggaagttcggaaaagtgcggttagcggctctagctttccatgaggcgatgacgacacactgggtctgcgagcaatcgacacatcaacgccatcagatcaggttgttcatagacaccgaagtgcaacaggacgtaaagatgaattttttgctgcttggagaatggcaaccgtctggaacccaacccgaacgacttgatctcatatcattggcggtgaagtcagcagctttcgagaattctgaagtaatggatggagagaatgtacatcagttctctgatccacatgaactagccactggttcaagaatcgccaaacgcaggcgagtcaagtgggccgatgagcagccagttcccgttatagtgcaccgtaatccatcatctccatcggagcctactaagctggatcatcggaagaatgtcaaaaggaagtcgggggtgcatactcttcaaggccctgacacacctggctgcgtggtgggttgttctatcgccactcagccttgcagaggcaaagagtgtttggggtactttgatgtggatctagaaactccgtttcgtcattcgttttacccatggtctggaatatgcaaagaaagcgttttagtcactaatgcgtttcgtactgcaaaaccactcgctagtctatttgacctgtatagggagtttgatatgatggaccaactactactggctaaggaaatagtatctatcattctcaagttccactcaactccatggctcgagagttcgtggacgctgaacgatattcattaccttggcacccagattggaatggaaagcgttctgagcaccctccacctcggcacgatcttgaatggcaagccaaaacaaaccgaccggtgtaacacgacaagcaccggacaagtaattgaggaaggaggcagacccgtagaccaaatccgagacacagctctttacaatctcggcgttggcctgcttgaaatagaccactggacgaatctagacccaaacgccgtgggacacatcaaaggtcttgcgaaacagaaatcaacgctgtgtccaaagtacagaaccttggtacaaaagtgtctgtactgcaaatttggtgttggggctgatctactcagacctcagctgcaaacagccattttgaatgaggttgtgcgggagctggaggctatggtcgcggggttgaggctttacgatgagctagagtga

SEQ ID NO: 12253 - protein, 600 aa, Muscodor strobelii
  misc_feature: SGI Peptide ID NO. 563970
  misc_feature (1)..(593): NCBI GI: 212544910 Blast Desc: conserved [Penicillium marneffei ATCC 18224] gi|210065578|gb|EEA19672.1| conserved [Penicillium marneffei ATCC 18224]
  misc_feature (94)..(595): NCBI GI: 256725461 Blast Desc: NECHADRAFT_23646 [Nectria haematococca mpVI 77-13-4]
  misc_feature (78)..(600): NCBI GI: 261357748 Blast Desc: conserved [Verticillium albo-atrum VaMs.102]
  misc_feature (5)..(595): NCBI GI: 189198668 Blast Desc: [Pyrenophora tritici-repentis Pt-1C-BFP] gi|187982770|gb|EDU48258.1| [Pyrenophora tritici-repentis Pt-1C-BFP]
  misc_feature (95)..(598): NCBI GI: 46123135 Blast Desc: FG05945.1 [Gibberella zeae PH-1]
  misc_feature (5)..(600): NCBI GI: 169624074 Blast Desc: SNOG_15288 [Phaeosphaeria nodorum SN15] gi|111056101|gb|EAT77221.1| SNOG_15288 [Phaeosphaeria nodorum SN15]
  misc_feature (17)..(596): NCBI GI: 189203199 Blast Desc: conserved [Pyrenophora tritici-repentis Pt-1C-BFP] gi|187985034|gb|EDU50522.1| conserved [Pyrenophora tritici-repentis Pt-1C-BFP]
  misc_feature (7)..(587): NCBI GI: 169599531 Blast Desc: SNOG_02586 [Phaeosphaeria nodorum SN15] gi|111068197|gb|EAT89317.1| SNOG_02586 [Phaeosphaeria nodorum SN15]
  misc_feature (427)..(590): NCBI GI: 169624730 Blast Desc: SNOG_15626 [Phaeosphaeria nodorum SN15] gi|160705227|gb|EAT77001.2| SNOG_15626 [Phaeosphaeria nodorum SN15]
  misc_feature (382)..(583): NCBI GI: 145604108 Blast Desc: MGG_10728 [Magnaporthe grisea 70-15] gi|145012179|gb|EDJ96835.1| MGG_10728 [Magnaporthe grisea 70-15]
  misc_feature: Useful for introducing or modulating the production of volatile compounds
MADPVSLALGISPLVIEVLKGYRKLKSKLNIFCHYSREIVRLRRKFTTQRDCFLSECEILFRKVISDRSHIQELLTSRESNHQFQEAIERLCVYLGERQSIFQGTFEEINEVIQDLETELLDFEQIESRREHGETLEDAIRRLRRRVKITIKKNTYDKALEGLRQSNDDLQNLRKHVEELRDEEMNLKEVAKVVKPLPLECRKFGKVRLAALAFHEAMTTHWVCEQSTHQRHQIRLFIDTEVQQDVKMNFLLLGEWQPSGTQPERLDLISLAVKSAAFENSEVMDGENVHQFSDPHELATGSRIAKRRRVKWADEQPVPVIVHRNPSSPSEPTKLDHRKNVKRKSGVHTLQGPDTPGCVVGCSIATQPCRGKECLGYFDVDLETPFRHSFYPWSGICKESVLVTNAFRTAKPLASLFDLYREFDMMDQLLLAKEIVSIILKFHSTPWLESSWTLNDIHYLGTQIGMESVLSTLHLGTILNGKPKQTDRCNTTSTGQVIEEGGRPVDQIRDTALYNLGVGLLEIDHWTNLDPNAVGHIKGLAKQKSTLCPKYRTLVQKCLYCKFGVGADLLRPQLQTAILNEVVRELEAMVAGLRLYDELE

SEQ ID NO: 12254 - DNA, 1881 bp, Muscodor strobelii
  misc_feature: SGI EST ID NO. CUFF.30910.0
  misc_feature: Variant of the nucleotide sequence at SEQ ID NO 12252
ggcggatcctgtttcccttgctctgggtatatcgccccttgttattgaggtgcttaaggggtatcgaaaactcaagtctaagctgaatatattttgtcattattcacgagaaatagttcggctccgaaggaaatttacgactcagcgagattgctttctgtccgagtgcgaaatactgttcaggaaagttatcagtgatcggtcacatattcaagaattattaacatcccgggaatctaatcatcagttccaagaggccattgaacgactgtgtgtatatctaggagagcgacagtcgattttccaaggcacatttgaggagataaatgaagtaatacaggacttggaaaccgagctacttgattttgagcagatcgagtcaagaagagaacatggcgaaactcttgaagatgccatcaggcgtctaaggcgccgagtcaagatcacgatcaaaaagaatacttacgacaaagctttggaaggattgagacagtccaatgacgatcttcagaatttgcgaaaacatgtcgaagaactacgagacgaggaaatgaacctaaaagaggttgctaaggtagtcaaaccacttcctttggagtgtaggaagttcggaaaagtgcggttagcggctctagctttccatgaggcgatgacgacacactgggtctgcgagcaatcgacacatcaacgccatcagatcaggttgttcatagacaccgaagtgcaacaggacgtaaagatgaattttttgctgcttggagaatggcaaccgtctggaacccaacccgaacgacttgatctcatatcattggcggtgaagtcagcagctttcgagaattctgaagtaatggatggagagaatgtacatcagttctctgatccacatgaactagccactggttcaagaatcgccaaacgcaggcgagtcaagtgggccgatgagcagccagttcccgttatagtgcaccgtaatccatcatctccatcggagcctactaagctggatcatcggaagaatgtcaaaaggaagtcgggggtgcatactcttcaaggccctgacacacctggctgcgtggtgggttgttctatcgccactcagccttgcagaggcaaagagtgtttggggtactttgatgtggatctagaaactccgtttcgtcattcgttttacccatggtctggaatatgcaaagaaagcgttttagtcactaatgcgtttcgtactgcaaaaccactcgctagtctatttgacctgtatagggagtttgatatgatggaccaactactactggctaaggaaatagtatctatcattctcaagttccactcaactccatggctcgagagttcgtggacgctgaacgatattcattaccttggcacccagattggaatggaaagcgttctgagcaccctccacctcggcacgatcttgaatggcaagccaaaacaaaccgaccggtgtaacacgacaagcaccggacaagtaattgaggaaggaggcagacccgtagaccaaatccgagacacagctctttacaatctcggcgttggcctgcttgaaatagaccactggacgaatctagacccaaacgccgtgggacacatcaaaggtcttgcgaaacagaaatcaacgctgtgtccaaagtacagaaccttggtacaaaagtgtctgtactgcaaatttggtgttggggctgatctactcagacctcagctgcaaacagccattttgaatgaggttgtgcgggagctggaggctatggtcgcggggttgaggctttacgatgagctagagtgaatggaagatagccatgtagcggagctcaaacctgaactttcggccacattagctcatcattactctttaatggcgtgaag

SEQ ID NO: 12255 - DNA, 1161 bp, Muscodor strobelii
  misc_feature: SGI cDNA ID NO. 563971
  misc_feature: Encodes the peptide sequence at SEQ ID NO 12256
atggccgagattactactcagcttcaagatgcagcaccgcgcaataaagaattgttacgaatcctctctgaaacagatcatgcgccaacttgtcttgctaatattctccttcaggcaccagccggcctaaaccaacagaagctgtacatcaaagacctggaatcacagctcgcgaaggttcaaaaagacttaccatggcttaaatggacacgaactaaggaattgaaggagcatgagagctaccgcgattctgtgatgaagaggtgggcgtataaggttagcggtaaccaggagaagttttccgctaaggccgacaaagaggagaaagattacttcgagtctctccaaaaattgcgccaagccgaagagatgcagaagcatcttgaacctctactatctgaagcccgaaccactcagcaacaactcgtacatgactccgagcgacatgaaacagcccaagccgagctggacgggctgtatgccagcatcttccaaggcccaactccatccttccccgaggaagatgaggcagagcgtaaggcagagaatgcactccaggtgtataataccgcacgcgggaatctggaggcagcacaacaggtcaacaaaatactaaaagacgccgatgcgcgtcttcgcaaatcactcatccacatagaagatgcgctggacagttcccgtatggatatgtttggaggtggtgcggcattcgatatgatggaacgaagcagtctccacagtgccgagatggaggtcatgcaggcacagatgctcatcatgcaagcacaacgtctgtctcctgacgtcggaaatctcccaacggccaagatctcacatggcagcttaatgagcgacgtactattcgataacatcttcactgatatggcgtttcatgacaaaatcaaagagtcgcgtactgaggtcgagcgatgccatcaagcattgttgaatcaattgccaccgtcagcacagaaatgcaagcatctggagcaagaggccaaagagaagaaagacctgctcgatactgcaagatttgagttgcaagagtcgcgaaagcggatatttgaacgacttagcttaggccatcttccgtccaatgactccaaacaaggcgccacggaggcggatgaacgtggtgcaccgccgccttattctcaatag

SEQ ID NO: 12256 - protein, 386 aa, Muscodor strobelii
  misc_feature: SGI Peptide ID NO. 563971
  misc_feature (3)..(364): NCBI GI: 171694644 Blast Desc: protein product [Podospora anserina] gi|170947564|emb|CAP59725.1| protein product [Podospora anserina]
  misc_feature (1)..(379): NCBI GI: 261359124 Blast Desc: conserved [Verticillium albo-atrum VaMs.102]
  misc_feature (5)..(383): NCBI GI: 156045732 Blast Desc: SS1G_09142 [Sclerotinia sclerotiorum 1980] gi|154693538|gb|EDN93276.1| SS1G_09142 [Sclerotinia sclerotiorum 1980]
  misc_feature (1)..(358): NCBI GI: 189209181 Blast Desc: conserved [Pyrenophora tritici-repentis Pt-1C-BFP] gi|187977016|gb|EDU43642.1| conserved [Pyrenophora tritici-repentis Pt-1C-BFP]
  misc_feature (1)..(385): NCBI GI: 169613530 Blast Desc: SNOG_09896 [Phaeosphaeria nodorum SN15] gi|111062041|gb|EAT83161.1| SNOG_09896 [Phaeosphaeria nodorum SN15]
  misc_feature (1)..(287): NCBI GI: 116205948 Blast Desc: CHGG_02267 [Chaetomium globosum CBS 148.51] gi|88182864|gb|EAQ90332.1| CHGG_02267 [Chaetomium globosum CBS 148.51]
  misc_feature (1)..(358): NCBI GI: 256731094 Blast Desc: NECHADRAFT_84993 [Nectria haematococca mpVI 77-13-4]
  misc_feature (41)..(383): NCBI GI: 170095924 Blast Desc: [Laccaria bicolor S238N-H82] gi|164645550|gb|EDR09797.1| [Laccaria bicolor S238N-H82]
  misc_feature (39)..(355): NCBI GI: 121720176 Blast Desc: conserved [Aspergillus clavatus NRRL 1] gi|119404998|gb|EAW15360.1| conserved [Aspergillus clavatus NRRL 1]
  misc_feature (5)..(364): NCBI GI: 154321894 Blast Desc: BC1G_01094 [Botryotinia fuckeliana B05.10] gi|150850341|gb|EDN25534.1| BC1G_01094 [Botryotinia fuckeliana B05.10]
MAEITTQLQDAAPRNKELLRILSETDHAPTCLANILLQAPAGLNQQKLYIKDLESQLAKVQKDLPWLKWTRTKELKEHESYRDSVMKRWAYKVSGNQEKFSAKADKEEKDYFESLQKLRQAEEMQKHLEPLLSEARTTQQQLVHDSERHETAQAELDGLYASIFQGPTPSFPEEDEAERKAENALQVYNTARGNLEAAQQVNKILKDADARLRKSLIHIEDALDSSRMDMFGGGAAFDMMERSSLHSAEMEVMQAQMLIMQAQRLSPDVGNLPTAKISHGSLMSDVLFDNIFTDMAFHDKIKESRTEVERCHQALLNQLPPSAQKCKHLEQEAKEKKDLLDTARFELQESRKRIFERLSLGHLPSNDSKQGATEADERGAPPPYSQ

SEQ ID NO: 12257 - DNA, 2011 bp, Muscodor strobelii
  misc_feature: SGI EST ID NO. CUFF.31071.0
  misc_feature: Variant of the nucleotide sequence at SEQ ID NO 12255
tctaaacgtatcaagtatgacggaacacaaaatttacagcccagcgcgacgccgttcttggcgctgtggctatgctctgtaggaccgtccttgtgatatcatcgctccttctgaggtcgccaacgttcacataggatcagaagagggcaccacacatgatactgaataatcctcaatatcctcgatttttcaacacaaacgatctttttatttttttattttttaacactccgctgcatcctaggactttccttgggtctagaagcatggccgagattactactcagcttcaagatgcagcaccgcgcaataaagaattgttacgaatcctctctgaaacagatcatggtacgttatttacagactgcgaaaactgtcacaactcgaattgactctgaatatagtacgtacgtcacaccgcaaatagcgccaacttgtcttgctaatattctccttcaggcaccagccggcctaaaccaacagaagctgtacatcaaagacctggaatcacagctcgcgaaggttcaaaaagacttaccatggcttaaatggacacgaactaaggaattgaaggagcatgagagctaccgcgattctgtgatgaagaggtgggcgtataaggttagcggtaaccaggagaagttttccgctaaggccgacaaagaggagaaagattacttcgagtctctccaaaaattgcgccaagccgaagagatgcagaagcatcttgaacctctactatctgaagcccgaaccactcagcaacaactcgtacatgactccgagcgacatgaaacagcccaagccgagctggacgggctgtatgccagcatcttccaaggcccaactccatccttccccgaggaagatgaggcagagcgtaaggcagagaatgcactccaggtgtataataccgcacgcgggaatctggaggcagcacaacaggtcaacaaaatactaaaagacgccgatgcgcgtcttcgcaaatcactcatccacatagaagatgcgctggacagttcccgtatggatatgtttggaggtggtgcggcattcgatatgatggaacgaagcagtctccacagtgccgagatggaggtcatgcaggcacagatgctcatcatgcaagcacaacgtctgtctcctgacgtcggaaatctcccaacggccaagatctcacatggcagcttaatgagcgacgtactattcgataacatcttcactgatatggcgtttcatgacaaaatcaaagagtcgcgtactgaggtcgagcgatgccatcaagcattgttgaatcaattgccaccgtcagcacagaaatgcaagcatctggagcaagaggccaaagagaagaaagacctgctcgatactgcaagatttgagttgcaagagtcgcgaaagcggatatttgaacgacttagcttaggccatcttccgtccaatgactccaaacaaggcgccacggaggcggatgaacgtggtgcaccgccgccttattctcaatagtgtgctcttggtagggaataatgaccaggaggaataaggtacagtagtgagactactcgtagagattgaagtttagtaaggaacgattgatggagatcgatgctcgcaaaagtattgctcacgatatcacctaccttttagaacccccgtttcacgaagttgccgcttgcgaaatttaaatggcatatattataacttatgaagtgcgaatattgatgggggaattcatgtgtagtttcaagtcgcgtgttgaagccgcaaattcgtctcaataatggacggcattttgcctcggcaagcttgtgacattctgggcagggatcatcatttcaacagcacttttcagcatagggtattaggaactagagattcattagtgcaccgacacgggggcttcatatcgtcgtgttgttttccagtcatacaagatgatgaatggctgtttatattcataacggtattgcgaatcaacatttgaaagggttggtgactttgcctgttgccg

SEQ ID NO: 12258 - DNA, 303 bp, Muscodor strobelii
  misc_feature: SGI cDNA ID NO. 563972
  misc_feature: Reduced expression when VOC is produced
  misc_feature: Encodes the peptide sequence at SEQ ID NO 12259
atgccatcaaatactcgacctttcaccacaacatcacaagtccatccagggcatctaccgacgttatacagaactggacgcatggagaagaaacttgcaacagcaacagtagcagccgtaggcatcggctacggactggcaaagtacaaagaattccaaacacagcaaggatacgcaaacgcagagtccgaagcagcgcgtcgccgacaagccgaggctatgatggatgcctattcagaccggtcgagtctcgcggagcttgaggctgctgtggctgcttacgaaacgcaacggaagaactga

SEQ ID NO: 12259 - protein, 100 aa, Muscodor strobelii
  misc_feature: SGI Peptide ID NO. 563972
  misc_feature (6)..(100): NCBI GI: 85083190 Blast Desc: NCU04502 [Neurospora crassa OR74A] gi|28918155|gb|EAA27835.1| [Neurospora crassa OR74A]
  misc_feature (3)..(100): NCBI GI: 261352869 Blast Desc: [Verticillium albo-atrum VaMs.102]
  misc_feature (7)..(95): NCBI GI: 256722005 Blast Desc: NECHADRAFT_73741 [Nectria haematococca mpVI 77-13-4]
  misc_feature (2)..(97): NCBI GI: 146324319 Blast Desc: conserved [Aspergillus fumigatus Af293] gi|129556251|gb|EAL85698.2| conserved [Aspergillus fumigatus Af293] gi|159122519|gb|EDP47640.1| conserved [Aspergillus A1163]
  misc_feature (2)..(97): NCBI GI: 119467486 Blast Desc: NFIA_049930 [Neosartorya fischeri NRRL 181] gi|119405701|gb|EAW15652.1| conserved [Neosartorya fischeri NRRL 181]
  misc_feature (5)..(100): NCBI GI: 171691376 Blast Desc: protein product [Podospora anserina] gi|170945636|emb|CAP71749.1| protein product [Podospora anserina]
  misc_feature (2)..(94): NCBI GI: 212529098 Blast Desc: conserved [Penicillium marneffei ATCC 18224] gi|210074104|gb|EEA28191.1| conserved [Penicillium marneffei ATCC 18224]
  misc_feature (2)..(94): NCBI GI: 212529096 Blast Desc: conserved [Penicillium marneffei ATCC 18224] gi|210074103|gb|EEA28190.1| conserved [Penicillium marneffei ATCC 18224]
  misc_feature (5)..(99): NCBI GI: 116195374 Blast Desc: [Chaetomium globosum CBS 148.51] gi|88180198|gb|EAQ87666.1| [Chaetomium globosum CBS 148.51]
  misc_feature (2)..(100): NCBI GI: 242764487 Blast Desc: conserved [Talaromyces stipitatus ATCC 10500] gi|218723981|gb|EED23398.1| conserved [Talaromyces stipitatus ATCC 10500]
  misc_feature: Useful for introducing or modulating the production of volatile compounds
MPSNTRPFTTTSQVHPGHLPTLYRTGRMEKKLATATVAAVGIGYGLAKYKEFQTQQGYANAESEAARRRQAEAMMDAYSDRSSLAELEAAVAAYETQRKN

SEQ ID NO: 12260 - DNA, 1663 bp, Muscodor strobelii
  misc_feature: SGI EST ID NO. CUFF.31452.1
  misc_feature: Variant of the nucleotide sequence at SEQ ID NO 12258
aacgttgccgcgttgtctgaccattttcatcggtccctgcatgcagtttcctacgtcgtagactaataaataaggcggatggtcccggggtgacatgcaacacatattgattcgccctttccagcattacataaaagttccttagtcccaaccttggtccgggttccggattctcgtcgactacctagttcccgtcgttctagatttagtattccaagttctcaagcttgaagctcttccccacctaagctacagcccaagcctcttcactggctctagctcttgtattgaccgaggtcgtattttctcatacacggaacgtcgccactcatccagatcacatcacgaaactcgggtccgtggcagaaaatctgctgcaagcgcacgataccgagaagcaaaggaagagaacatgccatcaaatactcgacctttcaccacaacatcacaagtccatccagggcatctaccgacgttatacagaactggacgcatggagaagaaacttgcaacagcaacagtagcagccgtaggcatcggtcagtgacacagactcacattcgggccagcgaagaccgaattacaaacgagacttgcaatcaaactaatacagaatcaggctacggactggcaaagtacaaagaattccaaacacagcaaggatacgcaaacgcagagtccgaagcagcgcgtcgccgacaagccgaggctatgatggatgcctattcagaccggtcgagtctcgcggagcttgaggctgctgtggctgcttacgaaacgcaacggaagaactgatcaattacttgggaaaatgcctttgcatgcatggttttaaagagcacggcgtggcgatatcaaaaaggcgttgaattttggatagctcttgcagtttacgattccaagcacgtgtaacggaaaacggatagcggcgtttgggcattagcggtatggcaatttggtgtacgggctgggcatctacatgcgctactcattcgagctcttttctcatgattgtacgatcaacgattccattcctacctttcgtctcattgtttctgtgttaagtgtaggtttccggatgtgtgaatacctcggtactgaaaaccatgcgttagtggagcgcgggttgcatcggtagccggaatgttacgggcgttttttggacctaatatttagggtccattggattctgggcgaggctcgggagtcaatcgggcgctggttgtcacgatggaaaggataaaaatcggcggaatattgatcgagaccagaaaatgatgggtgaatgtccttcatgctttgttgagatatattataaccgcgtcgagccatcgtctacagtcagtccattggtcagaaataggacggaagttttcttagacggcagtcagaaccttgacacggtgccgaaggtttggttccggttgaatgccgggacctaccgtatataagtccaaccactatgtaatgaatatgtgttgatggccagattttcgatagtatgtatggctttatacgaaaaagatcatgatctgagttgcctttacttaatgctttccgcttagtgagtgggcttgaagatagaatataccatttagcctaagtgatgctatcgccttgagttcaccatgaaaggttacgaagtggcaggcggaaggagaag

SEQ ID NO: 12261 - DNA, 903 bp, Muscodor strobelii
  misc_feature: SGI cDNA ID NO. 563973
  misc_feature: Reduced expression when VOC is produced
  misc_feature: Encodes the peptide sequence at SEQ ID NO 12262
atggctgagacaaagcacacgagcaagacatacactctgccttcgggcgacaagttgccggccgtcggcctcggcacttggcagtctcccaaggagcagaccgtcaaggccgttcaagatgctcttgctgctggctacagatacattgacacggcatacgcctacggaaacgaggcagacgtcggcgagggcgtcaaggcctctggcgtaccccgggagcagatctggatcaccaccaaactcgacaacccctggcacaagcgcgtgactgaaggcatcgacgcttcgctcaagaatctgggcacggagtacgtcgacctgtacctcatgcactggccctgctctctggatcccgccgacaagacgggcaagacggcgtacagcgactggaacttcatcgacacttggcgcgagatgcagaagttgctcgacaccggcaaggtccgcaacatcggtgtttccaacttcagcatcaccaaccttgagaagcttctcaacgacccatcttgcaagatcaagcctgccgtcaatcaggtcgagctgcatcccaacaatccgtcccccaagctcatcgactactgcgccgagaagggtatccactgcactgcttactcctgtctcggcagcaccaactcgccactgtacaaggacgccactttgctagagcttgcggagaagaagggcaagacgccacagcaatgcctcctccagtggggcatccagcgaggttgtgatgtcatccccaagtctgtgaccaaggagcgtatcgaggccaacttcgcattggacgggtggtctctaacggaggaggagatgaccacgctgtcgaacctcaaggatcggtttaaggtgtgcggagatggctggctccctgatacgatcttccatggtgacgacgaatag

SEQ ID NO: 12262 - protein, 300 aa, Muscodor strobelii
  misc_feature: SGI Peptide ID NO. 563973
  misc_feature (13)..(280): Pfam Id: PF00248 Pfam Desc: Aldo/keto reductase family
  misc_feature (1)..(300): NCBI GI: 145239293 Blast Desc: An08g01740 [Aspergillus niger] gi|134076799|emb|CAK39854.1| protein product [Aspergillus niger]
  misc_feature (5)..(300): NCBI GI: 259488403 Blast Desc: TPA: conserved aldo-keto oxidoreductase, NADPH-dependent (Eurofung) [Aspergillus nidulans FGSC A4]
  misc_feature (7)..(300): NCBI GI: 156053145 Blast Desc: SS1G_06740 [Sclerotinia sclerotiorum 1980] gi|154704518|gb|EDO04257.1| SS1G_06740 [Sclerotinia sclerotiorum 1980]
  misc_feature (1)..(300): NCBI GI: 70995191 Blast Desc: glycerol dehydrogenase Gcy1 [Aspergillus fumigatus Af293] gi|66849995|gb|EAL90322.1| glycerol dehydrogenase Gcy1, [Aspergillus fumigatus Af293] gi|159131116|gb|EDP56229.1| Gcy1,
  misc_feature (1)..(300): NCBI GI: 119496001 Blast Desc: glycerol dehydrogenase Gcy1, [Neosartorya fischeri NRRL 181] gi|119412936|gb|EAW22877.1| glycerol dehydrogenase Gcy1, [Neosartorya fischeri NRRL 181]
  misc_feature (1)..(300): NCBI GI: 154318267 Blast Desc: BC1G_03301 [Botryotinia fuckeliana B05.10] gi|150842824|gb|EDN18017.1| BC1G_03301 [Botryotinia fuckeliana B05.10]
  misc_feature (5)..(300): NCBI GI: 255940270 Blast Desc: Pc16g05650 [Penicillium chrysogenum Wisconsin 54-1255] gi|211585527|emb|CAP93235.1| Pc16g05650 [Penicillium chrysogenum Wisconsin 54-1255]
  misc_feature (1)..(300): NCBI GI: 121702005 Blast Desc: glycerol dehydrogenase Gcy1, [Aspergillus clavatus NRRL 1] gi|119397410|gb|EAW07841.1| glycerol dehydrogenase Gcy1, [Aspergillus clavatus NRRL 1]
  misc_feature (1)..(300): NCBI GI: 261352911 Blast Desc: GCY [Verticillium albo-atrum VaMs.102]
  misc_feature (1)..(300): NCBI GI: 242767787 Blast Desc: glycerol dehydrogenase Gcy1, [Talaromyces stipitatus ATCC 10500] gi|218724633|gb|EED24050.1| glycerol dehydrogenase Gcy1, [Talaromyces stipitatus ATCC 10500]
  misc_feature (17)..(284): SWISSPROT Homolog: EC 1.1.1.263 1,5-anhydro-D-fructose reductase
  misc_feature: Useful for introducing or modulating the production of volatile compounds
MAETKHTSKTYTLPSGDKLPAVGLGTWQSPKEQTVKAVQDALAAGYRYIDTAYAYGNEADVGEGVKASGVPREQIWITTKLDNPWHKRVTEGIDASLKNLGTEYVDLYLMHWPCSLDPADKTGKTAYSDWNFIDTWREMQKLLDTGKVRNIGVSNFSITNLEKLLNDPSCKIKPAVNQVELHPNNPSPKLIDYCAEKGIHCTAYSCLGSTNSPLYKDATLLELAEKKGKTPQQCLLQWGIQRGCDVIPKSVTKERIEANFALDGWSLTEEEMTTLSNLKDRFKVCGDGWLPDTIFHGDDE

SEQ ID NO: 12263 - DNA, 564 bp, Muscodor strobelii
  misc_feature: SGI cDNA ID NO. 563974
  misc_feature: Reduced expression when VOC is produced
  misc_feature: Encodes the peptide sequence at SEQ ID NO 12264
atgtcaccattcgacccgaacccacctccagaatcttgccccttctgcttgatagctactacctatcccacatacccgccgacctctccaccctccgcctcaaccttatcaccatctctcctctcgccagcatcattcatcgttctctcaacgcccaccttaatcgcgttcctcgacataatgcctttatcccgaggccatttactcctctgtcctcgatctcacaaccccaagctctccgacgtatcccctcacgaagcgtccgaaatgggtctctacctacgaatcctctccaaagcgctgtcccgggcaacaggagtgtacgattggaacgtcgttcaaaataatggggctgctgctgctcaagtcgtggggcatgtccactatcacctgataccgagaccagagatacgcgccagtgggagatttagagagagttttaccatgttcggaaggggacagagagaggaattggatgatgacgaaggcgaagagttggctgcgaagctgagggagaatattgctgtgatattggatgaggaagcgaagaaggccaagatatga

SEQ ID NO: 12264 - protein, 187 aa, Muscodor strobelii
  misc_feature: SGI Peptide ID NO. 563974
  misc_feature (43)..(137): Pfam Id: PF01230 Pfam Desc: HIT domain
  misc_feature (45)..(137): Pfam Id: PF01230 Pfam Desc: HIT domain
  misc_feature (4)..(187): NCBI GI: 256723085 Blast Desc: NECHADRAFT_104626 [Nectria haematococca mpVI 77-13-4]
  misc_feature (12)..(187): NCBI GI: 261352910 Blast Desc: HIT domain-containing protein [Verticillium albo-atrum VaMs.102]
  misc_feature (6)..(185): NCBI GI: 39975507 Blast Desc: MGG_00100 [Magnaporthe grisea 70-15] gi|145019061|gb|EDK03340.1| MGG_00100 [Magnaporthe grisea 70-15]
  misc_feature (4)..(186): NCBI GI: 171691392 Blast Desc: protein product [Podospora anserina] gi|170945644|emb|CAP71757.1| protein product [Podospora anserina]
  misc_feature (12)..(187): NCBI GI: 156053147 Blast Desc: SS1G_06741 [Sclerotinia sclerotiorum 1980] gi|154704519|gb|EDO04258.1| SS1G_06741 [Sclerotinia sclerotiorum 1980]
  misc_feature (12)..(171): NCBI GI: 164429380 Blast Desc: NCU04509 [Neurospora crassa OR74A] gi|157073458|gb|EAA27684.2| NCU04509 [Neurospora crassa OR74A]
  misc_feature (4)..(186): NCBI GI: 255947592 Blast Desc: Pc22g05280 [Penicillium chrysogenum Wisconsin 54-1255] gi|211591580|emb|CAP97816.1| Pc22g05280 [Penicillium chrysogenum Wisconsin 54-1255]
  misc_feature (12)..(175): NCBI GI: 146323857 Blast Desc: HIT domain protein [Aspergillus fumigatus Af293] gi|129557501|gb|EAL89578.2| HIT domain protein [Aspergillus fumigatus Af293]
  misc_feature (12)..(186): NCBI GI: 238843789 Blast Desc: HIT domain-containing protein [Microsporum canis CBS 113480]
  misc_feature (12)..(175): NCBI GI: 159125459 Blast Desc: HIT domain protein [Aspergillus fumigatus A1163]
  misc_feature: Useful for introducing or modulating the production of volatile compounds
MSPFDPNPPPESCPFCLIATTYPTYPPTSPPSASTLSPSLLSPASFIVLSTPTLIAFLDIMPLSRGHLLLCPRSHNPKLSDVSPHEASEMGLYLRILSKALSRATGVYDWNVVQNNGAAAAQVVGHVHYHLIPRPEIRASGRFRESFTMFGRGQREELDDDEGEELAAKLRENIAVILDEEAKKAKI

SEQ ID NO: 12265 - DNA, 237 bp, Muscodor strobelii
  misc_feature: SGI cDNA ID NO. 563975
  misc_feature: Reduced expression when VOC is produced
  misc_feature: Encodes the peptide sequence at SEQ ID NO 12266
atgtcccgagaagcctaccagatcccgaccgcccagtccggctcttcggctcccggcggtggccaggccctgcgcaacttcgacgccaacgacaacgcgaccatcgcctacatctgcggcgactgcggcttcaagttccccctcaagcgctctgacgccatccgctgcaaggagtgcggctgtcgcattctctataaggagcgcactagacgaatggttcaatttgaggctcgatga

SEQ ID NO: 12266 - protein, 78 aa, Muscodor strobelii
  misc_feature: SGI Peptide ID NO. 563975
  misc_feature (37)..(68): Pfam Id: PF03604 Pfam Desc: DNA directed RNA polymerase, 7 kDa subunit
  misc_feature (1)..(78): NCBI GI: 261352909 Blast Desc: metallothionein-I gene transcription activator [Verticillium albo-atrum VaMs.102]
  misc_feature (1)..(78): NCBI GI: 225682721 Blast Desc: PABG_03236 [Paracoccidioides brasiliensis Pb03]
  misc_feature (1)..(78): NCBI GI: 226285221 Blast Desc: metallothionein-I gene transcription activator [Paracoccidioides brasiliensis Pb01]
  misc_feature (1)..(78): NCBI GI: 154287308 Blast Desc: [Ajellomyces capsulatus NAm1] gi|150408090|gb|EDN03631.1| [Ajellomyces capsulatus NAm1]
  misc_feature (1)..(78): NCBI GI: 225559787 Blast Desc: metallothionein-I gene transcription activator [Ajellomyces capsulatus G186AR] gi|240276339|gb|EER39851.1| metallothionein-I gene transcription activator [Ajellomyces H143]
  misc_feature (1)..(78): NCBI GI: 259481836 Blast Desc: TPA: metallothionein-I gene transcription activator (AFU_orthologue; AFUA_4G11970) [Aspergillus nidulans FGSC A4]
  misc_feature (1)..(78): NCBI GI: 145611814 Blast Desc: [Magnaporthe grisea 70-15] gi|145019060|gb|EDK03339.1| [Magnaporthe grisea 70-15]
  misc_feature (1)..(78): NCBI GI: 238486154 Blast Desc: metallothionein-I gene transcription activator [Aspergillus flavus NRRL3357] gi|220699194|gb|EED55533.1| metallothionein-I gene transcription activator [Aspergillus
  misc_feature (1)..(78): NCBI GI: 238843812 Blast Desc: metallothionein-I gene transcription activator [Microsporum canis CBS 113480]
  misc_feature (1)..(78): NCBI GI: 121708186 Blast Desc: metallothionein-I gene transcription activator [Aspergillus clavatus NRRL 1] gi|119400202|gb|EAW10628.1| metallothionein-I gene transcription activator [Aspergillus NRRL
  misc_feature: Useful for introducing or modulating the production of volatile compounds
MSREAYQIPTAQSGSSAPGGGQALRNFDANDNATIAYICGDCGFKFPLKRSDAIRCKECGCRILYKERTRRMVQFEAR

SEQ ID NO: 12267 - DNA, 5222 bp, Muscodor strobelii
  misc_feature: SGI EST ID NO. CUFF.31777.0
  misc_feature: Variant of the nucleotide sequence at SEQ ID NO 12265
gaatttgttggaatgacaagaacgaagcgaaatgtacctgattggaaagttacgagatgtgagaccgctcccatgggcgatcaatcatgcttgccatggcaaagtgtttgaggagagaaatcgtcactatcagattacaagcagacacttggaggagcagagaaaaaaattgactacaaactggagatcatgactctccgcgtcatgtttccacactgattcataccttgtgggcgcctataccattagatcaggattgtcggggcgatctccgagcactcaatacacaagactgcaactagtggtcctcccgatctaattgctcctcaatttcatgatctgttcggtagatggaacatccttttgttctcaacactcgaatgctcccagcttcccttcgccactgtgaatatacccattgagatcactttctgcgaagactgtgatatccagctttcattttcaatcggcgaccggacagtacagtacaacgcgacgctctattcatcatggctgagacaaagcacacgaggtaagaatttctatagaaagtttacatgccgtagcatacacctcaattcagatgctaaggtcctcacgctatacagcaagacatacactctgccttcgggcgacaagttgccggccgtcggcctcggcacttggcagtctcccaaggagcagaccgtcaaggccgttcaagatgctcttgctgctggctacagatacattgacacggcatacgcctacggaaacgaggcagacgtcggcgagggcgtcaaggcctctggcgtaccccgggagcagatctggatcaccaccaaactcgacaacccctggcacaagcgcgtgactgaaggcatcgacgcttcgctcaagaatctgggcacggagtacgtcgacctgtacctcatgcactggccctgctctctggatcccgccgacaagacgggcaagacggcgtacagcgactggaacttcatcgacacttggcgcgagatgcagaagttgctcgacaccggcaaggtccgcaacatcggtgtttccaacttcagcatcaccaaccttgagaagcttctcaacgacccatcttgcaagatcaagcctgccgtcaatcaggtcgagctgcatcccaacaatccgtcccccaagctcatcgactactgcgccgagaagggtatccactgcactgcttactcctgtctcggcagcaccaactcgccactgtacaaggacgccactttgctagagcttgcggagaagaagggcaagacgccacagcaatgcctcctccagtggggcatccagcgaggttgtgatgtcatccccaagtctgtgaccaaggagcgtatcgaggccaacttcgcattggacgggtggtctctaacggaggaggagatgaccacgctgtcgaacctcaaggatcggtttaaggtgtgcggagatggctggctccctgatacgatcttccatggtgacgacgaatagatggacgtattgaccagatagaagcgtggtcttcaagataaacagaacgtagaccggatgtcgaataaccgattaatcgatgtgtggcttggaaggatacatccattgatgcgtagataatagacacccaatcaagctcacgcgatgtccaagtctcgatactgtcccacgtgaccaagctgcacctcatatttcgtcttcttttaacctctttctcatatcttggccttcttcgcttcctcatccaatatcacagcaatattctccctcagcttcgcagccaactcttcgccttcgtcatcatccaattcctctctctgtccccttccgaacatggtaaaactctctctaaatctcccactggcgcgtatctctggtctcggtatcaggtgatagtggacatgccccacgacttgagcagcagcagccccattattttgaacgacgttccaatcgtacactcctgttgcccgggacagcgctttggagaggattcgtaggtagagacccatttcggacgcttcgtgaggggatacgtcggagagcttggggttgtgagatcgaggacagaggagtaaatggcctcgggataaaggcattatgtcgaggaacgcgattaaggtgggcgttgagagaacgatgaatgatgctggcgagaggagagatggtgataaggttgaggcggagggtggagaggtcggcgggtatgtgggataggtagtagctatcaagcagaaggggcaagattctggaggtgggttcgggtcgaatggtgacattgttgttgatatagacttaggttgaagttgataatgccgtcccttgcgtttgaatcttgcttctatttcacagagagctttaccgtgcagtccactcgaaatcgagagcgatacgatctttaggactgtaatacgtagaaagaaatgccacgacgccgtccgctgatgcaaagaggaaaatgaagtctcaacgaaaggaagatgtgagccctaccgcagactggaatgaagaaagaggaaatgcagggaaattagacatctttgcggactcgcaacgaaatcgggagtcggcgctcaatggtgtgtgagcctcggcgcgagttgggacggatgcgctagccaatcaatcgtcgtcgcattactgaagaagaggtacagaagtacccctaccatagagcgctgggtttgtgccccacttgaccgcctttttgctttcagagcgaaccagagtgtgtaatgctttcagacatcgtcgccgcgcagtcattacaaaccattcgcaactcaacctcaactcaccttgcaactcgctgtgcagtgcctcatcacaagcaacgaacatctccagcccagatcatcgcgcaaccatctacctatcaacaatcgcaaccggttagactaccgtatccaccttgccctaacgaacgcgaccatgtcccgagaagcctaccagatcccgaccgcccagtccggctcttcggctcccggcggtggccaggccctgcgcaacttcgacgccaacgacaacgcgaccatcgcctacatctgcggcgactgcggcttcaagttccccctcaagcgctctgacgccatccgctgcaaggagtgcggctgtcgcattctctataaggagcgcactagacgaatggttcaatttgaggctcgatgatcgatgatttcgtgtctatatgcgagctgcgaggtgcggaacaatgggcttggccatttgaggtttacgctatggtctcttcgggttgcaggttatatggcttttcggatgcacaggtggtcatgtatgtaaatgacagatgtgcatggtcgtgcggaagcccttacttgcagccgattacatcacccgactgcggaagcgatacagtgaggcagcagagaatgtgccaagagccatatcaggcgagtgggcgagagacgggaaatgcataggaacaggcgtcaggagttgatcactgcattatcatgtagtcagggactggtcatttgtttttgattcactggccagagaaaagaaaacagaaatggtatcaattgcgcctatctatgccttttcccaaccttgccttgccaaccatgctgtggaggtcatcattctcatgcttttgtcgttacatccaactccaacccggaagagtctatgcctgctcctgaaaaacacactcagcctcgtctctgttggtggagaaacttggcgaaagaggcctcgtccattgtcgagtcgacattggcctccatagctgcctgatatcgctgctgtagaccctcacggtcatactcatcgtccacatcgtcgtaatcgtcaccgccgtgctcatcatcactcgagacatcgtctgaatcctcattggtcgggtacttggggcccgcagagctgctgccggcctcggccgatcccatggacatgcccttcatcatcttgtcaagctcctgctgccgcgtcttcttcttcagctcttcgcgctcggcacgcttgcgctccagctcgggcagatagtctttcttgaactcctcggccttctcctgcacagctgtgaagaaatcatcgacaccggcgcccgtcatggaggagacgcctactacgctgaggtgggcgtagaactcttcaagcatggagctcatcgagttgagtaggctgcccatgtatcccgaccccgcgccctcgccctcgacgcctccgaacgcgttgccagcctcgtcgtcggcgagggcggcctggaaggcgtcgtagtcagtcatccactccttggcgaaggaggcgtccttgacgtcggtcttgttgaagacgaggatcatgggcagcttggtcttgtagaggatggagcaggcgtagagcatgttgctcatgaaggtgctggtcgaggcggtgcgcggcgtgtcgatgatgtaggcgatgacggtggggaaggaggacgcgatggactcgaggaggatctggcccgaggcagaccagacgaagacttcgatctgcccggctgtggtgtggtgtatatcgttagtcatggctcagagagagagagagagagagagagagaggtacgtacgggtatcgatgaggatgttcttgatgagcttcttgtcgggcttctccgggtcgggggcagtgcgcctctcgagcaggccgaggatctggtcgaccttggtggcgaagaggttgagcgaggtgaggatgccgccgttggggccgaggcggtactgcttcatgacctccttgtagttgaccgagtcgcggatgtcgatgttggactcgaagggcacgttgagcaccgccgggtcgaggttgatcacgtacggcggctccttctgcccgtgcaggtgggcgttgatgcgctgcatgaacgtcgtcttgcccgaccccgccatgcccacgcagacgatcgctaccggctgctggctgcccgacggcgtagacgtgctggtgctggtgctggcactggtctctgccattgtgatcctatgtgctggaggcaacgacgacgagtgtacgacgaaagacgaaggggaaaaagtccacgtccaggtaggtaggctgaattcatgtctagagctaacctgcataatgcggggtgtggggcgaggggcgaggggcagcagtagatggaggggcagactcagacaggcaggtgtcaaaataattggcactgcaccaaatactcagacacgtagcagaatatgaaatagcaaaacagataaggtacagataagatgtggacattctaataaaag

SEQ ID NO: 12268 - DNA, 1215 bp, Muscodor strobelii
  misc_feature: SGI cDNA ID NO. 563976
  misc_feature: Encodes the peptide sequence at SEQ ID NO 12269
atggcagagaccagtgccagcaccagcaccagcacgtctacgccgtcgggcagccagcagccggtagcgatcgtctgcgtgggcatggcggggtcgggcaagacgacgttcatgcagcgcatcaacgcccacctgcacgggcagaaggagccgccgtacgtgatcaacctcgacccggcggtgctcaacgtgcccttcgagtccaacatcgacatccgcgactcggtcaactacaaggaggtcatgaagcagtaccgcctcggccccaacggcggcatcctcacctcgctcaacctcttcgccaccaaggtcgaccagatcctcggcctgctcgagaggcgcactgcccccgacccggagaagcccgacaagaagctcatcaagaacatcctcatcgatacccccgggcagatcgaagtcttcgtctggtctgcctcgggccagatcctcctcgagtccatcgcgtcctccttccccaccgtcatcgcctacatcatcgacacgccgcgcaccgcctcgaccagcaccttcatgagcaacatgctctacgcctgctccatcctctacaagaccaagctgcccatgatcctcgtcttcaacaagaccgacgtcaaggacgcctccttcgccaaggagtggatgactgactacgacgccttccaggccgccctcgccgacgacgaggctggcaacgcgttcggaggcgtcgagggcgagggcgcggggtcgggatacatgggcagcctactcaactcgatgagctccatgcttgaagagttctacgcccacctcagcgtagtaggcgtctcctccatgacgggcgccggtgtcgatgatttcttcacagctgtgcaggagaaggccgaggagttcaagaaagactatctgcccgagctggagcgcaagcgtgccgagcgcgaagagctgaagaagaagacgcggcagcaggagcttgacaagatgatgaagggcatgtccatgggatcggccgaggccggcagcagctctgcgggccccaagtacccgaccaatgaggattcagacgatgtctcgagtgatgatgagcacggcggtgacgattacgacgatgtggacgatgagtatgaccgtgagggtctacagcagcgatatcaggcagctatggaggccaatgtcgactcgacaatggacgaggcctctttcgccaagtttctccaccaacagagacgaggctga

SEQ ID NO: 12269 - protein, 404 aa, Muscodor strobelii
  misc_feature: SGI Peptide ID NO. 563976
  misc_feature (26)..(290): Pfam Id: PF03029 Pfam Desc: Conserved ATP binding protein
  misc_feature (20)..(402): NCBI GI: 85082462 Blast Desc: NCU04507 [Neurospora crassa OR74A] gi|28917999|gb|EAA27682.1| NCU04507 [Neurospora crassa OR74A]
  misc_feature (7)..(402): NCBI GI: 256723084 Blast Desc: [Nectria haematococca mpVI 77-13-4]
  misc_feature (1)..(402): NCBI GI: 46116392 Blast Desc: FG04038.1 [Gibberella zeae PH-1]
  misc_feature (11)..(403): NCBI GI: 261352908 Blast Desc: XPA-binding protein [Verticillium albo-atrum VaMs.102]
  misc_feature (12)..(401): NCBI GI: 39975505 Blast Desc: MGG_00101 [Magnaporthe grisea 70-15] gi|145019059|gb|EDK03338.1| MGG_00101 [Magnaporthe grisea 70-15]
  misc_feature (21)..(399): NCBI GI: 159125428 Blast Desc: ATP binding protein, [Aspergillus fumigatus A1163]
  misc_feature (21)..(399): NCBI GI: 70993602 Blast Desc: ATP binding protein [Aspergillus fumigatus Af293] gi|66849282|gb|EAL89610.1| ATP binding protein, [Aspergillus fumigatus Af293]
  misc_feature (21)..(399): NCBI GI: 119500186 Blast Desc: ATP binding protein, [Neosartorya fischeri NRRL 181] gi|119415015|gb|EAW24953.1| ATP binding protein, [Neosartorya fischeri NRRL 181]
  misc_feature (18)..(381): NCBI GI: 212542365 Blast Desc: ATP binding protein, [Penicillium marneffei ATCC 18224] gi|210066244|gb|EEA20337.1| ATP binding protein, [Penicillium marneffei ATCC 18224]
  misc_feature (21)..(399): NCBI GI: 121708137 Blast Desc: ATP binding protein, [Aspergillus clavatus NRRL 1] gi|119400188|gb|EAW10614.1| ATP binding protein, [Aspergillus clavatus NRRL 1]
MAETSASTSTSTSTPSGSQQPVAIVCVGMAGSGKTTFMQRINAHLHGQKEPPYVINLDPAVLNVPFESNIDIRDSVNYKEVMKQYRLGPNGGILTSLNLFATKVDQILGLLERRTAPDPEKPDKKLIKNILIDTPGQIEVFVWSASGQILLESIASSFPTVIAYIIDTPRTASTSTFMSNMLYACSILYKTKLPMILVFNKTDVKDASFAKEWMTDYDAFQAALADDEAGNAFGGVEGEGAGSGYMGSLLNSMSSMLEEFYAHLSVVGVSSMTGAGVDDFFTAVQEKAEEFKKDYLPELERKRAEREELKKKTRQQELDKMMKGMSMGSAEAGSSSAGPKYPTNEDSDDVSSDDEHGGDDYDDVDDEYDREGLQQRYQAAMEANVDSTMDEASFAKFLHQQRRG

SEQ ID NO: 12270 - DNA, 2407 bp, Muscodor strobelii
  misc_feature: SGI EST ID NO. CUFF.31778.1
  misc_feature: Variant of the nucleotide sequence at SEQ ID NO 12268
ccgcattatgcaggttagctctagacatgaattcagcctacctacctggacgtggactttttccccttcgtctttcgtcgtacactcgtcgtcgttgcctccagcacataggatcacaatggcagagaccagtgccagcaccagcaccagcacgtctacgccgtcgggcagccagcagccggtagcgatcgtctgcgtgggcatggcggggtcgggcaagacgacgttcatgcagcgcatcaacgcccacctgcacgggcagaaggagccgccgtacgtgatcaacctcgacccggcggtgctcaacgtgcccttcgagtccaacatcgacatccgcgactcggtcaactacaaggaggtcatgaagcagtaccgcctcggccccaacggcggcatcctcacctcgctcaacctcttcgccaccaaggtcgaccagatcctcggcctgctcgagaggcgcactgcccccgacccggagaagcccgacaagaagctcatcaagaacatcctcatcgatacccccgggcagatcgaagtcttcgtctggtctgcctcgggccagatcctcctcgagtccatcgcgtcctccttccccaccgtcatcgcctacatcatcgacacgccgcgcaccgcctcgaccagcaccttcatgagcaacatgctctacgcctgctccatcctctacaagaccaagctgcccatgatcctcgtcttcaacaagaccgacgtcaaggacgcctccttcgccaaggagtggatgactgactacgacgccttccaggccgccctcgccgacgacgaggctggcaacgcgttcggaggcgtcgagggcgagggcgcggggtcgggatacatgggcagcctactcaactcgatgagctccatgcttgaagagttctacgcccacctcagcgtagtaggcgtctcctccatgacgggcgccggtgtcgatgatttcttcacagctgtgcaggagaaggccgaggagttcaagaaagactatctgcccgagctggagcgcaagcgtgccgagcgcgaagagctgaagaagaagacgcggcagcaggagcttgacaagatgatgaagggcatgtccatgggatcggccgaggccggcagcagctctgcgggccccaagtacccgaccaatgaggattcagacgatgtctcgagtgatgatgagcacggcggtgacgattacgacgatgtggacgatgagtatgaccgtgagggtctacagcagcgatatcaggcagctatggaggccaatgtcgactcgacaatggacgaggcctctttcgccaagtttctccaccaacagagacgaggctgagtgtgtttttcaggagcaggcatagactcttccgggttggagttggatgtaacgacaaaagcatgagaatgatgacctccacagcatggttggcaaggcaaggttgggaaaaggcatagataggcgcaattgataccatttctgttttcttttctctggccagtgaatcaaaaacaaatgaccagtccctgactacatgataatgcagtgatcaactcctgacgcctgttcctatgcatttcccgtctctcgcccactcgcctgatatggctcttggcacattctctgctgcctcactgtatcgcttccgcagtcgggtgatgtaatcggctgcaagtaagggcttccgcacgaccatgcacatctgtcatttacatacatgaccacctgtgcatccgaaaagccatataacctgcaacccgaagagaccatagcgtaaacctcaaatggccaagcccattgttccgcacctcgcagctcgcatatagacacgaaatcatcgatcatcgagcctcaaattgaaccattctgcagcaatgcaaggtcagcactcccttcttcaagtcgcgtcctagcctaaaaacaaagaaaaggcacatcagacataccgtctagtgcgctccttatagagaatgcgacagccgcactccttgcagcggatggcgtcagagcgcttgagggggaacttgaagccgcagtcgccgcagatgtaggcgatggtcgcgttgtcgttggcgtcgaagttgcgcagggcctggccaccgccgggagccgaagagccggactgggcggtcgggatctggtaggcttctcgggacatggtcgcgttcgttagggcaaggtggatacggtagtctaaccggttgcgattgttgataggtagatggttgcgcgatgatctgggctggagatgttcgttgcttgtgatgaggcactgcacagcgagttgcaaggtgagttgaggttgagttgcgaatggtttgtaatgactgcgcggcgacgatgtctgaaagcattacacactctggttcgctctgaaagcaaaaaggcggtcaagtggggcacaaacccagc

SEQ ID NO: 12271 - DNA, 927 bp, Muscodor strobelii
  misc_feature: SGI cDNA ID NO. 563977
  misc_feature: Encodes the peptide sequence at SEQ ID NO 12272
atggcgactcctaaagaccttaccggattccatctctaccccaaactccctatggagatcaagctgatgatttgggccttctatcgtcaagatcaacacccaatctggcacttgatgtttctgactcccaaaggccgtatctatgctgcgcaagacgtcaagactctacgtatagccgagtcgacagcgcgcaccgctgctaccgactcaaggaaaggatcaacacctcttgaccccgaagagtacgacatccgactcacgaactgctcaaaagtcgcagcaagtgcagtcacattcggcggtaatcttgtagatgtgattgtcaacccaggccttcttgggagatacaattacaatcgatcgtttgactggcaacccaagcaaccaactcactcatgggtcaattttggtaaagacgttttcattattggctctgcatatcgtcatcctggacgactccgattcctctttgatcacgttggacatgcggtacctaaggatcttgcagaagaccactgggctcgccgcattcaagttttggccatgttcgtgtcgccctacgacgacttatttctatctgatcttgatcggcgggcttttactcagatcgagtctctccgaaaggtcgtcctcattactcatcttttgcgactaggagacttgatcggtcagcctgaagaacacaagagatctggccggttgttcaatgaaagacatgcacagcatggagctacgatggaagcctctaagcgtactgttcgtcaagagaatgtcaatgctaagtctctccgcagcgaacttgaacggctctttgccgaaacgaaccgccacggaaaggtgaaagttaccataattacgaaaaaatctaaggagtctgcctctggtcctcaggtttcacagcgcatcaagtcagtgatgcgggcttga

SEQ ID NO: 12272 - protein, 308 aa, Muscodor strobelii
  misc_feature: SGI Peptide ID NO. 563977
MATPKDLTGFHLYPKLPMEIKLMIWAFYRQDQHPIWHLMFLTPKGRIYAAQDVKTLRIAESTARTAATDSRKGSTPLDPEEYDIRLTNCSKVAASAVTFGGNLVDVIVNPGLLGRYNYNRSFDWQPKQPTHSWVNFGKDVFIIGSAYRHPGRLRFLFDHVGHAVPKDLAEDHWARRIQVLAMFVSPYDDLFLSDLDRRAFTQIESLRKVVLITHLLRLGDLIGQPEEHKRSGRLFNERHAQHGATMEASKRTVRQENVNAKSLRSELERLFAETNRHGKVKVTIITKKSKESASGPQVSQRIKSVMRA

SEQ ID NO: 12273 - DNA, 711 bp, Muscodor strobelii
  misc_feature: SGI cDNA ID NO. 563978
  misc_feature: Encodes the peptide sequence at SEQ ID NO 12274
atgtgcgtcgacattgactgtgtctcgtaccctaattgcggccacgaagtcaacttctacaacaaggattcgcgcttctgtctcttcagaactcctatgcacggcaaggaagcaaaagacatcgacttccacgtcgtgaactctcaattctctacaataaagaacgtttgtccaaaatgcatgacaaagtacaaccttgggcaagaatcccgtgacaatggcaccaaactcccgcgccttcagtttctcgagaaggttgatgaggtgtactttgcgactggggacggaaagtccgcccggtcgggcggcgaggaggttgccgccgctaagaaggccttagcagagctcaccaaggagaagcttgccgaactccaacagaccgtggagaagaacgttcatcggactctgactgctgtcaagggagatcccaaggataaggagaagagcgttcagagggcgactccgggcgctaagtgcgacctactcaaggcaatccttagcctgcctgatgtattcaacaagagggcgctcgtgcgcaactttggtactaactacggggtagttaaggagccctgggaggcgaagcgcgtgagcgccctcgctcgtaaggcaggactctggcaagtactccacgaagggtggaatcataacctgcagtcacacggagcagtacctgagaaatgggttgacccagttcatagtaatacctag

SEQ ID NO: 12274 - protein, 236 aa, Muscodor strobelii
  misc_feature: SGI Peptide ID NO. 563978
MCVDIDCVSYPNCGHEVNFYNKDSRFCLFRTPMHGKEAKDIDFHVVNSQFSTIKNVCPKCMTKYNLGQESRDNGTKLPRLQFLEKVDEVYFATGDGKSARSGGEEVAAAKKALAELTKEKLAELQQTVEKNVHRTLTAVKGDPKDKEKSVQRATPGAKCDLLKAILSLPDVFNKRALVRNFGTNYGVVKEPWEAKRVSALARKAGLWQVLHEGWNHNLQSHGAVPEKWVDPVHSNT

SEQ ID NO: 12275 - DNA, 1557 bp, Muscodor strobelii
  misc_feature: SGI cDNA ID NO. 563979
  misc_feature: Reduced expression when VOC is produced
  misc_feature: Encodes the peptide sequence at SEQ ID NO 12276
atgtattctccgtccctgatccgtttaacaggcgtccttccctgtgtgctagccggccttccagctgctcttgcgcagaacagcaccaacaactggccatggcagatttataagtccagcgctgcagagcctcccttgctgaacatatctaagtcgggcccaacttctcccggctatctttttttcgaccagaatggagattatgcccaccagtacagtctgttcatcatgactgacgataacgagcttgtgtggcagagtccattgggcgattacagcgccttcagagcccagacatttgaaggaaggtccgttttgacctttatgaacgggatcactctatccgagccgtacggtttcggctacggcatcatccagctcctggatgattcatacgagagtatctacaatgtgtcattgacggcggccgaggagaacttcgtgacgatccctgagcttaacgctaccgagttatactcatacttagatatgcacgaagcccgcatcaccccccaggacaccattctcgtcaccgagtacaacgtaaccaagcaagatctaggtactatcggtggaacggtagatggatgggtagtagatagcctcttctacgaactagacatcaaaaccaacgagatactctttcgatggagcgcattggaccaccttagtgcgataccgttctcggacgagattcaattcaggcctctttctgacagtggcaagaaccaatctctaccatacggcttttttcacatcaactccgtagacaagtttaaggatggatcatatctggtatcctcgcgctattactgctccattttccgggtttctcgagatggaacaatcgagtggacactacagggtcaaacgggaggtgatttcaagctcggtaatggcgcttccttctgttaccagcacgacgctcgcattctgcgtgaaaacggcacaaatgtgcatatcagcctcttcgataacgccaactcgaatatcgtctcaggcgtgaaccagacgcgtggtctctaccttgcccttgacatcgcaacgggtgaggtaacgctagaccaggccttcttcgacccgaacgataccgtctacgctctgtcgcagggcaacactcaaaagctgcccgacggccacgttgtgatgggctacggctccacgcccaagatccgcgagtatgatccgtcgggcgtccccatcatgaccgctcagtttggacctggtgacagcaaggtcttctcctaccgcgcctaccggattccctgggtcggacggccgaagacggccccagacgtcttcgcctgcgccaacggggcacgaaaccatacccaggtctacatgagctggaacggcgcgaccgagcatgcgtcctgggaggttttgactggcccagccaattcctctctcactcgtgctgctcgggtgcgaaagactgggtttgagacggtgacttccgtgccggggctggcaccatatattcaggctgaggcgcacggcgcgaacggcacttggatggcatcgtctttagtcatcgtgccacggagtagctgctag

SEQ ID NO: 12276 - protein, 518 aa, Muscodor strobelii
  misc_feature: SGI Peptide ID NO. 563979
  misc_feature (15)..(518): NCBI GI: 255950132 Blast Desc: Pc22g19300 [Penicillium chrysogenum Wisconsin 54-1255] gi|211592850|emb|CAP99218.1| Pc22g19300 [Penicillium chrysogenum Wisconsin 54-1255]
  misc_feature (17)..(515): NCBI GI: 115401050 Blast Desc: [Aspergillus terreus NIH2624] gi|114190054|gb|EAU31754.1| [Aspergillus terreus NIH2624]
  misc_feature (60)..(500): NCBI GI: 189188720 Blast Desc: conserved [Pyrenophora tritici-repentis Pt-1C-BFP] gi|187972305|gb|EDU39804.1| conserved [Pyrenophora tritici-repentis Pt-1C-BFP]
  misc_feature (1)..(513): NCBI GI: 121713570 Blast Desc: conserved [Aspergillus clavatus NRRL 1] gi|119402549|gb|EAW12970.1| conserved [Aspergillus clavatus NRRL 1]
  misc_feature (1)..(483): NCBI GI: 169775373 Blast Desc: [Aspergillus oryzae RIB40] gi|83770017|dbj|BAE60152.1| protein product [Aspergillus oryzae]
  misc_feature (1)..(483): NCBI GI: 238495979 Blast Desc: conserved [Aspergillus flavus NRRL3357] gi|220694105|gb|EED50449.1| conserved [Aspergillus flavus NRRL3357]
  misc_feature (32)..(490): NCBI GI: 255931075 Blast Desc: Pc12g02000 [Penicillium chrysogenum Wisconsin 54-1255] gi|211581713|emb|CAP79827.1| Pc12g02000 [Penicillium chrysogenum Wisconsin 54-1255]
  misc_feature (2)..(513): NCBI GI: 115443062 Blast Desc: [Aspergillus terreus NIH2624] gi|114188207|gb|EAU29907.1| [Aspergillus terreus NIH2624]
  misc_feature (20)..(490): NCBI GI: 145254530 Blast Desc: An18g01950 [Aspergillus niger] gi|134084235|emb|CAK47267.1| protein product [Aspergillus niger]
  misc_feature (3)..(484): NCBI GI: 119173205 Blast Desc: CIMG_10119 [Coccidioides immitis RS]
  misc_feature: Useful for introducing or modulating the production of volatile compounds
MYSPSLIRLTGVLPCVLAGLPAALAQNSTNNWPWQIYKSSAAEPPLLNISKSGPTSPGYLFFDQNGDYAHQYSLFIMTDDNELVWQSPLGDYSAFRAQTFEGRSVLTFMNGITLSEPYGFGYGIIQLLDDSYESIYNVSLTAAEENFVTIPELNATELYSYLDMHEARITPQDTILVTEYNVTKQDLGTIGGTVDGWVVDSLFYELDIKTNEILFRWSALDHLSAIPFSDEIQFRPLSDSGKNQSLPYGFFHINSVDKFKDGSYLVSSRYYCSIFRVSRDGTIEWTLQGQTGGDFKLGNGASFCYQHDARILRENGTNVHISLFDNANSNIVSGVNQTRGLYLALDIATGEVTLDQAFFDPNDTVYALSQGNTQKLPDGHVVMGYGSTPKIREYDPSGVPIMTAQFGPGDSKVFSYRAYRIPWVGRPKTAPDVFACANGARNHTQVYMSWNGATEHASWEVLTGPANSSLTRAARVRKTGFETVTSVPGLAPYIQAEAHGANGTWMASSLVIVPRSSC

SEQ ID NO: 12277 - DNA, 867 bp, Muscodor strobelii
  misc_feature: SGI cDNA ID NO. 563980
  misc_feature: Encodes the peptide sequence at SEQ ID NO 12278
atgccaactgacacaacgcctctgcttccatccgacggctcccagcagcctcggggcgacagtcatccggtgactctacgagcttgtcattcgccatggaaatttatcggtcaaaagacgctgctcggtctccggatcatcattgcctcgtaccttgtggctgctgctggcgtgtgtcttgactacaagctgaaggagaaagacgaccacagcaattggcgtatcgtgtttgattttgacaccatgtctttcgccatacagctagcataccacatcatggccacgatctggacgggagtgcacacctttcaccctaccgaagagaacagcttcttcgcgccatcgaccaggatctgcaagaccgaagcatttgcattcagcatgttctacactgcggctactgtcatccccttcgtcaacggcttcctatattacgccgtccttctcccaactggacatggtggcttcgaggcccatcttcctctgcaccatccacacaacacagctggcgtcttctatgacccaggtaacatcaagattttcgccatcttgaacctgtggaccatcacgactcttgtcgcggcgctggaagtcattttcatgaacagcatccgacgtcagagaccggtgactgcccacattgctggcatcatgctcttgacaagtgctcttgccggttgggctgcactggggataccagcaacaggacatccgggactgttcttccttgatccggagaaaaccggctcagtgggtacatccatcgccggagctcttgttcttatcgctgtatctgctggtaccttgacatacatgtatggcctcactgccatgcgagaagcactgacggctgcaagtggttggtaa

SEQ ID NO: 12278 - protein, 288 aa, Muscodor strobelii
  misc_feature: SGI Peptide ID NO. 563980
  misc_feature (9)..(286): NCBI GI: 171691416 Blast Desc: protein product [Podospora anserina] gi|170945656|emb|CAP71769.1| protein product [Podospora anserina]
  misc_feature (3)..(287): NCBI GI: 85082513 Blast Desc: NCU04520 [Neurospora crassa OR74A] gi|28918012|gb|EAA27695.1| [Neurospora crassa OR74A]
  misc_feature (4)..(250): NCBI GI: 46116318 Blast Desc: FG04001.1 [Gibberella zeae PH-1]
  misc_feature (4)..(250): NCBI GI: 256723051 Blast Desc: NECHADRAFT_42516 [Nectria haematococca mpVI 77-13-4]
  misc_feature (3)..(287): NCBI GI: 154295738 Blast Desc: BC1G_12872 [Botryotinia fuckeliana B05.10] gi|150843905|gb|EDN19098.1| BC1G_12872 [Botryotinia fuckeliana B05.10]
  misc_feature (3)..(287): NCBI GI: 156061954 Blast Desc: SS1G_01091 [Sclerotinia sclerotiorum 1980] gi|154696429|gb|EDN96167.1| SS1G_01091 [Sclerotinia sclerotiorum 1980]
  misc_feature (122)..(285): NCBI GI: 261352920 Blast Desc: conserved [Verticillium albo-atrum VaMs.102]
  misc_feature (3)..(250): NCBI GI: 145611792 Blast Desc: MGG_00116 [Magnaporthe grisea 70-15] gi|145019040|gb|EDK03319.1| MGG_00116 [Magnaporthe grisea 70-15]
MPTDTTPLLPSDGSQQPRGDSHPVTLRACHSPWKFIGQKTLLGLRIIIASYLVAAAGVCLDYKLKEKDDHSNWRIVFDFDTMSFAIQLAYHIMATIWTGVHTFHPTEENSFFAPSTRICKTEAFAFSMFYTAATVIPFVNGFLYYAVLLPTGHGGFEAHLPLHHPHNTAGVFYDPGNIKIFAILNLWTITTLVAALEVIFMNSIRRQRPVTAHIAGIMLLTSALAGWAALGIPATGHPGLFFLDPEKTGSVGTSIAGALVLIAVSAGTLTYMYGLTAMREALTAASGW

SEQ ID NO: 12279 - DNA, 837 bp, Muscodor strobelii
  misc_feature: SGI cDNA ID NO. 563981
  misc_feature: Encodes the peptide sequence at SEQ ID NO 12280
atgttcaagcgctctttccgctccacggaccgagtcgaaaagtcggcgaagttgtcgaagaagtccaacgcggttcgcgatccccagaagctttcgaaactgcagcggtcgcttgaggagactctcccggtcaagaaaagcctcacttccccgatcgtgactctcgtcgtcggtcgcgaagggcgactgtttgcggcgcatgaggaggtcctggttcagtcgccgttcttcgagcgcgcctgccgagaccaataccttgaggcgcagaataagaggatttcgctcccagacgaggaacccgagattttctcggccatcctcgaatatctctacaagggtgactactacccccgcttgttgcacaataagcagcgcaactcttgggagctcgaggatgccgtggcatctccggaccccaacaaccctaacaaccgagctggccgcggggcctcagtcgaggctaccatgttcgtgtcaagcgtcggacaatacatccttcgggataccgtggtatattgcgctgcagaacgataccggctcgaggagctcaagcgcctgtctcttaggaagcagggtctgcagagtggaattgacgtcgggacaatcctgcgatccgcgcagtatgcttacgcccatacgcccgacacggactcgcggctccgcgctcattatctcgccttgattatccgatgtcgcaagacattcaagagaagcggaaccatgcaggccgagatggaacagggcggcaagctcttctttgacctgttcgtggccatgtgcaaccacctcgacgacgtcgtggacatgagcaatgctcgtacgcccaagacgatctaa

SEQ ID NO: 12280 - protein, 278 aa, Muscodor strobelii
  misc_feature: SGI Peptide ID NO. 563981
  misc_feature (53)..(111): Pfam Id: PF00651 Pfam Desc: BTB/POZ domain
  misc_feature (1)..(278): NCBI GI: 156061966 Blast Desc: SS1G_01097 [Sclerotinia sclerotiorum 1980] gi|154696435|gb|EDN96173.1| SS1G_01097 [Sclerotinia sclerotiorum 1980]
  misc_feature (1)..(278): NCBI GI: 154295762 Blast Desc: BC1G_12884 [Botryotinia fuckeliana B05.10] gi|150843917|gb|EDN19110.1| BC1G_12884 [Botryotinia fuckeliana B05.10]
  misc_feature (1)..(278): NCBI GI: 116195414 Blast Desc: CHGG_04305 [Chaetomium globosum CBS 148.51] gi|88180218|gb|EAQ87686.1| CHGG_04305 [Chaetomium globosum CBS 148.51]
  misc_feature (1)..(278): NCBI GI: 39975477 Blast Desc: MGG_00115 [Magnaporthe grisea 70-15] gi|145019041|gb|EDK03320.1| MGG_00115 [Magnaporthe grisea 70-15]
  misc_feature (8)..(278): NCBI GI: 171691418 Blast Desc: protein product [Podospora anserina] gi|170945657|emb|CAP71770.1| protein product [Podospora anserina]
  misc_feature (31)..(278): NCBI GI: 46116320 Blast Desc: FG04002.1 [Gibberella zeae PH-1]
  misc_feature (31)..(278): NCBI GI: 256723052 Blast Desc: [Nectria haematococca mpVI 77-13-4]
  misc_feature (1)..(278): NCBI GI: 85082517 Blast Desc: NCU04521 [Neurospora crassa OR74A] gi|28918013|gb|EAA27696.1| conserved [Neurospora crassa OR74A]
  misc_feature (1)..(278): NCBI GI: 261201099 Blast Desc: conserved [Ajellomyces dermatitidis SLH14081] gi|239594022|gb|EEQ76603.1| conserved [Ajellomyces dermatitidis SLH14081] gi|239607104|gb|EEQ84091.1| conserved [Ajellomyces
  misc_feature (1)..(278): NCBI GI: 240278948 Blast Desc: conserved [Ajellomyces capsulatus H143]
MFKRSFRSTDRVEKSAKLSKKSNAVRDPQKLSKLQRSLEETLPVKKSLTSPIVTLVVGREGRLFAAHEEVLVQSPFFERACRDQYLEAQNKRISLPDEEPEIFSAILEYLYKGDYYPRLLHNKQRNSWELEDAVASPDPNNPNNRAGRGASVEATMFVSSVGQYILRDTVVYCAAERYRLEELKRLSLRKQGLQSGIDVGTILRSAQYAYAHTPDTDSRLRAHYLALIIRCRKTFKRSGTMQAEMEQGGKLFFDLFVAMCNHLDDVVDMSNARTPKTI

SEQ ID NO: 12281 - DNA, 2575 bp, Muscodor strobelii
  misc_feature: SGI EST ID NO. CUFF.31817.0
  misc_feature: Variant of the nucleotide sequence at SEQ ID NO 12279
attctacccccctttcttttgttctccctcccccaccacaaccatcaagaggtcgcaaagcatttgggatatctccagatacattcgtttgttcttccgaatcgactctgggatacaccgcccggacccttgtcaatcattttttgtgtgtccaactcatcacactctctccaccccccttcgctcttcccctccgtctcggctctccgaatttcctatagacataaatacacgttcttttcgtcgctctctggtcaattagtactttctaggacaagcagcagtcacctgtctcttttcctgattttatagcatcgcggatcgatatcgcatcccctaaccccacgttgtctcgattttctttacagcttccactctcaaccaccgtcaacatgttcaagcgctctttccgctccacggaccgagtcgaaaagtcggcgaagttgtcgaagaagtccaacgcggttcgcgatccccagaagctttcgaaactgcagcggtcgcttgaggagactctcccggtcaagaaaagcctcacttccccgatcgtgactctcgtcgtcggtcgcgaagggcgactgtttgcggcgcatgaggaggtcctggttcagtcgccgttcttcgagcgcgcctgccgagaccaataccttgaggcgcagaataagaggatttcgctcccagacgaggaacccgagattttctcggccatcctcgaatatctctacaagggtgactactacccccgcttgttgcacaataagcagcgcaactcttgggagctcgaggatgccgtggcatctccggaccccaacaaccctaacaaccgagctggccgcggggcctcagtcgaggctaccatgttcgtgtcaagcgtcggacaatacatccttcgggataccgtggtatattgcgctgcagaacgataccggctcgaggagctcaagcgcctgtctcttaggaagcagggtctgcagagtggaattgacgtcgggacaatcctgcgatccgcgcagtatgcttacgcccatacgcccgacacggactcgcggctccgcgctcattatctcgccttgattatccgatgtcgcaagacattcaagagaagcggaaccatgcaggccgagatggaacagggcggcaagctcttctttgacctgttcgtggccatgtgcaaccacctcgacgacgtcgtggacatgagcaatgctcgtacgcccaagacgatctaagagagttaggttgtgctgtttccgccatttggaggacgcagtagaaaacacatgcaccccatgactaatggtcctttcctggaatttgtgctgctatggatgctatttttgtgttttctaggcgaaggataccggatctcgtttgagtacgactaagcaggcgttctttgatttgttttccacgagtctgcttcattttgtcgccccgttgattcgatctctcccaagaaacttctcagcttcatcatcaagattggaaacatacaccatttgggagagaagactactacgacaaccaacaccagattgctgcagcagacgatatcatctccacttcttcactgaggttttggccgaaaccaatttttgaatgacgaattttttactgagttgctttgaggaagtgtttcgagagggctgtacggaagaaacagtacacaagggattacaatcaccgaaacacccatctttacccttggcgacccgtcttcctaatgaccctgaagacgcaactccatacacaccacacaggccagcggcctctccgcggcttcggaccggtttggttctacgcgattacacacttacccctagcgggaccgtagaaagcgcgaccaacggtatatcggtccaaggcaggcgggagggaaggagagttttttgtcgttaaaaactcaagattggcaaagattactatttgtcttttgcaactgcgttgcttgatttacgaatttctgtatttcggcaagcggggaggtcaaaggacgacacaggctggcgcgcctcttcgctgccatttgatatcaacccacccatctcttttgtgccaacaacaataacaccaccaagggaaatgacaagcaagaaaaatctttcaaagagaggcaccgctgacttctcgaccgcaaaaaaaagaacccataaataaacactgaaaaaaaacacgcatatgatgttctggtcaaatttggttacgctccacaacagattgttatatgagggtgttttttactagacccctggacactgcatggttccgctagcgctggctagcatctacgatctttacttttccctcggagagaggaatcagaggatagatgtagggagatctttctggtcctgtggatcagctagtatagatctggacactgcgctcttcggagtgtccgtgtacccgtacccgagcatgagtgcggtcttggcgcgataattgagagattcggccagcatattttaattttattgcgtgtgagaaagtgagtgtgaatgtgatatttcgtcggcttcactcgatggctcttagagttcagactattgaacgaagcgattattgttgatttccg

SEQ ID NO: 12282 - DNA, 900 bp, Muscodor strobelii
  misc_feature: SGI cDNA ID NO. 563982
  misc_feature: Encodes the peptide sequence at SEQ ID NO 12283
atgacatacactcgggtttcctcagatgacgacagcctagtaggtgacgtcgagtctcgtttgctacccgagaaggtcaatagctataatccaaagatacctcggagctggctcacgagacatctcactatcactcaagtatacgtcgtagtgcttcacattgtgacccttattctagctgggctcctctggagcagtcaccaaagcggttggcctagaataataaaagggccgtcctggtcccccgtgaaccaattcatcagatatgagatccaagacaaatacccaaaagacgtacatcaaaagaaaacgtactggggtccgccttcggacgagcaagacgcggcatgggacaatttagtcaaatccgtctacttcaacgcaacacgcgaggaactagagagggccggggagtcctttgacatgatcgcagaacttgccggcggaggataccccgcagccttaggcgtccaccacgatttacactgcgtgcgcaatctacgcctttacctctaccgcgaacgttactaccccagtatcactgaaacgcagcacgcctctctccgaggccatcttgatcactgtctcgaaatccttcgcagatccgtctcgtgcaccggtagcacgactgttcacactttcgtgtggccagatgcggatgccgaaacgcccataacacagtcaaacgcacgctcaaaatgtgttagctggtcctcgattgaggattggtccttgtcgcgtatggtccctctcatccccggcgaccgccaacgcgcggagttgaataacaacgacggcaacggcgataatgaagggatcttgcccgcccgcatccgcatcgtgcctgaatggcttgctgttgagggcgggttcaagcgccctccaaagaaagtcgactga

SEQ ID NO: 12283 - protein, 299 aa, Muscodor strobelii
  misc_feature: SGI Peptide ID NO. 563982
  misc_feature (47)..(251): NCBI GI: 238501772 Blast Desc: conserved [Aspergillus flavus NRRL3357] gi|220692357|gb|EED48704.1| conserved [Aspergillus flavus NRRL3357]
  misc_feature (47)..(251): NCBI GI: 169769306 Blast Desc: [Aspergillus oryzae RIB40] gi|83766981|dbj|BAE57121.1| protein product [Aspergillus oryzae]
  misc_feature (47)..(251): NCBI GI: 67900556 Blast Desc: AN7265.2 [Aspergillus nidulans FGSC A4] gi|40741946|gb|EAA61136.1| AN7265.2 [Aspergillus nidulans FGSC A4] gi|259483389|tpe|CBF78739.1| TPA: conserved [Aspergillus FGSC
  misc_feature (80)..(249): NCBI GI: 169602899 Blast Desc: SNOG_04454 [Phaeosphaeria nodorum SN15] gi|160706284|gb|EAT88214.2| SNOG_04454 [Phaeosphaeria nodorum SN15]
  misc_feature (40)..(254): NCBI GI: 154279258 Blast Desc: [Ajellomyces capsulatus NAm1] gi|150412385|gb|EDN07772.1| [Ajellomyces capsulatus NAm1]
  misc_feature (48)..(254): NCBI GI: 225680940 Blast Desc: conserved [Paracoccidioides brasiliensis Pb03]
  misc_feature (107)..(254): NCBI GI: 28881151 Blast Desc: [Neurospora crassa]
  misc_feature (105)..(254): NCBI GI: 85079216 Blast Desc: NCU03374 [Neurospora crassa OR74A] gi|28917367|gb|EAA27073.1| [Neurospora crassa OR74A]
  misc_feature (108)..(255): NCBI GI: 39960105 Blast Desc: MGG_09381 [Magnaporthe grisea 70-15] gi|145014341|gb|EDJ98909.1| MGG_09381 [Magnaporthe grisea 70-15]
  misc_feature (11)..(252): NCBI GI: 116204067 Blast Desc: CHGG_09917 [Chaetomium globosum CBS 148.51] gi|88176045|gb|EAQ83513.1| CHGG_09917 [Chaetomium globosum CBS 148.51]
MTYTRVSSDDDSLVGDVESRLLPEKVNSYNPKIPRSWLTRHLTITQVYVVVLHIVTLILAGLLWSSHQSGWPRIIKGPSWSPVNQFIRYEIQDKYPKDVHQKKTYWGPPSDEQDAAWDNLVKSVYFNATREELERAGESFDMIAELAGGGYPAALGVHHDLHCVRNLRLYLYRERYYPSITETQHASLRGHLDHCLEILRRSVSCTGSTTVHTFVWPDADAETPITQSNARSKCVSWSSIEDWSLSRMVPLIPGDRQRAELNNNDGNGDNEGILPARIRIVPEWLAVEGGFKRPPKKVD

SEQ ID NO: 12284 - DNA, 519 bp, Muscodor strobelii
  misc_feature: SGI cDNA ID NO. 563983
  misc_feature: Encodes the peptide sequence at SEQ ID NO 12285
atgttctccgggctcgcaaacccgcggcaagcagccgcccagctgctcaacttcgccctgattctgtctacagcgttcatgatgtggaaaggactctcgatagcctccgactcgccctcgcccatcgtcgtcgtcctgtccggctcgatggagcccgccttccaacgcggcgacctgctgttcctctggaatcgaaacctgctggccgagaccgacgtcggagagattgtggtgtacaatgtgaagggcaaggacatccccatcgtccaccgcgtcgtgcgcaagtttgggacgggggaccacgcgaagctgttaaccaagggcgacaacaacctggcagacgacaccgagctctatgcacgtggccaggactacctcgagagacaggacatcatcggaagcgtcattgggtacataccgttcgtgggctacgtcactatcctgctcagcgagtacccctggctgaagactgtcatgctaggaatcatgggtctactggtggtgttgcagagggaatga

SEQ ID NO: 12285 - protein, 172 aa, Muscodor strobelii
  misc_feature: SGI Peptide ID NO. 563983
  misc_feature (44)..(109): Pfam Id: PF00717 Pfam Desc: Peptidase S24-like
  misc_feature (44)..(95): Pfam Id: PF00717 Pfam Desc: Peptidase S24-like
  misc_feature (1)..(172): NCBI GI: 46116314 Blast Desc: FG03999.1 [Gibberella zeae PH-1]
  misc_feature (1)..(172): NCBI GI: 156061956 Blast Desc: conserved [Sclerotinia sclerotiorum 1980] gi|154696430|gb|EDN96168.1| conserved [Sclerotinia sclerotiorum 1980]
  misc_feature (1)..(172): NCBI GI: 261352922 Blast Desc: microsomal signal peptidase 18 kDa subunit [Verticillium albo-atrum VaMs.102]
  misc_feature (1)..(172): NCBI GI: 256723133 Blast Desc: [Nectria haematococca mpVI 77-13-4]
  misc_feature (1)..(172): NCBI GI: 39975481 Blast Desc: conserved [Magnaporthe grisea 70-15] gi|145019043|gb|EDK03322.1| conserved [Magnaporthe grisea 70-15]
  misc_feature (1)..(172): NCBI GI: 116195410 Blast Desc: conserved [Chaetomium globosum CBS 148.51] gi|88180216|gb|EAQ87684.1| conserved [Chaetomium globosum CBS 148.51]
  misc_feature (1)..(172): NCBI GI: 85082509 Blast Desc: microsomal signal peptidase 18 kDa subunit [Neurospora crassa OR74A] gi|28918011|gb|EAA27694.1| microsomal signal peptidase 18 kDa subunit [Neurospora crassa OR74A]
  misc_feature (7)..(172): NCBI GI: 189205164 Blast Desc: microsomal signal peptidase 18 kDa subunit [Pyrenophora tritici-repentis Pt-1C-BFP] gi|187986016|gb|EDU51504.1| microsomal signal peptidase 18 kDa
  misc_feature (28)..(172): NCBI GI: 154295740 Blast Desc: conserved [Botryotinia fuckeliana B05.10] gi|150843906|gb|EDN19099.1| conserved [Botryotinia fuckeliana B05.10]
  misc_feature (1)..(172): NCBI GI: 171691414 Blast Desc: protein product [Podospora anserina] gi|170945655|emb|CAP71768.1| protein product [Podospora anserina]
MFSGLANPRQAAAQLLNFALILSTAFMMWKGLSIASDSPSPIVVVLSGSMEPAFQRGDLLFLWNRNLLAETDVGEIVVYNVKGKDIPIVHRVVRKFGTGDHAKLLTKGDNNLADDTELYARGQDYLERQDIIGSVIGYIPFVGYVTILLSEYPWLKTVMLGIMGLLVVLQRE

SEQ ID NO: 12286 - DNA, 4585 bp, Muscodor strobelii
  misc_feature: SGI EST ID NO. CUFF.29177.1
  misc_feature: Variant of the nucleotide sequence at SEQ ID NO 12284
ctagaaggtggctgtcttctagagtcttagcacttgcggtggctgacgggctggcggcaactgcccccacccagagtgttgaggacaccttccattcgcaagctgctatcattgcgcccactgcgcccgctgcaagctgcacaataagatcgcgaaacaccacaatctaccggagctgcgctcaacctttctacaactttcaccgagctatagcctcttgtccacctctccgagtgcaccatttcccacgccgccgcgatgttctccgggctcgcaaacccgcggcaagcagccgcccagctgctcaacttcgccctgattctgtctacagcgttcatgatgtggaaaggactctcgatagcctccgactcgccctcgcccatcgtcgtcgtcctgtccggctcgatggagcccgccttccaacgcggcgacctgctgttcctctggaatcgaaacctgctggccgagaccgacgtcggagagattgtggtgtacaatgtgaagggcaaggacatccccatcgtccaccgcgtcgtgcgcaagtttgggacgggggaccacgcgaagctgttaaccaagggcgacaacaacctggcagacgacaccgagctctatgcacgtggccaggactacctcgagagacaggacatcatcggaagcgtcattgggtacataccgttcgtgggctacgtcactatcctgctcagcgagtacccctggctgaagactgtcatgctaggaatcatgggtctactggtggtgttgcagagggaatgagcgttttgtttggtgtgcgcattgtacgtgttatgagagggaagacagaaatcaatgatacccagctttcgccccatcctcgttcgatgacagtgcctgtcacttctcatccttacctatctccccgaagtgacagactgttgaccgcggaaagagtcatgatgggatggcctttggactaagtactgaataaaacggcggataaacactgatacatagacgcatctgatcacctgtatcatgctcccaggagcataccgtatcacctcaagggggagccgaataagcgggccacttcgcgacaacctaccatatcatggctttattcttctaagatgcaccgtacgtgtctgtcgttctagtgttcgagacatctcaccactccattgttataattgctcgctctcgaccattctaccgctgcggtccgccctctatttcgccttgcgcggcactctactggagtctaccccgactgttctgctcttctacaagaatccaagctcagtctagagacatcacgtgttctccgtacgatttgtccgcttccataatatccctgagacaaggagaacattctgaccaccgtgggccagcttattatgtttcattctgtacataggatgagtatataaacgggtacttgatccgcccctaccccgtccaaacagacactctacatcacaagcccaataaccaaaataacaacagcacaatgttaagaacgtctttaatgggggataacggggtctactccatatacccgcggaattttgccaagaagcgctcaaaaaacagcctcgtccgcggcgtaagggcctgcgacatcacaacttcaaacccacgattcaattggacaccccaggaaaatcaaatattcctcaagtacattcgccgacaccttgaatgaatgccagctcctgccctggagcgactattgcatgagctcgatctagacgggtacgaacttatagtcacaaaagagacgaagaatgtctcaagaatcatcaaagacaaagtcaggggcaaatttgctagaatgcgcgatcaatatcccggtggccactggcctgctggtaaaccaaagccgatgatgacgagaacgaggggaacggttcccactgtccattggtgggatgaccttgatggtgtggatgaaaacgatgaagaggagagtgagaaaggttcggtgtacaaccctgaggatgaatcgacggaagacgatgatgaaccggagatcaaaagagaggacgaggctggaccgtcgcgcatcaaaggcaaagcaagaagcaataggagacttgccagtgcccaaacgcctgctaagcaacgaccggccaaacagaaggtgaaggagactacgtccgaagatccacgctacgctgcactactcaacttggtacgtgcgtgcgcagcgttggatgaggcatatgaaggggcggaggatgacaatgatcgttatctccagaatcaggctgtccttctgcagcggtactgcgcggggagattggatcgcatggacagggcgagagaggaggaacgtggtgagaaggagaagagtagagcgaagcgaaaagctacggtgaaggggaagggcgaggagagtcaggggctgtttgttgggctataagttgatttcaataattttcttgtggctcgtactttggtacgtagtggtgccaagttcctcatagctaggagcagttggtgttgctcctgttgcataggctacctgcaaccattgttgacaggcatatacaatggcgcctgcaatgaagcatacaatggttaccatcggagtccagctgttgattccttggacgctcatgtatgcttagctcgctcccgaaattcttgccaactgttatattcggttttcgtcggtctggtcgtttctatctggtctttgacgtggggtcttctcgactgcgttggcattgtcttctgcccttgtggtccgaccctcccttttgattattgatagaatttttcaatctataggcttttggcattgccaacgaattttcgatctttcgctgcggcgtcagcatgcatgaaagctgagccaccactctatgcaccctacgacaacctcaccaccggatcaccctatgtaccataatgtaccgtgagcggacagatatacatctttcttgacatgtttcgagtgcaacatttgactgcacattatccctgctactgtcaaatacctcgagatacctactcaaagaagttgtcgcatagaaaatcgaactatacgctactgcaagatgccctgcaacgttccagcttcggcggagtccgtccagcgaatagacggagctattcagcatggtcgcgattactcgcgcactacggggtaattttttttttggaaacgaatctaatatatcgttgcttgacagtgctcttcgcgaggtactcccgacccaacagaatcaatgtacgtgtgggacaagcttcacacgtattggctcgcttgatcggcacatacgccgacacaacgaagagccgcaacacccctgccctgtgtgcagcaagtaccaagactcgaatgcctttcacttgcgttaccatctggttcaatacattagacgtgtccaccgcaacgatgaagccttgatggcatgggcctctcagaggcagactcggcagactatcgctcgctctattcaacctcaacaccaagagcagcggtctcataccactcaagggaccgttcccggatctccgagttctttgcaggcactacctcaatttccttgcccgattgacggttgtcagagcatcggaatttttggctatctccgacagatggacttagatgagcatctcatgttataccacggcgttccgcttggcaacaatccggcatacgcccaatcggccttcgtgacccctatgttgatagatagttctcttgacccggttgtcggatatcaacaaccattcggacagtctgagttccttcagcctgaccaacatatggttttcaccgaagaaggccagcaagttcacgatatggcacagtggccttatatgggctacgagatgtaggaagagcttcaattcggcggaacgagcgaaggagcaaacttcgatgacatgcatgtcaattggcattagccgctagattccaaggctacagtttccgattcgtgcattttttgtacattgtcactgtagagtcaatcctttgaagctcgttggatcccgggggggtgaggttgtttcgttctgtcattaccataccagtctctcactacagctagtttaccaatacaccacgctcgcttcgacataagaactcattgtgacaagtctagcggtaatatgactgtactcctttagatcaggtatgggaattagatgatagatgtttaggtacagcgtggatgacgagcagtcttctcaaagtagtctcactacctaggagcaccttaaaaccgacatataattactcctcacagaatttcgaacatagtcgtcgtgtagttcctggcataggtgagaagttgtcgcaaagcaggagtagtagacatccgctagaatagggggtatcagcccttagctccagatccgcagatgacttcagctcgctttgcatgttcttttgcacgtgcgcttcgcaaaggagatgaaagtggtggagtatctcgctgtccctagagaatttcacgacgagcttggggattaaaaaaaccaagtcaacttcggcaagaccatcttcatcaagacctagatagccctctcttatcctaaacactcgacggttatcttcggcgccagattgagcaatggcttgcgt

SEQ ID NO: 12287 - DNA, 2397 bp, Muscodor strobelii
  misc_feature: SGI cDNA ID NO. 563984
  misc_feature: Encodes the peptide sequence at SEQ ID NO 12288
atgaaggaagacacgtatgcacttcagttcacgccatacgggaggcatgtcatttccgagcccctctccgaagaggaggcagtagaactgtcccaacagagatcaatagccgtctttgcaaattttaataagctgcagactatcgtcgagcggcacgaggaagtggtccggagacgatggcacaaaaagacacgggagcaacgtaagagattactcttgaacctatggccaaacatgtcgcccagtcatcgacctgacctcaaagcataccggacgtggtccggaacgttttctcggtcggggtcccaggcgctaaatgaagctcaccgagcgcgaatcgcacggtcttctagagaagcgtgcatgtggccgcatatcaacctcgaagacctgtgcgtaggagtcaccatgctgcaactgctcaacgcccgtggtcgaaactcgcctgccgagtttgctccttcggaccatctcagtctccaccttggtcgtgagaccaatatcctacctgagattacaaagtgcgatggaactgttactatgcagggttttatgccaggactgtacggcgttgtcagagtcgctgcaggaagcctagcttctctaagacctaaccgcgtccttcccgaatcagccaacgacggcctcgaagtcctagaggtccaggaacgcctactccgtttcctcgttgacttctgtgtggctattattccggataaagatctggcgaatacttcattcccagtcctgcccgagccacccgccttgatctcttccggtgctggtgagtggctatcggcatccaagctggcactggagtcaccttacatggcgcccaagaagatcgatctgaaccggctcagacaattggtccaagcgaaatgtctggaagccagagatcatctatgggccctaagggaagatcctgcatatttcgccgaattcgctgccgagtggtgggaacattgtcctgaaaggtggaactggtttgaaaaacaactagaagagttcatacagaaggatgagccttccacgtatcagaacacaggctatctagatgcgaatatgaagctacggtacatcctggagtaccgtttgatcagaagcgttgtgaaagtcagagtcaatgcgttctttcctgcaatgccatcagtgtcttctcactttattcacgggtttttcccacctgacagcgaagttgatggggaaggtggtgtctcggataacctagaggatgacctagaggacctcgtctccatgcttagtcatacgcgtctcgatgagctcagcaggactgaaacaactacttgcatgccaagaaccgttttaaactacaacgacgatctaatctggcattggactgagttctgcggcatcgacaatcgatatatagatattggctctatgtcgtgcgagctggatcggttgttactacgagaacaggcacagagagatcgtgtcacatctttctttgctcgtattgttgcagacgtggggctagtaggtgcaatcaagaatcagcttgcattggaattagggattggcgtgcatatatgggacaccgccggcctacggaattgggttcttcaacacgctggtcctttggcataccttcaagtgctaacaaacccattaagaatagataagaggcaacttcgcctaggcaaagatggtaatccgaaatctgggaatttttactacccagtcaatgagcgacggacaaagaagaacacggaggctatgcagcgcgcagaacgacatttggatatgttatgggacaaattcgatcgccacatgtctcaagagctacctgcagacagctggcgcgccttacaagagctcgcacccctgcaacgcgacatggagagaacaccagactggacagaagtggaggacatctcgcagcatacttgttctagtcaagagccaattgtcaatcttgacttcggccacaaggatgatgccaattacacaccggcgcccatttccagggagaaagtgaagacccgtggcgaggcagccaaggatagggaagggactgaaaccccgggcatcgaaagcaaggactcgtccataataaccccaagcttttctatcaagaagcgagcattcaaggccttctcgacactgttctataaaccctccatcaaccagcaacctggtgagcttgcctggggcgagttccttcatgcaatgagcgccattcatttcgagccagagaagctgtacggatctgtgtggcagttcactccacgagatgctcggctatatgagcgtcccatttcattccacgaacctcatcccagtggaaagctggcatttcaggttgctagacggtatggtcgacggcttacccgtacatatggtttaagtggagaatcattcgcgttagaatag

SEQ ID NO: 12288 - protein, 798 aa, Muscodor strobelii
  misc_feature: SGI Peptide ID NO. 563984
  misc_feature (47)..(797): NCBI GI: 119497731 Blast Desc: NFIA_032920 [Neosartorya fischeri NRRL 181] gi|119413787|gb|EAW23726.1| conserved [Neosartorya fischeri NRRL 181]
  misc_feature (20)..(797): NCBI GI: 169772749 Blast Desc: [Aspergillus oryzae RIB40] gi|83768704|dbj|BAE58841.1| protein product [Aspergillus oryzae]
  misc_feature (3)..(798): NCBI GI: 154292612 Blast Desc: BC1G_14632 [Botryotinia fuckeliana B05.10] gi|150845846|gb|EDN21039.1| BC1G_14632 [Botryotinia fuckeliana B05.10]
  misc_feature (116)..(798): NCBI GI: 154313145 Blast Desc: BC1G_05574 [Botryotinia fuckeliana B05.10] gi|150849659|gb|EDN24852.1| BC1G_05574 [Botryotinia fuckeliana B05.10]
  misc_feature (22)..(325): NCBI GI: 256720869 Blast Desc: NECHADRAFT_50192 [Nectria haematococca mpVI 77-13-4]
  misc_feature (472)..(798): NCBI GI: 85104094 Blast Desc: NCU01053 [Neurospora crassa OR74A] gi|18376176|emb|CAD21293.1| [Neurospora crassa] gi|28923213|gb|EAA32429.1| [Neurospora crassa OR74A]
  misc_feature (18)..(356): NCBI GI: 85104094 Blast Desc: NCU01053 [Neurospora crassa OR74A] gi|18376176|emb|CAD21293.1| [Neurospora crassa] gi|28923213|gb|EAA32429.1| [Neurospora crassa OR74A]
  misc_feature (23)..(322): NCBI GI: 261190512 Blast Desc: conserved [Ajellomyces dermatitidis SLH14081] gi|239591088|gb|EEQ73669.1| conserved [Ajellomyces dermatitidis SLH14081]
  misc_feature (23)..(322): NCBI GI: 239614778 Blast Desc: conserved [Ajellomyces dermatitidis ER-3]
  misc_feature (472)..(798): NCBI GI: 256720869 Blast Desc: NECHADRAFT_50192 [Nectria haematococca mpVI 77-13-4]
MKEDTYALQFTPYGRHVISEPLSEEEAVELSQQRSIAVFANFNKLQTIVERHEEVVRRRWHKKTREQRKRLLLNLWPNMSPSHRPDLKAYRTWSGTFSRSGSQALNEAHRARIARSSREACMWPHINLEDLCVGVTMLQLLNARGRNSPAEFAPSDHLSLHLGRETNILPEITKCDGTVTMQGFMPGLYGVVRVAAGSLASLRPNRVLPESANDGLEVLEVQERLLRFLVDFCVAIIPDKDLANTSFPVLPEPPALISSGAGEWLSASKLALESPYMAPKKIDLNRLRQLVQAKCLEARDHLWALREDPAYFAEFAAEWWEHCPERWNWFEKQLEEFIQKDEPSTYQNTGYLDANMKLRYILEYRLIRSVVKVRVNAFFPAMPSVSSHFIHGFFPPDSEVDGEGGVSDNLEDDLEDLVSMLSHTRLDELSRTETTTCMPRTVLNYNDDLIWHWTEFCGIDNRYIDIGSMSCELDRLLLREQAQRDRVTSFFARIVADVGLVGAIKNQLALELGIGVHIWDTAGLRNWVLQHAGPLAYLQVLTNPLRIDKRQLRLGKDGNPKSGNFYYPVNERRTKKNTEAMQRAERHLDMLWDKFDRHMSQELPADSWRALQELAPLQRDMERTPDWTEVEDISQHTCSSQEPIVNLDFGHKDDANYTPAPISREKVKTRGEAAKDREGTETPGIESKDSSIITPSFSIKKRAFKAFSTLFYKPSINQQPGELAWGEFLHAMSAIHFEPEKLYGSVWQFTPRDARLYERPISFHEPHPSGKLAFQVARRYGRRLTRTYGLSGESFALE

SEQ ID NO: 12289 - DNA, 3208 bp, Muscodor strobelii
  misc_feature: SGI EST ID NO. CUFF.29046.0
  misc_feature: Variant of the nucleotide sequence at SEQ ID NO 12287
cgcggacaggagactcttcaatgtgcaagagccggaacagctgcctgataggaaaacgctgtcttccaactcacaaagtgaagtgccctttctacaacagccgttcatctgatgtttttactacattgtcaaatcatcattccctcgtactagcaactggcacagtaggtgagtattactctgtcgcaaacaagttacaaccctgcttatacacaccgccgatgcgtgatgaaaaacccttgctagtatgcccgtttactctccgccggacctgggcgtccgcggtggactgtgcacgcgcaggctagtcaaggggctccggagcgtgttttccactcgcagtcaaaaaggcagagaaagagatctatctcgctatccattttatgtgccgtcacttgcccaatatgaaggaagacacgtatgcacttcagttcacgccatacgggaggcatgtcatttccgagcccctctccgaagaggaggcagtagaactgtcccaacagagatcaatagccgtctttgcaaattttaataagctgcagactatcgtcgagcggcacgaggaagtggtccggagacgatggcacaaaaagacacgggagcaacgtaagagattactcttgaacctatggccaaacatgtcgcccagtcatcgacctgacctcaaagcataccggacgtggtccggaacgttttctcggtcggggtcccaggcgctaaatgaagctcaccgagcgcgaatcgcacggtcttctagagaagcgtgcatgtggccgcatatcaacctcgaagacctgtgcgtaggagtcaccatgctgcaactgctcaacgcccgtggtcgaaactcgcctgccgagtttgctccttcggaccatctcagtctccaccttggtcgtgagaccaatatcctacctgagattacaaagtgcgatggaactgttactatgcagggttttatgccaggactgtacggcgttgtcagagtcgctgcaggaagcctagcttctctaagacctaaccgcgtccttcccgaatcagccaacgacggcctcgaagtcctagaggtccaggaacgcctactccgtttcctcgttgacttctgtgtggctattattccggataaagatctggcgaatacttcattcccagtcctgcccgagccacccgccttgatctcttccggtgctggtgagtggctatcggcatccaagctggcactggagtcaccttacatggcgcccaagaagatcgatctgaaccggctcagacaattggtccaagcgaaatgtctggaagccagagatcatctatgggccctaagggaagatcctgcatatttcgccgaattcgctgccgagtggtgggaacattgtcctgaaagggtgctaaattggcaacgaaaacaacacccttctatcactgaccctgactatgccaatatttattgggaccaacgcattgcgtaatatgctttgcgtacgaggatgttcttcagtggaactggtttgaaaaacaactagaagagttcatacagaaggatgagccttccacgtatcagaacacaggctatctagatgcgaatatgaagctacggtacatcctggagtaccgtttgatcagaagcgttgtgaaagtcagagtcaatgcgttctttcctgcaatgccatcagtgtcttctcactttattcacgggtttttcccacctgacagcgaagttgatggggaaggtggtgtctcggataacctagaggatgacctagaggacctcgtctccatgcttagtcatacgcgtctcgatgagctcagtgacgtaacttgccgcaaagtgttcccgtgggagctaaatcgagagtcaggcaggactgaaacaactacttgcatgccaagaaccgttttaaactacaacgacgatctaatctggcattggactgagttctgcggcatcgacaatcgatatatagatattggctctatgtcgtgcgagctggatcggttgttactacgagaacaggcacagagagatcgtgtcacatctttctttgctcgtattgttgcagacgtggggctagtaggtgcaatcaagaatcagcttgcattggtacgtgtagggagatcccgcacagcttttttctgatcgtgttccgaagacatcgtactaacttctttgtaattcaaaccacaagactttcaggaattagggattggcgtgcatatatgggacaccgccggcctacggaattgggttcttcaacacgctggtcctttggcataccttcaagtgctaacaaacccattaagaatagataagaggcaacttcgcctaggcaaagatggtaatccgaaatctgggaatttttactacccagtcaatgagcgacggacaaagaagaacacggaggctatgcagcgcgcagaacgacatttggatatgttatgggacaaattcgatcgccacatgtctcaagagctacctgcagacagctggcgcgccttacaagagctcgcacccctgcaacgcgacatggagagaacaccagactggacagaagtggaggacatctcgcagcatacttgttctagtcaagagccaattgtcaatcttgacttcggccacaaggatgatgccaattacacaccggcgcccatttccagggagaaagtgaagacccgtggcgaggcagccaaggatagggaagggactgaaaccccgggcatcgaaagcaaggactcgtccataataaccccaagcttttctatcaagaagcgagcattcaaggccttctcgacactgttctataaaccctccatcaaccagcaacctggtgagcttgcctggggcgagttccttcatgcaatgagcgccattcatttcgagccagagaagctgtacggatctgtgtggcagttcactccacgagatgctcggctatatgagcgtcccatttcattccacgaacctcatcccagtggaaagctggcatttcaggttgctagacggtatggtcgacggcttacccgtacatatggtttaagtggagaatcattcgcgttagaatagattccaatgagtgtttaggttcccctaggtaccgttgtgtattgactctgactaccgtctggatacctatctctataaagaacatgcgccgtcaaattcagaacatactattgagaaaggtcacctcaaaatctcgattgaaaactcggc

SEQ ID NO: 12290 - DNA, 1641 bp, Muscodor strobelii
  misc_feature: SGI cDNA ID NO. 563985
  misc_feature: Encodes the peptide sequence at SEQ ID NO 12291
atgaccgagtcaacttcgatatcagatgctaatgtgacaatcttcggcccgaatgtttacgtcttcgattcgagtatgccaatggcggctattcaagatacggtaaccgcaatatttaaacaaatggaagccaatgagtttggcagtgagcgctacgcattattcttcaagcctggcacgtacaacatcctcttcgatgttggattctacacccatgttgctggtttaggccggagtccgggtgacgtacagatcgatggaggtgtcaatgtgccagcgtattggatgcccagccggaatgcaacttgcaacttttggcggacctttgagaacttcaccatcaatgcatcatcatctaccaatcatacgactacaattgcggtatcacaagcagctccgattcggcgaatgcatatcaaaagctccggcggcctatggttatttcaagtcgacccagacacgggagcaggtggctgggcctcgggcggctttatggccgactcggtggttgattacacagtactgcctggatcccagcagcaatggctatcgcgaaataacaaatacggcaactgggcgaatggcgtatggaatatggtgttcgtgggtgacgctgatgcaccgagtcaagatggctttcctgcatctccatatacaactatcttgcaaacaccagtcattcgagagaagccatatatgttcgtcgccaaacaaggtcaattcgaagtattcaagcctgctctacaggtagatgccaggggtccgagttggctaggaggaaaaccaacaacaggcacttctctatccatcaataatttccatgtcgcaaagcccgatgatgctaccgctacaagtgtaaatgcggccttgagcacagggaaacacatcttgttcactcctggtatatataagcttgaagacgccatacgtgtcaccaaagccgacacgatcattctgggattgggccagccatctctcatccctatcaatgggcggtgtgcaatcatggtggatgacgtgagtggtgtcacgattgccggtttgatcatcgatgccggcgaggttccttcgccgagcctgatagaaattgggcccgaggcgagctgtgagaagcacgctgcaaatccaacgttcctttatgaccttacagtgagaaccgctgggaaatgcaaaaatgacgtgggcatcacgatcaacagcaacaatgtcgttggtgaccaattgtgggtatggcgcgcagaccacggtgaaggcgcagcttgggaattaaacccgacaagaaatggcattgtcgtcaacggggatgactcagaaatcccctacgatcccccgaatcaggagtcttggatgtgtggaaaaacgaatggcttcgcctcgtacaaagtcactgacaaggtgaaaaatcatgaagcttggggactgggtatctactcatacttccgcgattcgccttccaagttggagaatgcagttgaagtccctgctggtgatggaatcaaattgcatcatttgactacggtatggctgacagggaaactgggaagtgagatcacccatatagtcaatggggttggagatcgagtgtatgccaacagccccgagacggctatgcgacagactgtcaaggagtttccagcttaa

SEQ ID NO: 12291 - protein, 546 aa, Muscodor strobelii
  misc_feature: SGI Peptide ID NO. 563985
  misc_feature (1)..(544): NCBI GI: 115380108 Blast Desc: secreted protein [Stigmatella aurantiaca DW4/3-1] gi|115362884|gb|EAU62082.1| secreted protein [Stigmatella aurantiaca DW4/3-1]
  misc_feature (8)..(544): NCBI GI: 251795973 Blast Desc: S-layer domain protein [Paenibacillus sp. JDR-2] gi|247543599|gb|ACT00618.1| S-layer domain protein [Paenibacillus sp. JDR-2]
  misc_feature (4)..(434): NCBI GI: 115378098 Blast Desc: secreted protein [Stigmatella aurantiaca DW4/3-1] gi|115364885|gb|EAU63943.1| secreted protein [Stigmatella aurantiaca DW4/3-1]
  misc_feature (15)..(545): NCBI GI: 150017530 Blast Desc: coagulation factor 5/8 type domain-containing protein [Clostridium beijerinckii NCIMB 8052] gi|149903995|gb|ABR34828.1| coagulation factor 5/8 type domain protein [Clostridium NCIMB
  misc_feature (15)..(525): NCBI GI: 284031578 Blast Desc: coagulation factor 5/8 type domain protein [Kribbella flavida DSM 17836] gi|283810871|gb|ADB32710.1| coagulation factor 5/8 type domain protein [Kribbella flavida DSM 17836]
  misc_feature (15)..(525): NCBI GI: 271963538 Blast Desc: Sros_2003 [Streptosporangium roseum DSM 43021] gi|270506713|gb|ACZ84991.1| Sros_2003 [Streptosporangium roseum DSM 43021]
  misc_feature (15)..(522): NCBI GI: 254404662 Blast Desc: secreted protein [Streptomyces sviceus ATCC 29083] gi|197714120|gb|EDY58154.1| secreted protein [Streptomyces sviceus ATCC 29083]
  misc_feature (15)..(525): NCBI GI: 254394731 Blast Desc: conserved factor 5/8 type domain-containing protein [Streptomyces pristinaespiralis ATCC 25486] gi|197718464|gb|EDY62372.1| conserved factor 5/8 type protein
  misc_feature (15)..(545): NCBI GI: 239982906 Blast Desc: SalbJ_25969 [Streptomyces albus J1074]
  misc_feature (15)..(545): NCBI GI: 159898043 Blast Desc: coagulation factor 5/8 type domain-containing protein [Herpetosiphon aurantiacus ATCC 23779] gi|159891082|gb|ABX04162.1| coagulation factor 5/8 type domain
MTESTSISDANVTIFGPNVYVFDSSMPMAAIQDTVTAIFKQMEANEFGSERYALFFKPGTYNILFDVGFYTHVAGLGRSPGDVQIDGGVNVPAYWMPSRNATCNFWRTFENFTINASSSTNHTTTIAVSQAAPIRRMHIKSSGGLWLFQVDPDTGAGGWASGGFMADSVVDYTVLPGSQQQWLSRNNKYGNWANGVWNMVFVGDADAPSQDGFPASPYTTILQTPVIREKPYMFVAKQGQFEVFKPALQVDARGPSWLGGKPTTGTSLSINNFHVAKPDDATATSVNAALSTGKHILFTPGIYKLEDAIRVTKADTIILGLGQPSLIPINGRCAIMVDDVSGVTIAGLIIDAGEVPSPSLIEIGPEASCEKHAANPTFLYDLTVRTAGKCKNDVGITINSNNVVGDQLWVWRADHGEGAAWELNPTRNGIVVNGDDSEIPYDPPNQESWMCGKTNGFASYKVTDKVKNHEAWGLGIYSYFRDSPSKLENAVEVPAGDGIKLHHLTTVWLTGKLGSEITHIVNGVGDRVYANSPETAMRQTVKEFPA

SEQ ID NO: 12292 - DNA, 2697 bp, Muscodor strobelii
  misc_feature: SGI cDNA ID NO. 563986
  misc_feature: Encodes the peptide sequence at SEQ ID NO 12293
atgggtagacaagctgggacttgtcctagcacttccaggaccctcctgctgctgggtcttgccagtacagttcaaagcattggtctttcgcaatatgtcgatccgctgataggaactgagggaccagaacctggtggggctatcgctggaggtaatgcgtttcctggtgcggctctaccgtgggggatggtcaaagctggaatcgacacaagttttttgggacttcgtccgaatacttccaccgactgcaatgccggctatacgccgttgggcaatgtcactgctatcagtctgatgcatgtccatgggaccggtggtgtcccatcgtatgggctggtctcacagatgccgcttctgggaacacttcactctattgacctcacagacaataacacatatgctcaaaatcggtcgctcaaggaagaggctgcaagcgtggggtatttcacgacgactttgactaatcagatcaaaatcgagatcacagcatctaatcactcagcgtggatacgttatacctacccttcagccagttctcctgtgaatagcagcataacctatccagagcaagccagcgactatgatactgaacagaaggacgatgatatccatgttttggtcgacttaactcatgttctcccagcgcatgatgccaatgcgcaaagttacggtcaacagtacgctcgtggtgatatccacttgcgacaaggaccagatcaggcatcgtactttggaagtgcctcgtacactggcggttggagccagccagaaagtcacaaggtatacttctgttgtaactttagtatgcccagtggctcacctctaactccgaccaatgcttatgtgcaacctgttggcaagaatcgggttgatggagctggcacattctcttggaagtacgaccctattcctttgcagcatagcacgaacaagcctgctctaaggtctgacatggacctcaaatcttcagctggcaatcggatgggcattggtgccttattcagctggactaggactccagaagctagttcccagaaccgggacagcgtattagagacgaagacagggatctcatatatcagtgctgagcaggcctgtagctatatctacgaagagttacccgtaggtcatcgctttgaagacgttatcaatcaggctcgccaacaatgggagactaaagtcctcgacgcgattgaagttgttgatgataaaagcaacaccagctccaataacacccttaagaagatgctctataccgctctgtatcatagcgcgatcttgcccaccgacaagacgggggaaaatccttactggatatcgaatgagacattcccttactatgatgaccattacactctgtgggacacatataagactgtgatgcctatgtatcatttattttatacgaatacatactcgaaaatcgtgaaaggattgatcaatatattttcattcgagggctacctcccggccggccgatctcttaattggaacggcagagtacagggcggtacgcacgctgatcttgttatcggtgacgctttcgtaaagagcatcagtttccttggtgatcagaagggactatccgagctcggcgatatagactgggaagaagcttttaaagccgtcgttaacgacgccgaagttcttcccgacaggaacgccggtacaaatcagcccattgattcggttactttcgacggtgccaccaaggaaggccgaggtgctctagatgactatctaaccctcggctatatcacacgaaatcactcccgaagcgtttctcgtggtcttgagtactcacaagatgacttcgcgatctggacgatcgcacatggattgaacaagtctgccgagctaaccagccgttacctccagcgggcaagctggtgggagaaccaatggaacccttctgtgaactcctcattgggtgagtacggtgtcttcactgggtttgcagggcccagaaacgcggatgatcagttcaacactactgcgtacgatcccattatctgcaacggcggttgtagctgggctgatgacatttatgaggcgaaggtatgggaaacaagcttctctgcggctccacacgacatgtcgcgacttatccagctgatgggcggtgacgatgcgttcattaaacggctagacatttcttttatccccgggttaggaagcaccgtcggcgcaaacaacgatgcaggcacagccctcttcaatcccggcaacgaacctagcttcgccatgcctcacctgtacaattatgtaccaggaaaccagtggaagacggtcaagcgatcgcgcgaattggtagacacatatttttctgactttcgaaacggttatcccggcaatatcgacgctggagcgatcccgtcgtggctcatattccacctaattgggttctaccccattgttggtcaacccctataccttcttggcgccccccgattttctgctttaagattaagactatttatgaacacccctttcgagcgaaccttgttaattacagctaccggcctgtccgacgatagcttttatcctcaaaaagtgactttggatggtgcagtacttgatagagcctggctaagccataatgagctgacaaacgcgtcagagatcgtattcgagatggggcaggatcctggtagttgggacatgggaacaaggccgtacagtctcagcggctggtag

SEQ ID NO: 12293 - protein, 898 aa, Muscodor strobelii
  misc_feature: SGI Peptide ID NO. 563986
  misc_feature (323)..(883): Pfam Id: PF07971 Pfam Desc: Glycosyl hydrolase family 92
  misc_feature (568)..(883): Pfam Id: PF07971 Pfam Desc: Glycosyl hydrolase family 92
  misc_feature (348)..(548): Pfam Id: PF07971 Pfam Desc: Glycosyl hydrolase family 92
  misc_feature (328)..(898): NCBI GI: 169615489 Blast Desc: SNOG_10902 [Phaeosphaeria nodorum SN15] gi|160702973|gb|EAT81401.2| SNOG_10902 [Phaeosphaeria nodorum SN15]
  misc_feature (11)..(892): NCBI GI: 259485999 Blast Desc: TPA: alpha-1,2-mannosidase family protein (AFU_orthologue; AFUA_5G10520) [Aspergillus nidulans FGSC A4]
  misc_feature (7)..(894): NCBI GI: 238484443 Blast Desc: conserved [Aspergillus flavus NRRL3357] gi|220701510|gb|EED57848.1| conserved [Aspergillus flavus NRRL3357]
  misc_feature (15)..(892): NCBI GI: 145252180 Blast Desc: An16g02910 [Aspergillus niger] gi|134083148|emb|CAK48600.1| protein product [Aspergillus niger]
  misc_feature (27)..(892): NCBI GI: 119492043 Blast Desc: glycosyl hydrolase, family 92 protein [Neosartorya fischeri NRRL 181] gi|119411676|gb|EAW21619.1| glycosyl hydrolase, family 92 protein [Neosartorya fischeri NRRL 181]
  misc_feature (11)..(892): NCBI GI: 67525193 Blast Desc: AN3054.2 [Aspergillus nidulans FGSC A4] gi|40744449|gb|EAA63625.1| AN3054.2 [Aspergillus nidulans FGSC A4]
  misc_feature (13)..(886): NCBI GI: 189204262 Blast Desc: glycosyl hydrolase [Pyrenophora tritici-repentis Pt-1C-BFP] gi|187985565|gb|EDU51053.1| glycosyl hydrolase [Pyrenophora tritici-repentis Pt-1C-BFP]
  misc_feature (13)..(892): NCBI GI: 238837546 Blast Desc: glycosyl hydrolase [Microsporum canis CBS 113480]
  misc_feature (16)..(892): NCBI GI: 156062436 Blast Desc: SS1G_01334 [Sclerotinia sclerotiorum 1980] gi|154696670|gb|EDN96408.1| SS1G_01334 [Sclerotinia sclerotiorum 1980]
  misc_feature (15)..(892): NCBI GI: 238506951 Blast Desc: alpha-1,2-mannosidase family protein [Aspergillus flavus NRRL3357] gi|220689390|gb|EED45741.1| alpha-1,2-mannosidase family protein [Aspergillus flavus
MGRQAGTCPSTSRTLLLLGLASTVQSIGLSQYVDPLIGTEGPEPGGAIAGGNAFPGAALPWGMVKAGIDTSFLGLRPNTSTDCNAGYTPLGNVTAISLMHVHGTGGVPSYGLVSQMPLLGTLHSIDLTDNNTYAQNRSLKEEAASVGYFTTTLTNQIKIEITASNHSAWIRYTYPSASSPVNSSITYPEQASDYDTEQKDDDIHVLVDLTHVLPAHDANAQSYGQQYARGDIHLRQGPDQASYFGSASYTGGWSQPESHKVYFCCNFSMPSGSPLTPTNAYVQPVGKNRVDGAGTFSWKYDPIPLQHSTNKPALRSDMDLKSSAGNRMGIGALFSWTRTPEASSQNRDSVLETKTGISYISAEQACSYIYEELPVGHRFEDVINQARQQWETKVLDAIEVVDDKSNTSSNNTLKKMLYTALYHSAILPTDKTGENPYWISNETFPYYDDHYTLWDTYKTVMPMYHLFYTNTYSKIVKGLINIFSFEGYLPAGRSLNWNGRVQGGTHADLVIGDAFVKSISFLGDQKGLSELGDIDWEEAFKAVVNDAEVLPDRNAGTNQPIDSVTFDGATKEGRGALDDYLTLGYITRNHSRSVSRGLEYSQDDFAIWTIAHGLNKSAELTSRYLQRASWWENQWNPSVNSSLGEYGVFTGFAGPRNADDQFNTTAYDPIICNGGCSWADDIYEAKVWETSFSAAPHDMSRLIQLMGGDDAFIKRLDISFIPGLGSTVGANNDAGTALFNPGNEPSFAMPHLYNYVPGNQWKTVKRSRELVDTYFSDFRNGYPGNIDAGAIPSWLIFHLIGFYPIVGQPLYLLGAPRFSALRLRLFMNTPFERTLLITATGLSDDSFYPQKVTLDGAVLDRAWLSHNELTNASEIVFEMGQDPGSWDMGTRPYSLSGW

SEQ ID NO: 12294 - DNA, 972 bp, Muscodor strobelii
  misc_feature: SGI cDNA ID NO. 563987
  misc_feature: Encodes the peptide sequence at SEQ ID NO 12295
atgtcagacactactaatgcaatcaaaactcttcagggatggtacgactcttcaagtgggctttggagtggtacgggatggtggaatagtgcaaactgtttgacagtacttgctgactatggtcttcttgattcgtctttctcccaaagctacaatattcccggcatcatttctaccacttataacaacggacgaaagtcattttccaattttatcaatgactattacgacgatgaaggatggtgggctctagccttcatacgcagctatgatctcacgaaacaacagttctacctgaaccaggcagtcactattttcaatgatatgaaaggcggaagctctccgtgtggaggcatctactgggacaaaccgcacacatataccaacgccatcgccaatgaactttacatgaaagttgctgcatctctggcaaatcgtattcctgccgataagaactcatatgtttctattgctcaatcagaatggaattggtttaagagtacaggcctaattaactctaacagcttgatcaacgatggtctcacttcctcctgcacgaataatggtgagaagacatggacgtataaccaaggtgtcatcctcggcgccttggtggaactttacaaagcaaacggggattcctcgcttctgacttccgcgactaagatcgcaaatgcagctatctcgacattggtctccggtggcattctatctgacggttgtgaacccaattgtggtgctgatggggaacaattcaagggtgtcttcatgcgcaacttacaagaactacataaggtagcgccgtcaagcaccttctccagctttatcaccaggaacgccgattctatctggtctgacgataataacaattatcatctgggacaaacttggcaaggcccctatgaaaacgcagatgctggctcacaaagctcggccttggacgcgctgatagcagcagttgccgtgtcataa

SEQ ID NO: 12295 - protein, 323 aa, Muscodor strobelii
  misc_feature: SGI Peptide ID NO. 563987
  misc_feature (1)..(322): Pfam Id: PF03663 Pfam Desc: Glycosyl hydrolase family 76
  misc_feature (73)..(280): Pfam Id: PF03663 Pfam Desc: Glycosyl hydrolase family 76
  misc_feature (7)..(322): NCBI GI: 156036496 Blast Desc: SS1G_12937 [Sclerotinia sclerotiorum 1980] gi|154698342|gb|EDN98080.1| SS1G_12937 [Sclerotinia sclerotiorum 1980]
  misc_feature (7)..(323): NCBI GI: 256727521 Blast Desc: NECHADRAFT_33506 [Nectria haematococca mpVI 77-13-4]
  misc_feature (1)..(311): NCBI GI: 145259279 Blast Desc: An04g09650 [Aspergillus niger] gi|134074943|emb|CAK47972.1| protein product [Aspergillus niger]
  misc_feature (8)..(310): NCBI GI: 115402265 Blast Desc: [Aspergillus terreus NIH2624] gi|114189055|gb|EAU30755.1| [Aspergillus terreus NIH2624]
  misc_feature (13)..(323): NCBI GI: 145613714 Blast Desc: MGG_01418 [Magnaporthe grisea 70-15] gi|145020750|gb|EDK04879.1| MGG_01418 [Magnaporthe grisea 70-15]
  misc_feature (7)..(323): NCBI GI: 46136471 Blast Desc: FG09751.1 [Gibberella zeae PH-1]
  misc_feature (7)..(322): NCBI GI: 171683507 Blast Desc: protein product [Podospora anserina] gi|170941713|emb|CAP67367.1| protein product [Podospora anserina]
  misc_feature (65)..(322): NCBI GI: 116194494 Blast Desc: CHGG_03845 [Chaetomium globosum CBS 148.51] gi|88179758|gb|EAQ87226.1| CHGG_03845 [Chaetomium globosum CBS 148.51]
  misc_feature (6)..(320): NCBI GI: 85104563 Blast Desc: NCU07005 [Neurospora crassa OR74A] gi|28923331|gb|EAA32525.1| [Neurospora crassa OR74A]
  misc_feature (8)..(322): NCBI GI: 119497737 Blast Desc: glycosyl hydrolase, [Neosartorya fischeri NRRL 181] gi|119413790|gb|EAW23729.1| glycosyl hydrolase, [Neosartorya fischeri NRRL 181]
  misc_feature (77)..(316): SWISSPROT Homolog: EC 3.2.1.101 Mannan endo-1,6-alpha-mannosidase
MSDTTNAIKTLQGWYDSSSGLWSGTGWWNSANCLTVLADYGLLDSSFSQSYNIPGIISTTYNNGRKSFSNFINDYYDDEGWWALAFIRSYDLTKQQFYLNQAVTIFNDMKGGSSPCGGIYWDKPHTYTNAIANELYMKVAASLANRIPADKNSYVSIAQSEWNWFKSTGLINSNSLINDGLTSSCTNNGEKTWTYNQGVILGALVELYKANGDSSLLTSATKIANAAISTLVSGGILSDGCEPNCGADGEQFKGVFMRNLQELHKVAPSSTFSSFITRNADSIWSDDNNNYHLGQTWQGPYENADAGSQSSALDALIAAVAVS

SEQ ID NO: 12296 - DNA, 741 bp, Muscodor strobelii
  misc_feature: SGI cDNA ID NO. 563988
  misc_feature: Encodes the peptide sequence at SEQ ID NO 12297
atgggccgcacgcctcaaaacctgcgacggggcatcctcccagcagaagcaagcggcatcgccgtgacgcagcgcgtctcagacagcgacccatcagtccctctggtcagcacattccacaactcctggctctaccgtacctaccacaacaactccgacccgcagacgggcatcacacgcgcgcaccccagcgggatttcgcgcccgcgcgtctcccttcaggtctactacacaggcgcccaggcttccgatccggagcatatcgagcgggtggcacgtgctctagagtcggtgattctccagtccaggaatgacacccgtgacgagtatgagcgggacagacttgatgtatatgggctccctggagcctccatcgagcgctgcatagcgcaccagagcggcgagatcgctgcgcgcgagacactaccacaaactcacaaggagtggcatattcagcggtacgacatcggcggatcaagctggcgcagcgctctcgtcattgtccgagatgtggatccggagaagacggagaaccacgtggtagggctgtcgacagtctacttcgaccgtgtcagggaagatggagagcgtcctggtgagccgtactgggagcgacgggcggagaacctcaatgatcaatgggtgctggttcatgaacttaagcatatgctaaactggcagcatagcgcgtcgcagtttgatggtgagggtgagcggtatgttgatcagggagagggttag

SEQ ID NO: 12297 - protein, 246 aa, Muscodor strobelii
  misc_feature: SGI Peptide ID NO. 563988
MGRTPQNLRRGILPAEASGIAVTQRVSDSDPSVPLVSTFHNSWLYRTYHNNSDPQTGITRAHPSGISRPRVSLQVYYTGAQASDPEHIERVARALESVILQSRNDTRDEYERDRLDVYGLPGASIERCIAHQSGEIAARETLPQTHKEWHIQRYDIGGSSWRSALVIVRDVDPEKTENHVVGLSTVYFDRVREDGERPGEPYWERRAENLNDQWVLVHELKHMLNWQHSASQFDGEGERYVDQGEG

SEQ ID NO: 12298 - DNA, 687 bp, Muscodor strobelii
  misc_feature: SGI cDNA ID NO. 563989
  misc_feature: Encodes the peptide sequence at SEQ ID NO 12299
atgatactgaacgacggcactgagcctcatttcgatcaagccgactacgtgacggagcatgtcttcgagttccaaacaatcctctccttcgtccagtggctcggaggcgtcggtgccgtaccgaacggagcgctggccaccggctatacgaagccaagcaaagcatgggtcgaggagtatctcctcagctctggcccggcgggaagcgcttatttcagcctgtcgaacgctagactcggcaatgtcgcggcaggcgatgatttcttctggagacattgtatgcacggccttggcgacgacatgaaagtcaatgagttgatcctcgcggatggcaagatgaatgggcagaaaacgacacttttccagcataagaatccgactgtggatcggggtgatggagataccaccatggtctacgtcaaatacgtcgcggctgtcttcacgtacttccatatcttcgacgacgaatacgccacggaacggggtaacacaaccgtggcgggcgagccaacgtacacagatggcaatggcaatgtccgccagggcaaaatgcgttggctgtggaaggcgttcatcgatgcgtcattgaacacggtcgataggaacggtcagagctattgtactgctgctggcaagttattcctcacgactcagtcgaatccgaactccgaaccccaagtatggtaa

SEQ ID NO: 12299 - protein, 228 aa, Muscodor strobelii
  misc_feature: SGI Peptide ID NO. 563989
  misc_feature (9)..(200): NCBI GI: 156056204 Blast Desc: SS1G_05454 [Sclerotinia sclerotiorum 1980] gi|154703238|gb|EDO02977.1| SS1G_05454 [Sclerotinia sclerotiorum 1980]
MILNDGTEPHFDQADYVTEHVFEFQTILSFVQWLGGVGAVPNGALATGYTKPSKAWVEEYLLSSGPAGSAYFSLSNARLGNVAAGDDFFWRHCMHGLGDDMKVNELILADGKMNGQKTTLFQHKNPTVDRGDGDTTMVYVKYVAAVFTYFHIFDDEYATERGNTTVAGEPTYTDGNGNVRQGKMRWLWKAFIDASLNTVDRNGQSYCTAAGKLFLTTQSNPNSEPQVW

SEQ ID NO: 12300 - DNA, 702 bp, Muscodor strobelii
  misc_feature: SGI cDNA ID NO. 563990
  misc_feature: Reduced expression when VOC is produced
  misc_feature: Encodes the peptide sequence at SEQ ID NO 12301
atgtctgctgaagaggatctgatcgactactccgacgaggagatggccaccaacgaggctgcccccgccaacggcaagaaggcggatgccgccgcctcaggcaccgtcgataagaagggttcctacgtcggcatccactcgactggtttccgtgatttcctgctcaagcccgagctcctgcgagccatcgccgactgcggtttcgagcatccatcggaggtccaacagacctgtatccctcaggctcttctcggtggtgacatcatctgccaggccaagtctggtctcggaaagactgctgtcttcgtcttgactactctccagcaggtcgagcctgttgctggcgagtgctctgtgctggtcatgtgccatacccgcgagttggctttccagatccgcaatgagtacaaccgcttcagcaagtacatgcccgacatcaagactggtgtcttctacggtggcactcccattgtgaaggatgccgagctcctcaagaacaaggagactcacccccacatcatcgttggtacgcccggtcgtctcaatgctctgatccgcgacaagtacctgcgcctcggtagcatccgaatcttcgtcctggatgagtgtgacaagatgcttgacgccatcgacatgcgccgcgatgtccaggacatctttcgatccacccccacccagaagcaggtcatgatgttcagcgcc

SEQ ID NO: 12301 - protein, 234 aa, Muscodor strobelii
  misc_feature: SGI Peptide ID NO. 563990
  misc_feature (72)..(234): Pfam Id: PF00270 Pfam Desc: DEAD/DEAH box helicase
  misc_feature (1)..(234): NCBI GI: 145610002 Blast Desc: conserved [Magnaporthe grisea 70-15] gi|152112305|sp|A4RBS3.1|SUB2_MAGGR RecName: Full=ATP-dependent RNA helicase SUB2 gi|145017381|gb|EDK01744.1| conserved grisea
  misc_feature (1)..(234): NCBI GI: 171684483 Blast Desc: protein product [Podospora anserina] gi|170942202|emb|CAP67854.1| protein product [Podospora anserina]
  misc_feature (1)..(234): NCBI GI: 164423323 Blast Desc: ATP-dependent RNA helicase [Neurospora crassa OR74A] gi|157070045|gb|EAA35657.2| ATP-dependent RNA helicase [Neurospora crassa OR74A]
  misc_feature (1)..(234): NCBI GI: 116193535 Blast Desc: ATP-dependent RNA helicase [Chaetomium globosum CBS 148.51] gi|118577976|sp|Q2H4D0.1|SUB2_CHAGB RecName: Full=ATP-dependent RNA helicase SUB2 gi|88182398|gb|EAQ89866.1|
  misc_feature (1)..(234): NCBI GI: 149210155 Blast Desc: MGCH7_ch7g559 [Magnaporthe grisea 70-15] gi|86196514|gb|EAQ71152.1| MGCH7_ch7g559 [Magnaporthe grisea 70-15]
  misc_feature (4)..(231): NCBI GI: 261353233 Blast Desc: ATP-dependent RNA helicase SUB2 [Verticillium albo-atrum VaMs.102]
  misc_feature (1)..(234): NCBI GI: 256733636 Blast Desc: [Nectria haematococca mpVI 77-13-4]
  misc_feature (2)..(234): NCBI GI: 156055836 Blast Desc: SS1G_05270 [Sclerotinia sclerotiorum 1980] gi|160358709|sp|A7EIX7.1|SUB2_SCLS1 RecName: Full=ATP-dependent RNA helicase sub2 gi|154703054|gb|EDO02793.1| SS1G_05270 1980]
  misc_feature (1)..(234): NCBI GI: 145247210 Blast Desc: An12g08030 [Aspergillus niger] gi|143586076|sp|A2R0B5.1|SUB2_ASPNC RecName: Full=ATP-dependent RNA helicase sub2 gi|134080586|emb|CAK41253.1| protein product
  misc_feature (1)..(234): NCBI GI: 225683798 Blast Desc: ATP-dependent RNA helicase sub2 [Paracoccidioides brasiliensis Pb03] gi|226293173|gb|EEH48593.1| ATP-dependent RNA helicase SUB2 [Paracoccidioides brasiliensis Pb18]
  misc_feature: Useful for introducing or modulating the production of volatile compounds
MSAEEDLIDYSDEEMATNEAAPANGKKADAAASGTVDKKGSYVGIHSTGFRDFLLKPELLRAIADCGFEHPSEVQQTCIPQALLGGDIICQAKSGLGKTAVFVLTTLQQVEPVAGECSVLVMCHTRELAFQIRNEYNRFSKYMPDIKTGVFYGGTPIVKDAELLKNKETHPHIIVGTPGRLNALIRDKYLRLGSIRIFVLDECDKMLDAIDMRRDVQDIFRSTPTQKQVMMFSA

SEQ ID NO: 12302 - DNA, 1017 bp, Muscodor strobelii
  misc_feature: SGI EST ID NO. CUFF.29304.0
  misc_feature: Variant of the nucleotide sequence at SEQ ID NO 12300
ctgatttcttcccactcttgactctggctgattctgatgcagcccatccagctttccgcacatcatctccaccagactgcgcagcctccaccttgccttcttccacctgccaccaccaacaaggcattgtctggctgttgcgtttcccacacaccgccatcaacaccttgcctcgacatcaccgtcgtctgccattctcatctggctccggtgtttactctcttgtcctctcttgtcctctctaactcttacctctctgtccgccaactcaaccaggctcctgcctcgtctcacccactaacaaaccaccgccatcatgtctgctgaagaggatctgatcgactactccgacgaggagatggccaccaacgaggctgcccccgccaacggcaagaaggcggatgccgccgcctcaggcaccgtcgataagaagggttcctacgtcggcatccactcgactggtttccgtgatttcctgctcaagcccgagctcctgcgagccatcgccgactgcggtttcgagcatccatcggaggtccaacagacctgtatccctcaggctcttctcggtggtgacatcatctgccaggccaagtctggtctcggaaagactgctgtcttcgtcttgactactctccagcaggtcgagcctgttgctggcgagtgctctgtgctggtcatgtgccatacccgcgagttggctttccagatccgcaatgagtacaaccgcttcagcaagtacatgcccgacatcaagactggtgtcttctacggtggcactcccattgtgaaggatgccgagctcctcaagaacaaggagactcacccccacatcatcgttggtacgcccggtcgtctcaatgctctgatccgcgacaagtacctgcgcctcggtagcatccgaatcttcgtcctggatgagtgtgacaagatgcttgacgccatcgacatgcgccgcgatgtccaggacatctttcgatccacccccacccagaagcaggtcatgatgttcagcgc

SEQ ID NO: 12303 - DNA, 789 bp, Muscodor strobelii
  misc_feature: SGI cDNA ID NO. 563991
  misc_feature: Encodes the peptide sequence at SEQ ID NO 12304
atgaacgactacagctacaacccacaagacgattatccctcgcaggtcgaatatagcccacaagccgactacaacaagccagtttatatgaatgaagcagacagggcaaaccacctacagaccgtcattgcggatcgtctgggaacattgatcgagctgcaacgcgcccaagctagagagccgatagtctacgagacactgtacaatgtactcctacaagtcgtcggtctgctcgtcgccgctctcttcggcgccttttcgatcctcgcgtggcaaattggcggtgccgcaaacaatcttgcgactgctggaaataacttgacgagcgcagggaacgatctgactagtacgggcaatgacatggcagctgaggcaaattgtgctgctgcatcggctaactttttgtcgattttcgatttctgttcaagcgacgatggccagactttcggcggaatatgcaatgttctatccggcacggatgcacgaagtgcattcgactctgtggcgtctgcggctgtcagcgccgtatcgacttgcctctctacgccttcggcctcgaccacggggtcagctccaacgggtggaagcggcagtggcagtggtagtggtgggattgacgaggacagtgggctgaccacaggcgaacttgctgggactatcgttggtgtggttatcggcgggctggtcttgatcttgtttctcgccctgcgatacctgtcttatcgtgcgaagaagaaggcaatgcttgataccgagactctgaagcagcccattccaggatctgagtaa

SEQ ID NO: 12304 - protein, 262 aa, Muscodor strobelii
  misc_feature: SGI Peptide ID NO. 563991
MNDYSYNPQDDYPSQVEYSPQADYNKPVYMNEADRANHLQTVIADRLGTLIELQRAQAREPIVYETLYNVLLQVVGLLVAALFGAFSILAWQIGGAANNLATAGNNLTSAGNDLTSTGNDMAAEANCAAASANFLSIFDFCSSDDGQTFGGICNVLSGTDARSAFDSVASAAVSAVSTCLSTPSASTTGSAPTGGSGSGSGSGGIDEDSGLTTGELAGTIVGVVIGGLVLILFLALRYLSYRAKKKAMLDTETLKQPIPGSE

SEQ ID NO: 12305 - DNA, 3191 bp, Muscodor strobelii
  misc_feature: SGI EST ID NO. CUFF.29091.1
  misc_feature: Variant of the nucleotide sequence at SEQ ID NO 12303
cctactagtaccaattcagtatgtgcacactctaccaggtactctattgcatgcattttgaggctttgactgggcaacagccgttcacagcaatgtcacatctgtatgtgtgattgccttgattatccttcactacctacctagagcatgcaactcgcctcaaatacaatcaagccctcaatcagtttcaggccgttgtctgtatcgtcgaatacctcactccaccaagtcagtctagcacacagtcaaacaagaatgctgacatctcctgaaatgagacacactatccagggaatcaaatagctcactgactgacacgccaacctcattcctccgcagtcacgaggctgcaccgacttgtctattgccgggatggcgaagaagaagcagaaacagcccagtatcccaaacaagacgttgcactccagagtatcatttctataccaagctgcaacatacctagcctctcatgatcccacaggagaatccagttgtcccgatagcgatactacagatcaggtcaaggaggacattaagactcgcaacttggttattgaccttcgcgcaacggccctcaagagcgtcatacgcatgtcaccagccatgaagatcactatttgcaaatcctgcgacacgttgcttgtcgagggtaagacgagtacatcggtagttgagaacaagagcaaaggcggcagaaagccttgggcagacgttcttgttatcaagtgtatgaaatgtggccgggagaagcggttccctgtgggagcacctcctcagaagcgtcggcctttgcgcgaggcgaaacccccgaaggcgcatgatggtgttggtgagatagctgagcaagctgatgaagagatgggcggcgtcactaccaatgggtgaatagctctttgcgcctatcctattgatccaatatttcgacttcaagatgagaactcatcgattgattcgcactacttcgtgtttatatgcctctatttaccttgacgatagtttctcgcacaagcccggatcatgttggattatgccggatctaaacaccagatcctagacattttctatcgccgcttatcaccgattgcttcacaaatgccatctccaacatttaccacttttccttcggcatagcatcatgtcttcaaccagctttttggcttgatgtctctagtgcctgcagtttaaggagctgcaacaccttacctccccttccctttttccacctcacccacaacctcttccacacctcacgcatctacaactttctataagatcaatccaaatcctccagcaatatcaattcgcaaactcttacagagtctatccgtaaccccctaccgtccaaatctgtttacttgtgatcgctaaggcagctcggtagttagcataccgcatgtcttgggtgggctcggcgactaaaatcgctactgggttcagctcccgtaaaaagtaggggtccagaccctcaggtctagtagcctaacgaacgactgtccaaacacaagacttcgtggcgcatctcgtagagactagtcagaaccccgtttcagctccgatcttggaccccgagtctcgacttcacggttgcatgtcgctttatgacttagtagctttatacctgagtgcttcccggcttccgcatctcattcacgatgtctcttcaaacacagcacatcgtcattccaaaatgaacgactacagctacaacccacaagacgattatccctcgcaggtcgaatatagcccacaagccgactacaacaagccagtttatatgaatgaagcagacagggcaaaccacctacagaccgtcattgcggatcgtctgggaacattgatcgagctgcaacgcgcccaagctagagagccgatagtctacgagacactgtacaatgtactcctacaagtcgtcggtctgctcgtcgccgctctcttcggcgccttttcgatcctcgcgtggcaaattggcggtgccgcaaacaatcttgcgactgctggaaataacttgacgagcgcagggaacgatctgactagtacgggcaatgacatggcagctgaggcaaattgtgctgctgcatcggctaactttttgtcgattttcgatttctgttcaagcgacgatggccagactttcggcggaatatgcaatgttctatccggcacggatgcacgaagtgcattcgactctgtggcgtctgcggctgtcagcgccgtatcgacttgcctctctacgccttcggcctcgaccacggggtcagctccaacgggtggaagcggcagtggcagtggtagtggtgggattgacgaggacagtgggctgaccacaggcgaacttgctgggactatcgttggtgtggttatcggcgggctggtcttgatcttgtttctcgccctgcgatacctgtcttatcgtgcgaagaagaaggcaatgcttgataccgagactctgaagcagcccattccaggatctgagtaaagctctacgaataaagaactctgcgaagaagggaatagggttgttaaggtctgattcgagaagggcctgtccagagacgcctctggcgaacctcctgatgctctttgcgagttgttataattgtgggttgaggtcaggcaggtcacaacatccgttgaatagcgcagataaccagggcagcaaaccgatgatggcaagcgtaacaaagacagcgaaaaatcctgcagaactgtccgcggaccacaagccaagaccaaaaaagcagcacaggcaactgaggaagagaagggcaatggatccaatctctaagaattttttcataccgggactcagaagtgggacgactgtcggcggcgaagataacagctctttcttttttttttgccatcagcatcaacatcgatgccactagaatagtagaaatcacgccgcgcgccttcgtgacagcggatcagtacaggcaagcacgcgcctgctcaaagctgcaggtgcgcgacgcgtcttcccattcaatggtcgcccgaagattgtccagccaatagaaaccccacctttagctagctatataggtgtcaataattcgtagacgatcaataaccgatgagccttgaccgggcgatgtcgtggtgtgggtaaagtgacgaaagcctggcaagctttactggttggtcaccagttcgagtcgccccctcaccacagtctttccctccttcct

SEQ ID NO: 12306 - DNA, 804 bp, Muscodor strobelii
  misc_feature: SGI cDNA ID NO. 563992
  misc_feature: Reduced expression when VOC is produced
  misc_feature: Encodes the peptide sequence at SEQ ID NO 12307
atgtcgtcggatcagcaactcacccttttcctatggcttgagggattctttccccgccgaattgactactacctcctacttaaaggcttagtcaaatcacctgcggatctcctagcctgcaagacagccgaacccaatctcaacatcgtacgcatgaacgtatcccaaggaggctggatattcaccccgtccgacgaccccctaccggcagagatcagcacaagcacgccatgtctacgtgtccgcaacactgccaccggtgaagaccgttgggttcgcgaaagcgcgtcgatactcgtatacctcgagagcctatatggcgatcgtaccccatcgatgaaaccgagcgatcacctagacattggcgccatggatgatctcatcggatgcgtgaacgcggcattcgcggagagtggtgtgtatgcacgccacgcaagcccgttcttggccggtatcttgggcttgaaggatgaggagcgaagtcctgctgcggcgcgcaatgcgcatgaggcgatgatcaagcaccttgtgaagctacagaactgggggaataaaacactaagtacgacgggttggttgacgcctggcgttgatggacctggcttggttgacgtttgccttgcctctgggagacgctatatggagaatgcctacggttttgattatttcgagaatgaggagctgaagccattgagagaatggtacaagaagtttcagaccttgccgtggtgggaggagttggaggagcggacgattattcacccagagttcttgaggtctaagctggatgatgttttttcgtga

SEQ ID NO: 12307 - protein, 267 aa, Muscodor strobelii
  misc_feature: SGI Peptide ID NO. 563992
  misc_feature (1)..(234): NCBI GI: 256726054 Blast Desc: NECHADRAFT_81568 [Nectria haematococca mpVI 77-13-4]
  misc_feature (6)..(249): NCBI GI: 119471300 Blast Desc: NFIA_055990 [Neosartorya fischeri NRRL 181] gi|119406299|gb|EAW16250.1| NFIA_055990 [Neosartorya fischeri NRRL 181]
  misc_feature (6)..(106): NCBI GI: 169600753 Blast Desc: SNOG_03223 [Phaeosphaeria nodorum SN15] gi|160705506|gb|EAT89954.2| SNOG_03223 [Phaeosphaeria nodorum SN15]
  misc_feature: Useful for introducing or modulating the production of volatile compounds
MSSDQQLTLFLWLEGFFPRRIDYYLLLKGLVKSPADLLACKTAEPNLNIVRMNVSQGGWIFTPSDDPLPAEISTSTPCLRVRNTATGEDRWVRESASILVYLESLYGDRTPSMKPSDHLDIGAMDDLIGCVNAAFAESGVYARHASPFLAGILGLKDEERSPAAARNAHEAMIKHLVKLQNWGNKTLSTTGWLTPGVDGPGLVDVCLASGRRYMENAYGFDYFENEELKPLREWYKKFQTLPWWEELEERTIIHPEFLRSKLDDVFS

SEQ ID NO: 12308 - DNA, 1346 bp, Muscodor strobelii
  misc_feature: SGI EST ID NO. CUFF.29097.0
  misc_feature: Variant of the nucleotide sequence at SEQ ID NO 12306
gttcaaaatgcgatgtctgctattggctgcaagtagccattagggtaaatcatgacaaagtgtagacaaagtgtcctgcagaacgcggcaacttgaactgcatcgatttctcttcgaaaatgcaaataaattcgaggttgggtcctctgaatgatggaaatggtgcaacacactcattgtgttctacagatctcccgcttttaacctttgtccattgacattatatcttagcgcaatctgaagcgaaaacgagtttaggtttccacctactgcaaaaacgatgtcgtcggatcagcaactcacccttttcctatggcttgagggattctttccccgccgaattgactactacctcctacttaaaggcttagtcaaatcacctgcggatctcctagcctgcaagacagccgaacccaatctcaacatcgtacgcatgaacgtatcccaaggaggctggatattcaccccgtccgacgaccccctaccggcagagatcagcacaagcacgccatgtctacgtgtccgcaacactgccaccggtgaagaccgttgggttcgcgaaagcgcgtcgatactcgtatacctcgagagcctatatggcgatcgtaccccatcgatgaaaccgagcgatcacctagacattggcgccatggatgatctcatcggatgcgtgaacgcggcattcgcggagagtggtgtgtatgcacgccacgcaagcccgttcttggccggtatcttgggcttgaaggatgaggagcgaagtcctgctgcggcgcgcaatgcgcatgaggcgatgatcaagcaccttgtgaagctacagaactgggggaataaaacactaagtacgacgggttggttgacgcctggcgttgatggacctggcttggttgacgtttgccttgcctctgggagacgctatatggagaatgcctacggttttgattatttcgagaatgaggagctgaagccattgagagaatggtacaagaagtttcagaccttgccgtggtgggaggagttggaggagcggacgattattcacccagagttcttgaggtctaagctggatgatgttttttcgtgatccgttgaattagactaaagatagatatcagagtgatgcgctagggataaacggcgtgatctttaaggtttgcataaggagggaaaaaaatctagcacttacatatgatcctgcctagctccgtaggtaacgttgatatctaatctctttaaatatacgcacttgcgcatttgttcgtctagctgataattttgccccctacaccaaatttcaatagatccaaccggttccccatcgactccacgcaacaaactcttcgccg

SEQ ID NO: 12309 - DNA, 1155 bp, Muscodor strobelii
  misc_feature: SGI cDNA ID NO. 563993
  misc_feature: Encodes the peptide sequence at SEQ ID NO 12310
atggtattttccttgtctgaggcaagtccctgcggccaacagctggtcacaacgaacattatcttccagattctttctactgcgttcttggtcctacgattttggtcggcggttcactcgggacgtcgcttcttcgcggacgatgtctgcatttgtctcgcatacgttagcgttagctgcttaggagtcattgtaatctggggtgtactcaacggtatgggaaagaagctcgtagaactgacgccctttcagctggtgatccaagtaaaggcaatactggccgttgagctcacttacctctcgacaactgttttcgccaaactatcggtgatctggctcctaaaacgcatatacgaaacaccaaacttcagacgtctatgcaacggactcattggctttacctcggtttactttgtctccttcactctcgtttacctgaccaattgcatcccaatttcccagatgtggcatcctcaacccggcggccactgtcgcggagaaaacgcaggcgaccacgctaccattggcatcagtttgttcctggatgttctgattctggctttaccgctacccgttctatggggcctgaagatgtcagtcagagacaagcttaccatcacagcgatgttcagtctgggtagtcttgcagtggccgttttaatatggcgaatagtcctcacagtcagagttcactcgtcgcccgaatgggtgcttacgctctgcaagatcgggtgtatcgctcagatagaacttcatgtcagcataatcgctgcgtgcataccgacgctgggtcccctttttaatgcctatatcaagcctatcttggcgaaattcagtattatcaaaagcaagctcagcagatccagcgcccggtcgaagagtgagagtgtcaaactgcgcacattgcatactattgggagctcacgccacgagcgacgaccgggaatttacagcgagcttcacgatagccaagataggatagttgaagaccagagcacgactaaaatgggggtcgaggcagagagaccagttgctgatacatgtggctccagtgctattgacgatgaagctctgatgaggccgccgtctggagcgatccatgtttatccaagcgtcgaagcgagataccacactgagaatagtcaggttcgctga

SEQ ID NO: 12310 - protein, 384 aa, Muscodor strobelii
  misc_feature: SGI Peptide ID NO. 563993
  misc_feature (9)..(340): NCBI GI: 145257262 Blast Desc: An04g02990 [Aspergillus niger] gi|134058578|emb|CAK96465.1| protein product [Aspergillus niger]
  misc_feature (8)..(324): NCBI GI: 121720146 Blast Desc: ACLA_060120 [Aspergillus clavatus NRRL 1] gi|119404983|gb|EAW15345.1| ACLA_060120 [Aspergillus clavatus NRRL 1]
  misc_feature (64)..(365): NCBI GI: 171678387 Blast Desc: protein product [Podospora anserina] gi|170937263|emb|CAP61920.1| protein product [Podospora anserina]
  misc_feature (5)..(319): NCBI GI: 146324405 Blast Desc: integral membrane protein [Aspergillus fumigatus Af293] gi|129557230|gb|EAL88635.2| integral membrane protein, [Aspergillus fumigatus Af293] gi|159124233|gb|EDP49351.1| A1163]
  misc_feature (9)..(341): NCBI GI: 154313039 Blast Desc: BC1G_05521 [Botryotinia fuckeliana B05.10] gi|150849606|gb|EDN24799.1| BC1G_05521 [Botryotinia fuckeliana B05.10]
  misc_feature (8)..(261): NCBI GI: 115398936 Blast Desc: conserved [Aspergillus terreus NIH2624] gi|114191940|gb|EAU33640.1| conserved [Aspergillus terreus NIH2624]
  misc_feature (12)..(298): NCBI GI: 121699456 Blast Desc: integral membrane protein, [Aspergillus clavatus NRRL 1] gi|119396169|gb|EAW06601.1| integral membrane protein, [Aspergillus clavatus NRRL 1]
  misc_feature (5)..(319): NCBI GI: 119469017 Blast Desc: integral membrane protein, [Neosartorya fischeri NRRL 181] gi|119406052|gb|EAW16003.1| integral membrane protein, [Neosartorya fischeri NRRL 181]
  misc_feature (12)..(322): NCBI GI: 256719870 Blast Desc: NECHADRAFT_56726 [Nectria haematococca mpVI 77-13-4]
  misc_feature (72)..(343): NCBI GI: 116197042 Blast Desc: CHGG_05119 [Chaetomium globosum CBS 148.51] gi|88181032|gb|EAQ88500.1| CHGG_05119 [Chaetomium globosum CBS 148.51]
MVFSLSEASPCGQQLVTTNIIFQILSTAFLVLRFWSAVHSGRRFFADDVCICLAYVSVSCLGVIVIWGVLNGMGKKLVELTPFQLVIQVKAILAVELTYLSTTVFAKLSVIWLLKRIYETPNFRRLCNGLIGFTSVYFVSFTLVYLTNCIPISQMWHPQPGGHCRGENAGDHATIGISLFLDVLILALPLPVLWGLKMSVRDKLTITAMFSLGSLAVAVLIWRIVLTVRVHSSPEWVLTLCKIGCIAQIELHVSIIAACIPTLGPLFNAYIKPILAKFSIIKSKLSRSSARSKSESVKLRTLHTIGSSRHERRPGIYSELHDSQDRIVEDQSTTKMGVEAERPVADTCGSSAIDDEALMRPPSGAIHVYPSVEARYHTENSQVR

SEQ ID NO: 12311 - DNA, 273 bp, Muscodor strobelii
  misc_feature: SGI cDNA ID NO. 563994
  misc_feature: Elevated expression when VOC is produced
  misc_feature: Encodes the peptide sequence at SEQ ID NO 12312
atgggcggtagtgcgacgagatcttcgatggcgcctcaggctagtgggggtgtggtgaaggctaggcaattgtcacatcttcacgctcagctcgcgcagctatctgctaatctcgcggatacggagaatctgctgcgtatgacgagtgtgcaggctggtgctatgaggggattgggtgcgtggcatggtgggttattcatggccgcgagtaaggtccttggtgaggagtcggtgaaggaacagtcgcagtcggagaagcccagtcagcgataa

SEQ ID NO: 12312 - protein, 90 aa, Muscodor strobelii
  misc_feature: SGI Peptide ID NO. 563994
  misc_feature (21)..(65): Pfam Id: PF08227 Pfam Desc: DASH complex subunit Hsk3 like
  misc_feature (5)..(81): NCBI GI: 261353235 Blast Desc: conserved [Verticillium albo-atrum VaMs.102]
  misc_feature (5)..(88): NCBI GI: 149210159 Blast Desc: MGCH7_ch7g561 [Magnaporthe grisea 70-15] gi|86196516|gb|EAQ71154.1| MGCH7_ch7g561 [Magnaporthe grisea 70-15]
  misc_feature (2)..(89): NCBI GI: 156055388 Blast Desc: SS1G_05046 [Sclerotinia sclerotiorum 1980] gi|154702830|gb|EDO02569.1| SS1G_05046 [Sclerotinia sclerotiorum 1980]
  misc_feature (15)..(77): NCBI GI: 85115570 Blast Desc: NCU09078 [Neurospora crassa OR74A] gi|28926692|gb|EAA35659.1| [Neurospora crassa OR74A]
  misc_feature (3)..(78): NCBI GI: 154302563 Blast Desc: BC1G_09858 [Botryotinia fuckeliana B05.10] gi|150855347|gb|EDN30539.1| BC1G_09858 [Botryotinia fuckeliana B05.10]
  misc_feature (18)..(89): NCBI GI: 212537411 Blast Desc: conserved [Penicillium marneffei ATCC 18224] gi|210068603|gb|EEA22694.1| conserved [Penicillium marneffei ATCC 18224]
  misc_feature (8)..(86): NCBI GI: 255951042 Blast Desc: Pc22g23980 [Penicillium chrysogenum Wisconsin 54-1255] gi|211593305|emb|CAP99686.1| Pc22g23980 [Penicillium chrysogenum Wisconsin 54-1255]
  misc_feature (3)..(71): NCBI GI: 46128575 Blast Desc: FG08665.1 [Gibberella zeae PH-1]
  misc_feature (20)..(86): NCBI GI: 240111742 Blast Desc: CPC735_012050 [Coccidioides posadasii C735 delta SOWgp]
  misc_feature (20)..(84): NCBI GI: 238840575 Blast Desc: conserved [Microsporum canis CBS 113480]
  misc_feature: Useful for introducing or modulating the production of volatile compounds
MGGSATRSSMAPQASGGVVKARQLSHLHAQLAQLSANLADTENLLRMTSVQAGAMRGLGAWHGGLFMAASKVLGEESVKEQSQSEKPSQR

SEQ ID NO: 12313 - DNA, 1894 bp, Muscodor strobelii
  misc_feature: SGI EST ID NO. CUFF.29119.0
  misc_feature: Variant of the nucleotide sequence at SEQ ID NO 12311
cggcggggtaggacgacatacaacggcgacgctgacagcggcattcaaggtaaaccggctcaactaatggaatggtgatcaattcgtttcggaagggggagactcgagggattacaagctgattgaatgagaaatcgacgaacacgacctctatatttcgtttatcacccaatagcgaccccgcaaccacacaatccagatcccaatcactcaatcaattaaaccgaccaccctatcaatcgcctcccgacttccgaacataccaccctaatacgacgtcaagaagggttcctgcctacgtctcgcgtctcagatctccgatcaacgagctgctggtccagtcctatctcactagtcgtcttgtcggacttatacacgcacgacagacagctgcatacgcaatacagtctgcacgaaacccattacgagaaaaacggatattagcattttggcgtgcgtcctgcggctttccgtctatctttttgtgtgaccactggaggggttggccgataccgacaatacacgtgtgcgcctagaccacgactacccaaactgcccagactacccaaactaccccggattgggcggcggacgggttgctgcatattcgcttgtgagagagacgaatactccacggtctgtgctccgataatttcttcggtggctgagggagagtgacgccacgaacgcgtacgtacacagagtgaaagactgggaggagagacacagaatagtgactatacggggaagacaggcgagggtagaggaacgcaataagatggcgagccgtaacgatcggacgacgacaatgggcggtagtgcgacgagatcttcgatggcgcctcaggctagtgggggtgtggtgaaggctaggcaattgtcacatcttcacgctcagctcgcgcagctatctgctaatctcgcggatacggagaatctgctgcgtatgacgagtgtgcaggctggtgctatgaggggattgggtgcgtggcatggtgggttattcatggccgcgagtaaggtccttggtgaggagtcggtgaaggaacagtcgcagtcggagaagcccagtcagcgataaggacggcagttgactgtgaaattgtttggcatgcttccagcaggttactaatagagtcgtggcctggggcagaggcgtgagtgtgtatgctcacgcgatacgctcgggctgtcgcctatgatcaatggagttcaacggtgttggctccttcgccggcccggcatggattatctgttcgggtctacactatctatttcggaaagtgaggacggagaacgacggacgttgagatagctacgaaaggtctaattcctgtggttgctgattaaggacattagccctgtgccttgaatcaggatcatggtggcggcatcactatcacttacagtcatcattcgatgctaaggggggaaattcactttgacaacttgacgcggatcaggtccgttgctacatgataacaaatgtcaagtatcaaactgtcttccaatccttggctcttggactgctggaatagtcgctgggcaggtcatcagaccaatgcatcgtggtgagttggaagtggaatcactgtgttcgatgatgaagttacttgctcggtatgccaggaaggaaatcatgttgatgttaggggcagaatggagtcgtggcgaatgcttattcgcaatgctattacggatgagtttctagctcaagtgcaatcgctggaatctggccgcggcattttgcatgttatctcactccttcctccgccgttactgtccgtactcttgtcttttttcctacctgttctatcttcgaatttgtttcaccattaaccttgcatggaccaagttacaagaagcaagcaatccagaaaaccatgtgtacgtg

SEQ ID NO: 12314 - DNA, 2247 bp, Muscodor strobelii
  misc_feature: SGI cDNA ID NO. 563995
  misc_feature: Reduced expression when VOC is produced
  misc_feature: Encodes the peptide sequence at SEQ ID NO 12315
atggcacccggggcgccccgtctgaagatcctctccgtgggagggaatgccgtctctgcctttctgtcatggaggttgcaggccaccaacgcctgcgatgtcacgctagtgtggaaatctggcttcgagagtgtctaccaatatggcatatccttcaaatccccatcctttggcaatgagcgcttcaaacctcgacatgtggttcgaacacctgaagaatcaacacaaaatcaaggcggcgccttcgactacgtaatactctgcatcaaagccctccccgatgtctacgatatcgcatcagtcatcgattctgttgtgacccctcagcacacctgcattttagtcaacacgacccattctctcggtgtagaagccgccatcgaagagaggttccccacaaacgtcgtcctatcattagtctgcaatgcagaaatcacacagctgggggcgagcgagttcgaacacagcggaacgtctacagaaatctgggtcggtcccgcaaataagaacaccaacatccccgtggccatccaggaagacatggctcaggcactggcaatgaccctcagcactgggcaggtggattgcaaggtctcgcgaaacattcgacagcagcaattcgaacgtgtgattgggcccattgcttttcatccggccagcgtcatcttcgaaaccccttcacatgcacagctactcgagaaaccaggcgtgcgacaacttgtctccgatgtcatcgacgaactgatcgctcttgcgaacagcgaaggttgtagtttgactaccgacttcaaagagaagacaattaaggagcaatgtcagccttcagagtcgactagtatcatgtggcaggattttatcgcgcggaggccaatggaagttgaaacctacctcggatcgcctatcaaactggcacaaaaaacgggcgccaaagtaccgcggatcgagacgctctacgccatcttccacaacttgaatgtggtaaaccaaagcagacccagggatcttaacggggtgcctgcgccatctgcgtcgtccggatcacccggcccacctggacctatgcctcggatggcatctggtggtcctcctcgacccatgcccaatggcaatggaatgcccaggccacgaccaagaaactcgtctaattttgcaggacctccgcctagtatgcgtcgtccgccaaatggacaccgtccatcgatgaacggcgcacccaacggacatcacccaccccgacagccttcgcgacgtggttcttttgaagagaatgacctgggagagttcagccatctcgtagtctatgacgacgcagacggagatggtggtggttactccggcgacgttccggatatggcaatccgagagagggagctccaactgcggcagcgtgaactggctctgaaggagcaggagatgcgcatgcgacgtggcggtcacggaggccccccacctcgatcgcgacgtgctcctccgatgcgcaacgggggaggtatgtacgatgatgaagatgaggaggatgactacttcgacgccagtgctggtctaaacaccccaatggttgacactgataacttcgacatgatgagcgtcacatcgagaaagaatcgctccaggccaccccctaatcagagtgatatccggtcaggccatctcaacggacgagagagcggcatagtctcgcgcggaggtcgatggcggccgaccttaggcaagaatcgatccagccagatcatcaacgccgtacctaccccgcaaggtgatataatggacgaccctatgatggcctattcctccaaccgttatggaaacgtggaccgcggacaaatccatgctggatccaggactaactccttgaccgcctcacatttgcaggagctccaaaatggcccagccatgaatggggcgtatcccagacgggccagccaatcgcccggtaacccagcatacacgccttccatgcgtggtggaaatggacggccttcgcctcccaatggaattcctaacggagtacgacaacccgtgccccggcatccgccaggtcatggcaatatggtggcgccgcagcaggttgaacaacgagtcggggtgagcactctccaaccacccaacatcaagcccgtacgaagtctgaccggtagtgcgagcgccagcgcggggagtggtgattcggcacatctcggatctgaaccttccgcccacagcagccaaagtagtctaggaccacgcccggtgggcctcactcgctga

SEQ ID NO: 12315 - protein, 748 aa, Muscodor strobelii
  misc_feature: SGI Peptide ID NO. 563995
  misc_feature (10)..(169): Pfam Id: PF02558 Pfam Desc: Ketopantoate reductase PanE/ApbA
  misc_feature (201)..(325): Pfam Id: PF08546 Pfam Desc: Ketopantoate reductase PanE/ApbA C terminal
  misc_feature (229)..(325): Pfam Id: PF08546 Pfam Desc: Ketopantoate reductase PanE/ApbA C terminal
  misc_feature (1)..(743): NCBI GI: 85115574 Blast Desc: NCU09079 [Neurospora crassa OR74A] gi|28926693|gb|EAA35660.1| conserved [Neurospora crassa OR74A]
  misc_feature (1)..(743): NCBI GI: 39970685 Blast Desc: MGG_02809 [Magnaporthe grisea 70-15] gi|149210161|ref|XP_001522455.1| MGCH7_ch7g562 [Magnaporthe grisea 70-15] gi|86196517|gb|EAQ71155.1| MGCH7_ch7g562 grisea
  misc_feature (8)..(743): NCBI GI: 171684487 Blast Desc: protein product [Podospora anserina] gi|170942204|emb|CAP67856.1| protein product [Podospora anserina]
  misc_feature (1)..(743): NCBI GI: 116193533 Blast Desc: CHGG_06484 [Chaetomium globosum CBS 148.51] gi|88182397|gb|EAQ89865.1| CHGG_06484 [Chaetomium globosum CBS 148.51]
  misc_feature (1)..(743): NCBI GI: 156055830 Blast Desc: SS1G_05267 [Sclerotinia sclerotiorum 1980] gi|154703051|gb|EDO02790.1| SS1G_05267 [Sclerotinia sclerotiorum 1980]
  misc_feature (1)..(743): NCBI GI: 154289491 Blast Desc: BC1G_16096 [Botryotinia fuckeliana B05.10] gi|150849201|gb|EDN24394.1| BC1G_16096 [Botryotinia fuckeliana B05.10]
  misc_feature (8)..(743): NCBI GI: 256733635 Blast Desc: NECHADRAFT_92038 [Nectria haematococca mpVI 77-13-4]
  misc_feature (8)..(743): NCBI GI: 46128579 Blast Desc: FG08667.1 [Gibberella zeae PH-1]
  misc_feature (1)..(748): NCBI GI: 226277898 Blast Desc: conserved [Paracoccidioides brasiliensis Pb01]
  misc_feature (1)..(748): NCBI GI: 226293176 Blast Desc: conserved [Paracoccidioides brasiliensis Pb18]
  misc_feature: Useful for introducing or modulating the production of volatile compounds
MAPGAPRLKILSVGGNAVSAFLSWRLQATNACDVTLVWKSGFESVYQYGISFKSPSFGNERFKPRHVVRTPEESTQNQGGAFDYVILCIKALPDVYDIASVIDSVVTPQHTCILVNTTHSLGVEAAIEERFPTNVVLSLVCNAEITQLGASEFEHSGTSTEIWVGPANKNTNIPVAIQEDMAQALAMTLSTGQVDCKVSRNIRQQQFERVIGPIAFHPASVIFETPSHAQLLEKPGVRQLVSDVIDELIALANSEGCSLTTDFKEKTIKEQCQPSESTSIMWQDFIARRPMEVETYLGSPIKLAQKTGAKVPRIETLYAIFHNLNVVNQSRPRDLNGVPAPSASSGSPGPPGPMPRMASGGPPRPMPNGNGMPRPRPRNSSNFAGPPPSMRRPPNGHRPSMNGAPNGHHPPRQPSRRGSFEENDLGEFSHLVVYDDADGDGGGYSGDVPDMAIRERELQLRQRELALKEQEMRMRRGGHGGPPPRSRRAPPMRNGGGMYDDEDEEDDYFDASAGLNTPMVDTDNFDMMSVTSRKNRSRPPPNQSDIRSGHLNGRESGIVSRGGRWRPTLGKNRSSQIINAVPTPQGDIMDDPMMAYSSNRYGNVDRGQIHAGSRTNSLTASHLQELQNGPAMNGAYPRRASQSPGNPAYTPSMRGGNGRPSPPNGIPNGVRQPVPRHPPGHGNMVAPQQVEQRVGVSTLQPPNIKPVRSLTGSASASAGSGDSAHLGSEPSAHSSQSSLGPRPVGLTR

SEQ ID NO: 12316 - DNA, 4732 bp, Muscodor strobelii
  misc_feature: SGI EST ID NO. CUFF.30393.1
  misc_feature: Variant of the nucleotide sequence at SEQ ID NO 12314
ctggatacagcctggggccagtgtgcgtgtgcttcgttccggatcttccatcatcccagacaacacagtacagtacagtagtggacagtggacaggcattggcattagagaattggtgctcgtcaatactttcttgactttggtatctatctcgagctgccgcgtcgttcctctcgccgctttgctgcctctctcgtcctgcctgtgtcatcatcctcgcctgccctgctaccgccctctcggcgctggtgctgctctttcctccctctcgcgccatccctctccttcacactttcctcctcccagctcagacaccgtctccttcccccgtcgccaatcgacgccctcgcacagcatcatcgttgtcgtccgaccgttgtccgccacacatctccacccggcctccccctaatcgcgccgttgtgtgtgcattgaacaatcggtgtccattcgttattcttttttgacctcgttttttgccgtttgtgagagacattgccggtcgctgcccagcactaccctgtattcccgacgcctatcgcctcaaacgcattagacagcagacgccatcttgacttgaactaccgcgacctgcctttacctatttcactcaactactacttcaactactacctactcgcactactgcctacgtacatctgaccctggtcttgacccgctcgttgtttttggccttgggttcctctgcatcatctcccccattgtctcgttgctcagctcggcctttgtctctcatcacttccgctcgtttcgatcttcaacttcgactcgtcagcgcagtcgtcccctcgctcttgctagcaacacacgtcggcatcgtccgtcgttgtaatcgtagcattccacgttagttggttgtgtttggttgttgcatcggaagaggatagcatcgttggaaaggatatatctctgcccaggtgcaaggtgtaaccggggtgctctcgacggcgatccaatcaccgccgcggccgccgcctccattccaaaggccactgaatgggcccccacgacgcccatcaatagaccgtcgacacctgcatccgtcccctttcttttcccgaccatccactgtcggcgccagccatccaccgaaggggaaaagatcgatcctcgaccctcgccggcgcaacgaaaaccagtttgcagggtcgtgagacagccgccagcagccagtgggagccattgtcagccattgggagcccagtgcacccagcgcccagtgtgcaagcgttgcacccgcgtcgtgcctgtgcctgcgggtcggacctctggcgacgtagtctcgtagactctgccctctcattccgacgctgccagtcctcacccacacaacccgtcgatacagagacacagccatctcggcctctcgaccactagtccccatccggtcgccatcatggcacccggggcgccccgtctgaagatcctctccgtgggagggaatgccgtctctgcctttctgtcatggaggttgcaggccaccaacgcctgcgatgtcacgctagtgtggaaatctggcttcgagagtgtctaccaatatggcatatccttcaaatccccatcctttggcaatgagcgcttcaaacctcgacatgtggttcgaacacctgaagaatcaacacaaaatcaaggcggcgccttcgactacgtaatactctgcatcaaagccctccccgatgtctacgatatcgcatcagtcatcgattctgttgtgacccctcagcacacctgcattttagtcaacacgacccattctctcggtgtagaagccgccatcgaagagaggttccccacaaacgtcgtcctatcattagtctgcaatgcagaaatcacacagctgggggcgagcgagttcgaacacagcggaacgtctacagaaatctgggtcggtcccgcaaataagaacaccaacatccccgtggccatccaggaagacatggctcaggcactggcaatgaccctcagcactgggcaggtggattgcaaggtctcgcgaaacattcgacagcagcaattcgaacgtgtgattgggcccattgcttttcatccggccagcgtcatcttcgaaaccccttcacatgcacagctactcgagaaaccaggcgtgcgacaacttgtctccgatgtcatcgacgaactgatcgctcttgcgaacagcgaaggttgtagtttgactaccgacttcaaagagaagacaattaaggagcaatgtcagccttcagagtcgactagtatcatgtggcaggattttatcgcgcggaggccaatggaagttgaaacctacctcggatcgcctatcaaactggcacaaaaaacgggcgccaaagtaccgcggatcgagacgctctacgccatcttccacaacttgaatgtggtaaaccaaagcagacccagggatcttaacggggtgcctgcgccatctgcgtcgtccggatcacccggcccacctggacctatgcctcggatggcatctggtggtcctcctcgacccatgcccaatggcaatggaatgcccaggccacgaccaagaaactcgtctaattttgcaggacctccgcctagtatgcgtcgtccgccaaatggacaccgtccatcgatgaacggcgcacccaacggacatcacccaccccgacagccttcgcgacgtggttcttttgaagagaatgacctgggagagttcagccatctcgtagtctatgacgacgcagacggagatggtggtggttactccggcgacgttccggatatggcaatccgagagagggagctccaactgcggcagcgtgaactggctctgaaggagcaggagatgcgcatgcgacgtggcggtcacggaggccccccacctcgatcgcgacgtgctcctccgatgcgcaacgggggaggtatgtacgatgatgaagatgaggaggatgactacttcgacgccagtgctggtctaaacaccccaatggttgacactgataacttcgacatgatgagcgtcacatcgagaaagaatcgctccaggccaccccctaatcagagtgatatccggtcaggccatctcaacggacgagagagcggcatagtctcgcgcggaggtcgatggcggccgaccttaggcaagaatcgatccagccagatcatcaacgccgtacctaccccgcaaggtgatataatggacgaccctatgatggcctattcctccaaccgttatggaaacgtggaccgcggacaaatccatgctggatccaggactaactccttgaccgcctcacatttgcaggagctccaaaatggcccagccatgaatggggcgtatcccagacgggccagccaatcgcccggtaacccagcatacacgccttccatgcgtggtggaaatggacggccttcgcctcccaatggaattcctaacggagtacgacaacccgtgccccggcatccgccaggtcatggcaatatggtggcgccgcagcaggttgaacaacgagtcggggtgagcactctccaaccacccaacatcaagcccgtacgaagtctgaccggtagtgcgagcgccagcgcggggagtggtgattcggcacatctcggatctgaaccttccgcccacagcagccaaagtagtctaggaccacgcccggtgggcctcactcgctgattacttgcccgccctctcatgtacagcgtgcatgagcatccaacgttggcgcaaccggacagctctggatgattcgggtcactcgaaaacacgacgaagatttcgcatttttgaccagtcgagatgacgatgcattcatatcgggttagacatggccagcttggattaccacctttacacgtacacatttaattctattcactctgaggggctcacgtacataagcattttgatatgaaaaagcagtggtcattagcttctggtaatattgcattggggtgcgggcttcttttcctttcttgcgaaacgcatatactcgacagtctcttctgtacgacttgttcgaggctcaccacctaagatattacgatcgtcactccgtcatctgaaccatatccgacattggcttcaagcctggatccaccgctccgaacttctggccgagcttcagtgaaacaagtagttctctcgatgattctggacggatggcttactcctaagggacgtctttctcgtagcaacacaagtctcgtgcacgaacctcggccttacccttgggaacacagatctcggacgactttgtcttgagaccctagtggatcaaacctagttgaattggttgaccccataccgccacatggccaggtgcgatcgatcctataatgacgaactagactgggcggatcgctgtagaaccagcgcggcgccgacacagcatggagggaagacgatggagatcataatctgggtatcttaatgtccgagctcactacagactacggtgacaagcgctgtttttgttttcctttttgtcacttgcgcgctggatctaatattgtaaaaaagaggcatctgacaaagtcggttggggaagctaaggtgaacgaagtcctcactcacacgaccacaaagtaaacgcgtggaacctgaagtaggaaagcatgggaagaagtggtggaataccagagcaaacaaagagaggctgaggccacattatcctagccccataaagatgggggacaatgaaagacgatacgcgcgagcacctgctaaagtcctcttctgagt

SEQ ID NO: 12317 - DNA, 990 bp, Muscodor strobelii
  misc_feature: SGI cDNA ID NO. 563996
  misc_feature: Encodes the peptide sequence at SEQ ID NO 12318
atggcacagcttttgggcaaagaagttggacgaattggatttggtcttatgggcttcacatggcgtgccaacccatgctcgaccgagcaggccattgagaccatgcgaactgcgttgaagcaaggaatgaccttctggaacggaggcgagttctacggtccgccagaatacaactcactcgtactccttgagaagtatttggcaaaatatcccgaggatgccgacaaatttgtgctttcaatcaaaggtggtatgaacatcgcaaagggccaagcagatggctcgccagcgaatacgcggcgtactattgacgattgtatggctcagctcaaagggcgtaagaagatcgacctatttgagttcgcccgtcgcgatccaaatgtgccaatggagaccacttttagtgtaatggacaaagagtatgttcaaactggcaagataggtggcataagcctttcagaagtccgagccgagacgattcacgaagctgtcaagcacaccaaagtgtctgctgtagaggttgagctttcactgttcacgaccgacgttctcgagaatggtgtcgcagccgcgtgcgcgcaatatggcattccgcttattgcgtactcgccgctcgggatgggactgttgactggtcagattcgcaaattcgaagaccttcctaaggattctcacttgcgccactttccgagatatcaacccgaaaactttgagatcaatatcgaacttgttacagaagtcgagaagcttgccgagaagaaggggtgcacgcctgcgcaatttgccattaactgggtgcgagcactctcgaaacgaccgggaatgccgatgattatcccaatccctggtggcacaacctcagcacgagtagaggagaacagtaaactagttgaactcacagacgaagaattgtcacagatcgatacaattttggctaaattcacgaccgctggtgatcgatatccagctggtgtaccgacaaacacgtag

SEQ ID NO: 12318 - protein, 329 aa, Muscodor strobelii
  misc_feature: SGI Peptide ID NO. 563996
  misc_feature (4)..(312): Pfam Id: PF00248 Pfam Desc: Aldo/keto reductase family
  misc_feature (1)..(329): NCBI GI: 67904384 Blast Desc: AN9179.2 [Aspergillus nidulans FGSC A4] gi|40742280|gb|EAA61470.1| AN9179.2 [Aspergillus nidulans FGSC A4] gi|259485392|tpe|CBF82377.1| TPA: pyridoxal reductase (AKR8),
  misc_feature (1)..(329): NCBI GI: 238484713 Blast Desc: aldo/keto reductase, [Aspergillus flavus NRRL3357] gi|220701645|gb|EED57983.1| aldo/keto reductase, [Aspergillus flavus NRRL3357]
  misc_feature (1)..(329): NCBI GI: 115492031 Blast Desc: conserved [Aspergillus terreus NIH2624] gi|114197503|gb|EAU39203.1| conserved [Aspergillus terreus NIH2624]
  misc_feature (1)..(329): NCBI GI: 145257414 Blast Desc: An04g03570 [Aspergillus niger] gi|134058638|emb|CAK38622.1| protein product [Aspergillus niger]
  misc_feature (1)..(329): NCBI GI: 169767802 Blast Desc: [Aspergillus oryzae RIB40] gi|83766227|dbj|BAE56370.1| protein product [Aspergillus oryzae]
  misc_feature (1)..(329): NCBI GI: 261357533 Blast Desc: pyridoxal reductase [Verticillium albo-atrum VaMs.102]
  misc_feature (1)..(329): NCBI GI: 85091461 Blast Desc: NCU09141 [Neurospora crassa OR74A] gi|28920304|gb|EAA29677.1| NCU09141 [Neurospora crassa OR74A]
  misc_feature (1)..(329): NCBI GI: 256735285 Blast Desc: NECHADRAFT_90163 [Nectria haematococca mpVI 77-13-4]
  misc_feature (1)..(328): NCBI GI: 85119285 Blast Desc: NCU02930 [Neurospora crassa OR74A] gi|28927423|gb|EAA36376.1| NCU02930 [Neurospora crassa OR74A]
  misc_feature (1)..(321): NCBI GI: 156062168 Blast Desc: SS1G_01199 [Sclerotinia sclerotiorum 1980] gi|154696536|gb|EDN96274.1| SS1G_01199 [Sclerotinia sclerotiorum 1980]
  misc_feature (1)..(321): SWISSPROT Homolog: EC 1.1.1.65 Pyridoxine 4-dehydrogenase
MAQLLGKEVGRIGFGLMGFTWRANPCSTEQAIETMRTALKQGMTFWNGGEFYGPPEYNSLVLLEKYLAKYPEDADKFVLSIKGGMNIAKGQADGSPANTRRTIDDCMAQLKGRKKIDLFEFARRDPNVPMETTFSVMDKEYVQTGKIGGISLSEVRAETIHEAVKHTKVSAVEVELSLFTTDVLENGVAAACAQYGIPLIAYSPLGMGLLTGQIRKFEDLPKDSHLRHFPRYQPENFEINIELVTEVEKLAEKKGCTPAQFAINWVRALSKRPGMPMIIPIPGGTTSARVEENSKLVELTDEELSQIDTILAKFTTAGDRYPAGVPTNT

SEQ ID NO: 12319 - DNA, 1437 bp, Muscodor strobelii
  misc_feature: SGI EST ID NO. CUFF.29147.0
  misc_feature: Variant of the nucleotide sequence at SEQ ID NO 12317
aaacgaacacgcttgtttcaggtattcatctggctgcacacacttttctcccactattagatataattgagatctcctaacaggctctactggtttcctccaaagtagtcaacatggcacagcttttgggcaaagaagttggacgaattggatttggtcttatgggcttcacatggcgtgccaacccatgctcgaccgagcaggccattgagaccatgcgaactgcgttgaagcaaggaatgaccttctggaacggaggcgagttctacggtccgccagaatacaactcactcgtactccttgagaagtatttggcaaaatatcccgaggatgccgacaaatttgtgctttcaatcaaaggtggtatgaacatcgcaaagggccaagcagatggctcgccagcgaatacgcggcgtactattgacgattgtatggctcagctcaaagggcgtaagaagatcgacctatttgagttcgcccgtcgcgatccaaatgtgccaatggagaccacttttagtgtaatggacaaagagtatgttcaaactggcaagataggtggcataagcctttcagaagtccgagccgagacgattcacgaagctgtcaagcacaccaaagtgtctgctgtagaggttgagctttcactgttcacgaccgacgttctcgagaatggtgtcgcagccgcgtgcgcgcaatatggcattccgcttattgcgtactcgccgctcgggatgggactgttgactggtcagattcgcaaattcgaagaccttcctaaggattctcacttgcgccactttccgagatatcaacccgaaaactttgagatcaatatcgaacttgttacagaagtcgagaagcttgccgagaagaaggggtgcacgcctgcgcaatttgccattaactgggtgcgagcactctcgaaacgaccgggaatgccgatgattatcccaatccctggtggcacaacctcagcacgagtagaggagaacagtaaactagttgaactcacagacgaagaattgtcacagatcgatacaattttggctaaattcacgaccgctggtgatcgatatccagctggtgtaccgacaaacacgtagaacgagctggcgaatctttgaatgacggtattgtgaaattgtgggaagcgcggatgggaaacatataaggtggcaatgacttggcacgggtccttagcacatcgtttttcgtcacctgtgtaaggactctgaaattagacattgatactattagatttacacctgatcctacttttcgggcactcgccaaatgttgtttcgatgagctacaaatggttatctttctaacatgcgatcgaagtttaacgagggagctacgtggagaatgggccaggcgatggagccacaagagaaccccaaacaaccaaaattggagcaagacgtttgatatcgg

SEQ ID NO: 12320 - DNA, 318 bp, Muscodor strobelii
  misc_feature: SGI cDNA ID NO. 563997
  misc_feature: Encodes the peptide sequence at SEQ ID NO 12321
atgaaggctactatgattgcactgttcggtctttttgccactgttatcacagccgccccaaatcccaaatatcatacaggcagcccagttccctacgttgcttgccctcctggactctatgctgagccacaatgctgcgcgaccgacgtcctcggcattgcggatttggactgtcattctccctcggccgttgcaaagagtgctgcgaacttcagggccatctgcgccaaaggtggccagcgcgctcgatgctgcgttattcctgttctgggccagggtgttctctgcgagactcctgttggcctcggagagcagtaa

SEQ ID NO: 12321 - protein, 105 aa, Muscodor strobelii
  misc_feature: SGI Peptide ID NO. 563997
  misc_feature (34)..(99): Pfam Id: PF06766 Pfam Desc: Fungal hydrophobin
  misc_feature (11)..(102): NCBI GI: 154125601 Blast Desc: hydrophobin [Hypocrea virens]
  misc_feature (6)..(104): NCBI GI: 37724083 Blast Desc: hydrophobin [Gibberella moniliformis]
  misc_feature (1)..(102): NCBI GI: 164425836 Blast Desc: NCU08192 [Neurospora crassa OR74A] gi|157071084|gb|EAA30046.2| NCU08192 [Neurospora crassa OR74A]
  misc_feature (1)..(104): NCBI GI: 46109898 Blast Desc: FG01831.1 [Gibberella zeae PH-1] gi|91221408|gb|ABE27986.1| hydrophobin 5 precursor [Fusarium culmorum]
  misc_feature (35)..(101): NCBI GI: 1709966 Blast Desc: QID3_TRIHA RecName: Full=Cell wall protein qid3; Flags: Precursor gi|460819|emb|CAA50728.1| QID3 [Hypocrea lixii]
  misc_feature (35)..(101): NCBI GI: 154125605 Blast Desc: hydrophobin [Hypocrea virens]
  misc_feature (32)..(102): NCBI GI: 1706154 Blast Desc: CRYP_CRYPA RecName: Full=Cryparin; Flags: Precursor gi|305085|gb|AAA19638.1| cryparin [Cryphonectria parasitica]
  misc_feature (3)..(102): NCBI GI: 39950019 Blast Desc: MGG_01173 [Magnaporthe grisea 70-15] gi|4337063|gb|AAD18059.1| magnaporin [Magnaporthe grisea] gi|145021037|gb|EDK05166.1| MGG_01173 [Magnaporthe grisea 70-15]
  misc_feature (1)..(102): NCBI GI: 171685270 Blast Desc: protein product [Podospora anserina] gi|170942596|emb|CAP68248.1| protein product [Podospora anserina]
  misc_feature (32)..(100): NCBI GI: 25091421 Blast Desc: THYD_CLAFS RecName: Full=Trihydrophobin; AltName: Full=CFTH1; Flags: Precursor gi|6448504|emb|CAB61236.1| Trihydrophobin [Claviceps fusiformis]
MKATMIALFGLFATVITAAPNPKYHTGSPVPYVACPPGLYAEPQCCATDVLGIADLDCHSPSAVAKSAANFRAICAKGGQRARCCVIPVLGQGVLCETPVGLGEQ

SEQ ID NO: 12322 - DNA, 996 bp, Muscodor strobelii
  misc_feature: SGI EST ID NO. CUFF.29156.0
  misc_feature: Variant of the nucleotide sequence at SEQ ID NO 12320
gagaaatattctaatcggaacaagaatctagtcctcaccttcatcattcagggccatctgcaaccaacgtcttcttcttcaacaaaaccacatctcgttcaccattctcgcctgtagcaatataatcaagcacgaaacccatcgccaaacatgaaggctactatgattgcactgttcggtctttttgccactgttatcacagccgccccaaatcccaaatatcatacaggcagcccagttccctacgttgcttgccctcctggactctatgctgagccacaatgctgcgcgaccgacgtcctcggcattgcggatttggactgtcattctccctcggccgttgcaaagagtgctgcgaacttcagggccatctgcgccaaaggtggccagcgcgctcgatgctgcgttattcctgttctgggccagggtgttctctgcgagactcctgttggcctcggagagcagtaaagataactaggcaattatagggttatgggctagataccaatatcttctaattgaagacaacagctcggttgctcggggaatttcggtcgtggggaagttgatttgagttgttgatgctgtctttcttgtattgaggggattcgtcgcatgattggggtacctttcacttctgatacatatgatctgggtggcgttagaacactagccttaagatgtttcattttcgatcggggtcttaatagatattggtcgtcgtgtagcggactctttggagacgggtttaacattgtgactgagtatcacaaaggttgaacgagacagattacatcatgttcataaattactctggagttctacttgaatgtgtaacgaactccatttctgacgcactcggcattgtccaagacgtgtgctcgtgattttggagaggatatattgaaatggcccactcatgtaaacactcatgtgcttgggtccggcatctcatcttctctcttaataaagcgagcgctccaaggacatgtttca

SEQ ID NO: 12323 - DNA, 2064 bp, Muscodor strobelii
  misc_feature: SGI cDNA ID NO. 563998
  misc_feature: Encodes the peptide sequence at SEQ ID NO 12324
atggctgtcgagtcacttgtagtgggccttggcttttttgtttctgctgtctcatcgacactcttcacgaacgaatcatctggcgccctgtttcttggcaacgataggctcgtctctgctgtcaataaatccacgggcgcgatcgactatctgacgctcgatggtcaggacctactgggatcaaaaaactatattccaaacacgccaggaggatcctcaggcaatgggcgctcaggtattggaccgtacttagactgctattgcattccttctggcacatacacccccgggggcgttaatgcaacctataaactttaccaggacgtcgactcatcagggacatcatggggcggtatcgttatgagtgagatctatcctccaactggccagctctttgaatcatactggtttcttcgcgatggcgaaacaggactgcatacttttactcggctggcatactataatgagacaacgccatttttacgaaatttgcaggagcttcggactcttttcagaccaaatacgccactctggacatatttgatcacggacgataccttccacgcgcccttgcctttacccgatcctgccaccggcgataccacgaacgcaactaccgttcaagatgcgacgtggtacattggtaatcgcacgaacgacccatatgtcgaacaaatgagcgatttctacaccaagtacactttccaggcggtatggcgcgaccatgatgtgcatgggatgttcggcgacggtcggcacagcgaaggcaatctgacatacggtgcatgggttgtcatgaacaccaaggacacatactttggaggacccatacatagcgatcttgttgttgatggaatagtgtacaactatattgtgtccaatcatcatggcgatggcacgcccaatatcacgcatggatttgatcggacttttgggccgtattacttccacttcaatagtggccctgctggcggaggatggttgccactatacgaggaggcgcttacttttgcttccccaacttggaacgcgcaattctacgacgacatctccgaatatatccctggctacgtcccgacttccggccgaggttcctggggagcgcatgtccagctccctgaaggcgcggagaacgccatcgctgtgcttgcccagaataacgttgattttcaggataatgtggaagacgtcaaggcatatcaatattgggctgatattagtagtgaatcaggccaagttcagatcgaccgcgtgaaggcaggaacctatcgactcacggtctacgctgacggcatcttcggcgactatacacaagatgatatcactattgtagccggtcaagagaccgacagtggttccgtagtctgggaacccgagtcggccggcaaggagatctggaggattggaagacccgacaaatcaggcggcgaatggaaacatgggtatatgcggaacacgactgcaccgcttcagccgccggagtatagaatctattttggcgcctatgactacatcgacgatttccccagtggtgtcaactatcatgttgggtcttcggtggaatcggaggacttcaattacgtgcattggtctgtcttcggaggatatgcgaatttccgccggcctgtgccggacgctggacatggcgagatcaacaactggacaataacattcaatgttgccgaggcggatctgaatgagacgagcgaggcgacattcactgttcagcttgctggtgccaagaccgcagctggcaacacagacgtgtggaatgctactcaaccctactccgatctaccattcgtggtcgcaatcaatgggcgagaacttgagccttgggtcataccttattatcattcatcttcttgtgccgtcagaagtgcggttgtttgctatcaggtcgccaacaagttcacgttcccgacaagttacctgaagaccggatcgaatgtgacgaatgaaattatcctgagcctaccattcaatgcgacagactatgagagtgctgtgctaccacagagtgtttatgtgcaatacgatgccctaaggttagaagccaaatag

SEQ ID NO: 12324 - protein, 687 aa, Muscodor strobelii
  misc_feature: SGI Peptide ID NO. 563998
  misc_feature (5)..(685): NCBI GI: 46123479 Blast Desc: FG06117.1 [Gibberella zeae PH-1]
  misc_feature (17)..(685): NCBI GI: 256731042 Blast Desc: polysaccharide lyase family 4 [Nectria haematococca mpVI 77-13-4]
  misc_feature (16)..(687): NCBI GI: 189198832 Blast Desc: rhamnogalacturonan lyase [Pyrenophora tritici-repentis Pt-1C-BFP] gi|187982852|gb|EDU48340.1| rhamnogalacturonan lyase [Pyrenophora tritici-repentis Pt-1C-BFP]
  misc_feature (7)..(687): NCBI GI: 261359710 Blast Desc: rhamnogalacturonate lyase [Verticillium albo-atrum VaMs.102]
  misc_feature (3)..(687): NCBI GI: 145603458 Blast Desc: MGG_06041 [Magnaporthe grisea 70-15] gi|145011682|gb|EDJ96338.1| MGG_06041 [Magnaporthe grisea 70-15]
  misc_feature (21)..(687): NCBI GI: 95025927 Blast Desc: rhamnogalacturonan lyase [Emericella nidulans]
  misc_feature (21)..(687): NCBI GI: 67540450 Blast Desc: AN6395.2 [Aspergillus nidulans FGSC A4] gi|40739227|gb|EAA58417.1| AN6395.2 [Aspergillus nidulans FGSC A4] gi|259479381|tpe|CBF69554.1| TPA: Rhamnogalacturonan lyase
  misc_feature (21)..(685): NCBI GI: 238488423 Blast Desc: conserved [Aspergillus flavus NRRL3357] gi|220697837|gb|EED54177.1| conserved [Aspergillus flavus NRRL3357]
  misc_feature (25)..(685): NCBI GI: 119494277 Blast Desc: NFIA_008140 [Neosartorya fischeri NRRL 181] gi|119412196|gb|EAW22137.1| conserved [Neosartorya fischeri NRRL 181]
  misc_feature (5)..(685): NCBI GI: 115449707 Blast Desc: conserved [Aspergillus terreus NIH2624] gi|114187624|gb|EAU29324.1| conserved [Aspergillus terreus NIH2624]
MAVESLVVGLGFFVSAVSSTLFTNESSGALFLGNDRLVSAVNKSTGAIDYLTLDGQDLLGSKNYIPNTPGGSSGNGRSGIGPYLDCYCIPSGTYTPGGVNATYKLYQDVDSSGTSWGGIVMSEIYPPTGQLFESYWFLRDGETGLHTFTRLAYYNETTPFLRNLQELRTLFRPNTPLWTYLITDDTFHAPLPLPDPATGDTTNATTVQDATWYIGNRTNDPYVEQMSDFYTKYTFQAVWRDHDVHGMFGDGRHSEGNLTYGAWVVMNTKDTYFGGPIHSDLVVDGIVYNYIVSNHHGDGTPNITHGFDRTFGPYYFHFNSGPAGGGWLPLYEEALTFASPTWNAQFYDDISEYIPGYVPTSGRGSWGAHVQLPEGAENAIAVLAQNNVDFQDNVEDVKAYQYWADISSESGQVQIDRVKAGTYRLTVYADGIFGDYTQDDITIVAGQETDSGSVVWEPESAGKEIWRIGRPDKSGGEWKHGYMRNTTAPLQPPEYRIYFGAYDYIDDFPSGVNYHVGSSVESEDFNYVHWSVFGGYANFRRPVPDAGHGEINNWTITFNVAEADLNETSEATFTVQLAGAKTAAGNTDVWNATQPYSDLPFVVAINGRELEPWVIPYYHSSSCAVRSAVVCYQVANKFTFPTSYLKTGSNVTNEIILSLPFNATDYESAVLPQSVYVQYDALRLEAK

SEQ ID NO: 12325 - DNA, 2351 bp, Muscodor strobelii
  misc_feature: SGI EST ID NO. CUFF.29159.0
  misc_feature: Variant of the nucleotide sequence at SEQ ID NO 12323
ctcgaagacctcgcagatcttgatgaaaatccggctgcccaagcctcgatcgcaacgtaaacacatggcaccctcgacatccgtggcaacccataccatgtccggagatgctatgggatcacggagtggttcatcgccccgtgcctgccaagcacttaagctatcgggacatatttcgtgacagtgggcgcgaaaacctgtcgtgttcattcgcataccaccgatacgacctcactatcatatgagaagctcttttagtaacacgatggctgtcgagtcacttgtagtgggccttggcttttttgtttctgctgtctcatcgacactcttcacgaacgaatcatctggcgccctgtttcttggcaacgataggctcgtctctgctgtcaataaatccacgggcgcgatcgactatctgacgctcgatggtcaggacctactgggatcaaaaaactatattccaaacacgccaggaggatcctcaggcaatgggcgctcaggtattggaccgtacttagactgctattgcattccttctggcacatacacccccgggggcgttaatgcaacctataaactttaccaggacgtcgactcatcagggacatcatggggcggtatcgttatgagtgagatctatcctccaactggccagctctttgaatcatactggtttcttcgcgatggcgaaacaggactgcatacttttactcggctggcatactataatgagacaacgccatttttacgaaatttgcaggagcttcggactcttttcagaccaaatacgccactctggacatatttgatcacggacgataccttccacgcgcccttgcctttacccgatcctgccaccggcgataccacgaacgcaactaccgttcaagatgcgacgtggtacattggtaatcgcacgaacgacccatatgtcgaacaaatgagcgatttctacaccaagtacactttccaggcggtatggcgcgaccatgatgtgcatgggatgttcggcgacggtcggcacagcgaaggcaatctgacatacggtgcatgggttgtcatgaacaccaaggacacatactttggaggacccatacatagcgatcttgttgttgatggaatagtgtacaactatattgtgtccaatcatcatggcgatggcacgcccaatatcacgcatggatttgatcggacttttgggccgtattacttccacttcaatagtggccctgctggcggaggatggttgccactatacgaggaggcgcttacttttgcttccccaacttggaacgcgcaattctacgacgacatctccgaatatatccctggctacgtcccgacttccggccgaggttcctggggagcgcatgtccagctccctgaaggcgcggagaacgccatcgctgtgcttgcccagaataacgttgattttcaggataatgtggaagacgtcaaggcatatcaatattgggctgatattagtagtgaatcaggccaagttcagatcgaccgcgtgaaggcaggaacctatcgactcacggtctacgctgacggcatcttcggcgactatacacaagatgatatcactattgtagccggtcaagagaccgacagtggttccgtagtctgggaacccgagtcggccggcaaggagatctggaggattggaagacccgacaaatcaggcggcgaatggaaacatgggtatatgcggaacacgactgcaccgcttcagccgccggagtatagaatctattttggcgcctatgactacatcgacgatttccccagtggtgtcaactatcatgttgggtcttcggtggaatcggaggacttcaattacgtgcattggtctgtcttcggaggatatgcgaatttccgccggcctgtgccggacgctggacatggcgagatcaacaactggacaataacattcaatgttgccgaggcggatctgaatgagacgagcgaggcgacattcactgttcagcttgctggtgccaagaccgcagctggcaacacagacgtgtggaatgctactcaaccctactccgatctaccattcgtggtcgcaatcaatgggcgagaacttgagccttgggtcataccttattatcattcatcttcttgtgccgtcagaagtgcggttgtttgctatcaggtcgccaacaagttcacgttcccgacaagttacctgaagaccggatcgaatgtgacgaatgaaattatcctgagcctaccattcaatgcgacagactatgagagtgctgtgctaccacagagtgtttatgtgcaatacgatgccctaaggttagaagccaaatagcagtagacaacaggaatgctga

SEQ ID NO: 12326 - DNA, 3477 bp, Muscodor strobelii
  misc_feature: SGI cDNA ID NO. 563999
  misc_feature: Encodes the peptide sequence at SEQ ID NO 12327
atgaggctaccacgaagaattacgatagacgggaagacttacgtgtgccactcagatgaggatggtggcaattacaaagaggaatcttcaatggagctacaaaagtatgacaataagagtctttcagagattccagaatacacgtacgacaagctcccaaatggagagagaaggatacgattgctcgttcttgattccgccagcgacaagacctcggaaataaactgcgagctagttgaagcagattatggaaacagctttcacatcccttcgaaaccaataccaaggaccggggaacacagaaaagcgaagggggcttcagaagatgaaaacaggaagatgctcgaaaaggaggccgaggaagtactccgtcgacagataaagtatgaagcactatcttggtgttggggcgatggcaaagaaatatatgctattaggattaagaaaaatggcataatgtataaacggaggatcaggaaggaactagctttggctctccgataccttcggcatgaaaacaaaacacggacgatctgggttgacagcatttgcatcaaccaacgagacgatagcgaaagaaatcatcaggtccaaatgatgtcgagaatctacaccagggcggaacaggtcttggtatggctgggagactcagacgccgacagtatcaaagccattgatttcattaagagcgaggtcctagaacttaagaatttcgatacaatctgctcagacaagagattcgcacataagtggagagctttgatgatgctcatgcagcggccttggttttcgcggaggtggatgattcaagaaatcactctaggccggattgcaactatacattgtggcgaatcaacaattgattggaacgattttgctatagctgtggagttattcgttgaggttgaaaacgcaacacaccgtctttccgaagtcatgcagaaagacgagaaatttcgccatattccgggatggtttgagcatgtttcggaacttggggccagtcttcttgtgcaagctaccgggaaggtctttcgcacgcagagcctaggaccagagacctcgcatctccttcaaaatccaaacaatcctctatacacaaagaggaaagaaacggatgttatctacaatgcggaaacgcattcaaaggcgctggcagagcgacctcaagcaatcgatcccttggagagacgaagtctgcttagtcttcaacatttggtaaccaccatgtttatttttgatacatcagagcctcgtgatgtaatatactcgctcctagctgttgcacgcgatgcaaccgcctccgcggaagactctatgctatctgatcccgacagcgcattactgatacgaacaggattttctgcttttcttgaagctaagccgttcaaggttgattacggtagggcgtactcagatgtgtgtcgagacttcgtgcaatttagcattgatcgcgcgtatgagatagactcagtgcaagcactcgatatcctgtgcagaccctgggccttggaaccgccgaaagagaagtcgagtcgtttgaaaataaaacggactgacgcaaagaaagatcgtagcggacctaaacgtacatattggacgacacaaacggaaagtggaactaaaacagacgagcgcacaacggaaaagtatgtcgacgattgttataagttgtggaaaaagtcagtggagcttcgagaagagggggggccagagaaatcagagaacccaggagagccagaagggcaaactcaattcgagctcatagaattggatgaactagtgaaggacaagtcggggcagacttctcaaagggtagagtggaacatgagcggaattaacaaaagcaagatttctaccgaacttcgatcattgaaagataagcatttcccgtggaaggtcgaggaatccaagaaattcgcgagcaaagtccgcccctttggtctctttcatcatgctggttcggtcgagaaaacgggtcgagtgaacgcagaccctcttgtcggcgctcctgaagatggccacaaaaactatagcgcagcacaggctcaagagcttagcattaagaccatcaaatttcgcaaaagatcaaaactcaagcactatagcctatatgtcagagggttcctatttgatgaaattcagagcgtcacagatgcctcacaggatggctttatacccacgtcttggatcgaactcggcggttgggatcatcctgagcatagagatccgccggatagcttttggagaaccattgttgctgatagagggcgagacaatcggaaccccccgtactattttgctcgggcatgcagagaatcagcgatacgcggaggtttgcgtagtggtggcatcaataccaaggctttgatcaacaatgaacgaaactcaattaccgctgagttctgccggcgagtccaagcggtaatatggaatcgccgattgttcaagacaaagcgtggtatcatgggtcttgggccgagagatatcgaaagaggtgataaagttggtattatctatggctgcaccgtgcccattatcctgagagagactgttaaagaccgcaatgtgtttccaatggaaaagatggaagatgctatagaagccctgaagtccgtcatcagacggagccgcgagaaaagggaaagtaagttgaaatatggacagactaaaatgaatggcaaggggcttgataaagaaacgaggaaagtcatgaaagagatcaatatgaaactcaatgaaaaatctggggcagaacacaaaaaacaggagaggaacgagcctaaaacagcaaagcataacgaggcgcccggtgaggacaaaatgaaattagcacaagacgagcacgggagtgatggatccaatatgaatcccagatcggtcgaagttgtcggccaaatcccagatctttatttagaggttgaaactagggttcagccgccagatgagaatgactccgagtcagggacgggccacgagatgtcaaaacaagctagcaaagattcgggagtaatcatcacaaatcccgaagtaagtgttgacgtcgatccagatcaaggttccagagagtttacagactctggtaaatatgacgatgatagttccaggcaacaagaagaggtcggtggcctgtcaacatccagtgctgaaggatcaacggaagctagaaagctggacccagaagccctcagcgatgagccaaaagactcaacagaggggtcgaggaactcgaatgcgagcgatgacaaccaaccaaaagatgagataggagagaagggccagcaaatagagggaggaacaggacaggagagaacaaaatcaaagacgatacgaaatcaagaggaggccgataggaatgatctacttcgattctatacactcattggcgaatgctatgttcatggtatgatggatggcgaagctctgaggcggaaattctacgatgacatatcggaccagacctttgagatcagatga

SEQ ID NO: 12327 - protein, 1158 aa, Muscodor strobelii
  misc_feature: SGI Peptide ID NO. 563999
  misc_feature (129)..(271): Pfam Id: PF06985 Pfam Desc: Heterokaryon incompatibility protein (HET)
  misc_feature (129)..(218): Pfam Id: PF06985 Pfam Desc: Heterokaryon incompatibility protein (HET)
  misc_feature (35)..(958): NCBI GI: 169611378 Blast Desc: SNOG_08800 [Phaeosphaeria nodorum SN15] gi|160702276|gb|EAT83968.2| SNOG_08800 [Phaeosphaeria nodorum SN15]
  misc_feature (32)..(473): NCBI GI: 169609613 Blast Desc: SNOG_07899 [Phaeosphaeria nodorum SN15] gi|160701878|gb|EAT84175.2| SNOG_07899 [Phaeosphaeria nodorum SN15]
  misc_feature (646)..(927): NCBI GI: 169609613 Blast Desc: SNOG_07899 [Phaeosphaeria nodorum SN15] gi|160701878|gb|EAT84175.2| SNOG_07899 [Phaeosphaeria nodorum SN15]
  misc_feature (126)..(439): NCBI GI: 242799835 Blast Desc: Ankyrin and HET domain protein [Talaromyces stipitatus ATCC 10500] gi|218716807|gb|EED16228.1| Ankyrin and HET domain protein [Talaromyces stipitatus ATCC 10500]
  misc_feature (45)..(512): NCBI GI: 238494932 Blast Desc: conserved [Aspergillus flavus NRRL3357] gi|220695352|gb|EED51695.1| conserved [Aspergillus flavus NRRL3357]
  misc_feature (45)..(512): NCBI GI: 169777725 Blast Desc: [Aspergillus oryzae RIB40] gi|83772065|dbj|BAE62195.1| protein product [Aspergillus oryzae]
  misc_feature (105)..(504): NCBI GI: 169598776 Blast Desc: SNOG_02196 [Phaeosphaeria nodorum SN15] gi|111069288|gb|EAT90408.1| SNOG_02196 [Phaeosphaeria nodorum SN15]
  misc_feature (112)..(515): NCBI GI: 145237736 Blast Desc: An07g04330 [Aspergillus niger] gi|134075989|emb|CAK48183.1| protein product [Aspergillus niger]
  misc_feature (116)..(434): NCBI GI: 212541046 Blast Desc: Ankyrin and HET domain protein [Penicillium marneffei ATCC 18224] gi|210067977|gb|EEA22069.1| Ankyrin and HET domain protein [Penicillium marneffei ATCC 18224]
  misc_feature (24)..(351): NCBI GI: 226283548 Blast Desc: conserved [Paracoccidioides brasiliensis Pb01]
MRLPRRITIDGKTYVCHSDEDGGNYKEESSMELQKYDNKSLSEIPEYTYDKLPNGERRIRLLVLDSASDKTSEINCELVEADYGNSFHIPSKPIPRTGEHRKAKGASEDENRKMLEKEAEEVLRRQIKYEALSWCWGDGKEIYAIRIKKNGIMYKRRIRKELALALRYLRHENKTRTIWVDSICINQRDDSERNHQVQMMSRIYTRAEQVLVWLGDSDADSIKAIDFIKSEVLELKNFDTICSDKRFAHKWRALMMLMQRPWFSRRWMIQEITLGRIATIHCGESTIDWNDFAIAVELFVEVENATHRLSEVMQKDEKFRHIPGWFEHVSELGASLLVQATGKVFRTQSLGPETSHLLQNPNNPLYTKRKETDVIYNAETHSKALAERPQAIDPLERRSLLSLQHLVTTMFIFDTSEPRDVIYSLLAVARDATASAEDSMLSDPDSALLIRTGFSAFLEAKPFKVDYGRAYSDVCRDFVQFSIDRAYEIDSVQALDILCRPWALEPPKEKSSRLKIKRTDAKKDRSGPKRTYWTTQTESGTKTDERTTEKYVDDCYKLWKKSVELREEGGPEKSENPGEPEGQTQFELIELDELVKDKSGQTSQRVEWNMSGINKSKISTELRSLKDKHFPWKVEESKKFASKVRPFGLFHHAGSVEKTGRVNADPLVGAPEDGHKNYSAAQAQELSIKTIKFRKRSKLKHYSLYVRGFLFDEIQSVTDASQDGFIPTSWIELGGWDHPEHRDPPDSFWRTIVADRGRDNRNPPYYFARACRESAIRGGLRSGGINTKALINNERNSITAEFCRRVQAVIWNRRLFKTKRGIMGLGPRDIERGDKVGIIYGCTVPIILRETVKDRNVFPMEKMEDAIEALKSVIRRSREKRESKLKYGQTKMNGKGLDKETRKVMKEINMKLNEKSGAEHKKQERNEPKTAKHNEAPGEDKMKLAQDEHGSDGSNMNPRSVEVVGQIPDLYLEVETRVQPPDENDSESGTGHEMSKQASKDSGVIITNPEVSVDVDPDQGSREFTDSGKYDDDSSRQQEEVGGLSTSSAEGSTEARKLDPEALSDEPKDSTEGSRNSNASDDNQPKDEIGEKGQQIEGGTGQERTKSKTIRNQEEADRNDLLRFYTLIGECYVHGMMDGEALRRKFYDDISDQTFEIR

SEQ ID NO: 12328 - DNA, 1392 bp, Muscodor strobelii
  misc_feature: SGI cDNA ID NO. 564000
  misc_feature: Encodes the peptide sequence at SEQ ID NO 12329
atgttcattccactcaactttgagcacgacaccacgaaaaaaatatggggcgcaatgaataaaatttgtcagactcttgacggcatacttaattctgcgggtgatgatagcttcacagccttccagacacaggattatacgaatgacagagatctgattgaatttctccgcatgcctgagcttaagcggccgatggaaggctgttcgaggtgccagtctcgattcctgacattggaggaagggtttagacacttgaacgaagaacacttcgaaaacagcaccggagatatgtcggagtcttcagccgcagctcgacgactttatcttcgcacaacactccaaatagaacttgaagctcgcgtaaacgctttcctgtctcttctcgaaggatgtacaaaagcattccaggagctggggaaaattgccgaagacatgctcgttggcaccctcaagacggcagatcatgttgaaacgaaaggatactatcccgtcattgagagcctagtaagagtctttgaacacatcaccatcattcttgttttctctgcagacttcatggccaaggcggataagacaatgagaacagatccacagagagcattggactgtggaaagttcgtgaccaaattaagaggatccttgaatgagatcatcaagaaggccgaaaaagatcttgtccaggcaaggagagacatcattttggccagcaatactgattacggtacggacatattggcttctattggccctgagttcatgattgcattggtctgtaatggactgttcttccggcgacttgaaaatgcgcaaacaaaaagttcaagtgagaaggacagaacgacaatagatgcaagcgatttgtacaaaagatacgccaataagttacaattgcaggtcaatcaacggcctcagaaacgcctacttcctgacatatatgcgctagaggaagaactggagatcctgcaaaaggtcatccattggcaaataaaattttgttatgacttctacagagtgctagatccggagtcatatagaatcacaacaaaaacacgaatatctcacttcagccccgaaaggcgctacctacacaagacaattgaccgcttgaaggtccgaagcgcggaatttacaagcctgctcgtgcgctcagccaggctacgggatcagctacaacagagcattgaaatcgaagaagaaagtcacggaaatgcgatccgggtgttcacattcgttacactgttcttcctcccactatcattcgtgacgagctttttcgggatgaatacagcagatattagggacagtaatcagaatcaggccattttctggatcacctcaatcccgaccaccacagttgtcattggtcttgcatacatatacggctacaaatag

SEQ ID NO: 12329 - protein, 463 aa, Muscodor strobelii
  misc_feature: SGI Peptide ID NO. 564000
  misc_feature (287)..(462): NCBI GI: 169614111 Blast Desc: SNOG_10190 [Phaeosphaeria nodorum SN15] gi|160707279|gb|EAT82525.2| SNOG_10190 [Phaeosphaeria nodorum SN15]
  misc_feature (277)..(463): NCBI GI: 116191921 Blast Desc: [Chaetomium globosum CBS 148.51] gi|88181591|gb|EAQ89059.1| [Chaetomium globosum CBS 148.51]
  misc_feature (287)..(463): NCBI GI: 121700607 Blast Desc: ACLA_018460 [Aspergillus clavatus NRRL 1] gi|119396711|gb|EAW07142.1| ACLA_018460 [Aspergillus clavatus NRRL 1]
  misc_feature (264)..(443): NCBI GI: 259479279 Blast Desc: TPA: conserved [Aspergillus nidulans FGSC A4]
  misc_feature (264)..(443): NCBI GI: 67540622 Blast Desc: AN6481.2 [Aspergillus nidulans FGSC A4] gi|40739313|gb|EAA58503.1| AN6481.2 [Aspergillus nidulans FGSC A4]
  misc_feature (366)..(462): NCBI GI: 189199072 Blast Desc: conserved [Pyrenophora tritici-repentis Pt-1C-BFP] gi|187982972|gb|EDU48460.1| conserved [Pyrenophora tritici-repentis Pt-1C-BFP]
  misc_feature (363)..(459): NCBI GI: 171679918 Blast Desc: protein product [Podospora anserina] gi|170939585|emb|CAP64812.1| protein product [Podospora anserina]
  misc_feature (361)..(460): NCBI GI: 164425592 Blast Desc: NCU05502 [Neurospora crassa OR74A] gi|157070988|gb|EAA31228.2| [Neurospora crassa OR74A]
  misc_feature (362)..(460): NCBI GI: 116201313 Blast Desc: CHGG_08541 [Chaetomium globosum CBS 148.51] gi|88177059|gb|EAQ84527.1| CHGG_08541 [Chaetomium globosum CBS 148.51]
  misc_feature (404)..(459): NCBI GI: 256734428 Blast Desc: NECHADRAFT_31433 [Nectria haematococca mpVI 77-13-4]
MFIPLNFEHDTTKKIWGAMNKICQTLDGILNSAGDDSFTAFQTQDYTNDRDLIEFLRMPELKRPMEGCSRCQSRFLTLEEGFRHLNEEHFENSTGDMSESSAAARRLYLRTTLQIELEARVNAFLSLLEGCTKAFQELGKIAEDMLVGTLKTADHVETKGYYPVIESLVRVFEHITIILVFSADFMAKADKTMRTDPQRALDCGKFVTKLRGSLNEIIKKAEKDLVQARRDIILASNTDYGTDILASIGPEFMIALVCNGLFFRRLENAQTKSSSEKDRTTIDASDLYKRYANKLQLQVNQRPQKRLLPDIYALEEELEILQKVIHWQIKFCYDFYRVLDPESYRITTKTRISHFSPERRYLHKTIDRLKVRSAEFTSLLVRSARLRDQLQQSIEIEEESHGNAIRVFTFVTLFFLPLSFVTSFFGMNTADIRDSNQNQAIFWITSIPTTTVVIGLAYIYGYK

SEQ ID NO: 12330 - DNA, 2779 bp, Muscodor strobelii
  misc_feature: SGI EST ID NO. CUFF.29247.0
  misc_feature: Variant of the nucleotide sequence at SEQ ID NO 12328
tctggagaagaaacctgagactgtcgaagaaaaaaagccaggattttcaggttctgatgaggaagagttgtttgacaatcaactgtctgcaacgctatataatgcgacgcaataccaaaagcgtacaataggcactcaacctcgagcttctgcacgacgagatccacttcttccgccgtcaggggatacctcattagcgccatatgggcctgtttatcctctcacctcctacactgggacaggtgttgatacagaagtctcccaaagtcgcatgacgaggactaagaaaaacggcgacgcttccgaagatgagtcgacgttgataggaagtgtgatctcgaggcaggagaatgattcacgacgaatcacagctctcaaatcccaaggaatcgttgtcaatgatgtcgatatggtgagcaatgtaccggaggttttcggttttctaccttcgaagacggaatcagtggttcctgggtctctactagttagtaaagtgagtaaaccgaacgtctgggattacttagatgaccaagaagactcggaagaagattccaccacgcctatcaatttagccaaggacaagcacgatgcgaaggagtccagtatgtttcggaacgacacgaacacgcaacattcatctggagcatctcaagcccctctgacaccagtggagcctcgcgcacatgaccgcccgctgattccattctttcgctgggaccataataagacagctgaggaatgtatgggaagtgacatcatggtccgtcaagtactcgatgaagtccatcatcgattatccgaacacaatgatcattggaaattttacaaaagaggctccgacataacactcgaggatctgcaaaatccgacaataggctcattatatgccccacctagtggtaacattattgattctattctgacctttcgaagtacggcttcaaacaacaggaagcacgaattattcagtgcaataaaattcttcgtagaaatgttcattccactcaactttgagcacgacaccacgaaaaaaatatggggcgcaatgaataaaatttgtcagactcttgacggcatacttaattctgcgggtgatgatagcttcacagccttccagacacaggattatacgaatgacagagatctgattgaatttctccgcatgcctgagcttaagcggccgatggaaggctgttcgaggtgccagtctcgattcctgacattggaggaagggtttagacacttgaacgaagaacacttcgaaaacagcaccggagatatgtcggagtcttcagccgcagctcgacgactttatcttcgcacaacactccaaatagaacttgaagctcgcgtaaacgctttcctgtctcttctcgaaggatgtacaaaagcattccaggagctggggaaaattgccgaagacatgctcgttggcaccctcaagacggcagatcatgttgaaacgaaaggatactatcccgtcattgagagcctagtaagagtctttgaacacatcaccatcattcttgttttctctgcagacttcatggccaaggcggataagacaatgagaacagatccacagagagcattggactgtggaaagttcgtgaccaaattaagaggatccttgaatgagatcatcaagaaggccgaaaaagatcttgtccaggcaaggagagacatcattttggccagcaatactgattacggtacggacatattggcttctattggccctgagttcatgattgcattggtctgtaatggactgttcttccggcgacttgaaaatgcgcaaacaaaaagttcaagtgagaaggacagaacgacaatagatgcaagcgatttgtacaaaagatacgccaataagttacaattgcaggtcaatcaacggcctcagaaacgcctacttcctgacatatatgcgctagaggaagaactggagatcctgcaaaaggtcatccattggcaaataaaattttgttatgacttctacagagtgctagatccggagtcatatagaatcacaacaaaaacacgaatatctcacttcagccccgaaaggcgctacctacacaagacaattgaccgcttgaaggtccgaagcgcggaatttacaagcctgctcgtgcgctcagccaggctacgggatcagctacaacagagcattgaaatcgaagaagaaagtcacggaaatgcgatccgggtgttcacattcgttacactgttcttcctcccactgtgagccgtcactgtctaaattggtgttgcactaatcacgctgacaaactcagatcattcgtgacgagctttttcgggatgaatacagcagatattagggacagtaatcagaatcaggccattttctggatcacctcaatcccgaccaccacagttgtcattggtcttgcatacatatacggctacaaataggaaagctggcaagatcggcgacgtaacgcaggatatgcaagaaggatcaaagaacgagggaatcgtgctctacaatcagccgctgcgttagctgattcaactgggctctggagcaattctcaaaatgacctagagaagggcgacatggcacgacgcgaaacagatatgagtgttttgtctcatcactcgataggaaagagacgagggaagagtgttcgcttctggaatcttccaaggggtgacactttgccctgaagtgataaggaattatgcatgtttttttttcaatgtgagagagaggatagcaccacttcctattactagtgaaataaatgaaaatttt

SEQ ID NO: 12331 - DNA, 2004 bp, Muscodor strobelii
  misc_feature: SGI cDNA ID NO. 564001
  misc_feature: Encodes the peptide sequence at SEQ ID NO 12332
atgcggatgagtccacggtcgagttcaagcagtaattcgcgcgcgttaatcattctggagaagaaacctgagactgtcgaagaaaaaaagccaggattttcaggttctgatgaggaagagttgtttgacaatcaactgtctgcaacgctatataatgcgacgcaataccaaaagcgtacaataggcactcaacctcgagcttctgcacgacgagatccacttcttccgccgtcaggggatacctcattagcgccatatgggcctgtttatcctctcacctcctacactgggacaggtgttgatacagaagtctcccaaagtcgcatgacgaggactaagaaaaacggcgacgcttccgaagatgagtcgacgttgataggaagtgtgatctcgaggcaggagaatgattcacgacgaatcacagctctcaaatcccaaggaatcgttgtcaatgatgtcgatatggtgagcaatgtaccggaggttttcggttttctaccttcgaagacggaatcagtggttcctgggtctctactagttagtaaagtgagtaaaccgaacgtctgggattacttagatgaccaagaagactcggaagaagattccaccacgcctatcaatttagccaaggacaagcacgatgcgaaggagtccagtatgtttcggaacgacacgaacacgcaaactcttgacggcatacttaattctgcgggtgatgatagcttcacagccttccagacacaggattatacgaatgacagagatctgattgaatttctccgcatgcctgagcttaagcggccgatggaaggctgttcgaggtgccagtctcgattcctgacattggaggaagggtttagacacttgaacgaagaacacttcgaaaacagcaccggagatatgtcggagtcttcagccgcagctcgacgactttatcttcgcacaacactccaaatagaacttgaagctcgcgtaaacgctttcctgtctcttctcgaaggatgtacaaaagcattccaggagctggggaaaattgccgaagacatgctcgttggcaccctcaagacggcagatcatgttgaaacgaaaggatactatcccgtcattgagagcctagtaagagtctttgaacacatcaccatcattcttgttttctctgcagacttcatggccaaggcggataagacaatgagaacagatccacagagagcattggactgtggaaagttcgtgaccaaattaagaggatccttgaatgagatcatcaagaaggccgaaaaagatcttgtccaggcaaggagagacatcattttggccagcaatactgattacggtacggacatattggcttctattggccctgagttcatgattgcattggtctgtaatggactgttcttccggcgacttgaaaatgcgcaaacaaaaagttcaagtgagaaggacagaacgacaatagatgcaagcgatttgtacaaaagatacgccaataagttacaattgcaggtcaatcaacggcctcagaaacgcctacttcctgacatatatgcgctagaggaagaactggagatcctgcaaaaggtcatccattggcaaataaaattttgttatgacttctacagagtgctagatccggagtcatatagaatcacaacaaaaacacgaatatctcacttcagccccgaaaggcgctacctacacaagacaattgaccgcttgaaggtccgaagcgcggaatttacaagcctgctcgtgcgctcagccaggctacgggatcagctacaacagagcattgaaatcgaagaagaaagtcacggaaatgcgatccgggtgttcacattcgttacactgttcttcctcccactatcattcgtgacgagctttttcgggatgaatacagcagatattagggacagtaatcagaatcaggccattttctggatcacctcaatcccgaccaccacagttgtcattggtcttgcatacatatacggctacaaatag

SEQ ID NO: 12332 - protein, 667 aa, Muscodor strobelii
  misc_feature: SGI Peptide ID NO. 564001
  misc_feature (488)..(666): NCBI GI: 169614111 Blast Desc: SNOG_10190 [Phaeosphaeria nodorum SN15] gi|160707279|gb|EAT82525.2| SNOG_10190 [Phaeosphaeria nodorum SN15]
  misc_feature (481)..(667): NCBI GI: 116191921 Blast Desc: [Chaetomium globosum CBS 148.51] gi|88181591|gb|EAQ89059.1| [Chaetomium globosum CBS 148.51]
  misc_feature (491)..(667): NCBI GI: 121700607 Blast Desc: ACLA_018460 [Aspergillus clavatus NRRL 1] gi|119396711|gb|EAW07142.1| ACLA_018460 [Aspergillus clavatus NRRL 1]
  misc_feature (468)..(647): NCBI GI: 259479279 Blast Desc: TPA: conserved [Aspergillus nidulans FGSC A4]
  misc_feature (468)..(647): NCBI GI: 67540622 Blast Desc: AN6481.2 [Aspergillus nidulans FGSC A4] gi|40739313|gb|EAA58503.1| AN6481.2 [Aspergillus nidulans FGSC A4]
  misc_feature (570)..(666): NCBI GI: 189199072 Blast Desc: conserved [Pyrenophora tritici-repentis Pt-1C-BFP] gi|187982972|gb|EDU48460.1| conserved [Pyrenophora tritici-repentis Pt-1C-BFP]
  misc_feature (567)..(663): NCBI GI: 171679918 Blast Desc: protein product [Podospora anserina] gi|170939585|emb|CAP64812.1| protein product [Podospora anserina]
  misc_feature (565)..(664): NCBI GI: 164425592 Blast Desc: NCU05502 [Neurospora crassa OR74A] gi|157070988|gb|EAA31228.2| [Neurospora crassa OR74A]
  misc_feature (566)..(664): NCBI GI: 116201313 Blast Desc: CHGG_08541 [Chaetomium globosum CBS 148.51] gi|88177059|gb|EAQ84527.1| CHGG_08541 [Chaetomium globosum CBS 148.51]
  misc_feature (608)..(663): NCBI GI: 256734428 Blast Desc: NECHADRAFT_31433 [Nectria haematococca mpVI 77-13-4]
MRMSPRSSSSSNSRALIILEKKPETVEEKKPGFSGSDEEELFDNQLSATLYNATQYQKRTIGTQPRASARRDPLLPPSGDTSLAPYGPVYPLTSYTGTGVDTEVSQSRMTRTKKNGDASEDESTLIGSVISRQENDSRRITALKSQGIVVNDVDMVSNVPEVFGFLPSKTESVVPGSLLVSKVSKPNVWDYLDDQEDSEEDSTTPINLAKDKHDAKESSMFRNDTNTQTLDGILNSAGDDSFTAFQTQDYTNDRDLIEFLRMPELKRPMEGCSRCQSRFLTLEEGFRHLNEEHFENSTGDMSESSAAARRLYLRTTLQIELEARVNAFLSLLEGCTKAFQELGKIAEDMLVGTLKTADHVETKGYYPVIESLVRVFEHITIILVFSADFMAKADKTMRTDPQRALDCGKFVTKLRGSLNEIIKKAEKDLVQARRDIILASNTDYGTDILASIGPEFMIALVCNGLFFRRLENAQTKSSSEKDRTTIDASDLYKRYANKLQLQVNQRPQKRLLPDIYALEEELEILQKVIHWQIKFCYDFYRVLDPESYRITTKTRISHFSPERRYLHKTIDRLKVRSAEFTSLLVRSARLRDQLQQSIEIEEESHGNAIRVFTFVTLFFLPLSFVTSFFGMNTADIRDSNQNQAIFWITSIPTTTVVIGLAYIYGYK

SEQ ID NO: 12333 - DNA, 2779 bp, Muscodor strobelii; identical to SEQ ID NO: 12330
  misc_feature: SGI EST ID NO. CUFF.29247.0
  misc_feature: Variant of the nucleotide sequence at SEQ ID NO 12331

SEQ ID NO: 12334 - DNA, 1026 bp, Muscodor strobelii
  misc_feature: SGI cDNA ID NO. 564002
  misc_feature: Reduced expression when VOC is produced
  misc_feature: Encodes the peptide sequence at SEQ ID NO 12335
atgcctcatccgtcaactgccgtcgcccggccgggcttcgaggacctagaacaagctgcattgtgtgtcattcgcctcatgagagacgcgcccggactcgccaacacccgccttgcactaattggagatcttgcggtgaccaaatatctacaacagccagcatcctgtgagaatattgaattcatcgtcagcaagcctacatcgcccagtttggtgaagaagacgcttctagctcattccaagaaattgcttgttgaaagagcacagggcgtgtttttcaaacatcccgcaggttgggctgtcgagataaagatcacgcctgaatggttatgcccttatctacccagttcggctcaacctatcgtggacatcaaggagctaccctacatctctctcacggatctcttcgttttcaaagccgacgcttgtggactgcgagaatcagaggctggtagacagatcgaagcatatcatgctggcgcattattagagcttgcctcaacccatttcccgttggaacttgaagactacaagctacagaaggtagaagaggcgttggacacactattagactatgcaccccaggactacgacaaggattggtggcagaggcgacttggtaaacaatgcgacaggcgccgctcgactatagacatcctctcagagctatctgaaggcctgcgtattgatgatgaagagaatcgacgtgctcgcaggcgaccaagtgtcttctcgctcaacaatcgagggtcagagacttctattagttcggcgtcatctatgtcttcccaaaatgctacccctgtatcttctcccacaatgaagatgcgcccgcggaagatgagcgtcagcggtacttacccacggcctcgaagacatacacaaactacgttggatacaccacctgacgaagagccactgtctcccctctattcaatgaatcacgacatcaatcgattgcatctagagctgatgaacaaccgagggcgaaactctcctggcgtcggcttcatggcacgaccttga

SEQ ID NO: 12335 - protein, 341 aa, Muscodor strobelii
  misc_feature: SGI Peptide ID NO. 564002
  misc_feature (13)..(297): NCBI GI: 256721943 Blast Desc: NECHADRAFT_78306 [Nectria haematococca mpVI 77-13-4]
  misc_feature (10)..(300): NCBI GI: 46111871 Blast Desc: FG02817.1 [Gibberella zeae PH-1]
  misc_feature (8)..(207): NCBI GI: 255939219 Blast Desc: Pc15g01590 [Penicillium chrysogenum Wisconsin 54-1255] gi|211585001|emb|CAP83045.1| Pc15g01590 [Penicillium chrysogenum Wisconsin 54-1255]
  misc_feature (5)..(206): NCBI GI: 240111645 Blast Desc: CPC735_021440 [Coccidioides posadasii C735 delta SOWgp]
  misc_feature (5)..(206): NCBI GI: 119180628 Blast Desc: CIMG_08933 [Coccidioides immitis RS]
  misc_feature (7)..(206): NCBI GI: 238841850 Blast Desc: conserved [Microsporum canis CBS 113480]
  misc_feature (14)..(206): NCBI GI: 240276390 Blast Desc: conserved [Ajellomyces capsulatus H143]
  misc_feature (8)..(207): NCBI GI: 238841832 Blast Desc: conserved [Microsporum canis CBS 113480]
  misc_feature (84)..(206): NCBI GI: 261195088 Blast Desc: conserved [Ajellomyces dermatitidis SLH14081] gi|239587820|gb|EEQ70463.1| conserved [Ajellomyces dermatitidis SLH14081]
  misc_feature (57)..(204): NCBI GI: 119483942 Blast Desc: NFIA_095970 [Neosartorya fischeri NRRL 181] gi|119410030|gb|EAW19977.1| NFIA_095970 [Neosartorya fischeri NRRL 181]
  misc_feature: Useful for introducing or modulating the production of volatile compounds
MPHPSTAVARPGFEDLEQAALCVIRLMRDAPGLANTRLALIGDLAVTKYLQQPASCENIEFIVSKPTSPSLVKKTLLAHSKKLLVERAQGVFFKHPAGWAVEIKITPEWLCPYLPSSAQPIVDIKELPYISLTDLFVFKADACGLRESEAGRQIEAYHAGALLELASTHFPLELEDYKLQKVEEALDTLLDYAPQDYDKDWWQRRLGKQCDRRRSTIDILSELSEGLRIDDEENRRARRRPSVFSLNNRGSETSISSASSMSSQNATPVSSPTMKMRPRKMSVSGTYPRPRRHTQTTLDTPPDEEPLSPLYSMNHDINRLHLELMNNRGRNSPGVGFMARP

SEQ ID NO: 12336 - DNA, 1283 bp, Muscodor strobelii
  misc_feature: SGI EST ID NO. CUFF.29192.0
  misc_feature: Variant of the nucleotide sequence at SEQ ID NO 12334
taaagacctcggatccggctgcgaacacccagaagacgcatgtgtcactggcgcgtcaactcatgcagctttctacggtctattcaccatgcctcatccgtcaactgccgtcgcccggccgggcttcgaggacctagaacaagctgcattgtgtgtcattcgcctcatgagagacgcgcccggactcgccaacacccgccttgcactaattggagatcttgcggtgaccaaatatctacaacagccagcatcctgtgagaatattgaattcatcgtcagcaagcctacatcgcccagtttggtgaagaagacgcttctagctcattccaagaaattgcttgttgaaagagcacagggcgtgtttttcaaacatcccgcaggttgggctgtcgagataaagatcacgcctgaatggttatgcccttatctacccagttcggctcaacctatcgtggacatcaaggagctaccctacatctctctcacggatctcttcgttttcaaagccgacgcttgtggactgcgagaatcagaggctggtagacagatcgaagcatatcatgctggcgcattattagagcttgcctcaacccatttcccgttggaacttgaagactacaagctacagaaggtagaagaggcgttggacacactattagactatgcaccccaggactacgacaaggattggtggcagaggcgacttggtaaacaatgcgacaggcgccgctcgactatagacatcctctcagagctatctgaaggcctgcgtattgatgatgaagagaatcgacgtgctcgcaggcgaccaagtgtcttctcgctcaacaatcgagggtcagagacttctattagttcggcgtcatctatgtcttcccaaaatgctacccctgtatcttctcccacaatgaagatgcgcccgcggaagatgagcgtcagcggtacttacccacggcctcgaagacatacacaaactacgttggatacaccacctgacgaagagccactgtctcccctctattcaatgaatcacgacatcaatcgattgcatctagagctgatgaacaaccgagggcgaaactctcctggcgtcggcttcatggcacgaccttgacgttttcgcgttattacttggtcttttttttttcttgcttgtaccggtgtataaaataacggtggtctcgggacggaaaagcggcggggcgcatgacgaaaaccttggattgtttagaataccctatagaatagactagatgttagcttaatcaatggtaatttcggga

SEQ ID NO: 12337 - DNA, 789 bp, Muscodor strobelii
  misc_feature: SGI cDNA ID NO. 564003
  misc_feature: Encodes the peptide sequence at SEQ ID NO 12338
atgccgggcctgctgatatacggagcaacaggctacacaggccgtctagctagcaagcaagcatcaaagctcgatatttcctttgcagtagcaggacgaagtcaaaagacactctcagattttgccgcatcgcttaatgtccctcactacgtcttcgctgtggacgagccccaaaagatcgatgtagcactccaaaacacacgtgtgctcctaaactgtgcaggtcctttcatgcacacagcagcccacctagtcgacgcatgtatacgcaacaaggtacactatctcgacatctctgccgagctttcaagctacgaaataattaataagcgcgatgaaccggcgaaagaagcgggggtcatgctattgcctggctgtggcggcagcgtagccatgctcggatgtcttgcgggaaagctcatcgagagcgtcaagagtcctatcagcattgaaatagcacttcgtatctctggtcccatttcgcgcggcaccgcacgctcagtagccagtggcgttacggcatctaacttgcaaagaattgacggaaaactgatcaagagtcaggattccaagacacagtttttcgacttcgagaatggtggcggtcctgtcgagtgtttctcagttgtattgccagatctcataacgctcgcaaaatctacgggggtcgacaatatcaatacatttgcctatgtttcaggaggagggttccaggaaccgaaactgacgattttcccaacgggccaactcaggaggaaagacgaaataatccgtaccacgccgctgtga

SEQ ID NO: 12338 - protein, 262 aa, Muscodor strobelii
  misc_feature: SGI Peptide ID NO. 564003
  misc_feature (4)..(262): Pfam Id: PF03435 Pfam Desc: Saccharopine dehydrogenase
  misc_feature (4)..(152): Pfam Id: PF03435 Pfam Desc: Saccharopine dehydrogenase
  misc_feature (1)..(252): NCBI GI: 169598100 Blast Desc: SNOG_01848 [Phaeosphaeria nodorum SN15] gi|111068940|gb|EAT90060.1| SNOG_01848 [Phaeosphaeria nodorum SN15]
  misc_feature (1)..(248): NCBI GI: 229591665 Blast Desc: PFLU4239 [Pseudomonas fluorescens SBW25] gi|229363531|emb|CAY50783.1| conserved [Pseudomonas fluorescens SBW25]
  misc_feature (1)..(258): NCBI GI: 66046773 Blast Desc: integral membrane protein [Pseudomonas syringae pv. syringae B728a] gi|63257480|gb|AAY38576.1| integral membrane protein [Pseudomonas syringae pv. syringae B728a]
  misc_feature (4)..(248): NCBI GI: 149276576 Blast Desc: integral membrane protein [Pedobacter sp. BAL39] gi|149233096|gb|EDM38471.1| integral membrane protein [Pedobacter sp. BAL39]
  misc_feature (1)..(248): NCBI GI: 116208742 Blast Desc: CHGG_03664 [Chaetomium globosum CBS 148.51] gi|88184261|gb|EAQ91729.1| CHGG_03664 [Chaetomium globosum CBS 148.51]
  misc_feature (1)..(233): NCBI GI: 163846182 Blast Desc: saccharopine dehydrogenase [Chloroflexus aurantiacus J-10-fl] gi|222523929|ref|YP_002568399.1| Saccharopine dehydrogenase [Chloroflexus sp. Y-400-fl] Saccharopine J-10-fl]
  misc_feature (1)..(232): NCBI GI: 219850246 Blast Desc: Saccharopine dehydrogenase [Chloroflexus aggregans DSM 9485] gi|219544505|gb|ACL26243.1| Saccharopine dehydrogenase [Chloroflexus aggregans DSM 9485]
  misc_feature (4)..(229): NCBI GI: 76801700 Blast Desc: NP2112A [Natronomonas pharaonis DSM 2160] gi|76557565|emb|CAI49147.1| conserved [Natronomonas pharaonis DSM 2160]
  misc_feature (4)..(229): NCBI GI: 227881563 Blast Desc: uncharacterized conserved protein [Halogeometricum borinquense DSM 11551] gi|227848442|gb|EEJ58530.1| uncharacterized conserved protein [Halogeometricum borinquense
  misc_feature (4)..(234): NCBI GI: 134098152 Blast Desc: saccharopine dehydrogenase [Saccharopolyspora erythraea NRRL 2338] gi|133910775|emb|CAM00888.1| saccharopine dehydrogenase [Saccharopolyspora erythraea NRRL 2338]
  misc_feature (4)..(127): SWISSPROT Homolog: EC 1.5.1.9 Saccharopine dehydrogenase (NAD(+), L-glutamate-forming)
MPGLLIYGATGYTGRLASKQASKLDISFAVAGRSQKTLSDFAASLNVPHYVFAVDEPQKIDVALQNTRVLLNCAGPFMHTAAHLVDACIRNKVHYLDISAELSSYEIINKRDEPAKEAGVMLLPGCGGSVAMLGCLAGKLIESVKSPISIEIALRISGPISRGTARSVASGVTASNLQRIDGKLIKSQDSKTQFFDFENGGGPVECFSVVLPDLITLAKSTGVDNINTFAYVSGGGFQEPKLTIFPTGQLRRKDEIIRTTPL

SEQ ID NO: 12339 - DNA, 876 bp, Muscodor strobelii
  misc_feature: SGI cDNA ID NO. 564004
  misc_feature: Encodes the peptide sequence at SEQ ID NO 12340
atgtatagctcacttgcgttcctcttgtccacggcttgcactgtagccgccgtcctcaggcaaccagctattactacaacgaaagtaactcaagcctactggcgcgcgaccttctccagccctcccttcaacctcctaaataacgcttggtacgaggatttctatactctcgtagacagtatcgagtcggatccggatgtaaaggttgttgtatttgattccagtgtccccgatttctggatcgcgcattttgatctcgttaatgaggtcaacaatgcctttctagtagattcatactggggtaatatcacgcgcctggccaatcttccggtcgtaaccattgctgcgattcaaggtatttgccgaggtggcggctgcgagctggcagctgcgctcgacattcgatttggtagtcaagagaaggctgtaatggaacaaatcgaaattggtattggtgcgttccctggttctggcggactcaggatgctacctaggcttgttgggcgaggtcgaacaatggaaattgtgcttggcgggaatgactttgatgcagataccgctgctgcatacggatggcttaatcgcgctattccagatgccgatttcgaggaattcgtagacgcctttgctcgtcgtgtcgctggatgggatagttatgcgattggcagagctaagagtattatcaacgagtcaggcttcccgaccgtgaccgaagtcaactctgacctcgcagcatttgtggaagctactcaacagggagcggtgccggagcgaatagaggcgttcatcgaggcggggctccagacgaacttgacatttgagatcgacttggcaagtgaggcgacacgattcatagactcagggccttggaattag

SEQ ID NO: 12340 - protein, 291 aa, Muscodor strobelii
  misc_feature: SGI Peptide ID NO. 564004
  misc_feature (34)..(198): Pfam Id: PF00378 Pfam Desc: Enoyl-CoA hydratase/isomerase family
  misc_feature (37)..(198): Pfam Id: PF00378 Pfam Desc: Enoyl-CoA hydratase/isomerase family
  misc_feature (24)..(291): NCBI GI: 156056510 Blast Desc: SS1G_05609 [Sclerotinia sclerotiorum 1980] gi|154703391|gb|EDO03130.1| SS1G_05609 [Sclerotinia sclerotiorum 1980]
  misc_feature (24)..(284): NCBI GI: 260459365 Blast Desc: Enoyl-CoA hydratase/isomerase [Mesorhizobium opportunistum WSM2075] gi|259034919|gb|EEW36175.1| Enoyl-CoA hydratase/isomerase [Mesorhizobium opportunistum WSM2075]
  misc_feature (25)..(279): NCBI GI: 146300845 Blast Desc: enoyl-CoA hydratase/isomerase [Flavobacterium johnsoniae UW101] gi|146155263|gb|ABQ06117.1| Enoyl-CoA hydratase/isomerase [Flavobacterium johnsoniae UW101]
  misc_feature (22)..(277): NCBI GI: 240169171 Blast Desc: enoyl-CoA hydratase/isomerase [Mycobacterium kansasii ATCC 12478]
  misc_feature (25)..(258): NCBI GI: 66044001 Blast Desc: enoyl-CoA hydratase/isomerase [Pseudomonas syringae pv. syringae B728a] gi|63254708|gb|AAY35804.1| Enoyl-CoA hydratase/isomerase [Pseudomonas syringae pv. syringae B728a]
  misc_feature (21)..(278): NCBI GI: 86361271 Blast Desc: enoyl-CoA hydratase protein [Rhizobium etli CFN 42] gi|86285373|gb|ABC94431.1| enoyl-CoA hydratase protein [Rhizobium etli CFN 42]
  misc_feature (28)..(277): NCBI GI: 187923684 Blast Desc: Enoyl-CoA hydratase/isomerase [Burkholderia phytofirmans PsJN] gi|187714878|gb|ACD16102.1| Enoyl-CoA hydratase/isomerase [Burkholderia phytofirmans PsJN]
  misc_feature (21)..(277): NCBI GI: 150377623 Blast Desc: enoyl-CoA hydratase/isomerase [Sinorhizobium medicae WSM419] gi|150032170|gb|ABR64285.1| Enoyl-CoA hydratase/isomerase [Sinorhizobium medicae WSM419]
  misc_feature (24)..(277): NCBI GI: 241666759 Blast Desc: Enoyl-CoA hydratase/isomerase [Rhizobium leguminosarum bv. trifolii WSM1325] gi|240862216|gb|ACS59881.1| Enoyl-CoA hydratase/isomerase [Rhizobium leguminosarum bv. trifolii
  misc_feature (24)..(277): NCBI GI: 116251618 Blast Desc: enoyl-CoA hydratase family protein [Rhizobium leguminosarum bv. viciae 3841] gi|115256266|emb|CAK07347.1| enoyl-CoA hydratase family protein [Rhizobium leguminosarum bv.
  misc_feature (20)..(238): SWISSPROT Homolog: EC 4.2.1.17 Enoyl-CoA hydratase
MYSSLAFLLSTACTVAAVLRQPAITTTKVTQAYWRATFSSPPFNLLNNAWYEDFYTLVDSIESDPDVKVVVFDSSVPDFWIAHFDLVNEVNNAFLVDSYWGNITRLANLPVVTIAAIQGICRGGGCELAAALDIRFGSQEKAVMEQIEIGIGAFPGSGGLRMLPRLVGRGRTMEIVLGGNDFDADTAAAYGWLNRAIPDADFEEFVDAFARRVAGWDSYAIGRAKSIINESGFPTVTEVNSDLAAFVEATQQGAVPERIEAFIEAGLQTNLTFEIDLASEATRFIDSGPWN

SEQ ID NO: 12341 - DNA, 1242 bp, Muscodor strobelii
  misc_feature: SGI cDNA ID NO. 564005
  misc_feature: Encodes the peptide sequence at SEQ ID NO 12342
atggcgactattacagaaacagtcacctgggttactccagccgcccgaccgcctcccggacaacctgacattaagtatgctcctgactatgacaactggcaggctcgcgtagctcggcgcaagggagccggcgatctgccaacaagtttgcctccaggcttcccagagcagctcacgggcccaatggtatgggaggggaattctgtcgccgacacctacgactggacttatgtccttaactcgactcagttgtcggaaattgatgaggccgtggcgcattttaaatcacttgatctttcgttcgctcacatcaagggggaaactttccctttgccgactcttcactcggagcttcggcgcctgtctgacgagcttcacaatggtcacggcttcttcgtgatacgcggcgtaaaagtcgacgagcactcgcgagaagacaacgttatcatctaccttggcatctcttctcatatcgccgcccaacgcggtcgccaggaccacaagttcaatggcaaacctgctgatgtggttctagcgcatatcaaggacctgagccattctgacccgaacaaaatcatcggttctccagcctacacgacagataagcaagtcttccatactgactcaggcgatatcgtttctctctttgctttggaaacatctcactccggaggggctagcaaactggcaagcacatggagggtgtacaatgaaatcgctcggactcggccggaccttatccacactctttctgagatatgggacatggaagtattcgagaaagcagcaaagcagtggactgagagacctttgatgtaccttctgccagctactaataatgctcctaaacgagtctcattacagtatggacgacggtatttcgtcggctttggtgcacttccacgcagtgaagatatcccccctatcacggaagcgcaggctgaagcccttgacacacttcatttcacgggcgaaaagttctgtgtgaacaccgaattccaaaagggcgacatacaatatataaacaatctgagcgtattccacgcccgagacggattcgtggacaaggacgaaaagcagcgacatcttcttcggctatggctaagagacccggaaaacgcttggactacgcccagttacctacgaccgagatgggcacagatctacgaaggtatcacaccggaaaatgaggtattcccattggaacctttcgttcgaagtgctggaaataaaggtcgataa

SEQ ID NO: 12342 - protein, 413 aa, Muscodor strobelii
  misc_feature: SGI Peptide ID NO. 564005
  misc_feature (95)..(375): Pfam Id: PF02668 Pfam Desc: Taurine catabolism dioxygenase TauD, TfdA family
  misc_feature (95)..(255): Pfam Id: PF02668 Pfam Desc: Taurine catabolism dioxygenase TauD, TfdA family
  misc_feature (306)..(375): Pfam Id: PF02668 Pfam Desc: Taurine catabolism dioxygenase TauD, TfdA family
  misc_feature (20)..(406): NCBI GI: 256726586 Blast Desc: NECHADRAFT_25501 [Nectria haematococca mpVI 77-13-4]
  misc_feature (19)..(413): NCBI GI: 261353143 Blast Desc: taurine catabolism dioxygenase TauD [Verticillium albo-atrum VaMs.102]
  misc_feature (21)..(410): NCBI GI: 39977425 Blast Desc: MGG_06615 [Magnaporthe grisea 70-15] gi|145015937|gb|EDK00427.1| MGG_06615 [Magnaporthe grisea 70-15]
  misc_feature (23)..(406): NCBI GI: 46105068 Blast Desc: FG00162.1 [Gibberella zeae PH-1]
  misc_feature (13)..(413): NCBI GI: 256728038 Blast Desc: NECHADRAFT_46137 [Nectria haematococca mpVI 77-13-4]
  misc_feature (1)..(408): NCBI GI: 85092915 Blast Desc: NCU02196 [Neurospora crassa OR74A] gi|28921033|gb|EAA30354.1| conserved [Neurospora crassa OR74A]
  misc_feature (21)..(406): NCBI GI: 70993200 Blast Desc: TfdA family oxidoreductase [Aspergillus fumigatus Af293] gi|66849081|gb|EAL89409.1| TfdA family oxidoreductase, [Aspergillus fumigatus Af293] gi|159125620|gb|EDP50737.1| A1163]
  misc_feature (21)..(405): NCBI GI: 121708738 Blast Desc: taurine catabolism dioxygenase TauD, TfdA family protein [Aspergillus clavatus NRRL 1] gi|119400380|gb|EAW10806.1| taurine catabolism dioxygenase TauD, TfdA family protein clavatus
  misc_feature (21)..(406): NCBI GI: 119499816 Blast Desc: taurine catabolism dioxygenase TauD, TfdA family protein [Neosartorya fischeri NRRL 181] gi|119414830|gb|EAW24768.1| taurine catabolism dioxygenase TauD,
  misc_feature (21)..(406): NCBI GI: 115389376 Blast Desc: conserved [Aspergillus terreus NIH2624] gi|114194589|gb|EAU36289.1| conserved [Aspergillus terreus NIH2624]
MATITETVTWVTPAARPPPGQPDIKYAPDYDNWQARVARRKGAGDLPTSLPPGFPEQLTGPMVWEGNSVADTYDWTYVLNSTQLSEIDEAVAHFKSLDLSFAHIKGETFPLPTLHSELRRLSDELHNGHGFFVIRGVKVDEHSREDNVIIYLGISSHIAAQRGRQDHKFNGKPADVVLAHIKDLSHSDPNKIIGSPAYTTDKQVFHTDSGDIVSLFALETSHSGGASKLASTWRVYNEIARTRPDLIHTLSEIWDMEVFEKAAKQWTERPLMYLLPATNNAPKRVSLQYGRRYFVGFGALPRSEDIPPITEAQAEALDTLHFTGEKFCVNTEFQKGDIQYINNLSVFHARDGFVDKDEKQRHLLRLWLRDPENAWTTPSYLRPRWAQIYEGITPENEVFPLEPFVRSAGNKGR

SEQ ID NO: 12343 - DNA, 1647 bp, Muscodor strobelii
  misc_feature: SGI EST ID NO. CUFF.29217.0
  misc_feature: Variant of the nucleotide sequence at SEQ ID NO 12341
cggacaacctgacattaagtatgctcctgactatgacaactggcaggctcgcgtagctcggcgcaagggagccggcgatctgccaacaagtttgcctccaggcttcccagagcagctcacgggcccaatggtatgggaggggaattctgtcgccgacacctacgactggacttatgtccttaactcgactcagttgtcggaaattgatgaggccgtggcgcattttaaatcacttgatctttcgttcgctcacatcaagggggaaactttccctttgccgactcttcactcggagcttcggcgcctgtctgacgagcttcacaatggtcacggcttcttcgtgatacgcggcgtaaaagtcgacgagcactcgcgagaagacaacgttatcatctaccttggcatctcttctcatatcgccgcccaacgcggtcgccaggaccacaagttcaatggcaaacctgctgatgtggttctagcgcatatcaaggacctgagccattctgacccgaacaaaatcatcggttctccagcctacacgacagataagcaagtcttccatactgactcaggcgatatcgtttctctctttgctttggaaacatctcactccggaggggctagcaaactggcaagcacatggagggtgtacaatgaaatcgctcggactcggccggaccttatccacactctttctgagatatgggacatggaagtattcgagaaagcagcaaagcagtggactgagagacctttgatgtaccttctgccagctactaataatgctcctaaacgagtctcattacagtatggacgacggtatttcgtcggctttggtgcacttccacgcagtgaagatatcccccctatcacggaagcgcaggctgaagcccttgacacacttcatttcacgggcgaaaagttctgtgtgaacaccgaattccaaaagggcgacatacaatatataaacaatctgagcgtattccacgcccgagacggattcgtggacaaggacgaaaagcagcgacatcttcttcggctatggctaagagacccggaaaacgcttggactacgcccagttacctacgaccgagatgggcacagatctacgaaggtatcacaccggaaaatgaggtattcccattggaacctttcgttcgaagtgctggaaataaaggtcgataagatgtttgatagcggtggactgtagatttgcttgatcatcgaccaacacgcaaactgatcctgctatcaatcaatgcctttatgccgaatcgcactcgtgctctagagggacacaaatccccaatcaatactgagcaggcctccaaacgttccaatttgtgtgcgagagttcacattgtgatgggctaattcccgttactgtaaggcaacgtgccataaaggtctcatgtcgcgtattctcaattgaacttttgaattgcctgtaaagtcatgaggcaataattatacagattgtaatcaagaaacaggagctcgtagttttgattgggcagttgttcttttggcgtcgtggggggcaacctacgctcttcaactacagtacctcgcctgctttgctagagagactcactggtagcgcacagttatttcagacatacagcgccagattttctctacaaaat

SEQ ID NO: 12344 - DNA, 1452 bp, Muscodor strobelii
  misc_feature: SGI cDNA ID NO. 564006
  misc_feature: Encodes the peptide sequence at SEQ ID NO 12345
atgactcgcagatcgcgaatccttcagcaaggtcccgatggcaaggggtccaatacaaaagctcccagccgtctctgtcttggccgacatgaatggccaaggcctttgttactgggcttgatagtcgttgtcatcatgattggatcgtggaaaagggctttctggcttgtgccgtcgctagcactgcctgtgctgtccggagggcactgcaaattcgacctctacaagcacttggggaatttgtcgccgtattttgtgccagacaatacaccaacatccctgaaatcgggcgcgcctccaggctgcacggtcgacaaaggcttccttgtacaccgacacggtagccggagccctctgtcagatgaagttggcgccatacagaatctgtcctactacatcaacaacaactcggcactcttctcgtctccacagaccaagttgccgactgagttcgccttcttgacggcgggctggaacagcacctttggcatcaatgacctctcagcccccggccgccagcagctcttcaaccatggcgtggcgatgaagcttcagtaccctgagttgttcaccaacgttgtactggccggagaccaggatcgtgtcgttgaatcggcagtctggttcatggatggctattatggccgctctgccaattcgacagcgactctcaaccgcatcgctgaggacgatgttacagtgagctggatcaccccggttgacacgtgcgatgcgtgggactacagcctaggagctggcttggtgtccgaatggggcgctgtatatttgccgccgatcgcgaagcgtatcaaccgcgtactgtctcatgcgtacccgacagttaacttcacagctgcacatgtacatggcatgttgtatgcctgtgcatatggtactgctgtatatggcattgactcttcgccgtggtgccctgtcttcctcccagaggagatcctcaaacacgaatacgaatatgatctactgctgcgaggcgcctttggatatggcttgccggatgacatgggcacagtcacgggtagtctcctcgtttcaaatgtgaccgcgtttctacgggataccacgggtcccaatctgtcattgaacttcggacacgacaccacgatcgatcttggactgaccgcgcttgggctggctgcagaccccgcataccctcttgaggggccggtcaatgctacacgcgcatggcggacggctacgcaggtgcccttcgctgcgcagatgttcttcaagactttatcatgcggtgacgatactaggatccagctactgctaaatgaggctaactttgatctaagcccgacgggctgcaagagtgacgagtatgggacatgtagcttcggggacttcattgctgccgacaccatccaaaccgcgctcggtgtgacgtacgacgatgcgaggtggtcagctgcatgtacccccaaagaataa

SEQ ID NO: 12345 - protein, 483 aa, Muscodor strobelii
  misc_feature: SGI Peptide ID NO. 564006
  misc_feature (103)..(432): Pfam Id: PF00328 Pfam Desc: Histidine acid phosphatase
  misc_feature (66)..(479): NCBI GI: 71024691 Blast Desc: UM06428.1 [Ustilago maydis 521] gi|46101968|gb|EAK87201.1| UM06428.1 [Ustilago maydis 521]
  misc_feature (60)..(457): NCBI GI: 115397249 Blast Desc: conserved [Aspergillus terreus NIH2624] gi|114192407|gb|EAU34107.1| conserved [Aspergillus terreus NIH2624]
  misc_feature (53)..(442): NCBI GI: 19111973 Blast Desc: thiamine-repressible acid phosphatase Pho4 [Schizosaccharomyces pombe 972h-] gi|400839|sp|Q01682.1|PPA2_SCHPO RecName: acid phosphatase pho4;
  misc_feature (72)..(456): NCBI GI: 121699932 Blast Desc: histidine acid phosphatase, [Aspergillus clavatus NRRL 1] gi|119396373|gb|EAW06805.1| histidine acid phosphatase, [Aspergillus clavatus NRRL 1]
  misc_feature (60)..(442): NCBI GI: 19112720 Blast Desc: acid phosphatase () [Schizosaccharomyces pombe] gi|74582362|sp|O60172.1|PPA3_SCHPO RecName: Full=Thiamine-repressible acid phosphatase SPBC21H7.03c; Flags:
  misc_feature (52)..(458): NCBI GI: 119471991 Blast Desc: histidine acid phosphatase, [Neosartorya fischeri NRRL 181] gi|119406403|gb|EAW16354.1| histidine acid phosphatase, [Neosartorya fischeri NRRL 181]
  misc_feature (66)..(467): NCBI GI: 238840189 Blast Desc: phytase [Microsporum canis CBS 113480]
  misc_feature (56)..(466): NCBI GI: 213404850 Blast Desc: thiamine-repressible acid phosphatase pho4 [Schizosaccharomyces japonicus yFS275] gi|212001244|gb|EEB06904.1| thiamine-repressible acid phosphatase
  misc_feature (76)..(458): NCBI GI: 70992337 Blast Desc: histidine acid phosphatase [Aspergillus fumigatus Af293] gi|66848650|gb|EAL88979.1| histidine acid phosphatase, [Aspergillus fumigatus Af293] gi|159124587|gb|EDP49705.1| acid
  misc_feature (54)..(456): NCBI GI: 67516565 Blast Desc: AN0564.2 [Aspergillus nidulans FGSC A4] gi|40747507|gb|EAA66663.1| AN0564.2 [Aspergillus nidulans FGSC A4] gi|259489172|tpe|CBF89224.1| TPA: histidine acid phosphatase,
  misc_feature (53)..(442): SWISSPROT Homolog: EC 3.1.3.2 Acid phosphatase
MTRRSRILQQGPDGKGSNTKAPSRLCLGRHEWPRPLLLGLIVVVIMIGSWKRAFWLVPSLALPVLSGGHCKFDLYKHLGNLSPYFVPDNTPTSLKSGAPPGCTVDKGFLVHRHGSRSPLSDEVGAIQNLSYYINNNSALFSSPQTKLPTEFAFLTAGWNSTFGINDLSAPGRQQLFNHGVAMKLQYPELFTNVVLAGDQDRVVESAVWFMDGYYGRSANSTATLNRIAEDDVTVSWITPVDTCDAWDYSLGAGLVSEWGAVYLPPIAKRINRVLSHAYPTVNFTAAHVHGMLYACAYGTAVYGIDSSPWCPVFLPEEILKHEYEYDLLLRGAFGYGLPDDMGTVTGSLLVSNVTAFLRDTTGPNLSLNFGHDTTIDLGLTALGLAADPAYPLEGPVNATRAWRTATQVPFAAQMFFKTLSCGDDTRIQLLLNEANFDLSPTGCKSDEYGTCSFGDFIAADTIQTALGVTYDDARWSAACTPKE

SEQ ID NO: 12346 - DNA, 1499 bp, Muscodor strobelii
  misc_feature: SGI EST ID NO. CUFF.29222.0
  misc_feature: Variant of the nucleotide sequence at SEQ ID NO 12344
cgcgaatccttcagcaaggtcccgatggcaaggggtccaatacaaaagctcccagccgtctctgtcttggccgacatgaatggccaaggcctttgttactgggcttgatagtcgttgtcatcatgattggatcgtggaaaagggctttctggcttgtgccgtcgctagcactgcctgtgctgtccggagggcactgcaaattcgacctctacaagcacttggggaatttgtcgccgtattttgtgccagacaatacaccaacatccctgaaatcgggcgcgcctccaggctgcacggtcgacaaaggcttccttgtacaccgacacggtagccggagccctctgtcagatgaagttggcgccatacagaatctgtcctactacatcaacaacaactcggcactcttctcgtctccacagaccaagttgccgactgagttcgccttcttgacggcgggctggaacagcacctttggcatcaatgacctctcagcccccggccgccagcagctcttcaaccatggcgtggcgatgaagcttcagtaccctgagttgttcaccaacgttgtactggccggagaccaggatcgtgtcgttgaatcggcagtctggttcatggatggctattatggccgctctgccaattcgacagcgactctcaaccgcatcgctgaggacgatgttacagtgagctggatcaccccggttgacacgtgcgatgcgtgggactacagcctaggagctggcttggtgtccgaatggggcgctgtatatttgccgccgatcgcgaagcgtatcaaccgcgtactgtctcatgcgtacccgacagttaacttcacagctgcacatgtacatggcatgttgtatgcctgtgcatatggtactgctgtatatggcattgactcttcgccgtggtgccctgtcttcctcccagaggagatcctcaaacacgaatacgaatatgatctactgctgcgaggcgcctttggatatggcttgccggatgacatgggcacagtcacgggtagtctcctcgtttcaaatgtgaccgcgtttctacgggataccacgggtcccaatctgtcattgaacttcggacacgacaccacgatcgatcttggactgaccgcgcttgggctggctgcagaccccgcataccctcttgaggggccggtcaatgctacacgcgcatggcggacggctacgcaggtgcccttcgctgcgcagatgttcttcaagactttatcatgcggtgacgatactaggatccagctactgctaaatgaggctaactttgatctaagcccgacgggctgcaagagtgacgagtatgggacatgtagcttcggggacttcattgctgccgacaccatccaaaccgcgctcggtgtgacgtacgacgatgcgaggtggtcagctgcatgtacccccaaagaataaaaatagagatatagaaatctacgtaattcgtaatcagacttcccagcgtaccaagcgtat

SEQ ID NO: 12347 - DNA, 1038 bp, Muscodor strobelii
  misc_feature: SGI cDNA ID NO. 564007
  misc_feature: Encodes the peptide sequence at SEQ ID NO 12348
atgtctctgacaagtcatccgtcaagtgaccctcctggtagtcccccgcggggaatcgcaacactgagcttggggcgacaagcctcttgcgcctctattgatctcacagaggcagacgtcagctccgatgagagtgacctgcaaccatcgaccggagctcgcgagctgaagcgaactcgcaaacgggctcaacttcgagaaccggtacacgctcttcagcaatctcaggctcaagaacagcacgactttcaggtggtagagtgggtgtatgataagggcgaatacgaaaccgcttcgccgacgattgatacagtcatattcgatctcccttcaactagtgacatcaaaggaaaaggtgaaccacaagaaaacggcatccctccgtccgccggcgccatagataatggctatgacgccgaaggcgagaatgacaatggctctctcagttcctattgctccaggtcagatgaagagagggaccccgaccagcatgatggtacgatggaagactggtgtcccggagtcgtggttgaggcaaaccgaaggtcaggcagctcatcttcacaacggtcacaacggtacaagcagagacaaattctaggtactatcccagaagtctcggacgaagatacactacgcgatgtaccagatgagcagctgcctggaggctaccccatcccagatatctgcatcgacaacgcaagcctcttcgactacaattcattctttgaagtcaaccccgagatgacatccgccatgacccccgtggggctcttgcctccccaggcgcaccatctccaccccctttaccctccgcgcaccaatcccaattccgaacccgctagccacgtccacgagcatactccggcatcaagtgccagcaaccggaataaccggatgacccgtatccgggaccagtttagacgagtcacacaggccttgcgtcctgaaccatccgatcacgtggtagacgcccgaccaccgggatccaagagttggaacccgtttatttggcgcggtaaatggggtaccgggtag

SEQ ID NO: 12348 - protein, 345 aa, Muscodor strobelii
  misc_feature: SGI Peptide ID NO. 564007
MSLTSHPSSDPPGSPPRGIATLSLGRQASCASIDLTEADVSSDESDLQPSTGARELKRTRKRAQLREPVHALQQSQAQEQHDFQVVEWVYDKGEYETASPTIDTVIFDLPSTSDIKGKGEPQENGIPPSAGAIDNGYDAEGENDNGSLSSYCSRSDEERDPDQHDGTMEDWCPGVVVEANRRSGSSSSQRSQRYKQRQILGTIPEVSDEDTLRDVPDEQLPGGYPIPDICIDNASLFDYNSFFEVNPEMTSAMTPVGLLPPQAHHLHPLYPPRTNPNSEPASHVHEHTPASSASNRNNRMTRIRDQFRRVTQALRPEPSDHVVDARPPGSKSWNPFIWRGKWGTG

SEQ ID NO: 12349 - DNA, 4311 bp, Muscodor strobelii
  misc_feature: SGI cDNA ID NO. 564008
  misc_feature: Encodes the peptide sequence at SEQ ID NO 12350
atggccttcctgttcaaatccaagaagaaccaggacaggaacatatccagccgcgatgggcccccggtgtcgagcggcatgcagagcccagccggccggatagcaagagacgagaagcacggcgcgcgctccacacccaccggcagcttgaactcgttcgatgatggaggaagccccaacgatgctgacagatatgctgtgcgccgagcagctgctactcagcaggagccagcacagcagccctcagcacaacagtcgcagagcgatcttccatttcgcaataatccatctgcgccacagcaaaatccaaatgcatctctatacccctggtcgcaacgccgactgaccttcacttcgaatattcccagcccatttccccgatatggcgcggccgtcaattctgtatcatcaaaagagggcgatatatacatcatgggaggcttaatcaacagttcgacagttaaaggcgacttgtggatgatcgaagctggtggcaacctgtcatgctatccactccctaccaccgccgagggccctggacccagagtgggacatgcctctctgctcgttggcaatgcattcattgtttatggtggggataccaagatcgaagagtctgacaccttggatgagaccctatacctcctcaacacctctaccagacagtggtcgagagccctacccgccggacctagaccttctggccgttatggacactcgctcaacattgtcggctccaagatctacatcttcggtggccaggtcgagggatactttatgaacgatctctcggccttcgatttgaaccagctgcaaatgccgaataatcgatgggaagtcatgatcggaaacactgaatccaactcggggcccaacggcaaagtcccgccagcccgaacaaaccatactatgatcacgtataacgacaagttatatctctttggtggaaccaacgggttccagtggttcaacgatgtgtggtgttatgatcccgtagtaaacaagtgggaccaactggattgcattggatatattccgctgccgagggagggacacgctgcagcgcttattgacgatgttatgtacgtttttggtgggcgaactgaagaaggcagtgacctcggtgatcttgccgcgttcaggatctcatcccggcgttggtataccttccagaacatgggcccaaccccatcgcctcgatctggccatagcatgacagctgtgggcaagtccgtggttgtggtgggaggagaaccgagctcggctacgaaccaagtcaacgatctttccctcgtctatgtcctggatacgaccaagatccgataccctaatgatgctcagatccaatccacgacgcagaagctacagcaggctaggaggcccagcggcgagtcaacctctggacgcggacctgggtcccgcgaaggctcaaaggggcccgatcctaagagacttgctggtggtcccggcagcccaaccagccctggcaagggacccaatgggacagagacggctggacctcccattagtaatgggatttccaaactgccccggccaggcacgtcaacgccttctggtcctcctccacaaggccagcctcctcgtccaacagttgacacaagcggcgccaatcgacggcttaaaaacgcctcgatcgaacgcattgagaaagacatggggccctcgagctcggcctcgccacagtcgccagctaaagacgaggccaacggtcgttcaacgccgagccaacaggctgctaaaattgcttcaaagcccgatggtgtgacagtggaagtgcagaaatctcgacaagctagaggacctgggtcaatggacagcagcaccgacccgactttgaagacagtggcgaaccgaccgtcctctccacctcccccaacgcgccagaacagcaaccctctggctcgacgaggctctaacaggaattctcagacggtggcacttctgaaggagttagattcagcacgcaaccgaaatgcttggtacgcctctgagctcgagatggcccgcaagtcgggctatacacctgctgcctctctcagccccgctctagaagctcgtggagtcgagacatttgacgacgaagataaacccctgattgaagcattgttagccatgagacaggagcttgctaatgtccagtcatccgttgacaagcaggccattattgctgcgaagcaaatcgccgaggcagaaaagcaacgtgatgccgctgttcgagaggcagtctatgccaaggcaaagctggctgctcatgccggaagtgcagcaagcaccccgcaggtcgatgttgatcgcagtgctgaatcgagcgaccgtgctaacgaaataagccgaaagcttgcctcaacattaaacatgcagaaggagctgcagaacaatctgtcacgtgcaggtaccgacttggatgcggaaaagcgagcccgccagcttgcagacgaaactttgagtgcttcccaaaaacggatggcagaactagagtcttacaaacaggagacctctctagagctcgagcggctacgagctgagctccacatgacacaacgcgaagctagagaacaagcagttgctgctactgaggccgttaccgccacgcagctccttcgtgtggagaaggaacagctcgagtcgaagtataacgatatctctggcagttctgaaaccaccagccagactctggagaccttgcgcaatgctgtcgcagcgtctaccaagaccggatccctgttcaagcgccgctatgaggaagagcgtgcactgcgcgagagcaacgaggctaagttccacaagctcaaggctgagcacgaggcccacaccgctgagttcgtcgccgtcagccagcgcttgcgcgatgccgaggagttggctgaacaacatgccaacgaggcccagacccatcgtgaagctgtccttgctgggttggagaagcttgctagtgatcctgccaaatctgggcaggctgattccgagcaatttgctgccctacagaatcaactcactgaagcaaatctcctagtgaagagatatcagcaacaggctgatgctgcggccgacaaacttcgcagcgccgaggagcgcattgccgggctcgaagcataccaggagcaatccagcagagaaggcgtcacaactcgtagaatgctccaatcagctctacgagacacccagtcactccaggcgctgaactctgagttgaagaatcagctagcgaaccagcaattagagacaaatgctattacggtacaacacaacacgcttaaagatatcttgggtgagagaggcatcagccccaccggtcttgcacgtgcccgcaatatgggcggtcgagctgagtcgccagatccaggtcgtgccgctgagcttgaacgacaacttctacaggctattgcggatcatgaggagacgaaacatgcattcacggtgcaggctcaagagacagagtcgacctatcgtgaacgtatcatacaattggagaatgactatcaatctgctgtccactacgtgaaaggcacagagaagatgctcaagaagatgaaggaagagttcgctaagtcaaaagctgagaatgtgaagcttaagaatgagaacttcgagcttgaggcacgtgccggcaacccagaaggctccgctggaggcgaatgggaggcagaaaaggctatgctcgaaacaaagatcgaagatttagaagagcagctcaagcatgcatctgcacaactcgagcatcagcttgccgcagtgcaaagagatctcgctctcatgaaacaggatcgcgatacagcagcacaatcaagccagaatgctatgcaaatgctcgctgcccgacagcaagatctcgagcgcttggaacaagagaactccggtctagagaccagagccaaggaagccgagcagaaagtcagcttactcctcgaccaggtcgagaactcggtcgacaactaccgtagacgcagcagaatgagcaccgaacagcagaacgccacgccgaatcttaatggccaggcgcatggccacgtccgacaggagagctctgaagctgagagtctttacggtgagcttggcgataacagaaacagtgcagctctggagaaccttgccagtgaactcgacgctctccgttcgcactgggagacaagaaacaagagcttccgcctatccaataccttcgacttcgagtctggtccgaagaaggacgacgatggcgccactggtctcggtttaagcgagagtttggcggattggagaaaacgacttgacaccgataagcacgatacccatggcagccaccgtcagtag

SEQ ID NO: 12350 - protein, 1436 aa, Muscodor strobelii
  misc_feature: SGI Peptide ID NO. 564008
  misc_feature (298)..(343): Pfam Id: PF01344 Pfam Desc: Kelch motif
  misc_feature (348)..(394): Pfam Id: PF01344 Pfam Desc: Kelch motif
  misc_feature (235)..(285): Pfam Id: PF01344 Pfam Desc: Kelch motif
  misc_feature (298)..(343): Pfam Id: PF07646 Pfam Desc: Kelch motif
  misc_feature (348)..(394): Pfam Id: PF07646 Pfam Desc: Kelch motif
  misc_feature (1)..(1424): NCBI GI: 39970817 Blast Desc: MGG_02875 [Magnaporthe grisea 70-15] gi|149210313|ref|XP_001522531.1| MGCH7_ch7g634 [Magnaporthe grisea 70-15] gi|86196589|gb|EAQ71227.1| MGCH7_ch7g634 grisea
  misc_feature (1)..(1433): NCBI GI: 46128651 Blast Desc: FG08703.1 [Gibberella zeae PH-1]
  misc_feature (1)..(1435): NCBI GI: 171683955 Blast Desc: protein product [Podospora anserina] gi|170941938|emb|CAP67590.1| protein product [Podospora anserina]
  misc_feature (1)..(1432): NCBI GI: 116193085 Blast Desc: CHGG_06260 [Chaetomium globosum CBS 148.51] gi|88182173|gb|EAQ89641.1| CHGG_06260 [Chaetomium globosum CBS 148.51]
  misc_feature (1)..(1435): NCBI GI: 164428468 Blast Desc: NCU00622 [Neurospora crassa OR74A] gi|157072158|gb|EAA36526.2| conserved [Neurospora crassa OR74A]
  misc_feature (1)..(1427): NCBI GI: 115386146 Blast Desc: ATEG_06928 [Aspergillus terreus NIH2624] gi|114190612|gb|EAU32312.1| ATEG_06928 [Aspergillus terreus NIH2624]
  misc_feature (1)..(1427): NCBI GI: 145238082 Blast Desc: An07g06100 [Aspergillus niger] gi|134076167|emb|CAK48980.1| protein product [Aspergillus niger]
  misc_feature (1)..(1427): NCBI GI: 159128802 Blast Desc: cell polarity protein (Tea1), [Aspergillus fumigatus A1163]
  misc_feature (1)..(1427): NCBI GI: 70989075 Blast Desc: cell polarity protein (Tea1) [Aspergillus fumigatus Af293] gi|66847018|gb|EAL87349.1| cell polarity protein (Tea1), [Aspergillus fumigatus Af293]
  misc_feature (1)..(1427): NCBI GI: 119498127 Blast Desc: cell polarity protein (Tea1), [Neosartorya fischeri NRRL 181] gi|119413985|gb|EAW23924.1| cell polarity protein (Tea1), [Neosartorya fischeri NRRL 181]
MAFLFKSKKNQDRNISSRDGPPVSSGMQSPAGRIARDEKHGARSTPTGSLNSFDDGGSPNDADRYAVRRAAATQQEPAQQPSAQQSQSDLPFRNNPSAPQQNPNASLYPWSQRRLTFTSNIPSPFPRYGAAVNSVSSKEGDIYIMGGLINSSTVKGDLWMIEAGGNLSCYPLPTTAEGPGPRVGHASLLVGNAFIVYGGDTKIEESDTLDETLYLLNTSTRQWSRALPAGPRPSGRYGHSLNIVGSKIYIFGGQVEGYFMNDLSAFDLNQLQMPNNRWEVMIGNTESNSGPNGKVPPARTNHTMITYNDKLYLFGGTNGFQWFNDVWCYDPVVNKWDQLDCIGYIPLPREGHAAALIDDVMYVFGGRTEEGSDLGDLAAFRISSRRWYTFQNMGPTPSPRSGHSMTAVGKSVVVVGGEPSSATNQVNDLSLVYVLDTTKIRYPNDAQIQSTTQKLQQARRPSGESTSGRGPGSREGSKGPDPKRLAGGPGSPTSPGKGPNGTETAGPPISNGISKLPRPGTSTPSGPPPQGQPPRPTVDTSGANRRLKNASIERIEKDMGPSSSASPQSPAKDEANGRSTPSQQAAKIASKPDGVTVEVQKSRQARGPGSMDSSTDPTLKTVANRPSSPPPPTRQNSNPLARRGSNRNSQTVALLKELDSARNRNAWYASELEMARKSGYTPAASLSPALEARGVETFDDEDKPLIEALLAMRQELANVQSSVDKQAIIAAKQIAEAEKQRDAAVREAVYAKAKLAAHAGSAASTPQVDVDRSAESSDRANEISRKLASTLNMQKELQNNLSRAGTDLDAEKRARQLADETLSASQKRMAELESYKQETSLELERLRAELHMTQREAREQAVAATEAVTATQLLRVEKEQLESKYNDISGSSETTSQTLETLRNAVAASTKTGSLFKRRYEEERALRESNEAKFHKLKAEHEAHTAEFVAVSQRLRDAEELAEQHANEAQTHREAVLAGLEKLASDPAKSGQADSEQFAALQNQLTEANLLVKRYQQQADAAADKLRSAEERIAGLEAYQEQSSREGVTTRRMLQSALRDTQSLQALNSELKNQLANQQLETNAITVQHNTLKDILGERGISPTGLARARNMGGRAESPDPGRAAELERQLLQAIADHEETKHAFTVQAQETESTYRERIIQLENDYQSAVHYVKGTEKMLKKMKEEFAKSKAENVKLKNENFELEARAGNPEGSAGGEWEAEKAMLETKIEDLEEQLKHASAQLEHQLAAVQRDLALMKQDRDTAAQSSQNAMQMLAARQQDLERLEQENSGLETRAKEAEQKVSLLLDQVENSVDNYRRRSRMSTEQQNATPNLNGQAHGHVRQESSEAESLYGELGDNRNSAALENLASELDALRSHWETRNKSFRLSNTFDFESGPKKDDDGATGLGLSESLADWRKRLDTDKHDTHGSHRQ

SEQ ID NO: 12351 - DNA, 5553 bp, Muscodor strobelii
  misc_feature: SGI EST ID NO. CUFF.29271.0
  misc_feature: Variant of the nucleotide sequence at SEQ ID NO 12349
cctgccttcctcttcccgccgccgacaccacgattcccactcggtaattttccagaggcgcaaacccccaggcactggaccaacctcgccgccgacctccttccctcccaacttttttttcctttgccgtcgaccacgatccttcatcccatcttttcgcttccgccccggttggtgtcattgggacgcgacttgaactgactgccagttgtcggattgtgctgttgcttattgctctggccgtcgttgcttccctcagcagcgtctatctgtatcaagttgtacttgcacccccttattgaccactgcactctttcctccacctcgccgcaccttccacacccgaccgtggaccgccctagcatttcgcacgctctgcgctcatccctccaaacatccaaattgtttcctgcaacgggtaacagctgaaacataaatcgtatcgccttcgcatacatcttacaacacataccgagggttctaggccagggacatcgcgccagctgctacacagaacccgatcttggaatttccagcgggaagacggtcccagccatcggatttccaacctgacttcatgtgactgcatcgggctcaatcacaatccgccgcgcgctatccaactcaattcaaccgtgcccgaccgccccgactccgatcgcatctgccaacaccaagcccggccgtccccattatcaccgttcaaccgacagccaggtcaatcgccgcccacacagccagctgaggtccctcgcgggatttcagccaccgtgccgaaatggccttcctgttcaaatccaagaagaaccaggacaggaacatatccagccgcgatgggcccccggtgtcgagcggcatgcagagcccagccggccggatagcaagagacgagaagcacggcgcgcgctccacacccaccggcagcttgaactcgttcgatgatggaggaagccccaacgatgctgacagatatgctgtgcgccgagcagctgctactcagcaggagccagcacagcagccctcagcacaacagtcgcagagcgatcttccatttcgcaataatccatctgcgccacagcaaaatccaaatgcatctctatacccctggtcgcaacgccgactgaccttcacttcgaatattcccagcccatttccccgatatggcgcggccgtcaattctgtatcatcaaaagagggcgatatatacatcatgggaggcttaatcaacagttcgacagttaaaggcgacttgtggatgatcgaagctggtggcaacctgtcatgctatccactccctaccaccgccgagggccctggacccagagtgggacatgcctctctgctcgttggcaatgcattcattgtttatggtggggataccaagatcgaagagtctgacaccttggatgagaccctatacctcctcaacacctctaccagacagtggtcgagagccctacccgccggacctagaccttctggccgttatggacactcgctcaacattgtcggctccaagatctacatcttcggtggccaggtcgagggatactttatgaacgatctctcggccttcgatttgaaccagctgcaaatgccgaataatcgatgggaagtcatgatcggaaacactgaatccaactcggggcccaacggcaaagtcccgccagcccgaacaaaccatactatgatcacgtataacgacaagttatatctctttggtggaaccaacgggttccagtggttcaacgatgtgtggtgttatgatcccgtagtaaacaagtgggaccaactggattgcattggatatattccgctgccgagggagggacacgctgcagcgcttattgacgatgttatgtacgtttttggtgggcgaactgaagaaggcagtgacctcggtgatcttgccgcgttcaggatctcatcccggcgttggtataccttccagaacatgggcccaaccccatcgcctcgatctggccatagcatgacagctgtgggcaagtccgtggttgtggtgggaggagaaccgagctcggctacgaaccaagtcaacgatctttccctcgtctatgtcctggatacgaccaagatccgataccctaatgatgctcagatccaatccacgacgcagaagctacagcaggctaggaggcccagcggcgagtcaacctctggacgcggacctgggtcccgcgaaggctcaaaggggcccgatcctaagagacttgctggtggtcccggcagcccaaccagccctggcaagggacccaatgggacagagacggctggacctcccattagtaatgggatttccaaactgccccggccaggcacgtcaacgccttctggtcctcctccacaaggccagcctcctcgtccaacagttgacacaagcggcgccaatcgacggcttaaaaacgcctcgatcgaacgcattgagaaagacatggggccctcgagctcggcctcgccacagtcgccagctaaagacgaggccaacggtcgttcaacgccgagccaacaggctgctaaaattgcttcaaagcccgatggtgtgacagtggaagtgcagaaatctcgacaagctagaggacctgggtcaatggacagcagcaccgacccgactttgaagacagtggcgaaccgaccgtcctctccacctcccccaacgcgccagaacagcaaccctctggctcgacgaggctctaacaggaattctcagacggtggcacttctgaaggagttagattcagcacgcaaccgaaatgcttggtacgcctctgagctcgagatggcccgcaagtcgggctatacacctgctgcctctctcagccccgctctagaagctcgtggagtcgagacatttgacgacgaagataaacccctgattgaagcattgttagccatgagacaggagcttgctaatgtccagtcatccgttgacaagcaggccattattgctgcgaagcaaatcgccgaggcagaaaagcaacgtgatgccgctgttcgagaggcagtctatgccaaggcaaagctggctgctcatgccggaagtgcagcaagcaccccgcaggtcgatgttgatcgcagtgctgaatcgagcgaccgtgctaacgaaataagccgaaagcttgcctcaacattaaacatgcagaaggagctgcagaacaatctgtcacgtgcaggtaccgacttggatgcggaaaagcgagcccgccagcttgcagacgaaactttgagtgcttcccaaaaacggatggcagaactagagtcttacaaacaggagacctctctagagctcgagcggctacgagctgagctccacatgacacaacgcgaagctagagaacaagcagttgctgctactgaggccgttaccgccacgcagctccttcgtgtggagaaggaacagctcgagtcgaagtataacgatatctctggcagttctgaaaccaccagccagactctggagaccttgcgcaatgctgtcgcagcgtctaccaagaccggatccctgttcaagcgccgctatgaggaagagcgtgcactgcgcgagagcaacgaggctaagttccacaagctcaaggctgagcacgaggcccacaccgctgagttcgtcgccgtcagccagcgcttgcgcgatgccgaggagttggctgaacaacatgccaacgaggcccagacccatcgtgaagctgtccttgctgggttggagaagcttgctagtgatcctgccaaatctgggcaggctgattccgagcaatttgctgccctacagaatcaactcactgaagcaaatctcctagtgaagagatatcagcaacaggctgatgctgcggccgacaaacttcgcagcgccgaggagcgcattgccgggctcgaagcataccaggagcaatccagcagagaaggcgtcacaactcgtagaatgctccaatcagctctacgagacacccagtcactccaggcgctgaactctgagttgaagaatcagctagcgaaccagcaattagagacaaatgctattacggtacaacacaacacgcttaaagatatcttgggtgagagaggcatcagccccaccggtcttgcacgtgcccgcaatatgggcggtcgagctgagtcgccagatccaggtcgtgccgctgagcttgaacgacaacttctacaggctattgcggatcatgaggagacgaaacatgcattcacggtgcaggctcaagagacagagtcgacctatcgtgaacgtatcatacaattggagaatgactatcaatctgctgtccactacgtgaaaggcacagagaagatgctcaagaagatgaaggaagagttcgctaagtcaaaagctgagaatgtgaagcttaagaatgagaacttcgagcttgaggcacgtgccggcaacccagaaggctccgctggaggcgaatgggaggcagaaaaggctatgctcgaaacaaagatcgaagatttagaagagcagctcaagcatgcatctgcacaactcgagcatcagcttgccgcagtgcaaagagatctcgctctcatgaaacaggatcgcgatacagcagcacaatcaagccagaatgctatgcaaatgctcgctgcccgacagcaagatctcgagcgcttggaacaagagaactccggtctagagaccagagccaaggaagccgagcagaaagtcagcttactcctcgaccaggtcgagaactcggtcgacaactaccgtagacgcagcagaatgagcaccgaacagcagaacgccacgccgaatcttaatggccaggcgcatggccacgtccgacaggagagctctgaagctgagagtctttacggtgagcttggcgataacagaaacagtgcagctctggagaaccttgccagtgaactcgacgctctccgttcgcactgggagacaagaaacaagagcttccgcctatccaataccttcgacttcgagtctggtccgaagaaggacgacgatggcgccactggtctcggtttaagcgagagtttggcggattggagaaaacgacttgacaccgataagcacgatacccatggcagccaccgtcagtaggcggacgtgcctaaatcttgccaagcctcatgagaggcactataatgaaggaaacctgaggatacgataccctgtatattctgttacggcggcagcttcccccgtcgcttaatgtgtaccacgacgtatcatgccttgtctttttcgccgcgatgcaagcttattggacttgaactattggacttctgctgttaggatttttgtcgtttcttgtaccacttcgcattctactaggcggcgtagcattcaggtcgtttgttatttccagctgcacagagttcatatacctacctacctacctggtaattgcttgccttaggctactagcctaggcttttagttgtaacccacagagtctttgccctactgtgaggtattctcttataattatatccgttgctttgaatcaatttcatgctcatacgtgactcgtaatactatgaatgtgggctttttatagctta

SEQ ID NO: 12352 - DNA, 1044 bp, Muscodor strobelii
  misc_feature: SGI cDNA ID NO. 564009
  misc_feature: Encodes the peptide sequence at SEQ ID NO 12353
atgttccggggtattctgcctccgttgtcgtccaaccttgatctgaagtatacccttcaagcgatagaagaaatgagacatcacctactactcggctcccggccgaaatatggcatttacgagactgtatgcaactacagtcttatgcttgaagacatcgacagcgccactgcccaattttgtctcgcagaaacagtcgaggctggacttaccacgatccgcaagacgcattcagctgagtgggatatcgatgttgatattttgtaccattacgcgaaattgaatctaaacgcgtcggctctggtgtgccttctacagagaacatcttggggagatcctaggaatatcatccagttagagaccctcgcaatgcgtggatgggaagcatcgttatgcctcatcaactgcatgaaagccatgaccagcatcagccaagctgccccgcacgaggaacaacagcctgatcagaagatgatgatgtcgattcatcatcctcgacattacttcgaggctctcttcttcgcggccgttttcatgttccgtactttctgcacgatgcaaccttcgaaagatctcacggacaaagaagttattatagaagcactcaccgaggtgtataacatgtttcggctattcccacatcatcgggatgtaacaggcggagcggaggtaatccaccgcctcattcacaaggcacgcgcagaagagtttccaggaaacagcgattttcacttgagtagtctgctaattacagagcgccttggtgcctctatcgtatgggacactctcaagctggtttacagcgtacggcataatcaccaggccacagagaaagcgaacgagaacagtcgaagacagcaagcttcatatactgagaattcactggcttcactgagcagtaatatgacgcatgatatccaggtaggaactgatgcggagcttctgctgcaggagtcgggagacctcgaatggacagatcttgactttattttcccgtctttcgagtattgctttggagctcaggaacagacccagtgggagtag

SEQ ID NO: 12353 - protein, 347 aa, Muscodor strobelii
  misc_feature: SGI Peptide ID NO. 564009
MFRGILPPLSSNLDLKYTLQAIEEMRHHLLLGSRPKYGIYETVCNYSLMLEDIDSATAQFCLAETVEAGLTTIRKTHSAEWDIDVDILYHYAKLNLNASALVCLLQRTSWGDPRNIIQLETLAMRGWEASLCLINCMKAMTSISQAAPHEEQQPDQKMMMSIHHPRHYFEALFFAAVFMFRTFCTMQPSKDLTDKEVIIEALTEVYNMFRLFPHHRDVTGGAEVIHRLIHKARAEEFPGNSDFHLSSLLITERLGASIVWDTLKLVYSVRHNHQATEKANENSRRQQASYTENSLASLSSNMTHDIQVGTDAELLLQESGDLEWTDLDFIFPSFEYCFGAQEQTQWE

SEQ ID NO: 12354 - DNA, 2420 bp, Muscodor strobelii
  misc_feature: SGI EST ID NO. CUFF.29259.1
  misc_feature: Variant of the nucleotide sequence at SEQ ID NO 12352
acatgatttaagctcgtgatgatagcagcgacacgttcctcatgctatgggtcctatcgtatgcgacgtataaacccgtgtaaaagacttacaaagcgtggcagtgccgaacgctcaatcaacggtcggttaatataagcaacagcgtataatcaaactctcttccgaccaagagagtcttatttctcggaactgtggaagtatttagacttaaaacaagacaatggttgggaaagcgagatcttgtacctcctgccgtcaagccaaggtagcttgcgatgcccgcaacaagtcacccaacaccccctgcacaaggtgcagccgcagtcagctcgtgtgccgattcgacaaaaactttaagagaattcccacccgacagtaagtaagtgtgttcgtccttttagttcactcaagcttagctatctgtgatactagacttaccgctagccttgttaccaatcataatctccgtgccacgcagaacatcgcggagggaagcagatcaccaccgacagaagcgttgccacaagaacccgaacccccattatcaacgcaaatcccattgctctatgcagctgtaacggaaaggctctcggactttatcattggcgatgtttccatccctcctggaataataatcgggttaatcaagcactttgggcattcctattatatccatgctcccttcatcgagcccatcgagtcactggcgtgcttccacacaacctcaccactactgttctggaccattgtgctactggctgcccaacatcacccaaagcatagtggtctgtatgataaactgctcccatggcatcgagaactcctaaagccagtctcaaatactgccattcagtctgtggaagagatacaggcgctccttctcttgtgtctatggccaataccgaaacggcctgagtcactaagtccgacttggagctatattggtctggccgtcaatgaatgtaagcgattgggcttgcataaacacatatcacacgaccccaatgagccgcagtcgactttgggagggcatgatgatccgcgaacaagaaatgtccgtacgcggacccgtcgcttgacatggcttgcgtgcttttatataagtacaaaagaagcgatgttccggggtattctgcctccgttgtcgtccaaccttgatctgaagtatacccttcaagcgatagaagaaatgagacatcacctactactcggctcccggccgaaatatggcatttacgagactgtatgcaactacagtcttatgcttgaagacatcgacagcgccactgcccaattttgtctcgcagaaacagtcgaggctggacttaccacgatccgcaagacgcattcagctgagtgggatatcgatgttgatattttgtaccattacgcgaaattgaatctaaacgcgtcggctctggtgtgccttctacagagaacatcttggggagatcctaggaatatcatccagttagagaccctcgcaatgcgtggatgggaagcatcgttatgcctcatcaactgcatgaaagccatgaccagcatcagccaagctgccccgcacgaggaacaacagcctgatcagaagatgatgatgtcgattcatcatcctcgacattacttcgaggctctcttcttcgcggccgttttcatgttccgtactttctgcacgatgcaaccttcgaaagatctcacggacaaagaagttattatagaagcactcaccgaggtgtataacatgtttcggctattcccacatcatcgggatgtaacaggcggagcggaggtaatccaccgcctcattcacaaggcacgcgcagaagagtttccaggaaacagcgattttcacttgagtagtctgctaattacagagcgccttggtgcctctatcgtatgggacactctcaagctggtttacagcgtacggcataatcaccaggccacagagaaagcgaacgagaacagtcgaagacagcaagcttcatatactgagaattcactggcttcactgagcagtaatatgacgcatgatatccaggtaggaactgatgcggagcttctgctgcaggagtcgggagacctcgaatggacagatcttgactttattttcccgtctttcgagtattgctttggagctcaggaacagacccagtgggagtagtttgccagttcgctctcgtattctggatattgtttaacgcagcttaagctgtcactactaaacaacatagattttaaatattcattgagctctgctcaagacattcaagatattcaatgtcaagattgttgtaccggctattctgtcttataatacaacgatcttgcatgcttaatggggttgtcattcgacgtacttatggtctccggtgtggagtatgaaccattagtggctgggaagaagaaataaattacgc

SEQ ID NO: 12355 - DNA, 726 bp, Muscodor strobelii
  misc_feature: SGI cDNA ID NO. 564010
  misc_feature: Encodes the peptide sequence at SEQ ID NO 12356
atgcagcttattcgtctcttcacggtcgtgtccttctgcacagcagtcgcttgtggatcatatcctgtttctgactggaaacgtcctggcctgggtgatgtgcgatctccttgccccatgcttaacactttggcaaatcatggattcctaccccacgatggcaagaacatagacgaaagcactgtcgtagcagcttttgataacatcaacttcgaccccgtgttctctcgctttctgtatagcattgctgtcagggggaatcctgctcctaatgcgacaacatttgacttgaaccaacttgacgtgcacaacaggttcgagcacgacgcaagtttgagtcgcgcagatgcttacttcggcgatggcgtgtctttcaatcagacgatcttcgacctgacgaaatcatattacactgagcaaattgtggatttgaagatggcctccaatgcgcgtctagcacgaatcaactactcaattgaaacaaatccagacttcgtagcccccagcgcaaatgctagcaagggagagacatccgcaattatcctcacgttctcaaatgggactttagggttcgcatctagatccaacatagagtatttctttgaaaatgaacgcttgccgtacgatcaggggtggaccaagccgaccagtgcgatttccagagatactcttgtggacatgattcaacggctggatgccgcagcgaattcgacaaacctacattaa

SEQ ID NO: 12356 - protein, 241 aa, Muscodor strobelii
  misc_feature: SGI Peptide ID NO. 564010
  misc_feature (26)..(66): Pfam Id: PF01328 Pfam Desc: Peroxidase, family 2
  misc_feature (26)..(231): NCBI GI: 145236505 Blast Desc: An06g00720 [Aspergillus niger] gi|134075355|emb|CAK39169.1| protein product [Aspergillus niger]
  misc_feature (1)..(227): NCBI GI: 145256287 Blast Desc: An10g01000 [Aspergillus niger CBS 513.88] gi|134078662|emb|CAK40535.1| protein product [Aspergillus niger]
  misc_feature (26)..(234): NCBI GI: 169774189 Blast Desc: [Aspergillus oryzae RIB40] gi|83769425|dbj|BAE59560.1| protein product [Aspergillus oryzae]
  misc_feature (26)..(231): NCBI GI: 238497309 Blast Desc: conserved [Aspergillus flavus NRRL3357] gi|220694770|gb|EED51114.1| conserved [Aspergillus flavus NRRL3357]
  misc_feature (7)..(235): NCBI GI: 255950370 Blast Desc: Pc22g20520 [Penicillium chrysogenum Wisconsin 54-1255] gi|211592969|emb|CAP99340.1| Pc22g20520 [Penicillium chrysogenum Wisconsin 54-1255]
  misc_feature (1)..(202): NCBI GI: 116198765 Blast Desc: CHGG_07538 [Chaetomium globosum CBS 148.51] gi|88178817|gb|EAQ86285.1| CHGG_07538 [Chaetomium globosum CBS 148.51]
  misc_feature (8)..(225): NCBI GI: 116201155 Blast Desc: CHGG_08462 [Chaetomium globosum CBS 148.51] gi|88176980|gb|EAQ84448.1| CHGG_08462 [Chaetomium globosum CBS 148.51]
  misc_feature (15)..(224): NCBI GI: 169622798 Blast Desc: SNOG_14625 [Phaeosphaeria nodorum SN15] gi|111056697|gb|EAT77817.1| SNOG_14625 [Phaeosphaeria nodorum SN15]
  misc_feature (7)..(219): NCBI GI: 115437934 Blast Desc: conserved [Aspergillus terreus NIH2624] gi|114188752|gb|EAU30452.1| conserved [Aspergillus terreus NIH2624]
  misc_feature (7)..(220): NCBI GI: 189189958 Blast Desc: conserved [Pyrenophora tritici-repentis Pt-1C-BFP] gi|187972924|gb|EDU40423.1| conserved [Pyrenophora tritici-repentis Pt-1C-BFP]
  misc_feature (29)..(218): SWISSPROT Homolog: EC 1.11.1.10 Chloride peroxidase
MQLIRLFTVVSFCTAVACGSYPVSDWKRPGLGDVRSPCPMLNTLANHGFLPHDGKNIDESTVVAAFDNINFDPVFSRFLYSIAVRGNPAPNATTFDLNQLDVHNRFEHDASLSRADAYFGDGVSFNQTIFDLTKSYYTEQIVDLKMASNARLARINYSIETNPDFVAPSANASKGETSAIILTFSNGTLGFASRSNIEYFFENERLPYDQGWTKPTSAISRDTLVDMIQRLDAAANSTNLH

SEQ ID NO: 12357 - DNA, 2441 bp, Muscodor strobelii
  misc_feature: SGI EST ID NO. CUFF.29261.0
  misc_feature: Variant of the nucleotide sequence at SEQ ID NO 12355
cttcatgaaggtattgcaggtatattagaagttccccacaattggttcaagtttctccgattgtccatgtcgtcttcatctatgagtacaacaaggtgggaagacatccacgctgcacagaagacgcatacttccgtgttggtcatgaaccatgtaatatcaatgacggaacatgttcccttcgcaatctgtctaccttaaacgccggcttccgcagaatggaagatcgtcagaaacgtataagatgcgtggcctagagccaggtcaactcaacctcaaacgcattatctatcgaattagttatattttatcttcatcaggatgcagcttattcgtctcttcacggtcgtgtccttctgcacagcagtcgcttgtggatcatatcctgtttctgactggaaacgtcctggcctgggtgatgtgcgatctccttgccccatgcttaacactttggcaaatcatggattcctaccccacgatggcaagaacatagacgaaagcactgtcgtagcagcttttgataacatcaacttcgaccccgtgttctctcgctttctgtatagcattgctgtcagggggaatcctgctcctaatgcgacaacatttgacttgaaccaacttgacgtgcacaacaggttcgagcacgacgcaagtttgagtcgcgcagatgcttacttcggcgatggcgtgtctttcaatcagacgatcttcgacctgacgaaatcatattacactgagcaaattgtggatttgaagatggcctccaatgcgcgtctagcacgaatcaactactcaattgaaacaaatccagacttcgtagcccccagcgcaaatgctagcaagggagagacatccgcaattatcctcacgttctcaaatgggactttagggttcgcatctagatccaacatagagtatttctttgaaaatgaacgcttgccgtacgatcaggggtggaccaagccgaccagtgcgatttccagagatactcttgtggacatgattcaacggctggatgccgcagcgaattcgacaaacctacattaaggaaagggttatacacggataaaagatttaaactactgagcagacagcaaactcccgacatcagttattcattgccttccttgggctgcttttctactttcgtcttcatgtaccctagttcagtcactctttgtcaatcacatacttagtggtcgactcaattgttttgcactttcgctgcattgctatcttgaaaatatacctcttcacttctatgtaagtcaggccgagaaactcaaagtccctcggttatgacaccacacctttaaatataaactacaatcctagtgtgaagaagaattttattttctactttactttatgctagaggtagtaatggaaattgaattccatagtagtaacttatatactagatacattgattcgttagttgttaaatgcctattgtagactattggtgcccaaaatacgactgtgataactctgaaggaacccctgctgcacaaaggaaaggctattattgctcgttgggattggataccgcttgccctaatgcgaccatctgaaacatgcacaattaaggtgtacctattagcacatgcgttggctgtctatctatccggcttagcggcatttctgtcaactctgtcctaattttgaaggatcactccgtccttgactccgtcggcccgttgggttagcattcgaaccgttgtagagaactcctaacgaacaacggctcgcgaggctagtcggccaatccgatcagtcgtctgatgcctcttgatgcctcaccgaacatttgcgactttgagttgggctgggtaaatgaatggtcctgtatgtaagatcgcgcgatccggccatgatcgtgagagtgacccaggagcctgtgtgtgaaccatacccagctagtgacagcttgcgaggctgctgcaacacaccatttgccatggccacaataaggttctgccaatcatatgaacccaccatttctgtcaacaccacatgatggactcgatcggaactgcatcgtgaaatctgccgtcttacaattctccgtgccgctatgctgcacgtctatgagcgagataaggggcattggaaatgaattttgagatactcatgcaaccgcccacagcaatacgattgagggttcattcgcgagatcaaaacgaccccatcgagcccatcattggtcgcaaattgcaatcgctacgtatggcgaccccgatcttcagccggaatatgaagccaacatgagatttacgtgtcaaaggcggtaattcttgagagagacggacagctcagcatgtcttgaacgctggccgtcgctttgtgtgtatattccaatcatctaagaggaacagagcctacgggcccaaccctggtcttaatccagactgctattactgctattcggtggagtggaa

SEQ ID NO: 12358 - DNA, 4533 bp, Muscodor strobelii
  misc_feature: SGI cDNA ID NO. 564011
  misc_feature: Encodes the peptide sequence at SEQ ID NO 12359
atgactgccgtcgcccatcaccacagtcattccgccgcataccctccctcccagcagcattcccattcccattcccagccgcagcacgagacgcaacactctgcgggcgacacatccttgccatccctcctccctgctgctgcagcccgccatcacacccacaccgccagaccgaacccggaaaagcacgacgctccggcgcctgcatctccaactgcgccctcttcgcggtttacgagcgctcaccctcaccaccagctcacctcccagcctggccaccctaccatgccctcgcgtcttggccccaatggcacctctactccgtcttactccccccatcgcgacctcgccctgcggaagcgcgggacggagccagtgacccggtccacgagcgccacagacgacgatgcctcggaccccagggcggtgaacaacagcaacaacaacaacaaccactcggctccccataagaagaagctctccatcgtcacctcccaggacgatgggaaccagggccgctcccaacgaccggccaagccccagctgctgcgatccaagagcgagcgcgtggtccgccgcgacgacacggagcccgtcgaggaggacatatacgagtggggtgcccgccacggcttcgaggaccactaccagtctgaggacatcatatcacagttggccaacaactggtatatgtactttacggacaagcggcacgagactaccgcacagcccaaaatccccaagtatgagatcgaggactggcggatgagggaccgtttaaagaccgtctcggctgccctcgcggtatgcctcaacataggagttgagccacccgaccagttgaagacgaaccccggcgcgaagctcgaggcttggcaggatccacacgcctcgcctgctaccaaggccttggagctcataggcaaggctctccaggcccagtatgagaacatttcggtgcggacaaggtacaagcagtatctagatccttcggtggaggagaccaagaagttctgcatctcgctgcggagaaacgcaaaggacgagaggatattattccattacaatggtcacggtgttcccaagccgacagcatctggtgagatttgggtttttaacaagaactacactcagtatatccctatatcgctatatgatctacagcaatggctgcaggctcctacggtgtttgtctgggactgttcggaagcgggtaacatactcaacaactatcaccgattcgtggagaagcatgtagaggaggaagaggcgacggcggccgccgaccccagctacgagaaactgaaattcgagggctatcttcacttggccgcttgtgccgtcaaggagaacctccctaccaatcctcttctcccggccgatctattcaccgcgtgtttgacgacaccaatcgaaatggcactgtggttcttcgttctgcagaaccccttaaaaactaaactgacgcctgaaagagccaaaaaacttcccggccgtcttcaggagagacggacgcctttaggagagttgaactggattttcaccgccatcacagacacaatcgcatggacatccttgcctcgtgccctattccggaagttctttaggcaggatctgatggtagctgcgctgttccgaaatttcatcttggcgcagaggataatgatggtctatggctgtcatcctcagtcgtacccagaacttccggacacacaccagcacccactgtgggaaagctgggacttggcagtagatcttgccctggcccagttaccgatgctggaaaagaaggaaagtgaaggaatcgattacgagtaccaaagctctaccttcttcgccgagcagcttactgcattcgaagtgtacctgggaaggggcgatgccatgctacaacgacctccggaacagttgcctgtggtgcttcaagtcttattgagtcagcagcatcgagttcgggcactcatcctcttgggtcggtttttggacttgggtccatgggcagttcagctagctctcagcatcggaattttcccttatgttctcaagcttttacagtcagctgctcccgagctgaagccggttatggtttttatatggacacgagtccttgccgttgacacatcctgtcagcctgacttaatcaaggataacggatacacatattttgctggcatcctaaaaccatccgaaaaccttctggttgctaatagtgacgaacacaaggcaatgtgcgcctttgtgctagccatgctttgcaagggatacaaacctggccagaacgtgtgtaaccagatcgatgccatgtcatcctgtctggtccacctccagaataaggagaacgtgttgctccgacagtgggcatgtctttgtctcagccaattgtggattaaccttcccgaggctaagtggaaaggcatcagggaggaggcgcccaagaagctctctgccctagccaaagactcatgttgcgaggtccgagccgcggtggttcatgcgatgacgacttttctagggattcctgacttgaccgatgaggtagctagggtcgaggaatccatagcttggacgatgttggagatggcgaacgatggaagccccgtcgtccgtaaggagctgctcgtattcttgtccaactttgtgttgcgctacgagaataagttcattgtcgcggcattcgagcaactgatggaggaacaagaatatgctcatcatccaccagctgacgatggcatggatcacaagatgggcttacactacgctggccctgacagccgcaatgctgatggctccatcaagccaacagcccagggactgtctttccatactgtattcgcagcttgttggaaacatattcttatactgaatgtcgatccccaccctgaagtgcagcgagacgctacagtcattgtagattacgtgcataacgctgttctcgcctcagcagttggttcacaagcccaatctataacggacgagatccacaagcgggctcgcagagctgctggtcacaagaaacaactgtccacatcacgcagtatgattggcatgccagcgccagagacggctgcaccggaaccagctgcaggacttttgaagcgtaccgccagtttactactccagctcccgagcatatggggtagcgaagaccgttcagccgcaacaagtcccctcggatctcccgaaatctcccgaaatttatcacaaaagttacggtaccccaccgactggaaaggtgctgccgaacaaaacgacccggcctacgtaccggcacattatcacattgcgagagagccagtgtctggcaattttgaagagcggaagttagatgaggtcccaactctacctctgaccagcaccttcctagactggtccatcgagtacttccgagagccccaaatgaaaccaagcgaggctgaagagcccggcagcactgaatacaatgaacggctgtggaggagatctcgcaatgaggcgatattgagagaaacgcaaccccagaagcaatttgcgggtacccacaaatggaataatgcgctctgcatcatgaataacaatgctcagccgactaagatgacattccatcagtttgaggaccatctcgccgtggccgatgatagtaacacagtctatctgtgggattggaagaaacagcagagactgaaccggttttcgaatggtaacccagccgggtccaagatcagcgacatgagatttataaacgaggatgataccgcatacttgatgacagggtcgtcggatggtgtcttgcggatatatcggaattaccaggaggcgtcgtcgatcgagcttgcctccgcctggcgagcactgacccaaatggttcccagcaacgtcaactcgggcatggtctttgactggcagcaagtgacaggcagagttctcgttgctggtgatgttcgtgtcattcgagtctgggcggctgcatctgagacatgtatcatggatatcccagccagatctggttcgtgcgtgacctcattgacctcggatcaaatgacggggaatatcttcgtcgcgggatttggcgacggagcggttcgagtgtttgacacccgcctccgacctcaagagtcgatggtgaaaaagtggaagaacgacaatgacaggcaatggatacgaagcgtgcatatgcaacgcggtggtcagcgggagctactctctgcaagccgtaacggcaaggtcaagctatgggacattcgaatggacaatccactccgtatcatcaatgcttcgcgcgatacgctgcggactgctagtgtgcatgaacatctgcccgtattctccgtcggcacatcagcacacatggtcaaagtgttcaatttcgaaggcgaagagctctctcgaatggaaccctactccagcttcctgcagcaaaaccgcggcgcaccgatagctgctactgccttccatccccatcgcatgattctcggatgtgctgcccggggcgattaccacgtcaacctcttcacttgcgccaatgagaagtctgacgcttttctcacctcgatttaa

SEQ ID NO: 12359 - protein, 1510 aa, Muscodor strobelii
  misc_feature: SGI Peptide ID NO. 564011
  misc_feature (93)..(1506): NCBI GI: 85074787 Blast Desc: NCU00621 [Neurospora crassa OR74A] gi|28927574|gb|EAA36525.1| NCU00621 [Neurospora crassa OR74A]
  misc_feature (96)..(1506): NCBI GI: 46128653 Blast Desc: FG08704.1 [Gibberella zeae PH-1]
  misc_feature (175)..(1505): NCBI GI: 149210309 Blast Desc: MGCH7_ch7g632 [Magnaporthe grisea 70-15] gi|86196587|gb|EAQ71225.1| MGCH7_ch7g632 [Magnaporthe grisea 70-15]
  misc_feature (225)..(1505): NCBI GI: 145609920 Blast Desc: MGG_02874 [Magnaporthe grisea 70-15] gi|145017306|gb|EDK01669.1| MGG_02874 [Magnaporthe grisea 70-15]
  misc_feature (231)..(1501): NCBI GI: 171683951 Blast Desc: protein product [Podospora anserina] gi|170941936|emb|CAP67588.1| protein product [Podospora anserina]
  misc_feature (44)..(1436): NCBI GI: 156046667 Blast Desc: SS1G_09434 [Sclerotinia sclerotiorum 1980] gi|154693829|gb|EDN93567.1| SS1G_09434 [Sclerotinia sclerotiorum 1980]
  misc_feature (218)..(1406): NCBI GI: 154296543 Blast Desc: BC1G_12846 [Botryotinia fuckeliana B05.10] gi|150843369|gb|EDN18562.1| BC1G_12846 [Botryotinia fuckeliana B05.10]
  misc_feature (103)..(1262): NCBI GI: 261353211 Blast Desc: WD repeat-containing protein mip1 [Verticillium albo-atrum VaMs.102]
  misc_feature (164)..(1498): NCBI GI: 242785510 Blast Desc: TORC1 growth control complex subunit Kog1, [Talaromyces stipitatus ATCC 10500] gi|218720757|gb|EED20176.1| TORC1 growth control complex subunit Kog1, [Talaromyces ATCC
  misc_feature (164)..(1498): NCBI GI: 239608808 Blast Desc: TORC1 growth control complex subunit Kog1 [Ajellomyces dermatitidis ER-3]
MTAVAHHHSHSAAYPPSQQHSHSHSQPQHETQHSAGDTSLPSLLPAAAARHHTHTARPNPEKHDAPAPASPTAPSSRFTSAHPHHQLTSQPGHPTMPSRLGPNGTSTPSYSPHRDLALRKRGTEPVTRSTSATDDDASDPRAVNNSNNNNNHSAPHKKKLSIVTSQDDGNQGRSQRPAKPQLLRSKSERVVRRDDTEPVEEDIYEWGARHGFEDHYQSEDIISQLANNWYMYFTDKRHETTAQPKIPKYEIEDWRMRDRLKTVSAALAVCLNIGVEPPDQLKTNPGAKLEAWQDPHASPATKALELIGKALQAQYENISVRTRYKQYLDPSVEETKKFCISLRRNAKDERILFHYNGHGVPKPTASGEIWVFNKNYTQYIPISLYDLQQWLQAPTVFVWDCSEAGNILNNYHRFVEKHVEEEEATAAADPSYEKLKFEGYLHLAACAVKENLPTNPLLPADLFTACLTTPIEMALWFFVLQNPLKTKLTPERAKKLPGRLQERRTPLGELNWIFTAITDTIAWTSLPRALFRKFFRQDLMVAALFRNFILAQRIMMVYGCHPQSYPELPDTHQHPLWESWDLAVDLALAQLPMLEKKESEGIDYEYQSSTFFAEQLTAFEVYLGRGDAMLQRPPEQLPVVLQVLLSQQHRVRALILLGRFLDLGPWAVQLALSIGIFPYVLKLLQSAAPELKPVMVFIWTRVLAVDTSCQPDLIKDNGYTYFAGILKPSENLLVANSDEHKAMCAFVLAMLCKGYKPGQNVCNQIDAMSSCLVHLQNKENVLLRQWACLCLSQLWINLPEAKWKGIREEAPKKLSALAKDSCCEVRAAVVHAMTTFLGIPDLTDEVARVEESIAWTMLEMANDGSPVVRKELLVFLSNFVLRYENKFIVAAFEQLMEEQEYAHHPPADDGMDHKMGLHYAGPDSRNADGSIKPTAQGLSFHTVFAACWKHILILNVDPHPEVQRDATVIVDYVHNAVLASAVGSQAQSITDEIHKRARRAAGHKKQLSTSRSMIGMPAPETAAPEPAAGLLKRTASLLLQLPSIWGSEDRSAATSPLGSPEISRNLSQKLRYPTDWKGAAEQNDPAYVPAHYHIAREPVSGNFEERKLDEVPTLPLTSTFLDWSIEYFREPQMKPSEAEEPGSTEYNERLWRRSRNEAILRETQPQKQFAGTHKWNNALCIMNNNAQPTKMTFHQFEDHLAVADDSNTVYLWDWKKQQRLNRFSNGNPAGSKISDMRFINEDDTAYLMTGSSDGVLRIYRNYQEASSIELASAWRALTQMVPSNVNSGMVFDWQQVTGRVLVAGDVRVIRVWAAASETCIMDIPARSGSCVTSLTSDQMTGNIFVAGFGDGAVRVFDTRLRPQESMVKKWKNDNDRQWIRSVHMQRGGQRELLSASRNGKVKLWDIRMDNPLRIINASRDTLRTASVHEHLPVFSVGTSAHMVKVFNFEGEELSRMEPYSSFLQQNRGAPIAATAFHPHRMILGCAARGDYHVNLFTCANEKSDAFLTSI

SEQ ID NO: 12360 - DNA, 5515 bp, Muscodor strobelii
  misc_feature: SGI EST ID NO. CUFF.29345.0
  misc_feature: Variant of the nucleotide sequence at SEQ ID NO 12358
cgactctgaataatccgtgcatgtatacttgtaataattatcgtattgacactcgaggcgcaacgtccggacttagagtttcttcatttaatccttaagtaatcaggccgatccaaaccgaagcaacattagtccatctaacctttctttttcccgtcataccctctgcttgacggcctggcgtgtgtctctctgcgtcggttccaccactctccttcgcgattcgctgttggcatcaagctcccgtcctgtgcccaatgcacctgttgctgtatgcgccctaggaggtagcttgctacccgacctcctgcgactgcgaccaaggcatcaccaacaccggccctctgcctgtgcagcaactcgcagcgttcgcgatgactgccgtcgcccatcaccacagtcattccgccgcataccctccctcccagcagcattcccattcccattcccagccgcagcacgagacgcaacactctgcgggcgacacatccttgccatccctcctccctgctgctgcagcccgccatcacacccacaccgccagaccgaacccggaaaagcacgacgctccggcgcctgcatctccaactgcgccctcttcgcggtttacgagcgctcaccctcaccaccagctcacctcccagcctggccaccctaccatgccctcgcgtcttggccccaatggcacctctactccgtcttactccccccatcgcgacctcgccctgcggaagcgcgggacggagccagtgacccggtccacgagcgccacagacgacgatgcctcggaccccagggcggtgaacaacagcaacaacaacaacaaccactcggctccccataagaagaagctctccatcgtcacctcccaggacgatgggaaccagggccgctcccaacgaccggccaagccccagctgctgcgatccaagagcgagcgcgtggtccgccgcgacgacacggagcccgtcgaggaggacatatacgagtggggtgcccgccacggcttcgaggaccactaccagtctgaggacatcatatcacagttggccaacaactggtatatgtactttacggacaagcggcacgagactaccgcacagcccaaaatccccaagtatgagatcgaggactggcggatgagggaccgtttaaagaccgtctcggctgccctcgcggtatgcctcaacataggagttgagccacccgaccagttgaagacgaaccccggcgcgaagctcgaggcttggcaggatccacacgcctcgcctgctaccaaggccttggagctcataggcaaggctctccaggcccagtatgagaacatttcggtgcggacaaggtacaagcagtatctagatccttcggtggaggagaccaagaagttctgcatctcgctgcggagaaacgcaaaggacgagaggatattattccattacaatggtcacggtgttcccaagccgacagcatctggtgagatttgggtttttaacaagaactacactcagtatatccctatatcgctatatgatctacagcaatggctgcaggctcctacggtgtttgtctgggactgttcggaagcgggtaacatactcaacaactatcaccgattcgtggagaagcatgtagaggaggaagaggcgacggcggccgccgaccccagctacgagaaactgaaattcgagggctatcttcacttggccgcttgtgccgtcaaggagaacctccctaccaatcctcttctcccggccgatctattcaccgcgtgtttgacgacaccaatcgaaatggcactgtggttcttcgttctgcagaaccccttaaaaactaaactgacgcctgaaagagccaaaaaacttcccggccgtcttcaggagagacggacgcctttaggagagttgaactggattttcaccgccatcacagacacaatcgcatggacatccttgcctcgtgccctattccggaagttctttaggcaggatctgatggtagctgcgctgttccgaaatttcatcttggcgcagaggataatgatggtctatggctgtcatcctcagtcgtacccagaacttccggacacacaccagcacccactgtgggaaagctgggacttggcagtagatcttgccctggcccagttaccgatgctggaaaagaaggaaagtgaaggaatcgattacgagtaccaaagctctaccttcttcgccgagcagcttactgcattcgaagtgtacctgggaaggggcgatgccatgctacaacgacctccggaacagttgcctgtggtgcttcaagtcttattgagtcagcagcatcgagttcgggcactcatcctcttgggtcggtttttggacttgggtccatgggcagttcagctagctctcagcatcggaattttcccttatgttctcaagcttttacagtcagctgctcccgagctgaagccggttatggtttttatatggacacgagtccttgccgttgacacatcctgtcagcctgacttaatcaaggataacggatacacatattttgctggcatcctaaaaccatccgaaaaccttctggttgctaatagtgacgaacacaaggcaatgtgcgcctttgtgctagccatgctttgcaagggatacaaacctggccagaacgtgtgtaaccagatcgatgccatgtcatcctgtctggtccacctccagaataaggagaacgtgttgctccgacagtgggcatgtctttgtctcagccaattgtggattaaccttcccgaggctaagtggaaaggcatcagggaggaggcgcccaagaagctctctgccctagccaaagactcatgttgcgaggtccgagccgcggtggttcatgcgatgacgacttttctagggattcctgacttgaccgatgaggtagctagggtcgaggaatccatagcttggacgatgttggagatggcgaacgatggaagccccgtcgtccgtaaggagctgctcgtattcttgtccaactttgtgttgcgctacgagaataagttcattgtcgcggcattcgagcaactgatggaggaacaagaatatgctcatcatccaccagctgacgatggcatggatcacaagatgggcttacactacgctggccctgacagccgcaatgctgatggctccatcaagccaacagcccagggactgtctttccatactgtattcgcagcttgttggaaacatattcttatactgaatgtcgatccccaccctgaagtgcagcgagacgctacagtcattgtagattacgtgcataacgctgttctcgcctcagcagttggttcacaagcccaatctataacggacgagatccacaagcgggctcgcagagctgctggtcacaagaaacaactgtccacatcacgcagtatgattggcatgccagcgccagagacggctgcaccggaaccagctgcaggacttttgaagcgtaccgccagtttactactccagctcccgagcatatggggtagcgaagaccgttcagccgcaacaagtcccctcggatctcccgaaatctcccgaaatttatcacaaaagttacggtaccccaccgactggaaaggtgctgccgaacaaaacgacccggcctacgtaccggcacattatcacattgcgagagagccagtgtctggcaattttgaagagcggaagttagatgaggtcccaactctacctctgaccagcaccttcctagactggtccatcgagtacttccgagagccccaaatgaaaccaagcgaggctgaagagcccggcagcactgaatacaatgaacggctgtggaggagatctcgcaatgaggcgatattgagagaaacgcaaccccagaagcaatttgcgggtacccacaaatggaataatgcgctctgcatcatgaataacaatgctcagccgactaagatgacattccatcagtttgaggaccatctcgccgtggccgatgatagtaacacagtctatctgtgggattggaagaaacagcagagactgaaccggttttcgaatggtaacccagccgggtccaagatcagcgacatgagatttataaacgaggatgataccgcatacttgatgacagggtcgtcggatggtgtcttgcggatatatcggaattaccaggaggcgtcgtcgatcgagcttgcctccgcctggcgagcactgacccaaatggttcccagcaacgtcaactcgggcatggtctttgactggcagcaagtgacaggcagagttctcgttgctggtgatgttcgtgtcattcgagtctgggcggctgcatctgagacatgtatcatggatatcccagccagatctggttcgtgcgtgacctcattgacctcggatcaaatgacggggaatatcttcgtcgcgggatttggcgacggagcggttcgagtgtttgacacccgcctccgacctcaagagtcgatggtgaaaaagtggaagaacgacaatgacaggcaatggatacgaagcgtgcatatgcaacgcggtggtcagcgggagctactctctgcaagccgtaacggcaaggtcaagctatgggacattcgaatggacaatccactccgtatcatcaatgcttcgcgcgatacgctgcggactgctagtgtgcatgaacatctgcccgtattctccgtcggcacatcagcacacatggtcaaagtgttcaatttcgaaggcgaagagctctctcgaatggaaccctactccagcttcctgcagcaaaaccgcggcgcaccgatagctgctactgccttccatccccatcgcatgattctcggatgtgctgcccggggcgattaccacgtcaacctcttcacttgcgccaatgagaagtctgacgcttttctcacctcgatttaattcacacactccaacacacttcgcctcctccctcctttttactccgcataatcacttacgaatctacctccctcatatgtgtctcattatcccactggacggcacgccgagtactgagatgaaatgggatctatcacgaacttgtacgagctggtcatcgcttgtatagcatgtcaggtcacagaagaccacacgcattattattactatcactacactattcaactcggtcttcacgaggggtatgggcgttggggaatacattgcttcgcttatgagatgtttgggcaatgtttacatgtttactcctgtcatgttagagtggaaacccaaagagaagactgtccgaactaggatgtcaaaaatactgctcataaacgaccgtgtcatttgaaggagatgattgtcaaattaaggtgaagcacaattggagctccacatgtaatgtaatgaagaagataagatcaatgccgttatttgagcgaagacgtgtatgtccatgatagctacatacgggatctagtctctgcaacacgtcgtactgctgacgtatacatgttgcgtttttcctcacttagagactaaatgaaagtccacctcgaggtgat

SEQ ID NO: 12361 - DNA, 867 bp, Muscodor strobelii
  misc_feature: SGI cDNA ID NO. 564012
  misc_feature: Encodes the peptide sequence at SEQ ID NO 12362
atggacgtcaaacacaaccacaacacccacaacaagggcaacaacaaggccgtcaagcccgtcaaggccgccaagcagaagagaaaccgaaaaccagagtccttgcatatccctcgagcagccggcgagggactgaccagcagagctctgcatcgaatgaagaaacagctgggaaagagcatcaggaagttagccagaggactcgctggagagacccttgctgaatcagtcctcaacaaccccacccccttcttcgcagaattcattcgactgaagatgcgcacgaagatgcaatcagacgccctcgagtgcaccagcgccttcttcacgagattcaactggaagggcatgaatcccgcacagaaaacctctttcctcaacgatagccgcgtcatcctgaaaagcatcgtaggcaacatcaatcgtctatggagcaacattgatagctatctattccttggtgagtgggacaaggatgtcgaacgtgagagagccgccaagacgaaggaagagcctgttgccaaatctgtggaggatcgcaccatcatcatgcaagatcttgccaagctaatagctagcctcagtgaaaacgcgagactcctttactcgaccatggtgtggaatggcaacaagaagaagaccgccgccttcgtcgaccagagcaacgccattctcgactctatcgcagacgacctggttcgtttcctagctcgtgaagaacaatttacgggctacgacaagatccgcgaggagaagagggagcgcagggctaagaagcgtgcgaagaagcgtcgaaatgctcagcctatcaaggaagatgaaattgaggaagacaaggacagtgaggaacatgagagcgacgactaa

SEQ ID NO: 12362 - protein, 288 aa, Muscodor strobelii
  misc_feature: SGI Peptide ID NO. 564012
MDVKHNHNTHNKGNNKAVKPVKAAKQKRNRKPESLHIPRAAGEGLTSRALHRMKKQLGKSIRKLARGLAGETLAESVLNNPTPFFAEFIRLKMRTKMQSDALECTSAFFTRFNWKGMNPAQKTSFLNDSRVILKSIVGNINRLWSNIDSYLFLGEWDKDVERERAAKTKEEPVAKSVEDRTIIMQDLAKLIASLSENARLLYSTMVWNGNKKKTAAFVDQSNAILDSIADDLVRFLAREEQFTGYDKIREEKRERRAKKRAKKRRNAQPIKEDEIEEDKDSEEHESDD

SEQ ID NO: 12363 - DNA, 288 bp, Muscodor strobelii
  misc_feature: SGI EST ID NO. CUFF.29276.0
  misc_feature: Variant of the nucleotide sequence at SEQ ID NO 12361
gagaaaccgaaaaccagagtccttgcatatccctcgagcagccggcgagggactgaccagcagagctctgcatcgaatgaagaaacagctgggaaagagcatcaggaagttagccagaggactcgctggagagacccttgctgaatcagtcctcaacaaccccacccccttcttcgcagaattcattcgactgaagatgcgcacgaagatgcaatcagacgccctcgagtgcaccagcgccttcttcacgagattcaactggaagggcatgaatcccgcacagaaaac

SEQ ID NO: 12364 - DNA, 252 bp, Muscodor strobelii
  misc_feature: SGI cDNA ID NO. 564013
  misc_feature: Encodes the peptide sequence at SEQ ID NO 12365
atggccaatatccacgtcagtcggtcgaaggcacaggtcaagacggagaagaatggtcaccggcagaaagatgagggcatggagcagatcacagttcgcattgtgaccaagccaatgaataatggaaggtctaatctggcggtcattgtgagaggtataggcgctgaactgattgccctgagccatcctgttgctttcatgctcaataccgaaaaagcggtaaaggccaaacacgagcaagcctcgtcatga

SEQ ID NO: 12365 - protein, 83 aa, Muscodor strobelii
  misc_feature: SGI Peptide ID NO. 564013
  misc_feature (24)..(81): NCBI GI: 156048646 Blast Desc: SS1G_09055 [Sclerotinia sclerotiorum 1980] gi|154693451|gb|EDN93189.1| SS1G_09055 [Sclerotinia sclerotiorum 1980]
MANIHVSRSKAQVKTEKNGHRQKDEGMEQITVRIVTKPMNNGRSNLAVIVRGIGAELIALSHPVAFMLNTEKAVKAKHEQASS

SEQ ID NO: 12366 - DNA, 2004 bp, Muscodor strobelii
  misc_feature: SGI cDNA ID NO. 564014
  misc_feature: Encodes the peptide sequence at SEQ ID NO 12367
atgagaatttactgcgcagatatacttttatttgtccgttgttgtgcagcagtctttccctatgcacaacagcccatccagccaccagctaataaagccaaaggcttctcagatcatgtcgcaaacatctttgatattggtccgaacgtggagaactatatcaacgaagttatgaaacgatggcatgtcccaggtatggctgtcgcagttatccaaggcaatgatacatgggctaaaggtttcggatatgcctcattgccttcgacaccagtaacgccagacaccttatttttcacaggaagcacaactaaatcattcaccgcggcagccgtctcgctcctgatcgataatagctcagactactcctttattcaatggacaacaccaatatccaatctgcttcgcgaggagttcgtgctgagcgacgcgtgggccaccgaccatgtcactatcgaggatgccttatcccaccggacaggctacccgcgccatgatttatcggttcccaagactgtgttagatttagtccaccatctgcggtttctcccaatgtctgctgagccacgagtcaaatttcaatactgcaatcacatgttcaacaccatcggctatctcatcactaagcttaccagccttgatctagcaaaattcttccatgcgtatctttgggaccccataggtatgcaccatacgttccttggcacccacgatcccatgttcaaggctagtagtctgcctatcgcagtgggatactggtacaaatatagcagtggcgaatacgtggcgcaaccatctcatgacgagatggcggacgaaggagcaggagctacgatttcgaacgtgctggactatgccaagtatctgcacatcatgatgaccgagtcaaagcccatatctaagagcggccatcgcgagttgaagaaagaacggagtttctgggaccagcctgggccgccgtttgtgggaccaacgccgtactcgctaggctgggcaagtggcatcttccagaacgaacaggtcttttttcacagcggctggctcgacgtatatcgaacggatatgctaatgataccttcgaagaatatcggcattctcgtgatggagaactcaccaaccgatgctattaaacttgtactctaccgaataatgtatgatctgtttaacgtggacgaaacgaacagatatgatcacgaaaaatcagcacggagaaagatggagtcagcattttcgtatctcgtcacttgccctgaacgcctgtatcctgacataccgtcgcctcctcacccgccaagcctgccactagcaaatcattctggaaagtatcataacccggggtatggaacgtatttcgtagcattgctttgtgatgatatcgagtcatatcaaattccgttcaatcacttggctgaaggttgtagcctccgaatcaaaatgccaagtgactcgtcactccagctctatttcgacttggagcataagaccggtgactattggataggatggggccatatatcagagtatcaagatccattacaacctctggtttgcgcacgagtgcagttccggatcagtgaaactggggaagtctcccagcttgtaaatctcacccagagcataaatatcgacactgatgtttcaacatcactatcaaaccgctacatcatcttgctaaacaccatgtcaagcagtgatgaatcagtcgcttcgtcgggctcctcagcttacaccctcgaccttgatctcgacgagtactttgccgttttcgcccaaaagattgtcgacaaggccgaccaagccaagatcattaccacaattcttcagggccatgcccagagcctgagctctctcctcgacaacccctatctccacaattacgtcagcgcagatctctcgcgcctcgatgctctcgccaaagcggccaactctgctctcgatgagtcttacaagaaaatcaaggatcttcaagaagctctcaaggacgcccagaaggagctcactctctaa

SEQ ID NO: 12367 - protein, 667 aa, Muscodor strobelii
  misc_feature: SGI Peptide ID NO. 564014
  misc_feature (50)..(387): Pfam Id: PF00144 Pfam Desc: Beta-lactamase
  misc_feature (8)..(456): NCBI GI: 256724689 Blast Desc: NECHADRAFT_63301 [Nectria haematococca mpVI 77-13-4]
  misc_feature (51)..(532): NCBI GI: 242762668 Blast Desc: penicillin-binding protein, [Talaromyces stipitatus ATCC 10500] gi|218723620|gb|EED23037.1| penicillin-binding protein, [Talaromyces stipitatus ATCC 10500]
  misc_feature (46)..(500): NCBI GI: 242812319 Blast Desc: penicillin-binding protein, [Talaromyces stipitatus ATCC 10500] gi|218714272|gb|EED13695.1| penicillin-binding protein, [Talaromyces stipitatus ATCC 10500]
  misc_feature (48)..(540): NCBI GI: 238504688 Blast Desc: penicillin-binding protein, [Aspergillus flavus NRRL3357] gi|220691046|gb|EED47395.1| penicillin-binding protein, [Aspergillus flavus NRRL3357]
  misc_feature (37)..(532): NCBI GI: 145252112 Blast Desc: An16g02560 [Aspergillus niger] gi|134083113|emb|CAK46786.1| protein product [Aspergillus niger]
  misc_feature (58)..(499): NCBI GI: 212544378 Blast Desc: penicillin-binding protein, [Penicillium marneffei ATCC 18224] gi|210065312|gb|EEA19406.1| penicillin-binding protein, [Penicillium marneffei ATCC 18224]
  misc_feature (48)..(499): NCBI GI: 46115044 Blast Desc: FG03364.1 [Gibberella zeae PH-1]
  misc_feature (52)..(532): NCBI GI: 256733952 Blast Desc: NECHADRAFT_36127 [Nectria haematococca mpVI 77-13-4]
  misc_feature (48)..(540): NCBI GI: 238499625 Blast Desc: penicillin-binding protein, [Aspergillus flavus NRRL3357] gi|220692800|gb|EED49146.1| penicillin-binding protein, [Aspergillus flavus NRRL3357]
  misc_feature (48)..(540): NCBI GI: 169779025 Blast Desc: [Aspergillus oryzae RIB40] gi|83772716|dbj|BAE62844.1| protein product [Aspergillus oryzae]
  misc_feature (49)..(369): SWISSPROT Homolog: EC 3.4.11.19 D-stereospecific aminopeptidase
MRIYCADILLFVRCCAAVFPYAQQPIQPPANKAKGFSDHVANIFDIGPNVENYINEVMKRWHVPGMAVAVIQGNDTWAKGFGYASLPSTPVTPDTLFFTGSTTKSFTAAAVSLLIDNSSDYSFIQWTTPISNLLREEFVLSDAWATDHVTIEDALSHRTGYPRHDLSVPKTVLDLVHHLRFLPMSAEPRVKFQYCNHMFNTIGYLITKLTSLDLAKFFHAYLWDPIGMHHTFLGTHDPMFKASSLPIAVGYWYKYSSGEYVAQPSHDEMADEGAGATISNVLDYAKYLHIMMTESKPISKSGHRELKKERSFWDQPGPPFVGPTPYSLGWASGIFQNEQVFFHSGWLDVYRTDMLMIPSKNIGILVMENSPTDAIKLVLYRIMYDLFNVDETNRYDHEKSARRKMESAFSYLVTCPERLYPDIPSPPHPPSLPLANHSGKYHNPGYGTYFVALLCDDIESYQIPFNHLAEGCSLRIKMPSDSSLQLYFDLEHKTGDYWIGWGHISEYQDPLQPLVCARVQFRISETGEVSQLVNLTQSINIDTDVSTSLSNRYIILLNTMSSSDESVASSGSSAYTLDLDLDEYFAVFAQKIVDKADQAKIITTILQGHAQSLSSLLDNPYLHNYVSADLSRLDALAKAANSALDESYKKIKDLQEALKDAQKELTL

SEQ ID NO: 12368 - DNA, 1221 bp, Muscodor strobelii
  misc_feature: SGI EST ID NO. CUFF.29292.0
  misc_feature: Variant of the nucleotide sequence at SEQ ID NO 12366
tgggctaaaggtttcggatatgcctcattgccttcgacaccagtaacgccagacaccttatttttcacaggaagcacaactaaatcattcaccgcggcagccgtctcgctcctgatcgataatagctcagactactcctttattcaatggacaacaccaatatccaatctgcttcgcgaggagttcgtgctgagcgacgcgtgggccaccgaccatgtcactatcgaggatgccttatcccaccggacaggctacccgcgccatgatttatcggttcccaagactgtgttagatttagtccaccatctgcggtttctcccaatgtctgctgagccacgagtcaaatttcaatactgcaatcacatgttcaacaccatcggctatctcatcactaagcttaccagccttgatctagcaaaattcttccatgcgtatctttgggaccccataggtatgcaccatacgttccttggcacccacgatcccatgttcaaggctagtagtctgcctatcgcagtgggatactggtacaaatatagcagtggcgaatacgtggcgcaaccatctcatgacgagatggcggacgaaggagcaggagctacgatttcgaacgtgctggactatgccaagtatctgcacatcatgatgaccgagtcaaagcccatatctaagagcggccatcgcgagttgaagaaagaacggagtttctgggaccagcctgggccgccgtttgtgggaccaacgccgtactcgctaggctgggcaagtggcatcttccagaacgaacaggtcttttttcacagcggctggctcgacgtatatcgaacggatatgctaatgataccttcgaagaatatcggcattctcgtgatggagaactcaccaaccgatgctattaaacttgtactctaccgaataatgtatgatctgtttaacgtggacgaaacgaacagatatgatcacgaaaaatcagcacggagaaagatggagtcagcattttcgtatctcgtcacttgccctgaacgcctgtatcctgacataccgtcgcctcctcacccgccaagcctgccactagcaaatcattctggaaagtatcataacccggggtatggaacgtatttcgtagcattgctttgtgatgatatcgagtcatatcaaattccgttcaatcacttggctgaaggttgtagcctccgaatcaaaatgccaagtgactcgtca

SEQ ID NO: 12369 - DNA, 1479 bp, Muscodor strobelii
  misc_feature: SGI cDNA ID NO. 564015
  misc_feature: Elevated expression when VOC is produced
  misc_feature: Encodes the peptide sequence at SEQ ID NO 12370
atgttgtcacggccagatctcgtagtcggccttaccgccgcagcctctctcgttgctgcaggtccctgcgatatctatgcttctggtaatacaccttgtattgctgcgcatagttctactcgtgcgctctacgatggctacaagggcgcactgtatcaagtcatgcgtggttctgataacgccacgatggacattggaccgttatccgctggcggcgccgctaatgcagctactcaagacaacttctgcagagggtcaacttgtctgatctccaagctctacgaccagtccggcatgggaaatcacttgacccaagctcccgccggaggtgctgccagaggcccaaatagcgacatgactgattatctgtctggtgcccgcggcgccccagtcaaagtgaaaggccaaaatacttacggtgttttcatctcgcctttcactggataccgaaacaacgctgccagcggcacggcaactggtgacgagccacagggcatgtacgctgtttttgacggtacccattacaataacaggtgctgcttcgactacggcaatgccgaaacaagcaaccttgacacaggcaacggtcaaatggaagccatatacttcggcgctggtgacggatggagtggctctggtgcaggtaatggtccttggattatggcagatctcgagaatggtctcttctccggatacgaccctcatctgaactcagcaaacccgacaaccaactctaggtttgtcacagccatcgtcaagggcgagcccggcacatgggctatccgtggaggcgactctaccaacggaggattgtccacattctataatggccgtcgtcccgctggaggttatgatccaatgcagaaatggggcgccattattttgggcattggtggtgacaacagcaacggcgcacaaggtaccttttacgagggagtgatgacgcgaggctatccttccgatgacacggaaaacagggttcagagtgacattgttgctgccggctatgcaacgcgatcaatgaatgacggacctgctatcaatgtcggctctactatctctttgaaagtcacaactcctgggtttactaatcgtgtcctcgcccattccggcgatgttgtcaacacccaagtaatctctacctcggataacacggccagatggaccgtccgtaccggcctcgcaaacagtgggtgctattctttcgaatctgtcgacactcctggcagctttatccgccattctgcataccagctgagactcaacggcaatgatggtagcaaagtcttctcagaggatgccactttctgcacgcagagtggaatcagcggctcaggcatttcattccgatcctggagctatgctgcacgctactggcgccattacaatgcgctactatacatctctgggaacagtgggccaatggcgtttgataacccagtcgcgttcaacgatgatgtgacgtttgcgatcgcttaa

SEQ ID NO: 12370 - protein, 492 aa, Muscodor strobelii
  misc_feature: SGI Peptide ID NO. 564015
  misc_feature (353)..(492): Pfam Id: PF05270 Pfam Desc: Alpha-L-arabinofuranosidase B (ABFB)
  misc_feature (22)..(340): Pfam Id: PF09206 Pfam Desc: Alpha-L-arabinofuranosidase B, catalytic
  misc_feature (1)..(491): NCBI GI: 212538783 Blast Desc: alpha-N-arabinofuranosidase precursor, [Penicillium marneffei ATCC 18224] gi|210069289|gb|EEA23380.1| alpha-N-arabinofuranosidase precursor, [Penicillium marneffei
  misc_feature (1)..(492): NCBI GI: 284504808 Blast Desc: arabinofuranosidase B [Penicillium funiculosum]
  misc_feature (1)..(492): NCBI GI: 209954737 Blast Desc: alfa-L-arabinofuranosidase [Fusarium oxysporum]
  misc_feature (1)..(492): NCBI GI: 60416980 Blast Desc: alpha-L-arabinofuranosidase B [Fusarium oxysporum f. sp. dianthi]
  misc_feature (7)..(492): NCBI GI: 238490130 Blast Desc: fungal alpha-L-arabinofuranosidase, [Aspergillus flavus NRRL3357] gi|220696715|gb|EED53056.1| fungal alpha-L-arabinofuranosidase, [Aspergillus flavus NRRL3357]
  misc_feature (7)..(492): NCBI GI: 169772253 Blast Desc: [Aspergillus oryzae RIB40] gi|83768456|dbj|BAE58593.1| protein product [Aspergillus oryzae]
  misc_feature (7)..(492): NCBI GI: 16754881 Blast Desc: alpha-L-arabinofuranosidase B [Aspergillus oryzae]
  misc_feature (7)..(492): NCBI GI: 16754883 Blast Desc: alpha-L-arabinofuranosidase B [Aspergillus oryzae]
  misc_feature (2)..(492): NCBI GI: 284504810 Blast Desc: arabinofuranosidase [Penicillium funiculosum]
  misc_feature (7)..(492): NCBI GI: 13991905 Blast Desc: AF367026_1 alpha-L-arabinofuranosidase [Penicillium purpurogenum]
  misc_feature (1)..(492): SWISSPROT Homolog: EC 3.2.1.55 Alpha-N-arabinofuranosidase
  misc_feature: Useful for introducing or modulating the production of volatile compounds
MLSRPDLVVGLTAAASLVAAGPCDIYASGNTPCIAAHSSTRALYDGYKGALYQVMRGSDNATMDIGPLSAGGAANAATQDNFCRGSTCLISKLYDQSGMGNHLTQAPAGGAARGPNSDMTDYLSGARGAPVKVKGQNTYGVFISPFTGYRNNAASGTATGDEPQGMYAVFDGTHYNNRCCFDYGNAETSNLDTGNGQMEAIYFGAGDGWSGSGAGNGPWIMADLENGLFSGYDPHLNSANPTTNSRFVTAIVKGEPGTWAIRGGDSTNGGLSTFYNGRRPAGGYDPMQKWGAIILGIGGDNSNGAQGTFYEGVMTRGYPSDDTENRVQSDIVAAGYATRSMNDGPAINVGSTISLKVTTPGFTNRVLAHSGDVVNTQVISTSDNTARWTVRTGLANSGCYSFESVDTPGSFIRHSAYQLRLNGNDGSKVFSEDATFCTQSGISGSGISFRSWSYAARYWRHYNALLYISGNSGPMAFDNPVAFNDDVTFAIA

SEQ ID NO: 12371 - DNA, 1858 bp, Muscodor strobelii
  misc_feature: SGI EST ID NO. CUFF.29294.0
  misc_feature: Variant of the nucleotide sequence at SEQ ID NO 12369
ctcattattaactcgatctagaaggagatcccatgaactttttgagttctcatgatgccggatgtcataccacccgttcggcatacggagcacatgagagactccgtcttagtcatttagagcaacgtatataagtgtatccattctcaccatgtagtcacttgctcttgaaatagcagcagttgtagatatctcctcgaagccacctctttgccgagtagttgccagcatgttgtcacggccagatctcgtagtcggccttaccgccgcagcctctctcgttgctgcaggtccctgcgatatctatgcttctggtaatacaccttgtattgctgcgcatagttctactcgtgcgctctacgatggctacaagggcgcactgtatcaagtcatgcgtggttctgataacgccacgatggacattggaccgttatccgctggcggcgccgctaatgcagctactcaagacaacttctgcagagggtcaacttgtctgatctccaagctctacgaccagtccggcatgggaaatcacttgacccaagctcccgccggaggtgctgccagaggcccaaatagcgacatgactgattatctgtctggtgcccgcggcgccccagtcaaagtgaaaggccaaaatacttacggtgttttcatctcgcctttcactggataccgaaacaacgctgccagcggcacggcaactggtgacgagccacagggcatgtacgctgtttttgacggtacccattacaataacaggtgctgcttcgactacggcaatgccgaaacaagcaaccttgacacaggcaacggtcaaatggaagccatatacttcggcgctggtgacggatggagtggctctggtgcaggtaatggtccttggattatggcagatctcgagaatggtctcttctccggatacgaccctcatctgaactcagcaaacccgacaaccaactctaggtttgtcacagccatcgtcaagggcgagcccggcacatgggctatccgtggaggcgactctaccaacggaggattgtccacattctataatggccgtcgtcccgctggaggttatgatccaatgcagaaatggggcgccattattttgggcattggtggtgacaacagcaacggcgcacaaggtaccttttacgagggagtgatgacgcgaggctatccttccgatgacacggaaaacagggttcagagtgacattgttgctgccggctatgcaacgcgatcaatgaatgacggacctgctatcaatgtcggctctactatctctttgaaagtcacaactcctgggtttactaatcgtgtcctcgcccattccggcgatgttgtcaacacccaagtaatctctacctcggataacacggccagatggaccgtccgtaccggcctcgcaaacagtgggtgctattctttcgaatctgtcgacactcctggcagctttatccgccattctgcataccagctgagactcaacggcaatgatggtagcaaagtcttctcagaggatgccactttctgcacgcagagtggaatcagcggctcaggcatttcattccgatcctggagctatgctgcacgctactggcgccattacaatgcgctactatacatctctgggaacagtgggccaatggcgtttgataacccagtcgcgttcaacgatgatgtgacgtttgcgatcgcttaaagtgaagagcagcaattctcagttgacgattgaatgctccccataactctttgtcgaagaattgcctttacctatggtcttgggcaaaagagaactgtgtacatagaagataccaatatatactgaatgctagcggccgagaagtccaaa

SEQ ID NO: 12372 - DNA, 1224 bp, Muscodor strobelii
  misc_feature: SGI cDNA ID NO. 564016
  misc_feature: Encodes the peptide sequence at SEQ ID NO 12373
atggatcaccgagaatctgattaccacctaacaattgccacagagcaattcttcgacggaggccaatactacccaccaggttccagcctagctttctcaagcttggcacctattgatgtacatgctaatggggagtatcatccaaccgacgaaggatatggccacggcaccggggcgcgcatggccgattacaacaatatctcatcaccggtcttcgccaccattgctgaaatagctaaaactgcagcaacgtgggagcgcctggatattgcagaggtgtggctgcttaacaagaccgagtccgagcagtatgacgaatttgttcctgcttatatgcaaaaccagctattcttccatactcaatgcaaaatgtcggcaactcacaatcataagagaactctttgcgacaatgactgtcttgtcagtcttggcggtatggaggaacatgggggaccaaatctagagcgggtctacaccgcttggaactatcctttctttgaatcgagtctcccaacgtttgtaatggcctcgtcatatagtcgtcgactacctgactctttagacattggtataaaatattgtcttgcggaaccgatagaggatctttgtgtcacagctctgtctgtcacgctcgctctcagataccctgaagatgaacctctcgtcacccttggtgatgctgtggcttcattcattgaggaacctgatgccgttatgaggggactttgcactcttgaccagaatcagatccgaaagcttctaagtgtgaaaaattcccatctgattcccggaccacgacggtggtatggatcaagacaaagatgggctacagctattcccacgtccgtatggcttacgagctatgcgcttttcgctagtggcatcactatctgtgcagttctactttatgtggggcttgaagacacaggtggtgtttatcggaattttttgcccagtgaggacggtgcattcatacagcttccattgaatctcattgagggcgttctattggccaacagcccacaaatcattctgtcactctgttacttagcaatggcaaaggagtggacacaattcggcgagagccctaacgctctccgcgtaacaaatccgaaggtgatctcacccgatgtgtcagttacttcagcgacctcggttatgatggggacagtagtctacccagcggcacaggcgttgttgtgggattctccgtcacgtctttga

SEQ ID NO: 12373 - protein, 407 aa, Muscodor strobelii
  misc_feature: SGI Peptide ID NO. 564016
  misc_feature (2)..(320): NCBI GI: 240106682 Blast Desc: CPC735_014660 [Coccidioides posadasii C735 delta SOWgp]
  misc_feature (2)..(372): NCBI GI: 256728368 Blast Desc: NECHADRAFT_54004 [Nectria haematococca mpVI 77-13-4]
  misc_feature (2)..(372): NCBI GI: 119174062 Blast Desc: CIMG_09013 [Coccidioides immitis RS]
  misc_feature (191)..(369): NCBI GI: 238839355 Blast Desc: conserved [Microsporum canis CBS 113480]
  misc_feature (2)..(371): NCBI GI: 149210697 Blast Desc: MGCH7_ch7g821 [Magnaporthe grisea 70-15] gi|86196776|gb|EAQ71414.1| MGCH7_ch7g821 [Magnaporthe grisea 70-15]
  misc_feature (2)..(371): NCBI GI: 145609738 Blast Desc: MGG_03033 [Magnaporthe grisea 70-15] gi|145017127|gb|EDK01490.1| MGG_03033 [Magnaporthe grisea 70-15]
  misc_feature (186)..(369): NCBI GI: 255940860 Blast Desc: Pc16g08800 [Penicillium chrysogenum Wisconsin 54-1255] gi|211585822|emb|CAP93550.1| Pc16g08800 [Penicillium chrysogenum Wisconsin 54-1255]
  misc_feature (94)..(372): NCBI GI: 46139873 Blast Desc: FG11451.1 [Gibberella zeae PH-1]
  misc_feature (191)..(373): NCBI GI: 256733357 Blast Desc: NECHADRAFT_67018 [Nectria haematococca mpVI 77-13-4]
  misc_feature (204)..(371): NCBI GI: 256720587 Blast Desc: NECHADRAFT_85423 [Nectria haematococca mpVI 77-13-4]
MDHRESDYHLTIATEQFFDGGQYYPPGSSLAFSSLAPIDVHANGEYHPTDEGYGHGTGARMADYNNISSPVFATIAEIAKTAATWERLDIAEVWLLNKTESEQYDEFVPAYMQNQLFFHTQCKMSATHNHKRTLCDNDCLVSLGGMEEHGGPNLERVYTAWNYPFFESSLPTFVMASSYSRRLPDSLDIGIKYCLAEPIEDLCVTALSVTLALRYPEDEPLVTLGDAVASFIEEPDAVMRGLCTLDQNQIRKLLSVKNSHLIPGPRRWYGSRQRWATAIPTSVWLTSYALFASGITICAVLLYVGLEDTGGVYRNFLPSEDGAFIQLPLNLIEGVLLANSPQIILSLCYLAMAKEWTQFGESPNALRVTNPKVISPDVSVTSATSVMMGTVVYPAAQALLWDSPSRL

SEQ ID NO: 12374 - DNA, 744 bp, Muscodor strobelii
  misc_feature: SGI EST ID NO. CUFF.29318.0
  misc_feature: Variant of the nucleotide sequence at SEQ ID NO 12372
cggaccacgacggtggtatggatcaagacaaagatgggctacagctattcccacgtccgtatggcttacgagctatgcgcttttcgctagtggcatcactatctgtgcagttctactttatgtggggcttgaagacacaggtggtgtttatcggaattttttgcccagtgaggacggtgcattcatacagcttccattgaatctcattgagggcgttctattggccaacagcccacaaatcattctgtcactctgttacttagcaatggcaaaggagtggacacaattcggcgagagccctaacgctctccgcgtaacaaatccgaaggtgatctcacccgatgtgtcagtcagttcatattcaataacatctaccaaactgggtcagcaatacgcaacgaatcggcttcaacttccgtacaaatatagtatacctctgattgccgtgagtgcctctttacattggctactttcgaatacgatatatgtcttcgtctcaactggaggttacttcagcgacctcggttatgatggggacagtagtctacccagcggcacaggcgttgttgtgggattctccgtcacgtctttgacagcatttctagcagtgtcgagcatcttaataattttaccgtccgtcgttgctttgccgagattacctccacatatggctcatgtggggagtaactctctagcaatatcagcggcctgtcactcgtccatatattcaaaagcagttaaacg

SEQ ID NO: 12375 - DNA, 471 bp, Muscodor strobelii
  misc_feature: SGI cDNA ID NO. 564017
  misc_feature: Encodes the peptide sequence at SEQ ID NO 12376
atgcagctcccggctctctttcttctgaatatatgcttcacaactactgcccatgcgatcgccggtaccctaggcttcgcaataagcaaccgaaagcccaatgcgtcatgcaaagatccagcggactacgtagctgacttcaaggctctcggctctctgaccaccgccaaagtcgtgcgcacctactcatcggcagattgcaatgttgctgcctatcttctcccggccgctctcgatgcaggattcaaagtggtgttggggatatggcctgacaaagaaaattccctcaaagccgataccctcgccgtagtccagaacgcaccgaaattcaaagacgccgtctacggcataaccgtcggttcggaaacgctctatcgcgggaacttcaccggcaacgagctgctctcacacattaacgacgtcaaatcacaacttggaccaggttacaaggtcggaacggcagacacatag

SEQ ID NO: 12376 - protein, 156 aa, Muscodor strobelii
  misc_feature: SGI Peptide ID NO. 564017
  misc_feature (3)..(156): NCBI GI: 156059188 Blast Desc: glucan 1,3-beta-glucosidase [Sclerotinia sclerotiorum 1980] gi|154701393|gb|EDO01132.1| glucan 1,3-beta-glucosidase [Sclerotinia sclerotiorum 1980]
  misc_feature (6)..(156): NCBI GI: 154304200 Blast Desc: BC1G_08370 [Botryotinia fuckeliana B05.10] gi|150854172|gb|EDN29364.1| BC1G_08370 [Botryotinia fuckeliana B05.10]
  misc_feature (1)..(156): NCBI GI: 238839046 Blast Desc: beta-glucosidase 4 [Microsporum canis CBS 113480]
  misc_feature (1)..(156): NCBI GI: 225679603 Blast Desc: glucan 1,3-beta-glucosidase [Paracoccidioides brasiliensis Pb03] gi|226291336|gb|EEH46764.1| glucan 1,3-beta-glucosidase [Paracoccidioides brasiliensis Pb18]
  misc_feature (1)..(156): NCBI GI: 154287972 Blast Desc: beta-glucosidase 4 [Ajellomyces capsulatus NAm1] gi|150408422|gb|EDN03963.1| beta-glucosidase 4 [Ajellomyces capsulatus NAm1]
  misc_feature (1)..(156): NCBI GI: 226285860 Blast Desc: beta-glucosidase [Paracoccidioides brasiliensis Pb01]
  misc_feature (1)..(156): NCBI GI: 240278808 Blast Desc: beta-glucosidase [Ajellomyces capsulatus H143]
  misc_feature (1)..(156): NCBI GI: 261203533 Blast Desc: glycosyl hydrolase [Ajellomyces dermatitidis SLH14081] gi|239586765|gb|EEQ69408.1| glycosyl hydrolase [Ajellomyces dermatitidis SLH14081]
  misc_feature (19)..(156): NCBI GI: 189189788 Blast Desc: glucan 1,3-beta-glucosidase precursor [Pyrenophora tritici-repentis Pt-1C-BFP] gi|187972839|gb|EDU40338.1| glucan 1,3-beta-glucosidase precursor [Pyrenophora tritici-repentis
  misc_feature (1)..(156): NCBI GI: 239608201 Blast Desc: glycosyl hydrolase [Ajellomyces dermatitidis ER-3]
  misc_feature (10)..(156): SWISSPROT Homolog: EC 3.2.1.58 Glucan 1,3-beta-glucosidase
MQLPALFLLNICFTTTAHAIAGTLGFAISNRKPNASCKDPADYVADFKALGSLTTAKVVRTYSSADCNVAAYLLPAALDAGFKVVLGIWPDKENSLKADTLAVVQNAPKFKDAVYGITVGSETLYRGNFTGNELLSHINDVKSQLGPGYKVGTADT

SEQ ID NO: 12377 - DNA, 918 bp, Muscodor strobelii
  misc_feature: SGI cDNA ID NO. 564018
  misc_feature: Encodes the peptide sequence at SEQ ID NO 12378
atgctttcgcgggatgtatctgtcaacgaggccctctcgggtatctttggcagtgtgagcttgactgcctggatatgcttactgataccgcagcttatcacaaactacaaagcgaggagcgctgagggattgtctatgggcttcttggctatctggctctttggtgatctgacaaacttgggcggcgccctcgtgaccggacttgccccgactgccaccgcattggcgggctatttctgcatatctgatttgatcctcatcacgcaatgcatctactacaacgtgcgcaatgcccgaatcgcccgaaaacgactccattcgaccggcactgaagcctcggaagacgagccactgcttcgacgaaattcgacaggcctaccgagctcccacatccgacatgcccaccatgaagagtctggtctcgaccctattaagcgtgtggttacgggcgaggatgagactccgtcaagcaacccgtggctcagcaactcgctgagcatcttcatcgtatacgttgtgggagccgcgggatggtttgtctcgtaccgtgccggtgcatgggacaagcccgatgatttcgacgtaccagacactagctcgcctgtcgccattggcggtatgatcttgggatatgcaagtgcgctgtgctacttatgtgctcgcataccccagatcatcaagaactaccgggagaaatcctgcgagggtcttgcgctgctattcttcctgttgtcgctgacaggaaacttgacttatggtctcagtgttttcacatactcgcaagaagctgactaccttatcaaagcgatcccgtggatgctgggatctttgggtaccattgtcgaagactgcatcattttctatcaattccggatctactcaccagaccgaaaatctgccgagtcaggcaatgcatga

SEQ ID NO: 12378 - protein, 305 aa, Muscodor strobelii
  misc_feature: SGI Peptide ID NO. 564018
  misc_feature (9)..(75): Pfam Id: PF04193 Pfam Desc: PQ loop repeat
  misc_feature (206)..(268): Pfam Id: PF04193 Pfam Desc: PQ loop repeat
  misc_feature (208)..(268): Pfam Id: PF04193 Pfam Desc: PQ loop repeat
  misc_feature (2)..(298): NCBI GI: 85091923 Blast Desc: NCU09195 [Neurospora crassa OR74A] gi|28920540|gb|EAA29903.1| conserved [Neurospora crassa OR74A] gi|29150087|emb|CAD79648.1| conserved [Neurospora crassa]
  misc_feature (6)..(300): NCBI GI: 46128237 Blast Desc: FG08496.1 [Gibberella zeae PH-1]
  misc_feature (4)..(300): NCBI GI: 256733482 Blast Desc: [Nectria haematococca mpVI 77-13-4]
  misc_feature (7)..(299): NCBI GI: 261353465 Blast Desc: vacuolar membrane PQ loop repeat protein [Verticillium albo-atrum VaMs.102]
  misc_feature (7)..(305): NCBI GI: 171684391 Blast Desc: protein product [Podospora anserina] gi|170942156|emb|CAP67808.1| protein product [Podospora anserina]
  misc_feature (8)..(304): NCBI GI: 39970777 Blast Desc: MGG_02855 [Magnaporthe grisea 70-15] gi|149210271|ref|XP_001522510.1| MGCH7_ch7g613 [Magnaporthe grisea 70-15] gi|86196568|gb|EAQ71206.1| MGCH7_ch7g613 grisea
  misc_feature (3)..(293): NCBI GI: 169604636 Blast Desc: SNOG_05332 [Phaeosphaeria nodorum SN15] gi|160706612|gb|EAT87723.2| SNOG_05332 [Phaeosphaeria nodorum SN15]
  misc_feature (9)..(300): NCBI GI: 189196818 Blast Desc: vacuolar membrane PQ loop repeat protein [Pyrenophora tritici-repentis Pt-1C-BFP] gi|187980626|gb|EDU47252.1| vacuolar membrane PQ loop repeat protein [Pyrenophora tritici-repentis
  misc_feature (2)..(302): NCBI GI: 156059186 Blast Desc: SS1G_03605 [Sclerotinia sclerotiorum 1980] gi|154701392|gb|EDO01131.1| SS1G_03605 [Sclerotinia sclerotiorum 1980]
  misc_feature (2)..(299): NCBI GI: 154304202 Blast Desc: BC1G_08371 [Botryotinia fuckeliana B05.10] gi|150854173|gb|EDN29365.1| BC1G_08371 [Botryotinia fuckeliana B05.10]
MLSRDVSVNEALSGIFGSVSLTAWICLLIPQLITNYKARSAEGLSMGFLAIWLFGDLTNLGGALVTGLAPTATALAGYFCISDLILITQCIYYNVRNARIARKRLHSTGTEASEDEPLLRRNSTGLPSSHIRHAHHEESGLDPIKRVVTGEDETPSSNPWLSNSLSIFIVYVVGAAGWFVSYRAGAWDKPDDFDVPDTSSPVAIGGMILGYASALCYLCARIPQIIKNYREKSCEGLALLFFLLSLTGNLTYGLSVFTYSQEADYLIKAIPWMLGSLGTIVEDCIIFYQFRIYSPDRKSAESGNA

SEQ ID NO: 12379 - DNA, 1882 bp, Muscodor strobelii
  misc_feature: SGI EST ID NO. CUFF.29404.2
  misc_feature: Variant of the nucleotide sequence at SEQ ID NO 12377
cagatgggtagatgacagtttctttttgcgcagaatctagactgactattgatgtctatagagaattctgcaaggtggcatcgaacagactcaacatgaagtcgcatgtccccttattgatcttgcattacattgcagcagcaaagcattcccatccatcagctgatcggcactaagcccctttcgtcagggtctcgtcacgctcattggcccaatgcaacttcgggcgtgggctggtcccttgtcacacgctcttatctctgtctctacctcttcagagataagaaaactcaagaggttcctttgactcaaatcccctccaatggccgatgccccattccgccttatcgcaggacccggtctgtctggtctgctcgtctgtctaggtattcactccattcactccagctgcaggtgatcctctgaagctgttggccccatgactgaagctcgacctttatatactgtccctctccttcccctgtccaaaagttgtctgatgccagcataatgtcttcgtcttctttccctttgtctgtctcacagctcggcgcccatgtttctgagaccatgctttcgcgggatgtatctgtcaacgaggccctctcgggtatctttggcagtgtgagcttgactgcctggatatgcttactgataccgcagcttatcacaaactacaaagcgaggagcgctgagggattgtctatgggcttcttggctatctggctctttggtgatctgacaaacttgggcggcgccctcgtgaccggacttgccccgactgccaccgcattggcgggctatttctgcatatctgatttgatcctcatcacgcaatgcatctactacaacgtgcgcaatgcccgaatcgcccgaaaacgactccattcgaccggcactgaagcctcggaagacgagccactgcttcgacgaaattcgacaggcctaccgagctcccacatccgacatgcccaccatgaagagtctggtctcgaccctattaagcgtgtggttacgggcgaggatgagactccgtcaagcaacccgtggctcagcaactcgctgagcatcttcatcgtatacgttgtgggagccgcgggatggtttgtctcgtaccgtgccggtgcatgggacaagcccgatgatttcgacgtaccagacactagctcgcctgtcgccattggcggtatgatcttgggatatgcaagtgcgctgtgctacttatgtgctcgcataccccagatcatcaagaactaccgggagaaatcctgcgagggtcttgcgctgctattcttcctgttgtcgctgacaggaaacttgacttatggtctcagtgttttcacatactcgcaagaagctgactaccttatcaaagcgatcccgtggatgctgggatctttgggtaccattgtcgaagactgcatcattttctatcaattccggatctactcaccagaccgaaaatctgccgagtcaggcaatgcatgaaaaccgaatgggcagtctaagggtatgtggattggtctcctgcgtttttgaatttgtgtcgcatcatcataatccacggcattgtcattattatgaccgttatggtcgcattattgggcgttagttgtccgggatatcatttgcatgggttcattctatacctggatcatagcatggcagacaacatccgatttgtctaattacattttaaaattatgagatctaaaatgcaacatgaagaagcggagaatgtgcatgaggccgccgttcgacgacagtcctaggttgttggcgaaatagttgatgcacgcttgctcactgcacctacctagtaacacgatgtcgaggaacgacgcttccgtcgttcggtcgctcttccaaaattataaatggc

SEQ ID NO: 12380 - DNA, 873 bp, Muscodor strobelii
  misc_feature: SGI cDNA ID NO. 564019
  misc_feature: Encodes the peptide sequence at SEQ ID NO 12381
atgcgcttcagtcttggagccattgttttaggtgctacggtcttgccgggcgcagccgcctggggcagtcttggtcatatcacaattgcatacatcgctagccacttcgttagagatgataccgcgaattattttcaggagttgttacgcaatgacacagagcattatctcgctggcgtcgcgacctgggccgacagcattaggtatacgaaatggggacggtttagcaagaattttcatttcatcgacgccaaggatgatccaccttcgtattgcggcgtcgattttctgagagattgcaaagaagagggctgtgtcgtgagctcgatgcagaactacacttcgcaggtactcgatgcgaatttgtttccttggcgtaggaaccaagcggccaaattcgtcattcatttcgtcggcgacatccaccagccgctacatgcggagaacgtcgctcagggcggcaatggtatccatgtgcaatgggaaggaaaggagttcaacttgcatcacgtttgggattcgagcatcgctgaaaagtggctcggcggcattcacaggaagccttacgtcgcggcgcagaggtctgggaagtatgcggcgacaagccaatcgtggctcgatggcatcatccttgacaacgcaattgcgacgtccatgggatgggcaaatgaatcaaacgcgatcgtctgctcccacgtcttcccagaagggccagccgcaatcgccggccaagagctcgcaggagagtactatcaaaaggcagcgccggtgattgagttacaagtcgctaaggccgggtttcgccttgcggcgtggctggatctcatcgctgaccgagttgcaggcgaaaaggagatgtttggggagttgtag

SEQ ID NO: 12381 - protein, 290 aa, Muscodor strobelii
  misc_feature: SGI Peptide ID NO. 564019
  misc_feature (21)..(278): Pfam Id: PF02265 Pfam Desc: S1/P1 Nuclease
  misc_feature (1)..(289): NCBI GI: 261353466 Blast Desc: nuclease S1 [Verticillium albo-atrum VaMs.102]
  misc_feature (1)..(290): NCBI GI: 46128235 Blast Desc: FG08495.1 [Gibberella zeae PH-1]
  misc_feature (22)..(283): NCBI GI: 116193241 Blast Desc: CHGG_06338 [Chaetomium globosum CBS 148.51] gi|88182251|gb|EAQ89719.1| CHGG_06338 [Chaetomium globosum CBS 148.51]
  misc_feature (3)..(280): NCBI GI: 39970773 Blast Desc: MGG_02853 [Magnaporthe grisea 70-15] gi|149210267|ref|XP_001522508.1| MGCH7_ch7g611 [Magnaporthe grisea 70-15] gi|86196566|gb|EAQ71204.1| MGCH7_ch7g611 grisea
  misc_feature (1)..(278): NCBI GI: 256733980 Blast Desc: NECHADRAFT_67214 [Nectria haematococca mpVI 77-13-4]
  misc_feature (1)..(276): NCBI GI: 29150086 Blast Desc: nuclease S1 precursor [Neurospora crassa]
  misc_feature (22)..(276): NCBI GI: 164423170 Blast Desc: NCU09194 [Neurospora crassa OR74A] gi|157069976|gb|EAA29902.2| NCU09194 [Neurospora crassa OR74A]
  misc_feature (24)..(254): NCBI GI: 171684393 Blast Desc: protein product [Podospora anserina] gi|170942157|emb|CAP67809.1| protein product [Podospora anserina]
  misc_feature (1)..(283): NCBI GI: 154290646 Blast Desc: BC1G_15643 [Botryotinia fuckeliana B05.10] gi|150847474|gb|EDN22667.1| BC1G_15643 [Botryotinia fuckeliana B05.10]
  misc_feature (4)..(278): NCBI GI: 169624232 Blast Desc: SNOG_15372 [Phaeosphaeria nodorum SN15] gi|111056185|gb|EAT77305.1| SNOG_15372 [Phaeosphaeria nodorum SN15]
  misc_feature (21)..(279): SWISSPROT Homolog: EC 3.1.30.1 Aspergillus nuclease S(1)
MRFSLGAIVLGATVLPGAAAWGSLGHITIAYIASHFVRDDTANYFQELLRNDTEHYLAGVATWADSIRYTKWGRFSKNFHFIDAKDDPPSYCGVDFLRDCKEEGCVVSSMQNYTSQVLDANLFPWRRNQAAKFVIHFVGDIHQPLHAENVAQGGNGIHVQWEGKEFNLHHVWDSSIAEKWLGGIHRKPYVAAQRSGKYAATSQSWLDGIILDNAIATSMGWANESNAIVCSHVFPEGPAAIAGQELAGEYYQKAAPVIELQVAKAGFRLAAWLDLIADRVAGEKEMFGEL

SEQ ID NO: 12382 - DNA, 740 bp, Muscodor strobelii
  misc_feature: SGI EST ID NO. CUFF.29333.0
  misc_feature: Variant of the nucleotide sequence at SEQ ID NO 12380
gtttagcaaaacttctgaactttaaatctattgtagataacggtcaatcattgttctaaagaacgattacgtcaaattcaaagatcaggtcattcgaagtgtaattgcggatgattcaaagatgcgcttcagtcttggagccattgttttaggtgctacggtcttgccgggcgcagccgcctggggcagtcttggtcatatcacaattgcatacatcgctagccacttcgttagagatgataccgcgaattattttcaggagttgttacgcaatgacacagagcattatctcgctggcgtcgcgacctgggccgacagcattaggtatacgaaatggggacggtttagcaagaattttcatttcatcgacgccaaggatgatccaccttcgtattgcggcgtcgattttctgagagattgcaaagaagagggctgtgtcgtgagctcgatgcagaactacacttcgcaggtactcgatgcgaatttgtttccttggcgtaggaaccaagcggccaaattcgtcattcatttcgtcggcgacatccaccagccgctacatgcggagaacgtcgctcagggcggcaatggtatccatgtgcaatgggaaggaaaggagttcaacttgcatcacgtttgggattcgagcatcgctgaaaagtggctcggcggcattcacaggaagccttacgtcgcggcgcagagtaagtcttctgaactatcagatatcagaaactagccct

SEQ ID NO: 12383 - DNA, 1431 bp, Muscodor strobelii
  misc_feature: SGI cDNA ID NO. 564020
  misc_feature: Elevated expression when VOC is produced
  misc_feature: Encodes the peptide sequence at SEQ ID NO 12384
atgcataccaagaacctcctcgtcgggcttctcagcctcacagctatcgccgaagcgactgctattcaccggccattcgacaatgtcatggcccgtcggtcactcgatcttcaagcacggcagttcaacaacaacaggggcggtaggaaccgaggcggcttcggccaaggccaaaacggtcagaacggccagaacaatgggcaaaacaacggtcagaacaacaacggccaggccgcggcaagttcagcaccgactgcaaccgccaccgacgccgctaacaacggccagaacaacggtcagggtcagaacaacggccaaaataacaaccaaggccaaaataatggacagaacaacggacagaacaatgccggcaacggaaacgccaatgccgctttgactctcgatgccaatgctgttcagacaggttctcagagtgatggtaacccagacgcggctgctggagaggccgcttcccaaaccgacgctgccaacttcatcaacttttgctcgggcaagaccctgacgaacggtctgcagaacaccggcggttcttgcaacggtatccccatgggtaacattccatcaacgaacaacttggtatcaagcgtacttgtcagcccccaaaatcttgacgacgttgctgcaaacacggacttcgatatttcggtacaagtcgccaactttgctcccggaacattcaccaatgctcagaacacgtattactcagcacctcaagatcttgatggctctggcaacattatcggccacacacacgttactgttcaagatttgggaaacagcttgaaccctaccacgcccctggacgccggccagtttgtcttcttcaagggtatcaacgatgctggtaacaaccagggtctcctctctgccgctgtcgacggtggtcttccgcaaggcaactaccgaatctgcaccatgttcgctgccgctaaccatcaacccgtgatcatgcccattgctcagcgtggtgctcaggacgattgcgttcgtatcacagttggtggcggtgttggcaacaacaacaacggtcagaacggacaaaacaatggcggccagaacaacggtcagaacaatggccagaacaacaatggtcagaataatgggcagaataacaatggacaaaacaacgggcaaagtaataataatggagataattcttcttcctctgctaactcgggaaatcagagtaatgctttgggcggtatcactgcaccggccgtcaccgactcaggtgattcctcgagacccttcgcggtcaacggcaacacctttgtgaatcaggcggcggcgattcagcgagcatgcgacatccagcagaaccagtgctccgatgctgcgaactcgggtgctggcttctctgtttctgactgccaagcgcagcaggctgcctgtcaggcgagcgccaattaa

SEQ ID NO: 12384 - protein, 476 aa, Muscodor strobelii
  misc_feature: SGI Peptide ID NO. 564020
  misc_feature (134)..(474): NCBI GI: 85091919 Blast Desc: NCU09193 [Neurospora crassa OR74A] gi|28920538|gb|EAA29901.1| [Neurospora crassa OR74A] gi|29150085|emb|CAD79646.1| [Neurospora crassa]
  misc_feature (133)..(340): NCBI GI: 46128233 Blast Desc: FG08494.1 [Gibberella zeae PH-1]
  misc_feature (132)..(475): NCBI GI: 39970769 Blast Desc: MGG_02851 [Magnaporthe grisea 70-15] gi|145017332|gb|EDK01695.1| MGG_02851 [Magnaporthe grisea 70-15]
  misc_feature (161)..(335): NCBI GI: 256733979 Blast Desc: NECHADRAFT_7259 [Nectria haematococca mpVI 77-13-4]
  misc_feature (134)..(340): NCBI GI: 116193239 Blast Desc: CHGG_06337 [Chaetomium globosum CBS 148.51] gi|88182250|gb|EAQ89718.1| CHGG_06337 [Chaetomium globosum CBS 148.51]
  misc_feature (112)..(359): NCBI GI: 154304648 Blast Desc: BC1G_08063 [Botryotinia fuckeliana B05.10] gi|150853963|gb|EDN29155.1| BC1G_08063 [Botryotinia fuckeliana B05.10]
  misc_feature (134)..(342): NCBI GI: 171684395 Blast Desc: protein product [Podospora anserina] gi|170942158|emb|CAP67810.1| protein product [Podospora anserina]
  misc_feature (114)..(359): NCBI GI: 156042620 Blast Desc: SS1G_11108 [Sclerotinia sclerotiorum 1980] gi|154695494|gb|EDN95232.1| SS1G_11108 [Sclerotinia sclerotiorum 1980]
  misc_feature (132)..(341): NCBI GI: 258568208 Blast Desc: [Uncinocarpus reesii 1704] gi|237906294|gb|EEP80695.1| [Uncinocarpus reesii 1704]
  misc_feature (134)..(340): NCBI GI: 39943016 Blast Desc: MGG_03588 [Magnaporthe grisea 70-15] gi|145009842|gb|EDJ94498.1| MGG_03588 [Magnaporthe grisea 70-15]
  misc_feature: Useful for introducing or modulating the production of volatile compounds
MHTKNLLVGLLSLTAIAEATAIHRPFDNVMARRSLDLQARQFNNNRGGRNRGGFGQGQNGQNGQNNGQNNGQNNNGQAAASSAPTATATDAANNGQNNGQGQNNGQNNNQGQNNGQNNGQNNAGNGNANAALTLDANAVQTGSQSDGNPDAAAGEAASQTDAANFINFCSGKTLTNGLQNTGGSCNGIPMGNIPSTNNLVSSVLVSPQNLDDVAANTDFDISVQVANFAPGTFTNAQNTYYSAPQDLDGSGNIIGHTHVTVQDLGNSLNPTTPLDAGQFVFFKGINDAGNNQGLLSAAVDGGLPQGNYRICTMFAAANHQPVIMPIAQRGAQDDCVRITVGGGVGNNNNGQNGQNNGGQNNGQNNGQNNNGQNNGQNNNGQNNGQSNNNGDNSSSSANSGNQSNALGGITAPAVTDSGDSSRPFAVNGNTFVNQAAAIQRACDIQQNQCSDAANSGAGFSVSDCQAQQAACQASAN

SEQ ID NO: 12385 - DNA, 5468 bp, Muscodor strobelii
  misc_feature: SGI EST ID NO. CUFF.29387.1
  misc_feature: Variant of the nucleotide sequence at SEQ ID NO 12383
gcggatcggctgatctgcgacgtctcgaccttgagaaataaggagggccagcttcatccgaccgctccctctcattctcgctctcctctctggcgtctcctgcctatttgcaatttggtctcggcaaccggcaggccttgcatcgtgccttagccacagtgagatctatcttcttagatggcttgcagacgttgtgcatgccagcatggagcgcgctgccattccgcacggcgtcggcgcggatgagagcttctgatgtgatggtccccggcagccgagcaaatctactatggccgaatagttgcatcatcacaacttttatatgtggatactacatcactaaaaagaatcagatcggagctttgtgattttacatgtcttgatgagatgacatgagataagaaaagctcgtaactgtcgtctgaagtatgcgtttctgctctaactgccacttgacttgacaaggagctaggttaaggtgaacagcatctcaacaatatcggccgacgtttctgtcggaactgattgaggcttacccctacgcgcctagttatttctctatcaagccactctcgaggagctcgaatctaactatggaccctgtcaattctgaagcggctctagcatcaagacatgcctcccgcactccaacccctgacacatagtcgccagggttcaccacccatgcgagcaatatcatcatggttcctgaattcaaccaatttctacgatccgcctcttcgttttgaatctgtggatactgctcctttctatagtcctggcaaggacccatgatgtcgcttgtgttgcggatccagtctcacgcttcagccgtgattgctagagaggctggctgctccccggcacgtcgctgaatataagagaaaagtcttggctcatatgtttccaatggtttttcctctctcatcttcatcttcttgagttcgattcttcttccggattcttatccttcctttccctttcaaatgcgctggtagtgtgttttgttcattcgttcctttcgacagctatctccctcgcctactcttcttcacacttgtctgtgacacattcttttcaacgattcgaaaacggtctggaaccatttttggaataatattattggattcttgccccaggattggaaaagacaactcagtcgcaatacacgtcaacgtatctatctcatcatgcataccaagaacctcctcgtcgggcttctcagcctcacagctatcgccgaagcgactgctattcaccggccattcgacaatgtcatggcccgtcggtcactcgatcttcaagcacggcagttcaacaacaacaggggcggtaggaaccgaggcggcttcggccaaggccaaaacggtcagaacggccagaacaatgggcaaaacaacggtcagaacaacaacggccaggccgcggcaagttcagcaccgactgcaaccgccaccgacgccgctaacaacggccagaacaacggtcagggtcagaacaacggccaaaataacaaccaaggccaaaataatggacagaacaacggacagaacaatgccggcaacggaaacgccaatgccgctttgactctcgatgccaatgctgttcagacaggttctcagagtgatggtaacccagacgcggctgctggagaggccgcttcccaaaccgacgctgccaacttcatcaacttttgctcgggcaagaccctgacgaacggtctgcagaacaccggcggttcttgcaacggtatccccatgggtaacattccatcaacgaacaacttggtatcaagcgtacttgtcagcccccaaaatcttgacgacgttgctgcaaacacggacttcgatatttcggtacaagtcgccaactttgctcccggaacattcaccaatgctcagaacacgtattactcagcacctcaagatcttgatggctctggcaacattatcggccacacacacgttactgttcaagatttgggaaacagcttgaaccctaccacgcccctggacgccggccagtttgtcttcttcaagggtatcaacgatgctggtaacaaccagggtctcctctctgccgctgtcgacggtggtcttccgcaaggcaactaccgaatctgcaccatgttcgctgccgctaaccatcaacccgtgatcatgcccattgctcagcgtggtgctcaggacgattgcgttcgtatcacagttggtggcggtgttggcaacaacaacaacggtcagaacggacaaaacaatggcggccagaacaacggtcagaacaatggccagaacaacaatggtcagaataatgggcagaataacaatggacaaaacaacgggcaaaagtaatgctttgggcggtatcactgcaccggccgtcaccgactcaggtgattcctcgagacccttcgcggtcaacggcaacacctttgtgaatcaggcggcggcgattcagcgagcatgcgacatccagcagaaccagtgctccgatgctgcgaactcgggtgctggcttctctgtttctgactgccaagcgcagcaggctgcctgtcaggcgagcgccaattaagacgacacaaatcgttgcaatggcaatcgcctctatgtgtcggatgagctggttgttttgtatatctgttagaaaaaaccattttccttttctcgtgggcgcctgacaagaatgcgtccgggaggagcggaacgactataaccttaatctcacacgagggctctgtgacttgccacgctaccgttgtctggtttttagagggggcaattctgtatttgtttttacactttcttcacaatttttattttagctagcggggggcttgtcacatagcagatgtcgttacgaatgaacgagccattgccggctcatatttaaactacaataactatgagctctcttcgtgacgattgttgacgtgcgcgtatttagaaaaaggcatagtacagtctggatcttgcgacgccgttgacgtgcgatgtgctcagtaaccatatacgaacataacacccgacatgaagttactcaaattctttttccagtgctcactcgaattttccttttaaattacttgctcatcggtcagcgtctaaatcgcaatccgcatcaaaattgggaccggatgcgaaatgctgcgcgtctcaagttgtgtctgcaactgtctcagacccctgttcgggctcagcccacaactgcccaattgccgccctacaccctgccggtttaccatttatagagcttatatgcatagtgaacgctgagaaattcaatatacgcattgagttcatctcgtacagatattgaaaaaaatccgcgctatactatcgccggcgtgtaaagcacatagtactgccaacatgtctctctaacccttggtttgatgggcagaagcttcaagattcattctgatacctcgaccgctagacccctcaaggctagaaattaatgtattcaatgcttttgccagacgtttcgtcgctaagtttatcccaatgccaatgatgatgcctcagtattcgtacaaaaccataatgcgactctgcatcctgttgtccgagatcagtgtcccaacttgtcgaggtgatcaacattttgtttcgtgtttagttctgtatttagttactatcttcaaacaaccagcagaggggacaatagacggaaataagataaagcagctgggccgaagtgtctgttgccggagcacgaaactcaaatgagcaggtcggtttgttatgtgtggaaatggtatacataaaccgctgtcaggatctcgctcgggggtgaatcgcgaatgagttcatgtgctgacctgtgctgtttctttgccgataccacacgtagctttggcccaatgcgggaatcgattcaaatggtattgtctgcgaaccactcaagcttctcgatctcgtaccaactgggcgcaaaggatcgcttccctttgttatcgtactcgtcatcaatagctacaaaatggagtttagggaatgaggtggatatggaccgctggctgatcctgacatcttgcaagcctataaacacaaatgttccgtcttcgaccagattcgcggatgctatttggaaactgacatcgatttgcaactgccatcggcctgagctattatgggcctgaccgagacctaacacttttccaatacgggtggtctttaatcctagcttttcaacatcgttacgcagtatagctgcctctaattgggatttcagcatacaattctgtacgagggtggaatctgcttcaatcaagtcccggaaatcgtcttctgtacggttctcgctcaatatggggacaaaaattgtccagggtatgaaatccttgcctaggacgatggcgaaagagtgaattggaaagtttccgatatgatatgatttcattaagagtcggtcgtttgtcttgaatatcagcgcagcgtgtgcacgctgtttcgtttccatcggaaattcaagtagacgagtaccagagcgatatgtacaatgtggcgcacagaaaacgtcaaccaagttgaaggaatttgaatttcgagtccattttgattgaggaatccgcagcacccgaaaactagtaggccatgagggcacctcttccatcatcacatcgggctctttgatcacaacagattcgcttttgaaacctggccagtcttttggaaatacgagtaccaagggaccgcaccgagcacggaacgaggaatattcccaattacgtagggggattgcaaggtacgctgtgctgtagctccgaagtgtacactgcagcatgacaaagctgtaaagcccttttgagcatattggatactcaatgcgaactgcattgccgtatatgaccggaggcgggtgatcttctttctctctgacctgaaggatcacgtgcgcagttgagaaatcggtaggtgagtcagctagtaatccgtgcatgagaggttgatctgatccccacgtagccattttgtgcatatcgccgaaggctttcggactaccccatgcgaaaagcgactgatcgtcagaaactctcaggatttcctgctgtaaacgcagaaatgccttcgtgccttcaccgtaaatgagcggcatgttgacgtcaaatatgcccattagagagtaggcctgatcctcgacacgtgttgttgtgcggtctgcggcccatgacattcgttttgcaatacagacttgagcgaagttacctgaagagagtactattatgtctatgcccgtaatcgtcgcgatggtatcttggaggctatgttttgaaccgatcaaatcccaactcccggagtaaaattgtacacttcttggcgcaatgagctcttgtaatgtccacccccgtttgaaccaacggctctgatgtagttcgcttgcatttgcgacatcagaaaggaacacgtaacagacgacagcctgacgataccagcggaacattgagttgatagcttctgacagctcag

SEQ ID NO: 12386 - DNA, 1380 bp, Muscodor strobelii
  misc_feature: SGI cDNA ID NO. 564021
  misc_feature: Elevated expression when VOC is produced
  misc_feature: Encodes the peptide sequence at SEQ ID NO 12387
atgcataccaagaacctcctcgtcgggcttctcagcctcacagctatcgccgaagcgactgctattcaccggccattcgacaatgtcatggcccgtcggtcactcgatcttcaagcacggcagttcaacaacaacaggggcggtaggaaccgaggcggcttcggccaaggccaaaacggtcagaacggccagaacaatgggcaaaacaacggtcagaacaacaacggccaggccgcgaacaacggtcagggtcagaacaacggccaaaataacaaccaaggccaaaataatggacagaacaacggacagaacaatgccggcaacggaaacgccaatgccgctttgactctcgatgccaatgctgttcagacaggttctcagagtgatggtaacccagacgcggctgctggagaggccgcttcccaaaccgacgctgccaacttcatcaacttttgctcgggcaagaccctgacgaacggtctgcagaacaccggcggttcttgcaacggtatccccatgggtaacattccatcaacgaacaacttggtatcaagcgtacttgtcagcccccaaaatcttgacgacgttgctgcaaacacggacttcgatatttcggtacaagtcgccaactttgctcccggaacattcaccaatgctcagaacacgtattactcagcacctcaagatcttgatggctctggcaacattatcggccacacacacgttactgttcaagatttgggaaacagcttgaaccctaccacgcccctggacgccggccagtttgtcttcttcaagggtatcaacgatgctggtaacaaccagggtctcctctctgccgctgtcgacggtggtcttccgcaaggcaactaccgaatctgcaccatgttcgctgccgctaaccatcaacccgtgatcatgcccattgctcagcgtggtgctcaggacgattgcgttcgtatcacagttggtggcggtgttggcaacaacaacaacggtcagaacggacaaaacaatggcggccagaacaacggtcagaacaatggccagaacaacaatggtcagaataatgggcagaataacaatggacaaaacaacgggcaaagtaataataatggagataattcttcttcctctgctaactcgggaaatcagagtaatgctttgggcggtatcactgcaccggccgtcaccgactcaggtgattcctcgagacccttcgcggtcaacggcaacacctttgtgaatcaggcggcggcgattcagcgagcatgcgacatccagcagaaccagtgctccgatgctgcgaactcgggtgctggcttctctgtttctgactgccaagcgcagcaggctgcctgtcaggcgagcgccaattaa

SEQ ID NO: 12387 - protein, 459 aa, Muscodor strobelii
  misc_feature: SGI Peptide ID NO. 564021
  misc_feature (117)..(457): NCBI GI: 85091919 Blast Desc: NCU09193 [Neurospora crassa OR74A] gi|28920538|gb|EAA29901.1| [Neurospora crassa OR74A] gi|29150085|emb|CAD79646.1| [Neurospora crassa]
  misc_feature (116)..(323): NCBI GI: 46128233 Blast Desc: FG08494.1 [Gibberella zeae PH-1]
  misc_feature (115)..(458): NCBI GI: 39970769 Blast Desc: MGG_02851 [Magnaporthe grisea 70-15] gi|145017332|gb|EDK01695.1| MGG_02851 [Magnaporthe grisea 70-15]
  misc_feature (144)..(318): NCBI GI: 256733979 Blast Desc: NECHADRAFT_7259 [Nectria haematococca mpVI 77-13-4]
  misc_feature (117)..(323): NCBI GI: 116193239 Blast Desc: CHGG_06337 [Chaetomium globosum CBS 148.51] gi|88182250|gb|EAQ89718.1| CHGG_06337 [Chaetomium globosum CBS 148.51]
  misc_feature (115)..(324): NCBI GI: 212543067 Blast Desc: conserved [Penicillium marneffei ATCC 18224] gi|210066595|gb|EEA20688.1| conserved [Penicillium marneffei ATCC 18224]
  misc_feature (95)..(342): NCBI GI: 154304648 Blast Desc: BC1G_08063 [Botryotinia fuckeliana B05.10] gi|150853963|gb|EDN29155.1| BC1G_08063 [Botryotinia fuckeliana B05.10]
  misc_feature (117)..(325): NCBI GI: 171684395 Blast Desc: protein product [Podospora anserina] gi|170942158|emb|CAP67810.1| protein product [Podospora anserina]
  misc_feature (97)..(342): NCBI GI: 156042620 Blast Desc: SS1G_11108 [Sclerotinia sclerotiorum 1980] gi|154695494|gb|EDN95232.1| SS1G_11108 [Sclerotinia sclerotiorum 1980]
  misc_feature (115)..(324): NCBI GI: 258568208 Blast Desc: [Uncinocarpus reesii 1704] gi|237906294|gb|EEP80695.1| [Uncinocarpus reesii 1704]
  misc_feature: Useful for introducing or modulating the production of volatile compounds
MHTKNLLVGLLSLTAIAEATAIHRPFDNVMARRSLDLQARQFNNNRGGRNRGGFGQGQNGQNGQNNGQNNGQNNNGQAANNGQGQNNGQNNNQGQNNGQNNGQNNAGNGNANAALTLDANAVQTGSQSDGNPDAAAGEAASQTDAANFINFCSGKTLTNGLQNTGGSCNGIPMGNIPSTNNLVSSVLVSPQNLDDVAANTDFDISVQVANFAPGTFTNAQNTYYSAPQDLDGSGNIIGHTHVTVQDLGNSLNPTTPLDAGQFVFFKGINDAGNNQGLLSAAVDGGLPQGNYRICTMFAAANHQPVIMPIAQRGAQDDCVRITVGGGVGNNNNGQNGQNNGGQNNGQNNGQNNNGQNNGQNNNGQNNGQSNNNGDNSSSSANSGNQSNALGGITAPAVTDSGDSSRPFAVNGNTFVNQAAAIQRACDIQQNQCSDAANSGAGFSVSDCQAQQAACQASAN

SEQ ID NO: 12388 - DNA, 5468 bp, Muscodor strobelii; identical to SEQ ID NO: 12385
  misc_feature: SGI EST ID NO. CUFF.29387.1
  misc_feature: Variant of the nucleotide sequence at SEQ ID NO 12386

SEQ ID NO: 12389 - DNA, 1836 bp, Muscodor strobelii
  misc_feature: SGI cDNA ID NO. 564022
  misc_feature: Encodes the peptide sequence at SEQ ID NO 12390
atgcgcttaataaatacaagcacattcgctattcacgaattcgcaggcgacaccgacaaggaatatgccattctttcacatacctggggtcacgatgaatgtctttttcaggacatgtgggatatcgagctatgcgaggcacgccagggtttccgcaagataaaacattgctgcgaacaggctgcccacgatggcctcgaatgggcttgggctgacacatgctgcattgataaaacgagcacggctgagctgtcagaagctatcaactcaatgttccgctggtatcgtcaggctgtcgtctgttacgtgttcctttctgatgtcgcaaatgcaagcgaactacatcagagccgttggttcaaacgggggtggacattacaagagctcattgcgccaagaagtgtacaattttactccgggagttgggatttgatcggttcaaaacatagcctccaagataccatcgcgacgattacgggcatagacataatagtactctcttcaggtaacttcgctcaagtctgtattgcaaaacgaatgtcatgggccgcagaccgcacaacaacacgtgtcgaggatcaggcctactctctaatgggcatatttgacgtcaacatgccgctcatttacggtgaaggcacgaaggcatttctgcgtttacagcaggaaatcctgagagtttctgacgatcagtcgcttttcgcatggggtagtccgaaagccttcggcgatatgcacaaaatggctacgtggggatcagatcaacctctcatgcacggattactagctgactcacctaccgatttctcaactgcgcacgtgatccttcaggtcagagagaaagaagatcacccgcctccggtcatatacggcaatgcagttcgcattgagtatccaatatgctcaaaagggctttacagctttgtcatgctgcagtgtacacttcggagctacagcacagcgtaccttgcaatccccctacgtaattgggaatattcctcgttccgtgctcggtgcggtcccttggtactcgtatttccaaaagactggccaggtttcaaaagcgaatctgttgtgatcaaagagcccgatgtgatgatggaagaggtgccctcatggcctactagttttcgggtgctgcggattcctcaatcaaaatggactcgaaattcaaattccttcaacttggttgacgttttctgtgcgccacattgtacatatcgctctggtactcgtctacttgaatttccgatggaaacgaaacagcgtgcacacgctgcgctgatattcaagacaaacgaccgactcttaatgaaatcatatcatatcggaaactttccaattcactctttcgccatcgtcctaggcaaggatttcataccctggacaatttttgtccccatattgagcgagaaccgtacagaagacgatttccgggacttgattgaagcagattccaccctcgtacagaattgtatgctgaaatcccaattagaggcagctatactgcgtaacgatgttgaaaagctaggattaaagaccacccgtattggaaaagtgttaggtctcggtcaggcccataatagctcaggccgatggcagttgcaaatcgatgtcagtttccaaatagcatccgcgaatctggtcgaagacggaacatttgtgtttataggcttgcaagatgtcaggatcagccagcggtccatatccacctcattccctaaactccattttgtagctattgatgacgagtacgataacaaagggaagcgatcctttgcgcccagttggtacgagatcgagaagcttgagtggttcgcagacaataccatttga

SEQ ID NO: 12390 - protein, 611 aa, Muscodor strobelii
  misc_feature: SGI Peptide ID NO. 564022
  misc_feature (22)..(128): Pfam Id: PF06985 Pfam Desc: Heterokaryon incompatibility protein (HET)
  misc_feature (52)..(106): Pfam Id: PF06985 Pfam Desc: Heterokaryon incompatibility protein (HET)
  misc_feature (116)..(128): Pfam Id: PF06985 Pfam Desc: Heterokaryon incompatibility protein (HET)
  misc_feature (1)..(564): NCBI GI: 169595686 Blast Desc: SNOG_00587 [Phaeosphaeria nodorum SN15] gi|111070962|gb|EAT92082.1| SNOG_00587 [Phaeosphaeria nodorum SN15]
  misc_feature (1)..(328): NCBI GI: 256720502 Blast Desc: NECHADRAFT_55867 [Nectria haematococca mpVI 77-13-4]
  misc_feature (1)..(343): NCBI GI: 145228631 Blast Desc: An01g01850 [Aspergillus niger] gi|134054715|emb|CAK43556.1| protein product [Aspergillus niger]
  misc_feature (1)..(276): NCBI GI: 154318644 Blast Desc: BC1G_02711 [Botryotinia fuckeliana B05.10] gi|150857841|gb|EDN33033.1| BC1G_02711 [Botryotinia fuckeliana B05.10]
  misc_feature (1)..(300): NCBI GI: 256722255 Blast Desc: NECHADRAFT_52327 [Nectria haematococca mpVI 77-13-4]
  misc_feature (1)..(354): NCBI GI: 145246214 Blast Desc: An12g02770 [Aspergillus niger] gi|134080070|emb|CAK41116.1| protein product [Aspergillus niger]
  misc_feature (1)..(239): NCBI GI: 256732223 Blast Desc: NECHADRAFT_93752 [Nectria haematococca mpVI 77-13-4]
  misc_feature (9)..(277): NCBI GI: 145235123 Blast Desc: An03g03270 [Aspergillus niger] gi|134057890|emb|CAK38231.1| protein product [Aspergillus niger]
  misc_feature (1)..(287): NCBI GI: 46139565 Blast Desc: FG11297.1 [Gibberella zeae PH-1]
  misc_feature (1)..(236): NCBI GI: 256729159 Blast Desc: NECHADRAFT_39749 [Nectria haematococca mpVI 77-13-4]
MRLINTSTFAIHEFAGDTDKEYAILSHTWGHDECLFQDMWDIELCEARQGFRKIKHCCEQAAHDGLEWAWADTCCIDKTSTAELSEAINSMFRWYRQAVVCYVFLSDVANASELHQSRWFKRGWTLQELIAPRSVQFYSGSWDLIGSKHSLQDTIATITGIDIIVLSSGNFAQVCIAKRMSWAADRTTTRVEDQAYSLMGIFDVNMPLIYGEGTKAFLRLQQEILRVSDDQSLFAWGSPKAFGDMHKMATWGSDQPLMHGLLADSPTDFSTAHVILQVREKEDHPPPVIYGNAVRIEYPICSKGLYSFVMLQCTLRSYSTAYLAIPLRNWEYSSFRARCGPLVLVFPKDWPGFKSESVVIKEPDVMMEEVPSWPTSFRVLRIPQSKWTRNSNSFNLVDVFCAPHCTYRSGTRLLEFPMETKQRAHAALIFKTNDRLLMKSYHIGNFPIHSFAIVLGKDFIPWTIFVPILSENRTEDDFRDLIEADSTLVQNCMLKSQLEAAILRNDVEKLGLKTTRIGKVLGLGQAHNSSGRWQLQIDVSFQIASANLVEDGTFVFIGLQDVRISQRSISTSFPKLHFVAIDDEYDNKGKRSFAPSWYEIEKLEWFADNTI

SEQ ID NO: 12391 - DNA, 3736 bp, Muscodor strobelii
  misc_feature: SGI EST ID NO. CUFF.29388.3
  misc_feature: Variant of the nucleotide sequence at SEQ ID NO 12389
gatcccccgcaaaacgccatttcctaggtgtcctgttgaagggtgtagctcttaagatcatgatgaacgccctcatcaaccgacttcatgttgcgcatgagtgcgacttgcgctctacgtggcagatttcagtacatgagccgctagatagtgtctcccgtcagccgtggccaatgtccgggcgtgactttcgcgccaaagatgcgcttaataaatacaagcacattcgctattcacgaattcgcaggcgacaccgacaaggaatatgccattctttcacatacctggggtcacgatgaatgtctttttcaggacatgtgggatatcgagctatgcgaggcacgccagggtttccgcaagataaaacattgctgcgaacaggctgcccacgatggcctcgaatgggcttgggctgacacatgctgcattgataaaacgagcacggctgagctgtcagaagctatcaactcaatgttccgctggtatcgtcaggctgtcgtctgttacgtgttcctttctgatgtcgcaaatgcaagcgaactacatcagagccgttggttcaaacgggggtggacattacaagagctcattgcgccaagaagtgtacaattttactccgggagttgggatttgatcggttcaaaacatagcctccaagataccatcgcgacgattacgggcatagacataatagtactctcttcaggtaacttcgctcaagtctgtattgcaaaacgaatgtcatgggccgcagaccgcacaacaacacgtgtcgaggatcaggcctactctctaatgggcatatttgacgtcaacatgccgctcatttacggtgaaggcacgaaggcatttctgcgtttacagcaggaaatcctgagagtttctgacgatcagtcgcttttcgcatggggtagtccgaaagccttcggcgatatgcacaaaatggctacgtggggatcagatcaacctctcatgcacggattactagctgactcacctaccgatttctcaactgcgcacgtgatccttcaggtcagagagaaagaagatcacccgcctccggtcatatacggcaatgcagttcgcattgagtatccaatatgctcaaaagggctttacagctttgtcatgctgcagtgtacacttcggagctacagcacagcgtaccttgcaatccccctacgtaattgggaatattcctcgttccgtgctcggtgcggtcccttggtactcgtatttccaaaagactggccaggtttcaaaagcgaatctgttgtgatcaaagagcccgatgtgatgatggaagaggtgccctcatggcctactagttttcgggtgctgcggattcctcaatcaaaatggactcgaaattcaaattccttcaacttggttgacgttttctgtgcgccacattgtacatatcgctctggtactcgtctacttgaatttccgatggaaacgaaacagcgtgcacacgctgcgctgatattcaagacaaacgaccgactcttaatgaaatcatatcatatcggaaactttccaattcactctttcgccatcgtcctaggcaaggatttcataccctggacaatttttgtccccatattgagcgagaaccgtacagaagacgatttccgggacttgattgaagcagattccaccctcgtacagaattgtatgctgaaatcccaattagaggcagctatactgcgtaacgatgttgaaaagctaggattaaagaccacccgtattggaaaagtgttaggtctcggtcaggcccataatagctcaggccgatggcagttgcaaatcgatgtcagtttccaaatagcatccgcgaatctggtcgaagacggaacatttgtgtttataggcttgcaagatgtcaggatcagccagcggtccatatccacctcattccctaaactccattttgtagctattgatgacgagtacgataacaaagggaagcgatcctttgcgcccagttggtacgagatcgagaagcttgagtggttcgcagacaataccatttgaatcgattcccgcattgggccaaagctacgtgtggtatcggcaaagaaacagcacaggtcagcacatgaactcattcgcgattcacccccgagcgagatcctgacagcggtttatgtataccatttccacacataacaaaccgacctgctcatttgagtttcgtgctccggcaacagacacttcggcccagctgctttatcttatttccgtctattgtcccctctgctggttgtttgaagatagtaactaaatacagaactaaacacgaaacaaaatgttgatcacctcgacaagttgggacactgatctcggacaacaggatgcagagtcgcattatggttttgtacgaatactgaggcatcatcattggcattgggataaacttagcgacgaaacgtctggcaaaagcattgaatacattaatttctagccttgaggggtctagcggtcgaggtatcagaatgaatcttgaagcttctgcccatcaaaccaagggttagagagacatgttggcagtactatgtgctttacacgccggcgatagtatagcgcggatttttttcaatatctgtacgagatgaactcaatgcgtatattgaatttctcagcgttcactatgcatataagctctataaatggtaaaccggcagggtgtagggcggcaattgggcagttgtgggctgagcccgaacaggggtctgagacagttgcagacacaacttgagacgcgcagcatttcgcatccggtcccaattttgatgcggattgcgatttagacgctgaccgatgagcaagtaatttaaaaggaaaattcgagtgagcactggaaaaagaatttgagtaacttcatgtcgggtgttatgttcgtatatggttactgagcacatcgcacgtcaacggcgtcgcaagatccagactgtactatgcctttttctaaatacgcgcacgtcaacaatcgtcacgaagagagctcatagttattgtagtttaaatatgagccggcaatggctcgttcattcgtaacgacatctgctatgtgacaagccccccgctagctaaaataaaaattgtgaagaaagtgtaaaaacaaatacagaattgccccctctaaaaaccagacaacggtagcgtggcaagtcacagagccctcgtgtgagattaaggttatagtcgttccgctcctcccggacgcattcttgtcaggcgcccacgagaaaaggaaaatggttttttctaacagatatacaaaacaaccagctcatccgacacatagaggcgattgccattgcaacgatttgtgtcgtcttaattggcgctcgcctgacaggcagcctgctgcgcttggcagtcagaaacagagaagccagcacccgagttcgcagcatcggagcactggttctgctggatgtcgcatgctcgctgaatcgccgccgcctgattcacaaaggtgttgccgttgaccgcgaagggtctcgaggaatcacctgagtcggtgacggccggtgcagtgataccgcccaaagcattactctgatttcccgagttagcagaggaagaagaattatctccattattattactttgcccgttgttttgtccattgttattctgcccattattctgaccattgttgttctggccattgttctgaccgttgttctggccgccattgttttgtccgttctgaccgttgttgttg

SEQ ID NO: 12392 - DNA, 1155 bp, Muscodor strobelii
  misc_feature: SGI cDNA ID NO. 564023
  misc_feature: Encodes the peptide sequence at SEQ ID NO 12393
atgcgtgcaccttcgttgatcagctgcctagtcttcacggcctaccaggctgcggcaattccaactacgtgcccacgtgatgaccatcacaatgcaaaacgccattgccgcgagctcatggttgatatcgatatatctgcaagaaatcaaatgttcaccctgaagccgcctcatggtgacatcgaggtcacaaacttcgttctcgaccttatacagcccggcggtaatttcacagagaccatctcctcagggaccatcacgaaatcaggctcatataaagttgcggcaacttactgcgagccatcccatggcccaggcaaagctcttcaggttctcacacacggcattagcttcggcaagtcgtactgggaccaccctgtgcacaactacaactacagctatgtcaactcagcgctgtctcgtaactacagtgtctttttctacgatcgcctaggcgtaggactgtcttcgaaaggagatcctttgaacgagatccagcctgcactggaactctctgcccttcaagctctgacttcaatgctgcggaaaacctcggtccccggaattgaggccaaatatgagaaagtcgtgcacgtgggacacagcttcgggagtcttctaacatacgccttcacgaattcgtttcccacgctttcagacggaatcgcgctcacggggttcagtttggatccagagtttgctaccttatccactcttggggataacttcgttgcagccaacagcttgccaaagtggaagcacttgccggatggctatttagtcagtaagggaatgaacagcatacagactgggttcttctctccagaggctttcgaccctgaggttttgaatgctgcctacaatgcaatcgaacctcgtacaattggagagacactttcccaagatgtgataccgatgcagagtcagttcgaaggccctgtgcttgttgttacaggagagcgcgattttcccgcctgcggtggcaactgtcttgcgaccgtgccttcaatcccggctaagaccgaagacgcatttgtaaaggcagcgtccttcaatgtcaccgttgtgcctagaaccggccacggacttaatttccactatagctggcccataacctacggggttgtctccaatttcttcgatgagatcatttga

SEQ ID NO: 12393 - protein, 384 aa, Muscodor strobelii
  misc_feature: SGI Peptide ID NO. 564023
  misc_feature (34)..(380): NCBI GI: 261356743 Blast Desc: conserved [Verticillium albo-atrum VaMs.102]
  misc_feature (34)..(382): NCBI GI: 256726441 Blast Desc: NECHADRAFT_79651 [Nectria haematococca mpVI 77-13-4]
  misc_feature (32)..(382): NCBI GI: 46124239 Blast Desc: FG06497.1 [Gibberella zeae PH-1]
  misc_feature (32)..(380): NCBI GI: 255930811 Blast Desc: Pc12g00590 [Penicillium chrysogenum Wisconsin 54-1255] gi|211581581|emb|CAP79686.1| Pc12g00590 [Penicillium chrysogenum Wisconsin 54-1255]
  misc_feature (36)..(382): NCBI GI: 154320985 Blast Desc: BC1G_01367 [Botryotinia fuckeliana B05.10] gi|150851905|gb|EDN27097.1| BC1G_01367 [Botryotinia fuckeliana B05.10]
  misc_feature (34)..(382): NCBI GI: 154302613 Blast Desc: BC1G_09883 [Botryotinia fuckeliana B05.10] gi|150855372|gb|EDN30564.1| BC1G_09883 [Botryotinia fuckeliana B05.10]
  misc_feature (89)..(380): NCBI GI: 115401136 Blast Desc: [Aspergillus terreus NIH2624] gi|114190097|gb|EAU31797.1| [Aspergillus terreus NIH2624]
  misc_feature (35)..(382): NCBI GI: 145228501 Blast Desc: An01g01170 [Aspergillus niger] gi|134054648|emb|CAK43493.1| protein product [Aspergillus niger]
  misc_feature (35)..(382): NCBI GI: 238489057 Blast Desc: conserved [Aspergillus flavus NRRL3357] gi|220698154|gb|EED54494.1| conserved [Aspergillus flavus NRRL3357]
  misc_feature (35)..(382): NCBI GI: 169763180 Blast Desc: [Aspergillus oryzae RIB40] gi|83770518|dbj|BAE60651.1| protein product [Aspergillus oryzae]
MRAPSLISCLVFTAYQAAAIPTTCPRDDHHNAKRHCRELMVDIDISARNQMFTLKPPHGDIEVTNFVLDLIQPGGNFTETISSGTITKSGSYKVAATYCEPSHGPGKALQVLTHGISFGKSYWDHPVHNYNYSYVNSALSRNYSVFFYDRLGVGLSSKGDPLNEIQPALELSALQALTSMLRKTSVPGIEAKYEKVVHVGHSFGSLLTYAFTNSFPTLSDGIALTGFSLDPEFATLSTLGDNFVAANSLPKWKHLPDGYLVSKGMNSIQTGFFSPEAFDPEVLNAAYNAIEPRTIGETLSQDVIPMQSQFEGPVLVVTGERDFPACGGNCLATVPSIPAKTEDAFVKAASFNVTVVPRTGHGLNFHYSWPITYGVVSNFFDEII

SEQ ID NO: 12394 - DNA, 787 bp, Muscodor strobelii
  misc_feature: SGI EST ID NO. CUFF.29349.0
  misc_feature: Variant of the nucleotide sequence at SEQ ID NO 12392
tgcccttcaagctctgacttcaatgctgcggaaaacctcggtccccggaattgaggccaaatatgagaaagtcgtgcacgtgggacacagcttcgggagtcttctaacatacgccttcacgaattcgtttcccacgctttcagacggaatcgcgctcacggggttcagtttggatccagagtttgctaccttatccactcttggggataacttcgttgcagccaacagcttgccaaagtggaagcacttgccggatggctatttagtcagtaagggaatgaacagcatacagactgggttcttctctccagaggctttcgaccctgaggttttgaatgctgcctacaatgcaatcgaacctcgtacaattggagagacactttcccaagatgtgataccgatgcagagtcagttcgaaggccctgtgcttgttgttacaggagagcgcgattttcccgcctgcggtggcaactgtcttgcgaccgtgccttcaatcccggctaagaccgaagacgcatttgtaaaggcagcgtccttcaatgtcaccgttgtgcctagaaccggccacggacttaatttccactatagctggcccataacctacggggttgtctccaatttcttcgatgagatcatttgaacgacgactaatctcatatggcaagggctagctgcaacttggatggtgggcgacaaacgaatctgagtagtgaatgattcaacatttggcgtagtgctttaaggggttgacggacttgagagatttgatagatacttaagatcttgc

SEQ ID NO: 12395 - DNA, 753 bp, Muscodor strobelii
  misc_feature: SGI cDNA ID NO. 564024
  misc_feature: Encodes the peptide sequence at SEQ ID NO 12396
atgccgcccacatattacacgcctatctatcaagccgacccagtgcccaaatgttccgcaagctggggtctgggctcgatagtctttgttgagagaaatgtcgatccacagagtctcacagtaaagggaacgtttcgaatcatatcgcaagagaaaggagtttcctctggcgacccggaattcaaatatagtacacattctgagtctctccccggggttcccaaccgagtctcccaacagagtgacatgaagccctttcggaaagtgatgctgaacgcggtcaagaaactgcgatctacggaagacccgcgctacaataggaagtggaacgtaagcttttgctggggtgtcgctgattttctcgaagcggatggcgagcccgtcgccccgggcaaccttcgaactgcatgttgcctgttcaccctgtatgatgtcttcgagaacgatatacctcgcgtgccaaccgaatatgatattggacgttgtgctgtggccatttcggaagcaatagggtatatgaagaaggagatgagaatagccgaacagcaagatcttacagaagtgaacttcgcgcttcgtcttggagcatatcattacgaacctgtttctctcgacgataatcaaagaactgtgacgatgaaaagagacaggaagatggagcccgaagagagatacacgatcaactactataatagaatgaccgcaccgattgcgccgaacggttacagaggccatgtatcacctctggtctga

SEQ ID NO: 12396 - protein, 250 aa, Muscodor strobelii
  misc_feature: SGI Peptide ID NO. 564024
MPPTYYTPIYQADPVPKCSASWGLGSIVFVERNVDPQSLTVKGTFRIISQEKGVSSGDPEFKYSTHSESLPGVPNRVSQQSDMKPFRKVMLNAVKKLRSTEDPRYNRKWNVSFCWGVADFLEADGEPVAPGNLRTACCLFTLYDVFENDIPRVPTEYDIGRCAVAISEAIGYMKKEMRIAEQQDLTEVNFALRLGAYHYEPVSLDDNQRTVTMKRDRKMEPEERYTINYYNRMTAPIAPNGYRGHVSPLV

SEQ ID NO: 12397 - DNA, 264 bp, Muscodor strobelii
  misc_feature: SGI EST ID NO. CUFF.29354.0
  misc_feature: Variant of the nucleotide sequence at SEQ ID NO 12395
ctgcatgttgcctgttcaccctgtatgatgtcttcgagaacgatatacctcgcgtgccaaccgaatatgatattggacgttgtgctgtggccatttcggaagcaatagggtatatgaagaaggagatgagaatagccgaacagcaagatcttacagaagtgaacttcgcgcttcgtcttggagcatatcattacgaacctgtttctctcgacgataatcaaagaactgtgacgatgaaaagagacaggaagatggagcccgaag

SEQ ID NO: 12398 - DNA, 2127 bp, Muscodor strobelii
  misc_feature: SGI cDNA ID NO. 564025
  misc_feature: Encodes the peptide sequence at SEQ ID NO 12399
atgtatacaacagcaaattcaactctttgtactacaccaggatgtctcgacgcagccgccaatatccttagcaaccttcatcccaactaccaagcaatcgacccgtgtgaagactttgatctatacgtctgcggcaactatccctcaagatttcaggagcttgggttcgataattccgacgtcttgggaggagagatccagggcgagaataaccgtatactacaaattgtcctgaatgacccaccgggcgctgaagccgatcctgaagatgttgtgctctataatatgatggtacaagactatacagcctgtgcggatgctgtcacgattgctgcaaacgaacttggccagctccctgacatgatatccaaagtgattgagctgttcccagtcgactataactctaacgaaaccctctcagagaagcattatgacagcctggcgtctgccatagtttatcttgcttcgatcggaacctctgtttttggcgatttctggacctaccaagacatgcacgaagactcgacgtataatatcccattctttggcatcttcagtccctccaagattgaccaagcagctggggaggatcccggaatctactatgcgctgaacaggaccttggtagaaggcggcgatgagttcattgcacaactcacgccctatcttccgaagtcagctcaaggagctatatcaaagctgactaagaacctcatcaatttcgtgatgccactcgctgagcttgaagccgcggtctcgacaggactctcctataccaatagtgaatatccgttccaaggcctattcgatcagtcgacgctcgacgaagcctcgaaggcggcgccagcacttgttctagaccgagttatcaactcaattaaaccagatggttacacagttgaccgtatcgctcacccccacaagacgatttatccattgatgtccgaagccatcagcaaacaaagtccggtcacgattcaggcgtttatgcttgcccgacttctcctatcatacggaccaaagacggctgcagtacttgcaacaccggaaggtagcggtgatcgcagtgccgtttgccaacaatatatcgggacaagtcttgcttggattagctctagattctggttggaacgaaagtacagtatgcagactcagaagttcattctaagtttatctgaggagatgcgtgaagcttttctgcaacgcgtcgatgaccatgactggattgcggaggcagataagtcccttatcaaagacaaaattgagcagatgcgactcaacattgggtttcccgagttgccggacgttatgaacgccactgctctcttagactactacgacggtatcaatattacagactcgtggttcgacaatgttctgtcaatcaggcaatggggtttcaagaaggcgtttgctgcgcttacggagcctattgacagacgcgagttcctcctttatggtgtagcatcctacaccgccaactcacgcgcttggcgtgagcatgatgttgcgcatattacttctggcgccattcaagcaccatggtaccacgtcaatgcgactcgctacctgacattcggcacgatcggatacctgacggcccatgagatgacgcacaatcttgataacttcggcatcttgatcagtaatgatcgcaagtatcaagaatggctgtctagcgagacgaaaaatgccttcgatgagcgtaccgaatgtgttatcgaccagtatgatgctattcccgtccgactcggtgatggaacggtgctctaccaacccgataaccgcactgctattcatgttacaggcaacttgacttccacggagaacattgctgacctaggtggcatcaacgtggcttacgaggcatggcagagaacacgaacagattatcctggagagtcacagcgtttacctggcctcgagcagttctcacccgaacagctcttcttcctccaatttggcaacagttggtgtacgacagtcgacgctgcaagtactaaaaatggtctcattgacctgcactcacccaatatggcacgcatatctggagcagttgctaactccaagggctttcgggacgcatttaaatgcaagaagcgcgagccaacctgtgagatgtggtaa

SEQ ID NO: 12399 - protein, 708 aa, Muscodor strobelii
  misc_feature: SGI Peptide ID NO. 564025
  misc_feature (496)..(707): Pfam Id: PF01431 Pfam Desc: Peptidase family M13
  misc_feature (36)..(431): Pfam Id: PF05649 Pfam Desc: Peptidase family M13
  misc_feature (509)..(699): Pfam Id: PF01431 Pfam Desc: Peptidase family M13
  misc_feature (393)..(431): Pfam Id: PF05649 Pfam Desc: Peptidase family M13
  misc_feature (3)..(708): NCBI GI: 261357888 Blast Desc: endothelin-converting enzyme [Verticillium albo-atrum VaMs.102]
  misc_feature (8)..(708): NCBI GI: 156053700 Blast Desc: SS1G_05697 [Sclerotinia sclerotiorum 1980] gi|154703478|gb|EDO03217.1| SS1G_05697 [Sclerotinia sclerotiorum 1980]
  misc_feature (5)..(708): NCBI GI: 171677690 Blast Desc: protein product [Podospora anserina] gi|170936913|emb|CAP61572.1| protein product [Podospora anserina]
  misc_feature (7)..(708): NCBI GI: 256725718 Blast Desc: NECHADRAFT_43284 [Nectria haematococca mpVI 77-13-4]
  misc_feature (3)..(708): NCBI GI: 242779910 Blast Desc: endothelin-converting enzyme [Talaromyces stipitatus ATCC 10500] gi|218719632|gb|EED19051.1| endothelin-converting enzyme [Talaromyces stipitatus ATCC 10500]
  misc_feature (7)..(708): NCBI GI: 189190306 Blast Desc: endothelin-converting enzyme 1 [Pyrenophora tritici-repentis Pt-1C-BFP] gi|187973098|gb|EDU40597.1| endothelin-converting enzyme 1 [Pyrenophora tritici-repentis
  misc_feature (6)..(708): NCBI GI: 171677141 Blast Desc: protein product [Podospora anserina] gi|170936638|emb|CAP61297.1| protein product [Podospora anserina]
  misc_feature (3)..(708): NCBI GI: 212526054 Blast Desc: endothelin-converting enzyme [Penicillium marneffei ATCC 18224] gi|210072582|gb|EEA26669.1| endothelin-converting enzyme [Penicillium marneffei ATCC 18224]
  misc_feature (5)..(708): NCBI GI: 39977517 Blast Desc: MGG_06643 [Magnaporthe grisea 70-15] gi|145013844|gb|EDJ98485.1| MGG_06643 [Magnaporthe grisea 70-15]
  misc_feature (6)..(708): NCBI GI: 169624194 Blast Desc: SNOG_15353 [Phaeosphaeria nodorum SN15] gi|160705132|gb|EAT77286.2| SNOG_15353 [Phaeosphaeria nodorum SN15]
  misc_feature (1)..(708): SWISSPROT Homolog: EC 3.4.24.11 Neprilysin
MYTTANSTLCTTPGCLDAAANILSNLHPNYQAIDPCEDFDLYVCGNYPSRFQELGFDNSDVLGGEIQGENNRILQIVLNDPPGAEADPEDVVLYNMMVQDYTACADAVTIAANELGQLPDMISKVIELFPVDYNSNETLSEKHYDSLASAIVYLASIGTSVFGDFWTYQDMHEDSTYNIPFFGIFSPSKIDQAAGEDPGIYYALNRTLVEGGDEFIAQLTPYLPKSAQGAISKLTKNLINFVMPLAELEAAVSTGLSYTNSEYPFQGLFDQSTLDEASKAAPALVLDRVINSIKPDGYTVDRIAHPHKTIYPLMSEAISKQSPVTIQAFMLARLLLSYGPKTAAVLATPEGSGDRSAVCQQYIGTSLAWISSRFWLERKYSMQTQKFILSLSEEMREAFLQRVDDHDWIAEADKSLIKDKIEQMRLNIGFPELPDVMNATALLDYYDGINITDSWFDNVLSIRQWGFKKAFAALTEPIDRREFLLYGVASYTANSRAWREHDVAHITSGAIQAPWYHVNATRYLTFGTIGYLTAHEMTHNLDNFGILISNDRKYQEWLSSETKNAFDERTECVIDQYDAIPVRLGDGTVLYQPDNRTAIHVTGNLTSTENIADLGGINVAYEAWQRTRTDYPGESQRLPGLEQFSPEQLFFLQFGNSWCTTVDAASTKNGLIDLHSPNMARISGAVANSKGFRDAFKCKKREPTCEMW

SEQ ID NO: 12400 - DNA, 603 bp, Muscodor strobelii
  misc_feature: SGI cDNA ID NO. 564026
  misc_feature: Encodes the peptide sequence at SEQ ID NO 12401
atgacccacaatctgctcttttgcacagccgaggaggctaagcccttggtaccaagaattcttgcagccgaggaggagcagggtatctatccatatgctcttgtcgaatcccgcgaagggttccagccaggacaaccattcaaagacaagttacaagagaatgaaaccttcgaaacggatttcataggagcttcggtcgacgaatgtggaacttggacgttaggaaaagaaggttccaggtttctatatactgaaaccatgcttattgtagacgaacgaagtgcccaggacgagaccgttactttatgggtacatccacatgagctccatgcgccttttctacgccgcaaccaagagcctcaagtctggtaccctttcaggattcactattccaagatttgggaactgctagtcgagtttctagacgagggacggccgcatgagacgtatggggccttgttcagacgcaaagaagagtttaccaatgaaaatgggatttttgattatgataaagcaaccgagagcattctcgcaggagacggaggaatccagtacgaagaccaatactgggatcgagtcaagaaggaagacaaacctgaatag

SEQ ID NO: 12401 - protein, 200 aa, Muscodor strobelii
  misc_feature: SGI Peptide ID NO. 564026
  misc_feature (1)..(181): NCBI GI: 119487618 Blast Desc: NFIA_030770 [Neosartorya fischeri NRRL 181] gi|119410698|gb|EAW20644.1| NFIA_030770 [Neosartorya fischeri NRRL 181]
  misc_feature (1)..(174): NCBI GI: 119480667 Blast Desc: NFIA_084170 [Neosartorya fischeri NRRL 181] gi|119408516|gb|EAW18465.1| NFIA_084170 [Neosartorya fischeri NRRL 181]
  misc_feature (1)..(180): NCBI GI: 119472392 Blast Desc: NFIA_057810 [Neosartorya fischeri NRRL 181] gi|119406480|gb|EAW16431.1| NFIA_057810 [Neosartorya fischeri NRRL 181]
MTHNLLFCTAEEAKPLVPRILAAEEEQGIYPYALVESREGFQPGQPFKDKLQENETFETDFIGASVDECGTWTLGKEGSRFLYTETMLIVDERSAQDETVTLWVHPHELHAPFLRRNQEPQVWYPFRIHYSKIWELLVEFLDEGRPHETYGALFRRKEEFTNENGIFDYDKATESILAGDGGIQYEDQYWDRVKKEDKPE

SEQ ID NO: 12402 - DNA, 1047 bp, Muscodor strobelii
  misc_feature: SGI EST ID NO. CUFF.29370.0
  misc_feature: Variant of the nucleotide sequence at SEQ ID NO 12400
atgcatggagtagcagctagtgcctgtggtacctgtggtgcctgtttccatgagctgcacccctgggctgccgggctaggttcccgtctttggacgcgctctaacacgctggcacactaggtaccccatactaaccgcgcccgtgtatcgtatgagtggcgccgtaaacacagcgcaaatcacctccagaatacttatgtccaacaactcgttctttacactgatcccactcctaggcagtatgacgtcagttagttcttgaattcggcgagtgcgtgacgaatgagtacctaacatttttaccctatcatcctgttatataacgttgtttcacgggacctttctctttgaacattttcacgtgcatttcatcataagactttagaatccgacgtgagagatatgacccacaatctgctcttttgcacagccgaggaggctaagcccttggtaccaagaattcttgcagccgaggaggagcagggtatctatccatatgctcttgtcgaatcccgcgaagggttccagccaggacaaccattcaaagacaagttacaagagaatgaaaccttcgaaacggatttcataggagcttcggtcgacgaatgtggaacttggacgttaggaaaagaaggttccaggtttctatatactgaaaccatgcttattgtagacgaacgaagtgcccaggacgagaccgttactttatgggtacatccacatgagctccatgcgccttttctacgccgcaaccaagagcctcaagtctggtaccctttcaggattcactattccaagatttgggaactgctagtcgagtttctagacgagggacggccgcatgagacgtatggggccttgttcagacgcaaagaagagtttaccaatgaaaatgggatttttgattatgataaagcaaccgagagcattctcgcaggagacggaggaatccagtacgaagaccaatactgggatcgagtcaagaaggaagacaaacctgaatagagcatcgaattcgcttgaatgagtttcggttgctacctgcca

SEQ ID NO: 12403 - DNA, 1287 bp, Muscodor strobelii
  misc_feature: SGI cDNA ID NO. 564027
  misc_feature: Encodes the peptide sequence at SEQ ID NO 12404
atgtcaaacagcgaccctctcgatggccttgatggcattgactggtctagcgcgaaacatgcctacggtcctgcaacagacactcccgatatcttgcgacaggttcagtcaaaggaaaacgacgaaagtcaaattgctctggataccttgttctttagtattttccatcaaggcacgcgttactcgtcatcggccttagctgtgccattcctctacgccctgcttgatgtgaaggatacgcccaatcgaccagatatccaaaacttgctcctccatctggcagtaggatacccctccgggcgcatgccgtcgggtatgaagggtatggcagaatggagaagatacatcaatgaaatacaaacgcccgaattcacggaaagaatggcgcaagagaatactgactggcttgctgcagcccctgatgagaagacacgcgagaggcgtcaaatggagttggatattcagggtggcccaacgaggtttgtgcagtcgaaactcgattctttccgtgcttacgaggctgttcaacgtggcattgacacatcactccgctgtctgcatgatgaagcaattgaagttcgcgaaatgtctgcttttgtgctcgggttctttcccgaaaagtgggaacggattgagccttctcttgctgtcttgatcgagaacgagcaaaatgcttcggttcgcggcactgcaatcatagcacttggcttgctagtaggcacccctgccgaaggatctaaaatagaggttatgaagcgtctggacgatatctttgtacagcacgatggaaatgacttggcccgatggtgtagtgcaattgcgttgcttcttctcggcactgtgaagccggagtgtgtcgaggaagtgattcgaaagctcgctgatccttcgtatctcggaaacaatgagctgaagaatctggacgaggctaggtttcctttcgctgacccaacaatgacttcattggcagcatcagtgctggaggatctcaaaggtagcgagcatccggaggtaacccgagctctcgcaaaaagtctagccagagcaaacggcttaacccctgtgttcatcgcaggagctatgttaaaaacagccttcgatggcagccggcctgacgagatgccacctttcgtcgacttgacagagctacagcagaacgcagtacgatctttattgacggtggatccattcaattggagctttgccaacttcctcgatgttctacgaagtatgggccttcctagtatgaagcacaagctggaggcctacattggacagacagattga

SEQ ID NO: 12404 - protein, 428 aa, Muscodor strobelii
  misc_feature: SGI Peptide ID NO. 564027
  misc_feature (4)..(426): NCBI GI: 256723751 Blast Desc: NECHADRAFT_86738 [Nectria haematococca mpVI 77-13-4]
  misc_feature (1)..(241): NCBI GI: 115491411 Blast Desc: [Aspergillus terreus NIH2624] gi|114197193|gb|EAU38893.1| [Aspergillus terreus NIH2624]
  misc_feature (1)..(425): NCBI GI: 269125676 Blast Desc: PBS lyase HEAT domain protein repeat-containing protein [Thermomonospora curvata DSM 43183] gi|268310634|gb|ACY97008.1| PBS lyase HEAT domain protein protein
  misc_feature (1)..(403): NCBI GI: 238489153 Blast Desc: AFLA_017940 [Aspergillus flavus NRRL3357] gi|220698202|gb|EED54542.1| AFLA_017940 [Aspergillus flavus NRRL3357]
  misc_feature (3)..(425): NCBI GI: 254402152 Blast Desc: conserved [Streptomyces sviceus ATCC 29083] gi|197711628|gb|EDY55662.1| conserved [Streptomyces sviceus ATCC 29083]
  misc_feature (88)..(425): NCBI GI: 269126170 Blast Desc: PBS lyase HEAT domain protein repeat-containing protein [Thermomonospora curvata DSM 43183] gi|268311128|gb|ACY97502.1| PBS lyase HEAT domain protein protein
  misc_feature (1)..(145): NCBI GI: 169763266 Blast Desc: [Aspergillus oryzae RIB40] gi|83770561|dbj|BAE60694.1| protein product [Aspergillus oryzae]
  misc_feature (4)..(96): NCBI GI: 238062557 Blast Desc: MCAG_03523 [Micromonospora sp. ATCC 39149] gi|237884368|gb|EEP73196.1| MCAG_03523 [Micromonospora sp. ATCC 39149]
  misc_feature (7)..(106): NCBI GI: 124002485 Blast Desc: M23134_05188 [Microscilla marina ATCC 23134] gi|123992314|gb|EAY31682.1| M23134_05188 [Microscilla marina ATCC 23134]
  misc_feature (9)..(90): NCBI GI: 282871775 Blast Desc: HEAT domain containing protein [Streptomyces sp. ACT-1] gi|282574720|gb|EFB80151.1| HEAT domain containing protein [Streptomyces sp. ACT-1]
MSNSDPLDGLDGIDWSSAKHAYGPATDTPDILRQVQSKENDESQIALDTLFFSIFHQGTRYSSSALAVPFLYALLDVKDTPNRPDIQNLLLHLAVGYPSGRMPSGMKGMAEWRRYINEIQTPEFTERMAQENTDWLAAAPDEKTRERRQMELDIQGGPTRFVQSKLDSFRAYEAVQRGIDTSLRCLHDEAIEVREMSAFVLGFFPEKWERIEPSLAVLIENEQNASVRGTAIIALGLLVGTPAEGSKIEVMKRLDDIFVQHDGNDLARWCSAIALLLLGTVKPECVEEVIRKLADPSYLGNNELKNLDEARFPFADPTMTSLAASVLEDLKGSEHPEVTRALAKSLARANGLTPVFIAGAMLKTAFDGSRPDEMPPFVDLTELQQNAVRSLLTVDPFNWSFANFLDVLRSMGLPSMKHKLEAYIGQTD

SEQ ID NO: 12405 - DNA, 1390 bp, Muscodor strobelii
  misc_feature: SGI EST ID NO. CUFF.29378.0
  misc_feature: Variant of the nucleotide sequence at SEQ ID NO 12403
cgacgaaagtcaaattgctctggataccttgttctttagtattttccatcaaggcacgcgttactcgtcatcggccttagctgtgccattcctctacgccctgcttgatgtgaaggatacgcccaatcgaccagatatccaaaacttgctcctccatctggcagtaggatacccctccgggcgcatgccgtcgggtatgaagggtatggcagaatggagaagatacatcaatgaaatacaaacgcccgaattcacggaaagaatggcgcaagagaatactgactggcttgctgcagcccctgatgagaagacacgcgagaggcgtcaaatggagttggatattcagggtggcccaacgaggtttgtgcagtcgaaactcgattctttccgtgcttacgaggctgttcaacgtggcattgacacatcactccgctgtctgcatgatgaagcaattgaagttcgcgaaatgtctgcttttgtgctcgggttctttcccgaaaagtgggaacggattgagccttctcttgctgtcttgatcgagaacgagcaaaatgcttcggttcgcggcactgcaatcatagcacttggcttgctagtaggcacccctgccgaaggatctaaaatagaggttatgaagcgtctggacgatatctttgtacagcacgatggaaatgacttggcccgatggtgtagtgcaattgcgttgcttcttctcggcactgtgaagccggagtgtgtcgaggaagtgattcgaaagctcgctgatccttcgtatctcggaaacaatgagctgaagaatctggacgaggctaggtttcctttcgctgacccaacaatgacttcattggcagcatcagtgctggaggatctcaaaggtagcgagcatccggaggtaacccgagctctcgcaaaaagtctagccagagcaaacggcttaacccctgtgttcatcgcaggagctatgttaaaaacagccttcgatggcagccggcctgacgagatgccacctttcgtcgacttgacagagctacagcagaacgcagtacgatctttattgacggtggatccattcaattggagctttgccaacttcctcgatgttctacgaagtatgggccttcctagtatgaagcacaagctggaggcctacattggacagacagattgatcgcagatccgacatgcatgagctcacggaaatgagagattggtgttcgtggaagctcccagaagtgctgtagacgttcatgtaaagagggtaatattgggatgactctgtaactaattcccgaatagaccggcgaaaaagacttatatatgcgcacctcaaaccccgtatcatgcgccagggagcgtatcgtagcacttcaaggtttcagccgaatatgcg

SEQ ID NO: 12406 - DNA, 501 bp, Muscodor strobelii
  misc_feature: SGI cDNA ID NO. 564028
  misc_feature: Encodes the peptide sequence at SEQ ID NO 12407
atggcttcctatactagtatcgtggtcatcattgccattgtgttcaatgtcctcttcgtttctagcaggccgtctctcccgtacattcaccacgccgctagatctgtcaacgactcgcccgccggctttgactccagctgcaacaacaacatggacttctatcaggattacgacaaagcttatttgcgggccaactgtctaagccgtaatcaaactctcacctataccatcttgaacctgaaccactgcatcggcaacaataatggcgagatgatccaacaagccgagggcaatttttcagcgtcgtgtgattgcaatcagttcaagggcccaaatccgacttatctttattgtacttgtgactccgacaccggcggtcaaaacacctacaacgcctttgagctttcggacttcatcggaaattacgacggacaacttagctgcttcgatgcccacggctgctcgcccaccgatgacacttgcacagactggccgctgtag

SEQ ID NO: 12407 - protein, 166 aa, Muscodor strobelii
  misc_feature: SGI Peptide ID NO. 564028
  misc_feature (44)..(148): Pfam Id: PF08881 Pfam Desc: CVNH domain
  misc_feature (78)..(148): Pfam Id: PF08881 Pfam Desc: CVNH domain
  misc_feature (75)..(149): NCBI GI: 171687967 Blast Desc: protein product [Podospora anserina] gi|170943945|emb|CAP69597.1| protein product [Podospora anserina]
MASYTSIVVIIAIVFNVLFVSSRPSLPYIHHAARSVNDSPAGFDSSCNNNMDFYQDYDKAYLRANCLSRNQTLTYTILNLNHCIGNNNGEMIQQAEGNFSASCDCNQFKGPNPTYLYCTCDSDTGGQNTYNAFELSDFIGNYDGQLSCFDAHGCSPTDDTCTDWPL

SEQ ID NO: 12408 - DNA, 4578 bp, Muscodor strobelii
  misc_feature: SGI cDNA ID NO. 564029
  misc_feature: Reduced expression when VOC is produced
  misc_feature: Encodes the peptide sequence at SEQ ID NO 12409
atgaccaccaggccccctctggccatctctcagcggcagcctcagagatcactcagcagctcggggttgtcgcagagacctacaccgcagcgcacgctctcccagcaatacctgccgccctcgccggtgcgcagaaccgagtctttcaccgagcccgccgacgggtgcgatggcgccgggtcgcagtcgcagtcgcacccgcagtgccaggcccaggcccggtatggcacaactccgcggaggggcggctcgaggctcaagctcgagctggccaacgacaacatcatccatgccggcttcgtcgagtccccccaaaaccctgatcccttgtccgccaataaggtcttcaccccgtcccgagtgatgtccatggccgacgcccccgacctgggcgacatgagcccgcacacctcgagggcccagacggttgacggcgagacaaatcctctccccatgccgccccgtcgcgctcgcttcatggcgcccgccaagcggtgccagccacaggccgtcaatacgccggtgaagaaggatgtgcggccgaaacctttcactatcgaagtccctctagaagcacctcggcttgtcaacaagagcaaacaagaccttggtaggaccatgaaacatgacggtactggccaacgggggactaacgagcgtgaaggctacgccgatttcaacccctggcgcggatctcaccccgaggaccagttctcagaccatatcatacgtgtgggctacttcgataaagccccgtcgcaggcaagccaggagaccggctcagcccgcaactccttgttccctgcgctcaaacagaagagcggcttacacacactgtccaatatattcacatctatcttaagccagcgcagacatattggccagatatcctctgcatctactttcaagccgccaccgcgcgtcacgttaaccgataccaagcgggaggtctggctaagagaccttgctaactcggccattcccctgcgccggctgagcaggacaatccctcacggtatacggggtcgcgttcttcttgaccagtgtctcaacaaaaacgtccccacggatcgtgctgtatggctcgcgaaatgcgttggcgcaaacgaaatcagggctttcaagagaaagggcgtgaacaacacatttgtcatgggcggcgaggtgaaatggattcgagactggactctgtgtgtggagcagtttgtcgatgccgttattaacgcattccacgagaacgattggaaatccaaagtcacatatgccatccgcctcgccactcatctgtatgccgagcatcttgtagatcgcgaccattatatggagtggctcgtttctagcattgaatctagtaacgaggcaaaattgcctatgtggttattgatggtacagatctattggaaggatatgctcaaactccgacgacatggtcgccgcctggtggctgcaatggtcagccaccattgttcgatctatgacagcccggatcgcgatattctattgcctctgtcaacccagctcgggatccttgtcgagacgcttctttcgacctgcccggacagcttcgtgtgtccctcgatctggacccgatttcgcgattcgttgcagtcattcctttcgtgctgcaccgagccgaaactcgcggtctttcacatgatcgactcacgtaatgactcgttgaccatttcgcatgtggaaacgcagcctgctgtgcgaagtacgctggtagggcttcttgattgcatgatccgcattccttttcaagatgatattcccgcacagattcgcaaagctacgacgaatagctctgtccttattcgcacgactctcgactggtgcacgtcgctatatcgatacggcgccgcgaaagtatacgctgcagtgaccattcttcgctccctgtcgagcgtcgaaatagatcttactgcggagatcctccacttcctagatgctgactcgctccaagaaactgcacgcaagcatattatatatcatattgtttcagagctagttcggtcgggacatttttcagtgccccagtacatacagtggctcattgctaggggtggtcttattgatacgtctgaagctcaacctgacgggccttgctcgttgaggcttttagtagaaattccgatccacgccttcagcgaatcaatgggcaccctgcgcgggtcactgctccgaagagtcggctactctgttgaggacgaggcgaacgacattgcgactgcgatcagatgtatcaagcacgcactcttcgtgcccctagatcacgatgatccattgctggcgcgaccacccatgactgtcaagaagttgagcaaacggatcggtctcagtagtcgggctctgaaatccgaagtctgctcttggcttgcaaacgaatttgtggaccatctcgcccaccaatatcatttagataaacccgtttttcaaccgacggaacaatcattggacattgttcggacacttttggagactgcccaggattttgccatgctggacagaactttacaaatcatggtccacgcctcgaacgtcgagatacttgcgtactgcgtaaacactatcagcctccatctgccgtgtttcattgcgatgggttcggccaaacctcttttccactctttctacgagcgactcaggatagtgagtatggaacaaggcctcgcggcacgaccactgctagcttctctcgcagcccttgcgcctcgacttccgggctttgatcaaattgcaatacagttacgaaatgaattgattttggcggatcgaagcaatgcggtggatgcctcatcacccttatcggataacatggccaatcaactccaagacgacgaaacggaattgggagaacaaattgaaaagctcacgaactatacgagcgcagacaaaccgactatggagcgtctgtttcataccatcgtgagcaagctgggaggttgctggacaaagggtgatgaccggcaaagaccatactgcatcctgctctctcgcctgcgagttttcgacccacaatacttcgatacattaatgagagactgggtgcaacatatccgcaaactcacgagacgtgcctccatcacgccgattttcccactgcttgttagctccggctgcctttcgctgacaaccctactcgctactgctttgagaaaccagagtcaggggacccagaatcaaccagtcggatcggcttctacctatatgcaagaagtcctcctgatgctcatgaaaccattagctccggatcacatattgacctcagacgactgttatcgatttcgtatcattcaagaacaagcgcgactagaatacgcacgagatgtcatgcccctgattcgcggttcgcttgcagagtatgcttcatcccgacatctgcagcagccccaacctcagccactcgacgacgaaaagttcaagggtctccttctcgagttgttaagagacttgattctcatcgatccaaaggcggcaagtcagacgctgtcgttgaaatgcccggatgcaagattagccactctcatcgaagccctcactaccaaattattagtgcctcatggtggaggcgggcagaaaactttcgaacaggtcttggagcttgcaaacgaatttaccctccctttctgccaagtcaagctctgtctcaacctcgccattcatgactctagcaaccctgaaggcgccgaaaagctccaagcacaattcgaacagctttccgtagccatggacaatgcgatcgaggcggacaacatcatgtggacgggtatgctctcgtgcttgaactctgatattactctccatttgaagaaccgggccgaagccaaatttctagacctctttcgttctctcaaaaacctaccctttgatgagactcaatctcaaagagactttcacaaagcagaaaacttgttgactgttgtggattccgtcatccggggctcgtctgcctctaagtcgcctccgttctccagttctatggcagattgcttaaccgatctgtgggagatccttggatccaccggtgaggactgcgagtcgttgaaaatggaagttttatggcgctggttgccattgttgctctcctatctcgcgctccaagcatcgcagctctcaacagctgctgatcaagccaagcttcaaaattgcgatatccgcgctcgcgttttaatcatacttgctggtcttacattggagcttgataggtatccgacctctaatcttggaccccgtgtttttgatatcgcacttctccttgttgacaatattccggaagaggcccgggtgcaatgtgtccgggcggtcaaagaccatacagtggatcctcgcctgcgatatctgttcagttttactcctgaccctgccgaaaacttcatgctggcacatcgcgaaaagccaccagcaggcatccatgagcgacggatgatggctatgaacctcgccatgggcatgccgccagaaaaacttacgcctttcgcgttcaggcgatgggagatactcaacgagccgacaccaaatgtaggcgagaacgataccagtctcagcctaacattatttgacgctagaaaaatatga

SEQ ID NO: 12409 - protein, 1525 aa, Muscodor strobelii
  misc_feature: SGI Peptide ID NO. 564029
  misc_feature (301)..(364): Pfam Id: PF09497 Pfam Desc: Transcription mediator subunit Med12
  misc_feature (1)..(1525): NCBI GI: 46128519 Blast Desc: FG08637.1 [Gibberella zeae PH-1]
  misc_feature (1)..(1484): NCBI GI: 85116994 Blast Desc: NCU00962 [Neurospora crassa OR74A] gi|74618669|sp|Q7SGG0.1|SRB8_NEUCR RecName: Full=Mediator of RNA polymerase II transcription subunit 12; AltName: Full=Mediator 12
  misc_feature (1)..(1323): NCBI GI: 171684401 Blast Desc: protein product [Podospora anserina] gi|170942161|emb|CAP67813.1| protein product [Podospora anserina]
  misc_feature (1)..(1525): NCBI GI: 145609954 Blast Desc: MGG_02846 [Magnaporthe grisea 70-15] gi|145017338|gb|EDK01701.1| MGG_02846 [Magnaporthe grisea 70-15]
  misc_feature (530)..(1402): NCBI GI: 261353468 Blast Desc: RNA polymerase I activation mediator protein [Verticillium albo-atrum VaMs.102]
  misc_feature (113)..(839): NCBI GI: 116193249 Blast Desc: CHGG_06342 [Chaetomium globosum CBS 148.51] gi|88182255|gb|EAQ89723.1| CHGG_06342 [Chaetomium globosum CBS 148.51]
  misc_feature (178)..(1277): NCBI GI: 225558764 Blast Desc: conserved [Ajellomyces capsulatus G186AR]
  misc_feature (149)..(1525): NCBI GI: 145245403 Blast Desc: An11g10110 [Aspergillus niger] gi|134079669|emb|CAK97095.1| protein product [Aspergillus niger]
  misc_feature (178)..(1217): NCBI GI: 240275158 Blast Desc: RNA polymerase II mediator complex component Srb8 [Ajellomyces capsulatus H143]
  misc_feature (559)..(1525): NCBI GI: 149210253 Blast Desc: MGCH7_ch7g604 [Magnaporthe grisea 70-15] gi|86196559|gb|EAQ71197.1| MGCH7_ch7g604 [Magnaporthe grisea 70-15]
  misc_feature: Useful for introducing or modulating the production of volatile compounds
MTTRPPLAISQRQPQRSLSSSGLSQRPTPQRTLSQQYLPPSPVRRTESFTEPADGCDGAGSQSQSHPQCQAQARYGTTPRRGGSRLKLELANDNIIHAGFVESPQNPDPLSANKVFTPSRVMSMADAPDLGDMSPHTSRAQTVDGETNPLPMPPRRARFMAPAKRCQPQAVNTPVKKDVRPKPFTIEVPLEAPRLVNKSKQDLGRTMKHDGTGQRGTNEREGYADFNPWRGSHPEDQFSDHIIRVGYFDKAPSQASQETGSARNSLFPALKQKSGLHTLSNIFTSILSQRRHIGQISSASTFKPPPRVTLTDTKREVWLRDLANSAIPLRRLSRTIPHGIRGRVLLDQCLNKNVPTDRAVWLAKCVGANEIRAFKRKGVNNTFVMGGEVKWIRDWTLCVEQFVDAVINAFHENDWKSKVTYAIRLATHLYAEHLVDRDHYMEWLVSSIESSNEAKLPMWLLMVQIYWKDMLKLRRHGRRLVAAMVSHHCSIYDSPDRDILLPLSTQLGILVETLLSTCPDSFVCPSIWTRFRDSLQSFLSCCTEPKLAVFHMIDSRNDSLTISHVETQPAVRSTLVGLLDCMIRIPFQDDIPAQIRKATTNSSVLIRTTLDWCTSLYRYGAAKVYAAVTILRSLSSVEIDLTAEILHFLDADSLQETARKHIIYHIVSELVRSGHFSVPQYIQWLIARGGLIDTSEAQPDGPCSLRLLVEIPIHAFSESMGTLRGSLLRRVGYSVEDEANDIATAIRCIKHALFVPLDHDDPLLARPPMTVKKLSKRIGLSSRALKSEVCSWLANEFVDHLAHQYHLDKPVFQPTEQSLDIVRTLLETAQDFAMLDRTLQIMVHASNVEILAYCVNTISLHLPCFIAMGSAKPLFHSFYERLRIVSMEQGLAARPLLASLAALAPRLPGFDQIAIQLRNELILADRSNAVDASSPLSDNMANQLQDDETELGEQIEKLTNYTSADKPTMERLFHTIVSKLGGCWTKGDDRQRPYCILLSRLRVFDPQYFDTLMRDWVQHIRKLTRRASITPIFPLLVSSGCLSLTTLLATALRNQSQGTQNQPVGSASTYMQEVLLMLMKPLAPDHILTSDDCYRFRIIQEQARLEYARDVMPLIRGSLAEYASSRHLQQPQPQPLDDEKFKGLLLELLRDLILIDPKAASQTLSLKCPDARLATLIEALTTKLLVPHGGGGQKTFEQVLELANEFTLPFCQVKLCLNLAIHDSSNPEGAEKLQAQFEQLSVAMDNAIEADNIMWTGMLSCLNSDITLHLKNRAEAKFLDLFRSLKNLPFDETQSQRDFHKAENLLTVVDSVIRGSSASKSPPFSSSMADCLTDLWEILGSTGEDCESLKMEVLWRWLPLLLSYLALQASQLSTAADQAKLQNCDIRARVLIILAGLTLELDRYPTSNLGPRVFDIALLLVDNIPEEARVQCVRAVKDHTVDPRLRYLFSFTPDPAENFMLAHREKPPAGIHERRMMAMNLAMGMPPEKLTPFAFRRWEILNEPTPNVGENDTSLSLTLFDARKI

SEQ ID NO: 12410 - DNA, 7289 bp, Muscodor strobelii
  misc_feature: SGI EST ID NO. CUFF.29612.0
  misc_feature: Variant of the nucleotide sequence at SEQ ID NO 12408
ctggggtcaatatttggcttattacctacgagtcaggcactgattgacctgagcaccaacaatccacggcgcgggtttcagccccgagcccaagcgtcggtgttcattacgtgatgatgaggaaattgtgtttgtccgtccagtctacgccgtaactccccgctggatctataattaccaatctcgacaaattttaacgatccttctctttcggacttacaggatggccggccgtcatcgtcgagtgcctcgtctaagcatgcctgacaaactccgggctcgagcacaagaccgatactagttagatagactgcttaaaggggaatgcaagtcgggttaggccggaagcaccaggacacagactattggagcgagctatgtataatctttccactgggacttgctacagcagagaacggggcgagtgcgatggtgctatattgactagtggtaaggggaatgaaagcgtggtcaggttacaccgggacggtggtccttggaggacgacttgcataatcggtgtctgttggttggtgagtttgcatcatcagctcctcccaccacactaaggtacgggctgcagtgtgtacatgacgatttgctctgcagatgcttgctacatggaggtgtgctagtggctatcatatgatggcgggacgcctatttggtgattaacggtcgtacgtggagacataccatagcacaactattgcccgtcgccatgaggagtattattaagaggatagcccattattaagagggcggaagggtgacttggcagacctgggccaggatgctagaaaatgacagacgacagagaaggtatgggagagagttgcgataaatttggcgctggcgtcggctcgcaccttttctcccgcggttccgatgagatccctaggttctcttctcggactagtgaggcctcgtgatagctgcactccccggccgcgggaatgcgtctttgtcagacaacgacggcccaaacgagcagccagcacaacgtcaacagacacaggcctggctggacttttgcctctttgccgacttctgatcaatcaggttctagaagattgacgataataatccgatagatctcagggcttggacactctcggacgggtgacattccacacgcccctgttggggttccaccgacacacccccctcccttccccttgttgagtcttgaccccagctcgatggtacgtgccgcagcatccaaccaagcgtgaattgcgtgcgaccgcaaccgcttctatctcgtctggcatctgcatcgatctcctttcgcctgtccgcctgtggcctgccgacctgcctgcttctgctcgtactgtaattagtatagcacctaggcggactggctggccttttattagattgttaccgattaccaactcgtgggctcactcgtacgagcagtgacaaccgccggaatcgttagcctgtctccgtatctcactcatgccgcctcttttcgcctttatcacataatccatactcgtacactttgacctcacctctattgctgtccacttcacatgccctccagcctcgattcacttatagatcttcccaaccttcaccccttgcttctctttgctttgccccatgtaacgagtagatatctgtcgagctatgtcactgcttgttgcttggtagggtgttgatcgtcgtcgctgtcggttttgtaacccgaatcttggtaactttgtcactgcgccaagctggctgactctccgggccttggcatctcgcctccaacctaccacatcccatctcgtcctgatacctcagccgatacgcatatcacccgttgctacctgtaccaccaccctcatgacctgcccgtagatctgtctgccacaccagctgctgcacacttgcattccctcaccgagcttcacacgattcaacccacataatccgccaacctattcatcacctagctaccatctgctgcgataaaacaccttcgaatactaattgctcaacacacgtgcccggcattcccttcttcagcctccggatcgctgccctccctggccacgaccgcccacaggcagtccaccgcgacctcggccgcaacctctcacggcctctttccactcgactctgcactctaacgaagatatggcgcacgcaccgccccttgacttgcgatgaccaccaggccccctctggccatctctcagcggcagcctcagagatcactcagcagctcggggttgtcgcagagacctacaccgcagcgcacgctctcccagcaatacctgccgccctcgccggtgcgcagaaccgagtctttcaccgagcccgccgacgggtgcgatggcgccgggtcgcagtcgcagtcgcacccgcagtgccaggcccaggcccggtatggcacaactccgcggaggggcggctcgaggctcaagctcgagctggccaacgacaacatcatccatgccggcttcgtcgagtccccccaaaaccctgatcccttgtccgccaataaggtcttcaccccgtcccgagtgatgtccatggccgacgcccccgacctgggcgacatgagcccgcacacctcgagggcccagacggttgacggcgagacaaatcctctccccatgccgccccgtcgcgctcgcttcatggcgcccgccaagcggtgccagccacaggccgtcaatacgccggtgaagaaggatgtgcggccgaaacctttcactatcgaagtccctctagaagcacctcggcttgtcaacaagagcaaacaagaccttggtaggaccatgaaacatgacggtactggccaacgggggactaacgagcgtgaaggctacgccgatttcaacccctggcgcggatctcaccccgaggaccagttctcagaccatatcatacgtgtgggctacttcgataaagccccgtcgcaggcaagccaggagaccggctcagcccgcaactccttgttccctgcgctcaaacagaagagcggcttacacacactgtccaatatattcacatctatcttaagccagcgcagacatattggccagatatcctctgcatctactttcaagccgccaccgcgcgtcacgttaaccgataccaagcgggaggtctggctaagagaccttgctaactcggccattcccctgcgccggctgagcaggacaatccctcacggtatacggggtcgcgttcttcttgaccagtgtctcaacaaaaacgtccccacggatcgtgctgtatggctcgcgaaatgcgttggcgcaaacgaaatcagggctttcaagagaaagggcgtgaacaacacatttgtcatgggcggcgaggtgaaatggattcgagactggactctgtgtgtggagcagtttgtcgatgccgttattaacgcattccacgagaacgattggaaatccaaagtcacatatgcgtaagttctgttcaattaaattaagtttcgaccggagtgtaagttgaccttttgtagcatccgcctcgccactcatctgtatgccgagcatcttgtagatcgcgaccattatatggagtggctcgtttctagcattgaatctagtaacgaggcaaaattgcctatgtggttattgatggtacagatctattggaaggatatgctcaaactccgacgacatggtcgccgcctggtggctgcaatggtcagccaccattgttcgatctatgacagcccggatcgcgatattctattgcctctgtcaacccagctcgggatccttgtcgagacgcttctttcgacctgcccggacagcttcgtgtgtccctcgatctggacccgatttcgcgattcgttgcagtcattcctttcgtgctgcaccgagccgaaactcgcggtctttcacatgatcgactcacgtaatgactcgttgaccatttcgcatgtggaaacgcagcctgctgtgcgaagtacgctggtagggcttcttgattgcatgatccgcattccttttcaagatgatattcccgcacagattcgcaaagctacgacgaatagctctgtccttattcgcacgactctcgactggtgcacgtcgctatatcgatacggcgccgcgaaagtatacgctgcagtgaccattcttcgctccctgtcgagcgtcgaaatagatcttactgcggagatcctccacttcctagatgctgactcgctccaagaaactgcacgcaagcatattatatatcatattgtttcagagctagttcggtcgggacatttttcagtgccccagtacatacagtggctcattgctaggggtggtcttattgatacgtctgaagctcaacctgacgggccttgctcgttgaggcttttagtagaaattccgatccacgccttcagcgaatcaatgggcaccctgcgcgggtcactgctccgaagagtcggctactctgttgaggacgaggcgaacgacattgcgactgcgatcagatgtatcaagcacgcactcttcgtgcccctagatcacgatgatccattgctggcgcgaccacccatgactgtcaagaagttgagcaaacggatcggtctcagtagtcgggctctgaaatccgaagtctgctcttggcttgcaaacgaatttgtggaccatctcgcccaccaatatcatttagataaacccgtttttcaaccgacggaacaatcattggacattgttcggacacttttggagactgcccaggattttgccatgctggacagaactttacaaatcatggtccacgcctcgaacgtcgagatacttgcgtactgcgtaaacactatcagcctccatctgccgtgtttcattgcgatgggttcggccaaacctcttttccactctttctacgagcgactcaggatagtgagtatggaacaaggcctcgcggcacgaccactgctagcttctctcgcagcccttgcgcctcgacttccgggctttgatcaaattgcaatacagttacgaaatgaattgattttggcggatcgaagcaatgcggtggatgcctcatcacccttatcggataacatggccaatcaactccaagacgacgaaacggaattgggagaacaaattgaaaagctcacgaactatacgagcgcagacaaaccgactatggagcgtctgtttcataccatcgtgagcaagctgggaggttgctggacaaagggtgatgaccggcaaagaccatactgcatcctgctctctcgcctgcgagttttcgacccacaatacttcgatacattaatgagagactgggtgcaacatatccgcaaactcacgagacgtgcctccatcacgccgattttcccactgcttgttagctccggctgcctttcgctgacaaccctactcgctactgctttgagaaaccagagtcaggggacccagaatcaaccagtcggatcggcttctacctatatgcaagaagtcctcctgatgctcatgaaaccattagctccggatcacatattgacctcagacgactgttatcgatttcgtatcattcaagaacaagcgcgactagaatacgcacgagatgtcatgcccctgattcgcggttcgcttgcagagtatgcttcatcccgacatctgcagcagccccaacctcagccactcgacgacgaaaagttcaagggtctccttctcgagttgttaagagacttgattctcatcgatccaaaggcggcaagtcagacgctgtcgttgaaatgcccggatgcaagattagccactctcatcgaagccctcactaccaaattattagtgcctcatggtggaggcgggcagaaaactttcgaacaggtcttggagcttgcaaacgaatttaccctccctttctgccaagtcaagctctgtctcaacctcgccattcatgactctagcaaccctgaaggcgccgaaaagctccaagcacaattcgaacagctttccgtagccatggacaatgcgatcgaggcggacaacatcatgtggacgggtatgctctcgtgcttgaactctgatattactctccatttgaagaaccgggccgaagccaaatttctagacctctttcgttctctcaaaaacctaccctttgatgagactcaatctcaaagagactttcacaaagcagaaaacttgttgactgttgtggattccgtcatccggggctcgtctgcctctaagtcgcctccgttctccagttctatggcagattgcttaaccgatctgtgggagatccttggatccaccggtgaggactgcgagtcgttgaaaatggaagttttatggcgctggttgccattgttgctctcctatctcgcgctccaagcatcgcagctctcaacagctgctgatcaagccaagcttcaaaattgcgatatccgcgctcgcgttttaatcatacttgctggtcttacattggagcttgataggtatccgacctctaatcttggaccccgtgtttttgatatcgcacttctccttgttgacaatattccggaagaggcccgggtgcaatgtgtccgggcggtcaaagaccatacagtggatcctcgcctgcgatatctgttcagttttactcctgaccctgccgaaaacttcatgctggcacatcgcgaaaagccaccagcaggcatccatgagcgacggatgatggctatgaacctcgccatgggcatgccgccagaaaaacttacgcctttcgcgttcaggcgatgggagatactcaacgagccgacaccaaatgtaggcgagaacgataccagtctcagcctaacattatttgacgctagaaaaatatgatacatcagcgtcgtcacccaatctatattattacacttggaagagcttcaacttcctagcgattcgccatgacattgggtaatgctatatcctaatcatatttaaatcttatacagaggatttgtagcatatcggagcgttgcatattgctttttgcatcgttcttcattggacttttcttttgtcttgtttacaataccaaggggcgactggaaaggggcatcggagcgtggaatggttttgaaattatggtgttgcataggggtgttatatcatagcatggttgaaatggttatcatcgactcataccttcatgtcatataaattatcgtggcgagctgcttagaggcagaggaattagaagagaggggcgctaggtgtgcatcaatacccattccattactttcaacaaccttacagtgcctaaaatggcgtttttctgtgacagttgcatttaagtctaaacgaaccgctggttatagatacgtg

SEQ ID NO: 12411 - DNA, 318 bp, Muscodor strobelii
  misc_feature: SGI cDNA ID NO. 564030
  misc_feature: Reduced expression when VOC is produced
  misc_feature: Encodes the peptide sequence at SEQ ID NO 12412
atgtctaccaagaaggacatgcgccgacctgatctggtcgtgccctaccaggagcccccgaagaccaccgatgccgtcgagttctcctccaccctttcctcgacgctgcccatggctgccatcttcacacgcaacaagtttatcggatgggcgtctctagtattcagcatacaaagctggctgggcgagagcgaggccacgacggccaacacaagcactccgggatacttcactgtcggcatgtcttttatggctctgctcgctacctacctccccatcttccttcccacccctggaaagatgcccggcaccgcgtag

SEQ ID NO: 12412 - protein, 105 aa, Muscodor strobelii
  misc_feature: SGI Peptide ID NO. 564030
  misc_feature (2)..(104): NCBI GI: 116193247 Blast Desc: CHGG_06341 [Chaetomium globosum CBS 148.51] gi|88182254|gb|EAQ89722.1| CHGG_06341 [Chaetomium globosum CBS 148.51]
  misc_feature (1)..(96): NCBI GI: 145609952 Blast Desc: MGG_02847 [Magnaporthe grisea 70-15] gi|145017337|gb|EDK01700.1| MGG_02847 [Magnaporthe grisea 70-15]
  misc_feature (1)..(99): NCBI GI: 256733480 Blast Desc: NECHADRAFT_102472 [Nectria haematococca mpVI 77-13-4]
  misc_feature (1)..(90): NCBI GI: 85117646 Blast Desc: NCU03193 [Neurospora crassa OR74A] gi|28927100|gb|EAA36057.1| [Neurospora crassa OR74A]
  misc_feature (1)..(105): NCBI GI: 171684399 Blast Desc: protein product [Podospora anserina] gi|170942160|emb|CAP67812.1| protein product [Podospora anserina]
  misc_feature (1)..(94): NCBI GI: 149210255 Blast Desc: MGCH7_ch7g605 [Magnaporthe grisea 70-15] gi|86196560|gb|EAQ71198.1| MGCH7_ch7g605 [Magnaporthe grisea 70-15]
  misc_feature (1)..(100): NCBI GI: 226279262 Blast Desc: PAAG_05875 [Paracoccidioides brasiliensis Pb01]
  misc_feature (2)..(104): NCBI GI: 189202652 Blast Desc: PTRG_07330 [Pyrenophora tritici-repentis Pt-1C-BFP] gi|187984761|gb|EDU50249.1| PTRG_07330 [Pyrenophora tritici-repentis Pt-1C-BFP]
  misc_feature (1)..(100): NCBI GI: 240275154 Blast Desc: [Ajellomyces capsulatus H143]
  misc_feature (1)..(95): NCBI GI: 154291689 Blast Desc: BC1G_15135 [Botryotinia fuckeliana B05.10] gi|150846635|gb|EDN21828.1| BC1G_15135 [Botryotinia fuckeliana B05.10]
  misc_feature: Useful for introducing or modulating the production of volatile compounds
MSTKKDMRRPDLVVPYQEPPKTTDAVEFSSTLSSTLPMAAIFTRNKFIGWASLVFSIQSWLGESEATTANTSTPGYFTVGMSFMALLATYLPIFLPTPGKMPGTA

SEQ ID NO: 12413 - DNA, 1292 bp, Muscodor strobelii
  misc_feature: SGI EST ID NO. CUFF.29397.0
  misc_feature: Variant of the nucleotide sequence at SEQ ID NO 12411
tgacttcgcgtattgatggccatcactgcgatcaacgagcatcatcaccgaaatcgcccgcgcctacggtagccccagacatcttgtcgcagtcactccttgattgacctcctactgcacacgacgagcaaaatgtctaccaagaaggacatgcgccgacctgatctggtcgtgccctaccaggagcccccgaagaccaccgatgccgtcgagttctcctccaccctttcctcgacgctgcccatggctgccatcttcacacgcaacaagtttatcggatgggcgtctctagtattcagcatacaaagctggctgggcgagagcgaggccacgacggccaacacaagcactccgggatacttcactgtcggcatgtcttttatggctctgctcgctacctacctccccatcttccttcccacccctggaaagatgcccggcaccgcgtagattccgactccgacatcgactctgtaatgaaacgatatatactatagatgcgcgcaacgcttgtgcatctggcgatttcgcgatacatcggtggcttaggaagaggcatcgatggtgcgcaataacatgacgtcgcgatttaggagacgatcatacgctgataagagcacgaagctaggccgagacgccgagacggcgcaatgatagcctgttgtaagatccgataccattaataagcaaaacatcacctggtaaaattaatcgacggcgcaatcaggcctgccaagtcatatttacagagtgactttgttttcagtcttaaatcaactagatttaaaattgctcatagagggcgtggtcatacgaaagacttataactgtcatagtttcgtctgggctattacgcagtccaacacgctcccatatgcagtgaaactcaccttcacttaaaagtgaacgttacaggctgaacatgcaaacaagtgtcgtttctagctgcgcatcgcctaattgtaatagtctcgaggcgaggaggcgacgaatgtcgtaaaacggactgaaagctcctaatccccacaaataacgagagcgcgacgcagactcattactttctatgacgacatccaagaatcgcgccacgataatgcgaacccaatacgtttttgttcaattctaatgtttagctgagtccgatgtatttaatatgaagagcggttaacaaagagaggggcagttgctatgtacataagttggtcttcgttgatttagatgtagcgaactaatgctgttgatctcctcatttgctaagattcccaatatagtcgcatacccttcaagatttc

SEQ ID NO: 12414 - DNA, 1221 bp, Muscodor strobelii
  misc_feature: SGI cDNA ID NO. 564031
  misc_feature: Encodes the peptide sequence at SEQ ID NO 12415
atgtctggtcattcgctggtattccagctttcaggaacgtgcaacgaatacccatggggcaagaaggggcaagattcactcgccgctcgcctctgcgctcagacagagggaaccggtttccagatcgaggatgggaaattctattccgagatgtggtttggcgattatcctgattttcctgctcgtaagctagagactggagaattgctagcagatgtcctcaagcaggaccagaagaggttattcggcgcgaaagtgattgagaatttcgacgcacagctgccgttcttgccgaagatcttatcaatcgcaaaagccttgcctttgcagctccatccaaataaggagctggctgcgaaactccacgccaaggacccagacaatttcaccgatcccaaccacaagcctgagatcgccgtagctctgtcgaaatttgaggtctttgcaggattcaagcctttatctgctattgcatcactattcaagctacagccacttcgtaaattcgttcctggcgaccaggaaacatggaccgatgagactctgagagatgtcaccagaaatctactgaagagtgatcttgagacggttaaggaagtgcagactgcgctggcggaaattccccgagacgattttggcgacgcggcatacgtacttgatctcctgccgcggttgcaagatcagtacgggccagaagatgccggtagcttggtggcgctattgtgcatgaactttttcgttttcgaggcgggcgatgctgtatggattcctgcagatggcattcatgcgtatctttccggtgacatcgttgagtgtatggcgagatcaaataatgtgctgaatgtcggcttctgtccaccagcggaccgcaacaacgtcgatatgtttgccaacacgttaacattcaagtcgcatagtaaagaagacgtcatacttcccagcgaaaagacgcaaaaaggcaagaaagggaagacagtggtttatcggccgccaatgagcgagtttgacatgttgaagacggatctagcagcgggcgatagtgaagaactggttcctagtgaaggacctggggtcatgatcgtgacgaagggaaagggtgtaatgaaagctcaaggagaggattttgagttgagagagggctggatctttttcgtcgctcctggggttgaggtgcggtgggagagcgacgagggtattcagatttatatggctgttatctag

SEQ ID NO: 12415 - protein, 406 aa, Muscodor strobelii
  misc_feature: SGI Peptide ID NO. 564031
  misc_feature (7)..(373): Pfam Id: PF01238 Pfam Desc: Phosphomannose isomerase type I
  misc_feature (7)..(158): Pfam Id: PF01238 Pfam Desc: Phosphomannose isomerase type I
  misc_feature (221)..(373): Pfam Id: PF01238 Pfam Desc: Phosphomannose isomerase type I
  misc_feature (7)..(406): NCBI GI: 85093719 Blast Desc: NCU02322 [Neurospora crassa OR74A] gi|28921200|gb|EAA30512.1| [Neurospora crassa OR74A]
  misc_feature (1)..(406): NCBI GI: 171678493 Blast Desc: protein product [Podospora anserina] gi|170937316|emb|CAP61973.1| protein product [Podospora anserina]
  misc_feature (1)..(406): NCBI GI: 261359868 Blast Desc: mannose-6-phosphate isomerase [Verticillium albo-atrum VaMs.102]
  misc_feature (1)..(345): NCBI GI: 116204357 Blast Desc: CHGG_10062 [Chaetomium globosum CBS 148.51] gi|88176190|gb|EAQ83658.1| CHGG_10062 [Chaetomium globosum CBS 148.51]
  misc_feature (7)..(406): NCBI GI: 189200164 Blast Desc: mannose-6-phosphate isomerase [Pyrenophora tritici-repentis Pt-1C-BFP] gi|187983518|gb|EDU49006.1| mannose-6-phosphate isomerase [Pyrenophora tritici-repentis
  misc_feature (1)..(404): NCBI GI: 154290333 Blast Desc: BC1G_15797 [Botryotinia fuckeliana B05.10] gi|150847781|gb|EDN22974.1| BC1G_15797 [Botryotinia fuckeliana B05.10]
  misc_feature (1)..(404): NCBI GI: 156044560 Blast Desc: SS1G_10384 [Sclerotinia sclerotiorum 1980] gi|154694772|gb|EDN94510.1| SS1G_10384 [Sclerotinia sclerotiorum 1980]
  misc_feature (7)..(402): NCBI GI: 159125103 Blast Desc: mannose-6-phosphate isomerase, class I [Aspergillus fumigatus A1163]
  misc_feature (7)..(402): NCBI GI: 119500846 Blast Desc: mannose-6-phosphate isomerase, class I [Neosartorya fischeri NRRL 181] gi|119415345|gb|EAW25283.1| mannose-6-phosphate isomerase, class I [Neosartorya fischeri NRRL
  misc_feature (7)..(402): NCBI GI: 70994328 Blast Desc: mannose-6-phosphate isomerase, class I [Aspergillus fumigatus Af293] gi|66849618|gb|EAL89946.1| mannose-6-phosphate isomerase, class I [Aspergillus fumigatus Af293]
  misc_feature (1)..(404): SWISSPROT Homolog: EC 5.3.1.8 Mannose-6-phosphate isomerase
MSGHSLVFQLSGTCNEYPWGKKGQDSLAARLCAQTEGTGFQIEDGKFYSEMWFGDYPDFPARKLETGELLADVLKQDQKRLFGAKVIENFDAQLPFLPKILSIAKALPLQLHPNKELAAKLHAKDPDNFTDPNHKPEIAVALSKFEVFAGFKPLSAIASLFKLQPLRKFVPGDQETWTDETLRDVTRNLLKSDLETVKEVQTALAEIPRDDFGDAAYVLDLLPRLQDQYGPEDAGSLVALLCMNFFVFEAGDAVWIPADGIHAYLSGDIVECMARSNNVLNVGFCPPADRNNVDMFANTLTFKSHSKEDVILPSEKTQKGKKGKTVVYRPPMSEFDMLKTDLAAGDSEELVPSEGPGVMIVTKGKGVMKAQGEDFELREGWIFFVAPGVEVRWESDEGIQIYMAVI

SEQ ID NO: 12416 - DNA, 1353 bp, Muscodor strobelii
  misc_feature: SGI cDNA ID NO. 564032
  misc_feature: Encodes the peptide sequence at SEQ ID NO 12417
atgtatcgtctatacgctgagtcggccgtctgtattgtgtatcttcaggatgtcatttcgcctgacactgacaccatcagcaaaagcgaatggtttcagagagggtggacgctacaagagctcatagcaccaggagcaatcaaattctataacaagaattggcgcttcttgggggacaaacatgatctcatagatgtcctcgtaagaactactggtatccctaccaatgtattgtacaactgggtacatcctcagagctactccattgcgcagcgcatgtcgtgggctgctggacggactaccgagagagttgaagatcgtgcttatagcttgatgggcttattcgatgtcaacatgccgcttatatacggcgaacgcgaacgcgctttcacacgtttgcaggaacagatcatagccagatcaacagacgaatcgatattcgcatgggaccttgatcttattgagggttcaacaagagacgccaaagaagtcggctgtggcttgctagctacctcgcccgcatgctttttgaggtgcggtgatgttgtgggccacggaaatacgcgaggattccagataaatcagtttggtatctccattacgctcccttccatgctgtacagccttgggatctacatttgtacactcagagccagtagagacccgctctcaacacacaagcactgcgctatttttcttgctaaaagcccttatctggactcgtatacgcgaataagcaacctagacggtcagagtgttatgatgagtgctctgaatgatacagtcgaaatgagcatcacagttccgctaagaccgatgaataaacccaaacagcttttctcgggtatttggctacgaagcctcgatatccctacggataagttctttgccaatgtagtgaatccagagcaaaatcagcgcttcatgctgatggacggccagcaggggttagtgtataccgtggttctagaagataaccaacggctagaacccagaacatggatatatctaggattcgaccgcatgagtcggcccatctgtctaatgaatatcaaagcgcaaaataacttttgggaagagaaaatgttatctaggcacaacgggctattcggagacccaatggactctcggaacagcgacagcgggcttgatatcttcgtcgaatcgtattccaaaaacaaagtctacaaagtatctgcttcaattgagctagttcccgacaagattgagttggaaaatggaaatgataaagcgatggtatacgcagctgatatctttgtaacctggctctgggagccggcgactgctgagaatgattctgattcatcttctacttgtggctgtttgtgctag

SEQ ID NO: 12417 - protein, 450 aa, Muscodor strobelii
  misc_feature: SGI Peptide ID NO. 564032
  misc_feature (23)..(40): Pfam Id: PF06985 Pfam Desc: Heterokaryon incompatibility protein (HET)
  misc_feature (1)..(347): NCBI GI: 238841528 Blast Desc: HET domain-containing protein [Microsporum canis CBS 113480]
  misc_feature (1)..(346): NCBI GI: 121715886 Blast Desc: HET domain protein [Aspergillus clavatus NRRL 1] gi|119403709|gb|EAW14126.1| HET domain protein [Aspergillus clavatus NRRL 1]
  misc_feature (1)..(346): NCBI GI: 239611724 Blast Desc: HET domain-containing protein [Ajellomyces dermatitidis ER-3]
  misc_feature (1)..(346): NCBI GI: 261201308 Blast Desc: HET domain-containing protein [Ajellomyces dermatitidis SLH14081] gi|239592113|gb|EEQ74694.1| HET domain-containing protein [Ajellomyces dermatitidis SLH14081]
  misc_feature (1)..(346): NCBI GI: 119481395 Blast Desc: HET domain protein [Neosartorya fischeri NRRL 181] gi|119408880|gb|EAW18829.1| HET domain protein [Neosartorya fischeri NRRL 181]
  misc_feature (1)..(346): NCBI GI: 71001840 Blast Desc: HET domain protein [Aspergillus fumigatus Af293] gi|66853239|gb|EAL93563.1| HET domain protein [Aspergillus fumigatus Af293] gi|159129660|gb|EDP54774.1| HET domain protein
  misc_feature (1)..(288): NCBI GI: 256720502 Blast Desc: NECHADRAFT_55867 [Nectria haematococca mpVI 77-13-4]
  misc_feature (1)..(199): NCBI GI: 145235123 Blast Desc: An03g03270 [Aspergillus niger] gi|134057890|emb|CAK38231.1| protein product [Aspergillus niger]
  misc_feature (1)..(208): NCBI GI: 116197286 Blast Desc: CHGG_05241 [Chaetomium globosum CBS 148.51] gi|88181154|gb|EAQ88622.1| CHGG_05241 [Chaetomium globosum CBS 148.51]
  misc_feature (1)..(185): NCBI GI: 145246214 Blast Desc: An12g02770 [Aspergillus niger] gi|134080070|emb|CAK41116.1| protein product [Aspergillus niger]
MYRLYAESAVCIVYLQDVISPDTDTISKSEWFQRGWTLQELIAPGAIKFYNKNWRFLGDKHDLIDVLVRTTGIPTNVLYNWVHPQSYSIAQRMSWAAGRTTERVEDRAYSLMGLFDVNMPLIYGERERAFTRLQEQIIARSTDESIFAWDLDLIEGSTRDAKEVGCGLLATSPACFLRCGDVVGHGNTRGFQINQFGISITLPSMLYSLGIYICTLRASRDPLSTHKHCAIFLAKSPYLDSYTRISNLDGQSVMMSALNDTVEMSITVPLRPMNKPKQLFSGIWLRSLDIPTDKFFANVVNPEQNQRFMLMDGQQGLVYTVVLEDNQRLEPRTWIYLGFDRMSRPICLMNIKAQNNFWEEKMLSRHNGLFGDPMDSRNSDSGLDIFVESYSKNKVYKVSASIELVPDKIELENGNDKAMVYAADIFVTWLWEPATAENDSDSSSTCGCLC

SEQ ID NO: 12418 - DNA, 1625 bp, Muscodor strobelii
  misc_feature: SGI EST ID NO. CUFF.29409.0
  misc_feature: Variant of the nucleotide sequence at SEQ ID NO 12416
tcttattctagtaagtagctgttacaatgatagtgtactggtctgttcgtttgataattcacggtatcctattgaacagtttgtttgtcacactaacgcggtacaatttctaccaatagaagtgaatcaattaactccatgtatcgtctatacgctgagtcggccgtctgtattgtgtatcttcaggatgtcatttcgcctgacactgacaccatcagcaaaagcgaatggtttcagagagggtggacgctacaagagctcatagcaccaggagcaatcaaattctataacaagaattggcgcttcttgggggacaaacatgatctcatagatgtcctcgtaagaactactggtatccctaccaatgtattgtacaactgggtacatcctcagagctactccattgcgcagcgcatgtcgtgggctgctggacggactaccgagagagttgaagatcgtgcttatagcttgatgggcttattcgatgtcaacatgccgcttatatacggcgaacgcgaacgcgctttcacacgtttgcaggaacagatcatagccagatcaacagacgaatcgatattcgcatgggaccttgatcttattgagggttcaacaagagacgccaaagaagtcggctgtggcttgctagctacctcgcccgcatgctttttgaggtgcggtgatgttgtgggccacggaaatacgcgaggattccagataaatcagtttggtatctccattacgctcccttccatgctgtacagccttgggatctacatttgtacactcagagccagtagagacccgctctcaacacacaagcactgcgctatttttcttgctaaaagcccttatctggactcgtatacgcgaataagcaacctagacggtcagagtgttatgatgagtgctctgaatgatacagtcgaaatgagcatcacagttccgctaagaccgatgaataaacccaaacagcttttctcgggtatttggctacgaagcctcgatatccctacggataagttctttgccaatgtagtgaatccagagcaaaatcagcgcttcatgctgatggacggccagcaggggttagtgtataccgtggttctagaagataaccaacggctagaacccagaacatggatatatctaggattcgaccgcatgagtcggcccatctgtctaatgaatatcaaagcgcaaaataacttttgggaagagaaaatgttatctaggcacaacgggctattcggagacccaatggactctcggaacagcgacagcgggcttgatatcttcgtcgaatcgtattccaaaaacaaagtctacaaagtatctgcttcaattgagctagttcccgacaagattgagttggaaaatggaaatgataaagcgatggtatacgcagctgatatctttgtaacctggctctgggagccggcgactgctgagaatgattctgattcatcttctacttgtggctgtttgtgctaggagagcattcaatgtcacacatgtttgaagagactaacgctccgagtatgaacatagggcaaacctcgagctcatgtctgaaactttgatgtacaatctattgaatctagattgataccacaatatgagatgcg

SEQ ID NO: 12419 - DNA, 624 bp, Muscodor strobelii
  misc_feature: SGI cDNA ID NO. 564033
  misc_feature: Encodes the peptide sequence at SEQ ID NO 12420
atgtccggctggccagagatactcagcggccttccggcaagctggggcaaagatagccaagtcaccgtcgtcaataatgtgttcacgccccatcacgggaccgatatttgggactgggtcgaatttagcattgttcgacaagagaagggatgtctatctggctcacacaccgactatagcgaggagtccgacgggagccgtagatcagccgcacagatctcacaagacaacgataccaatgagtggcgacacatgcttgaccaactggcacagcgcttgaaaaacgagtacaacataagttactgcctgtcgaaaatcaaaatcgacagcagcaacggtgtcatactagagaaccctttatatctaccatgctggcttgtcactctgtatctcaccacggaagattatacgacatacatcgtacttcaagaggttgagcggaccattgaaaacgcctatgccactatgcgcaatagagataaacccatgaaattttcgttcgcattgagaatcatctatgcgactgcggccatggctgtgcctgcggacaggtcaaatcaagtgattgaggttccagcattggctgtctttggggcagaaatgggcggtttggtagagttctag

SEQ ID NO: 12420 - protein, 207 aa, Muscodor strobelii
  misc_feature: SGI Peptide ID NO. 564033
MSGWPEILSGLPASWGKDSQVTVVNNVFTPHHGTDIWDWVEFSIVRQEKGCLSGSHTDYSEESDGSRRSAAQISQDNDTNEWRHMLDQLAQRLKNEYNISYCLSKIKIDSSNGVILENPLYLPCWLVTLYLTTEDYTTYIVLQEVERTIENAYATMRNRDKPMKFSFALRIIYATAAMAVPADRSNQVIEVPALAVFGAEMGGLVEF

SEQ ID NO: 12421 - DNA, 636 bp, Muscodor strobelii
  misc_feature: SGI EST ID NO. CUFF.29412.0
  misc_feature: Variant of the nucleotide sequence at SEQ ID NO 12419
ttgaaaacgcctatgccactatgcgcaatagagataaacccatgaaattttcgttcgcattgagaatcatctatgcgactgcggccatggctgtgcctgcggacaggtcaaatcaagtgattgaggttccagcattggctgtctttggggcagaaatgggcggtttggtagagttctagggactttcgcggacgttcatgggggattcttttcgagtctcttctctgttgtcgtttgaagttttcatatagattgtgtttagtttaggttttgtttgacgctgatactacctaatctagccggcgggaaaggatgcagtagactgaccaggtagcaatcgtattatctctgacgcggcctttacagttctcttgtagcgcatagtcatccttggtgatgccgcagatctatcatgtgacgacgatgtcttttctctgtcgctgtagcggatgaggtccggttggagagtgagaagggaacgcaggcttacatggctgtcacctaacaagctgcaaactatgtcacgtgtaatcaacatgggcggctttaaattgccacttcatcatttgccatgtgacattggtcctatcattcacctgaatttctttgtccctgttgttgtgtaacagttgtggg

SEQ ID NO: 12422 - DNA, 918 bp, Muscodor strobelii
  misc_feature: SGI cDNA ID NO. 564034
  misc_feature: Encodes the peptide sequence at SEQ ID NO 12423
atggaggcgagtggatctgcatcacctacctacccaattatggacaccatgccgacctcggttttgggcgcggatccctttgtgtggaacaacccccatcagtgccccccgccggtatcaccaggccgggtgatcccgtgtctctttttctacgcgcttgacaaacagcaagaagtcagactaagctgtcacgttatgaccgccaagactttgaccagaggcagcatgactctttcaatcgatacaccgagcccggaggcagctcctacagtgcaacaggatgcggagatactatatgaatatcaccaacttcacatgaccatcgatcagagtgtcaaggtcgatgccatcttctgtttgtgcagcctagatcttcgcgtcgcagaacgcgctgctcaactttttcttgatggccacggtggatatctcatcttctctggcggctctggaagtctcactcaggatcgctttgaaaaacccgaggctcagctctttgctgatgttgctcttaagatgggtgtgcccggggaacggcttattcttgaaccaaattccaccaacaccggcgagaatgttcgcttcactcacaagctgctacaagaaaagggtctatttttgtcttccttcctcctcgttcagaaaccgtacatggagcggcgaacatatgctactttcaaaaagcaatggcccgatagcaacagcaccgtaatatttgtcacctcaccccgcctctcttgggaaaattatcctaaccacgacaatcccattgacctcgtgatcaacattgctgtcggtgatctcatacgcctcaaagattacccggcaaaaggttatcaaataccacaggatattccagatatggtctggatggctgcccaacgactgattcaagcaggatatattgatcatctaccctaa

SEQ ID NO: 12423 - protein, 305 aa, Muscodor strobelii
  misc_feature: SGI Peptide ID NO. 564034
  misc_feature (113)..(270): Pfam Id: PF02698 Pfam Desc: DUF218 domain
  misc_feature (89)..(305): NCBI GI: 261359310 Blast Desc: conserved [Verticillium albo-atrum VaMs.102]
  misc_feature (94)..(305): NCBI GI: 39942836 Blast Desc: MGG_03498 [Magnaporthe grisea 70-15] gi|145009948|gb|EDJ94604.1| MGG_03498 [Magnaporthe grisea 70-15]
  misc_feature (90)..(300): NCBI GI: 148927862 Blast Desc: protein of function DUF218 [candidate division TM7 genomosp. GTL1] gi|147886790|gb|EDK72342.1| protein of function DUF218 [candidate division TM7 genomosp. GTL1]
  misc_feature (90)..(300): NCBI GI: 148927289 Blast Desc: protein of function DUF218 [candidate division TM7 genomosp. GTL1] gi|147887295|gb|EDK72751.1| protein of function DUF218 [candidate division TM7 genomosp. GTL1]
  misc_feature (95)..(304): NCBI GI: 54302360 Blast Desc: PBPRB0680 [Photobacterium profundum SS9] gi|46915782|emb|CAG22553.1| [Photobacterium profundum SS9]
  misc_feature (86)..(304): NCBI GI: 284038771 Blast Desc: protein of function DUF218 [Spirosoma linguale DSM 74] gi|283818064|gb|ADB39902.1| protein of function DUF218 [Spirosoma linguale DSM 74]
  misc_feature (95)..(304): NCBI GI: 90577673 Blast Desc: VAS14_11519 [Vibrio angustum S14] gi|90440759|gb|EAS65939.1| VAS14_11519 [Vibrio angustum S14]
  misc_feature (95)..(304): NCBI GI: 90414034 Blast Desc: P3TCK_06857 [Photobacterium profundum 3TCK] gi|90324956|gb|EAS41477.1| P3TCK_06857 [Photobacterium profundum 3TCK]
  misc_feature (95)..(304): NCBI GI: 89076218 Blast Desc: SKA34_04145 [Photobacterium sp. SKA34] gi|89048104|gb|EAR53690.1| SKA34_04145 [Photobacterium sp. SKA34]
  misc_feature (88)..(304): NCBI GI: 197337877 Blast Desc: VFMJ11_A0934 [Vibrio fischeri MJ11] gi|197315129|gb|ACH64578.1| conserved [Vibrio fischeri MJ11]
MEASGSASPTYPIMDTMPTSVLGADPFVWNNPHQCPPPVSPGRVIPCLFFYALDKQQEVRLSCHVMTAKTLTRGSMTLSIDTPSPEAAPTVQQDAEILYEYHQLHMTIDQSVKVDAIFCLCSLDLRVAERAAQLFLDGHGGYLIFSGGSGSLTQDRFEKPEAQLFADVALKMGVPGERLILEPNSTNTGENVRFTHKLLQEKGLFLSSFLLVQKPYMERRTYATFKKQWPDSNSTVIFVTSPRLSWENYPNHDNPIDLVINIAVGDLIRLKDYPAKGYQIPQDIPDMVWMAAQRLIQAGYIDHLP

SEQ ID NO: 12424 - DNA, 5305 bp, Muscodor strobelii
  misc_feature: SGI EST ID NO. CUFF.29434.0
  misc_feature: Variant of the nucleotide sequence at SEQ ID NO 12422
cgcgggttgagtcacagctgaaatcctcccatagcgccgccgtttagggaggtggataccgagaccggcagaccgggatgcaatgcgacccaagacacacacgcaaaaatccgaggtgcgataagaagcgtgaatgtcctgcagatcaagtgaagggtggtcgaaatgtcagactcaccgccgacttcccttcatcccttgctttccgaaggagaagcatcaacgatggccgtcatgccccccgaagtgccagaatcgcaatcggcgaagcaaagcaacggagagcacggagcatcccgtagggtcaactcggaggactctgagaatggcatcgttcagagaaatgccggtgcacctgacacttccgacattgagatcgatggtccgatggaacggcggttgcgccgcaaaatcgacctgcgactgtgcacaattgctgggatactatgttctctcaatttgcttgattccggcgttatttcctcggcggctgtcacaagcctaccgactgatctagggctgacggggaatcgatatggcgttgcaatcttcatcttcactgtcagctccatcgcattccagctgccctcaaccctggcggtgcgcacttttggtccccggctctggtttgcgctgatcacctttgcatttggtatcatcactatggccacagcgtttatccagacttggaaacagatgatcgcgctgcgtgttcttctcggtatcgctgcaagtggaatgtaccctggcctgacataccttatttcgacgtggtatccgcggcgtgagcagcagacccggtttgcgttcttgcaaacgggagaagttattattcttgcaacgggcggtatagtcaattttggtttgaatttcctagacggcaagggtggacttgcgggctggcggtacatgttcttggtgcaaggcctcataactgttgttatcgggattgtgacctatttctggatcgttgatttccctgagaacgcccataaaactccctggttcttaacccaagaagaacaagagcttgcagtggcccgaattaacgctgaccgcaaggacgttgaacctgaggaattctcgtggccggcaatcttcgtgcatgcaaaggacccaaagatctacggttttgcagtaatgttctttttgctgaacattgtctcgacctcgctatcctactttttacctcagattctccaaaacggccttggcttcagcgagaaccttgccatactgcttaatgcacccccatactattatgctgttatacccgtgatcatatcttccatggtcggcgataaattccgaatcagaggcccagtgatcatcttcaactgcctttcattaattctgggttttggtctattaggctttgccaagcaagacgtggcgaggtacattggggcatttctcgctacgggtgcttatgtgagcaactgggcggcattgagcacttatcaggcgaacaacatcactggacagtggaagcgagcgtttacagctgcagccgtgacagctttgaatggagctggtggtattgcaggcagcttcatcgtcaaatcatctgaagcacctcgatacccaacggccatttgggtctccatcggatcgcacattctaatcattgccattgtatgtgtgttctcggtgtacttccatcttgccaataagctacaagcgagcgggaaattggtactcgaaggggttgagggctttcgatacactttatagactatggatctatgaaaataggaaattaaaacattcatgatcgcttgtcctgtctggttctcggtcgtaaccttatgcaattgtaatgtcttgtccaaacgccacccatgcttgtattctaaagtgaatgctggaaaaataattcactaacgttttgaccaaaggttccagcaagatcaaataatcatccacatcacgactcgacactcactgacatgtgatataaaatagacgcatgggtttaccagccaaatttctcaacccgaaggtcgatgtttgacccccgccgtatctcttcggcacagatattccggacactacggttgagtccgtcaggacctgataccacaacgccagtttctatttgtgagttgtcaacgatgtccgatatgtatgctgaaacatcaggccttcctgcctccactgttggttccgggactgtgacatgaacaccaagacggcgcagttcattcagcttttctctgggtacccacgatctttgagatccagaatgaattatccaaagaagatgcatttttcgcttcccgttttgcgtccgtgctaagtggcaaattaaagggtataccaccgcgatgcctgatccaccagcgatgagaatagtgtttcgactcgcgcggagcatatttaatggatcggtagatccatatggcccatctattctgacttgaacagaagaatgcgaacgagcgtattctagtaggcgggatgtgaatccattgtatgttcggatcagcaaatttaaagatatgcgtgtgtcactacctctgggagctgctgatgcaatagtaaacggatgggcttgtaatgcattactcccacccaattccggcaccgagatgaatatgtgatcggcggggtgccatccacttattgcattttgccggaaggcccgaagcgcatttttgccgcgcgaaaggtcccacgcagcggagagcagcaccgtatcaccatctttaagaatctcaatgtcgcattgcacggtggcggacttgagcccaatcctccatactatgcgatcaacgaagaatatcaacaacgatgcatagacgtacggccggcttgtatagaagtgcaaccagagaaatgccaatgcagcgatctggaggatgacatgcgacgcaagaaatagctcgtaccatctctcacgaaaactcgctagagaggtgaagtacagcaattcatacgacacaaatgcaccaattccaagtaagatcaaggggtgggttatatattccctgaagtctccgtgctgcaaccagtctggggtgatccacaccctccagaccagcatgctaacgaagtgtatgacggcttgaaaacacatgaactcgccgacgcggcgatgaaaaatatttagtgcttcataagatcggccagtgaggaatttcaatggctgatttttggcagcaagaagatataatagcggtagattgacgatgaacacatatcccgagcgatcagcgaagatgaagaaatacttcagctcgaagggcattagaagcaaatggaagaatatgttgagaccgacccacgcggcgacaaatagtgacgttagattcgatggtaggacgcgatttacgatgggtatcggcggaggctgatacatgagccacgaacgaacgacagctgacacgctcggtttactcgctcgacccggatgcaatccatggtggcggttcttgagtaatggctgacgctctagatcgagattgtcatcgaccttctggctaagactagaactggccgacgttgctccatctagggtgctgctagaagaagaagagttggtgccgttccgcgtatcctttagaaccttaatatgggggtccgcatcgtaaccgttcgggtctccttcgatcgctcgaattcttctctgcaatctaaaactccgataaaaatgagataaagaaaacatgaccagaacggctagaagagcgatattgtatgctgcaactatgtcgcgcccctcgaggatgaactcgattaatacccgcacatactcaagtctctccggatcctcagggaatccatcgtttgcttcggataatgtggtgaaatcggagagcaggttgggcggaaagtgagaagtctttaagacgtggcgcaacgcttggagcgcccattcgttgtcgctatcgccttgcaccatttcgatgaacaaacagccctgagttgaaaggcatccatgaaacgaggaaggggggcggaatgggtgaccaggcgagccaggcagatcagaagatcttatcagattgataagatggaggcgagtggatctgcatcacctacctacccaattatggacaccatgccgacctcggttttgggcgcggatccctttgtgtggaacaacccccatcagtgccccccgccggtatcaccaggccgggtgatcccgtgtctctttttctacgcgcttgacaaacagcaagaagtcagactaagctgtcacgttatgaccgccaagactttgaccagaggcagcatgactctttcaatcgatacaccgagcccggaggcagctcctacagtgcaacaggatgcggagatactatatgaatatcaccaacttcacatgaccatcgatcagagtgtcaaggtcgatgccatcttctgtttgtgcagcctagatcttcgcgtcgcagaacgcgctgctcaactttttcttgatggccacggtggatatctcatcttctctggcggctctggaagtctcactcaggatcgctttgaaaaacccgaggctcagctctttgctgatgttgctcttaagatgggtgtgcccggggaacggcttattcttgaaccaaattccaccaacaccggcgagaatgttcgcttcactcacaagctgctacaagaaaagggtctatttttgtcttccttcctcctcgttcagaaaccgtacatggagcggcgaacatatgctactttcaaaaagcaatggcccgatagcaacagcaccgtaatatttgtcacctcaccccgcctctcttgggaaaattatcctaaccacgacaatcccattgacctcgtgatcaacattgctgtcggtgatctcatacgcctcaaagattacccggcaaaaggttatcaaataccacaggatattccagatatggtctggatggctgcccaacgactgattcaagcaggatatattgatcatctaccctaatcctgaaatatccccccgcgctacgcactgcaggtctaccttcccaagctgcatcttcactctctgaccgctgcattctgcaccaacaactgccaatcattgacagtctgcgccattacatcaactccccacataaactcattaaagcttcgatcattccacttatctggatttgtgccctctccacggctaccactgcggatcaactcatcccttcgtctttgtgcttctccatccggcatatgacttgcattggaatgggatattcactcactatgtccacctggccccatgaatcgtgttgctgttgtttcgcgaagcaaggccatcacattctcatcgccctttaccatctcttcacctggataattt

SEQ ID NO: 12425 - DNA, 1929 bp, Muscodor strobelii
  misc_feature: SGI cDNA ID NO. 564035
  misc_feature: Encodes the peptide sequence at SEQ ID NO 12426
atggtgcaaggcgatagcgacaacgaatgggcgctccaagcgttgcgccacgtcttaaagacttctcactttccgcccaacctgctctccgatttcaccacattatccgaagcaaacgatggattccctgaggatccggagagacttgagtatgtgcgggtattaatcgagttcatcctcgaggggcgcgacatagttgcagcatacaatatcgctcttctagccgttctggtcatgttttctttatctcatttttatcggagttttagattgcagagaagaattcgagcgatcgaaggagacccgaacggttacgatgcggacccccatattaaggttctaaaggatacgcggaacggcaccaactcttcttcttctagcagcaccctagatggagcaacgtcggccagttctagtcttagccagaaggtcgatgacaatctcgatctagagcgtcagccattactcaagaaccgccaccatggattgcatccgggtcgagcgagtaaaccgagcgtgtcagctgtcgttcgttcgtggctcatgtatcagcctccgccgatacccatcgtaaatcgcgtcctaccatcgaatctaacgtcactatttgtcgccgcgtgggtcggtctcaacatattcttccatttgcttctaatgcccttcgagctgaagtatttcttcatcttcgctgatcgctcgggatatgtgttcatcgtcaatctaccgctattatatcttcttgctgccaaaaatcagccattgaaattcctcactggccgatcttatgaagcactaaatatttttcatcgccgcgtcggcgagttcatgtgttttcaagccgtcatacacttcgttagcatgctggtctggagggtgtggatcaccccagactggttgcagcacggagacttcagggaatatataacccaccccttgatcttacttggaattggtgcatttgtgtcgtatgaattgctgtacttcacctctctagcgagttttcgtgagagatggtacgagctatttcttgcgtcgcatgtcatcctccagatcgctgcattggcatttctctggttgcacttctatacaagccggccgtacgtctatgcatcgttgttgatattcttcgttgatcgcatagtatggaggattgggctcaagtccgccaccgtgcaatgcgacattgagattcttaaagatggtgatacggtgctgctctccgctgcgtgggacctttcgcgcggcaaaaatgcgcttcgggccttccggcaaaatgcaataagtggatggcaccccgccgatcacatattcatctcggtgccggaattgggtgggagtaatgcattacaagcccatccgtttactattgcatcagcagctcccagaggtagtgacacacgcatatctttaaatttgctgatccgaacatacaatggattcacatcccgcctactagaatacgctcgttcgcattcttctgttcaagtcagaatagatgggccatatggatctaccgatccattaaatatgctccgcgcgagtcgaaacactattctcatcgctggtggatcaggcatcgcggtggtataccctttaatttgccacttagcacggacgcaaaacgggaagcgaaaaatgcatcttctttggataattcattctggatctcaaagatcgtgggtacccagagaaaagctgaatgaactgcgccgtcttggtgttcatgtcacagtcccggaaccaacagtggaggcaggaaggcctgatgtttcagcatacatatcggacatcgttgacaactcacaaatagaaactggcgttgtggtatcaggtcctgacggactcaaccgtagtgtccggaatatctgtgccgaagagatacggcgggggtcaaacatcgaccttcgggttgagaaatttggctggtaa

SEQ ID NO: 12426 - protein, 642 aa, Muscodor strobelii
  misc_feature: SGI Peptide ID NO. 564035
  misc_feature (233)..(357): Pfam Id: PF01794 Pfam Desc: Ferric reductase like transmembrane component
  misc_feature (386)..(506): Pfam Id: PF08022 Pfam Desc: FAD-binding domain
  misc_feature (518)..(621): Pfam Id: PF00175 Pfam Desc: Oxidoreductase NAD-binding domain
  misc_feature (514)..(624): Pfam Id: PF08030 Pfam Desc: Ferric reductase NAD binding domain
  misc_feature (430)..(506): Pfam Id: PF08022 Pfam Desc: FAD-binding domain
  misc_feature (518)..(550): Pfam Id: PF00175 Pfam Desc: Oxidoreductase NAD-binding domain
  misc_feature (586)..(624): Pfam Id: PF08030 Pfam Desc: Ferric reductase NAD binding domain
  misc_feature (10)..(642): NCBI GI: 85114996 Blast Desc: NCU00876 [Neurospora crassa OR74A] gi|28926586|gb|EAA35556.1| conserved [Neurospora crassa OR74A]
  misc_feature (46)..(642): NCBI GI: 171684097 Blast Desc: protein product [Podospora anserina] gi|170942009|emb|CAP67661.1| protein product [Podospora anserina]
  misc_feature (41)..(642): NCBI GI: 145613012 Blast Desc: MGG_08278 [Magnaporthe grisea 70-15] gi|145020081|gb|EDK04309.1| MGG_08278 [Magnaporthe grisea 70-15]
  misc_feature (30)..(642): NCBI GI: 261360551 Blast Desc: conserved [Verticillium albo-atrum VaMs.102]
  misc_feature (10)..(642): NCBI GI: 189205062 Blast Desc: ferric reductase transmembrane component [Pyrenophora tritici-repentis Pt-1C-BFP] gi|187985965|gb|EDU51453.1| ferric reductase transmembrane component [Pyrenophora tritici-repentis
  misc_feature (181)..(642): NCBI GI: 169610049 Blast Desc: SNOG_08118 [Phaeosphaeria nodorum SN15] gi|160701969|gb|EAT84394.2| SNOG_08118 [Phaeosphaeria nodorum SN15]
  misc_feature (42)..(642): NCBI GI: 156039369 Blast Desc: SS1G_11821 [Sclerotinia sclerotiorum 1980] gi|154697558|gb|EDN97296.1| SS1G_11821 [Sclerotinia sclerotiorum 1980]
  misc_feature (45)..(462): NCBI GI: 116192775 Blast Desc: CHGG_06105 [Chaetomium globosum CBS 148.51] gi|88182018|gb|EAQ89486.1| CHGG_06105 [Chaetomium globosum CBS 148.51]
  misc_feature (190)..(642): NCBI GI: 50546717 Blast Desc: YALI0B13134p [Yarrowia lipolytica] gi|49646694|emb|CAG83079.1| YALI0B13134p [Yarrowia lipolytica]
  misc_feature (195)..(642): NCBI GI: 238838273 Blast Desc: FreB [Microsporum canis CBS 113480]
  misc_feature (228)..(578): SWISSPROT Homolog: EC 1.16.1.7 Ferric-chelate reductase
MVQGDSDNEWALQALRHVLKTSHFPPNLLSDFTTLSEANDGFPEDPERLEYVRVLIEFILEGRDIVAAYNIALLAVLVMFSLSHFYRSFRLQRRIRAIEGDPNGYDADPHIKVLKDTRNGTNSSSSSSTLDGATSASSSLSQKVDDNLDLERQPLLKNRHHGLHPGRASKPSVSAVVRSWLMYQPPPIPIVNRVLPSNLTSLFVAAWVGLNIFFHLLLMPFELKYFFIFADRSGYVFIVNLPLLYLLAAKNQPLKFLTGRSYEALNIFHRRVGEFMCFQAVIHFVSMLVWRVWITPDWLQHGDFREYITHPLILLGIGAFVSYELLYFTSLASFRERWYELFLASHVILQIAALAFLWLHFYTSRPYVYASLLIFFVDRIVWRIGLKSATVQCDIEILKDGDTVLLSAAWDLSRGKNALRAFRQNAISGWHPADHIFISVPELGGSNALQAHPFTIASAAPRGSDTRISLNLLIRTYNGFTSRLLEYARSHSSVQVRIDGPYGSTDPLNMLRASRNTILIAGGSGIAVVYPLICHLARTQNGKRKMHLLWIIHSGSQRSWVPREKLNELRRLGVHVTVPEPTVEAGRPDVSAYISDIVDNSQIETGVVVSGPDGLNRSVRNICAEEIRRGSNIDLRVEKFGW

SEQ ID NO: 12427 - DNA, 1569 bp, Muscodor strobelii
  misc_feature: SGI cDNA ID NO. 564036
  misc_feature: Reduced expression when VOC is produced
  misc_feature: Encodes the peptide sequence at SEQ ID NO 12428
atgtcagactcaccgccgacttcccttcatcccttgctttccgaaggagaagcatcaacgatggccgtcatgccccccgaagtgccagaatcgcaatcggcgaagcaaagcaacggagagcacggagcatcccgtagggtcaactcggaggactctgagaatggcatcgttcagagaaatgccggtgcacctgacacttccgacattgagatcgatggtccgatggaacggcggttgcgccgcaaaatcgacctgcgactgtgcacaattgctgggatactatgttctctcaatttgcttgattccggcgttatttcctcggcggctgtcacaagcctaccgactgatctagggctgacggggaatcgatatggcgttgcaatcttcatcttcactgtcagctccatcgcattccagctgccctcaaccctggcggtgcgcacttttggtccccggctctggtttgcgctgatcacctttgcatttggtatcatcactatggccacagcgtttatccagacttggaaacagatgatcgcgctgcgtgttcttctcggtatcgctgcaagtggaatgtaccctggcctgacataccttatttcgacgtggtatccgcggcgtgagcagcagacccggtttgcgttcttgcaaacgggagaagttattattcttgcaacgggcggtatagtcaattttggtttgaatttcctagacggcaagggtggacttgcgggctggcggtacatgttcttggtgcaaggcctcataactgttgttatcgggattgtgacctatttctggatcgttgatttccctgagaacgcccataaaactccctggttcttaacccaagaagaacaagagcttgcagtggcccgaattaacgctgaccgcaaggacgttgaacctgaggaattctcgtggccggcaatcttcgtgcatgcaaaggacccaaagatctacggttttgcagtaatgttctttttgctgaacattgtctcgacctcgctatcctactttttacctcagattctccaaaacggccttggcttcagcgagaaccttgccatactgcttaatgcacccccatactattatgctgttatacccgtgatcatatcttccatggtcggcgataaattccgaatcagaggcccagtgatcatcttcaactgcctttcattaattctgggttttggtctattaggctttgccaagcaagacgtggcgaggtacattggggcatttctcgctacgggtgcttatgtgagcaactgggcggcattgagcacttatcaggcgaacaacatcactggacagtggaagcgagcgtttacagctgcagccgtgacagctttgaatggagctggtggtattgcaggcagcttcatcgtcaaatcatctgaagcacctcgatacccaacggccatttgggtctccatcggatcgcacattctaatcattgccattgtatgtgtgttctcggtgtacttccatcttgccaataagctacaagcgagcgggaaattggtactcgaaggggttgagggctttcgatacactttatag

SEQ ID NO: 12428 - protein, 522 aa, Muscodor strobelii
  misc_feature: SGI Peptide ID NO. 564036
  misc_feature (91)..(462): Pfam Id: PF07690 Pfam Desc: Major Facilitator Superfamily
  misc_feature (8)..(521): NCBI GI: 212541304 Blast Desc: MFS transporter, [Penicillium marneffei ATCC 18224] gi|210068106|gb|EEA22198.1| MFS transporter, [Penicillium marneffei ATCC 18224]
  misc_feature (75)..(521): NCBI GI: 242799099 Blast Desc: MFS transporter, [Talaromyces stipitatus ATCC 10500] gi|218716652|gb|EED16073.1| MFS transporter, [Talaromyces stipitatus ATCC 10500]
  misc_feature (43)..(521): NCBI GI: 261197934 Blast Desc: MFS transporter [Ajellomyces dermatitidis SLH14081] gi|239595332|gb|EEQ77913.1| MFS transporter [Ajellomyces dermatitidis SLH14081]
  misc_feature (43)..(521): NCBI GI: 239607819 Blast Desc: MFS transporter [Ajellomyces dermatitidis ER-3]
  misc_feature (26)..(521): NCBI GI: 164428615 Blast Desc: NCU00803 [Neurospora crassa OR74A] gi|157072215|gb|EAA34567.2| conserved [Neurospora crassa OR74A]
  misc_feature (57)..(521): NCBI GI: 119195657 Blast Desc: CIMG_02203 [Coccidioides immitis RS]
  misc_feature (50)..(479): NCBI GI: 169623937 Blast Desc: SNOG_15217 [Phaeosphaeria nodorum SN15] gi|160705080|gb|EAT77442.2| SNOG_15217 [Phaeosphaeria nodorum SN15]
  misc_feature (47)..(521): NCBI GI: 145253272 Blast Desc: An16g08510 [Aspergillus niger] gi|134083711|emb|CAK42950.1| protein product [Aspergillus niger]
  misc_feature (72)..(515): NCBI GI: 258575635 Blast Desc: conserved [Uncinocarpus reesii 1704] gi|237902265|gb|EEP76666.1| conserved [Uncinocarpus reesii 1704]
  misc_feature (75)..(513): NCBI GI: 238490764 Blast Desc: MFS transporter, [Aspergillus flavus NRRL3357] gi|220697032|gb|EED53373.1| MFS transporter, [Aspergillus flavus NRRL3357]
  misc_feature: Useful for introducing or modulating the production of volatile compounds
MSDSPPTSLHPLLSEGEASTMAVMPPEVPESQSAKQSNGEHGASRRVNSEDSENGIVQRNAGAPDTSDIEIDGPMERRLRRKIDLRLCTIAGILCSLNLLDSGVISSAAVTSLPTDLGLTGNRYGVAIFIFTVSSIAFQLPSTLAVRTFGPRLWFALITFAFGIITMATAFIQTWKQMIALRVLLGIAASGMYPGLTYLISTWYPRREQQTRFAFLQTGEVIILATGGIVNFGLNFLDGKGGLAGWRYMFLVQGLITVVIGIVTYFWIVDFPENAHKTPWFLTQEEQELAVARINADRKDVEPEEFSWPAIFVHAKDPKIYGFAVMFFLLNIVSTSLSYFLPQILQNGLGFSENLAILLNAPPYYYAVIPVIISSMVGDKFRIRGPVIIFNCLSLILGFGLLGFAKQDVARYIGAFLATGAYVSNWAALSTYQANNITGQWKRAFTAAAVTALNGAGGIAGSFIVKSSEAPRYPTAIWVSIGSHILIIAIVCVFSVYFHLANKLQASGKLVLEGVEGFRYTL

SEQ ID NO: 12429 - DNA, 5305 bp, Muscodor strobelii; identical to SEQ ID NO: 12424
  misc_feature: SGI EST ID NO. CUFF.29434.0
  misc_feature: Variant of the nucleotide sequence at SEQ ID NO 12427

SEQ ID NO: 12430 - DNA, 1422 bp, Muscodor strobelii
  misc_feature: SGI cDNA ID NO. 564037
  misc_feature: Elevated expression when VOC is produced
  misc_feature: Encodes the peptide sequence at SEQ ID NO 12431
atgcatactaagaggtcagtcctttttgcggccagcgtcgcctgcgtgcttgcaggaaccgtaccgttgcgcagcccgctccctttcaactacaccacgttggcagcagcatcaaaccgaacggactctacaaacagtacgctcgtagccttagttacagatggcatttccagctgtggtagcacgtggatggcaattccagatgtcactatcggaagcaacaccgacagccgcaccgggttcacgacggccgtaaacaagttttgtagtatggcaaatgggttgaccgtggccagccaaggttacttgtccatggctaccgaggtttatctggatggtggcggcaatcctcccgcctatggattgctaggatatgtctacttcgaaattcataacaagcagagtgcagcccatatagtagacacggcttcgtgccaggcgcatcttaatacgctctcggcttccggtggaaaatgctacggcagcgatcacggcgatacgaaaggcggcacatatcaagtgggagccgaagccgtatcgtaccatgcccttggatttggaacccctccaactcaggacgctctcaacaagttgtacacgtctgccgcactcgctgcccaaacgccaaacaaaggttctggagcacccttgaatccgtggcctctagactcgctcaatgcggttaaaccaacttcttgccacagtcataacgattacgaccatgacattccgctatttcaggcactggccgctggttgtattggggttgaagcggatgtctggcttgtgtctggaaatctgtacattggccatcttctgccaacgactggcagaacgctaaccgcccaatatatcaaccctctgaaggcaattatagaccacaacggtggttttgtgtacaaggcgcaaccaagtcgagcgctctcgttactggtggattttaagacaagcgataccggaacattagacgcagtcgtgaaggcacttgaccccctacgacaggctggatatctctcaagaatccagaatgggcggtttgtgaaaggagcagtaactgtagttgcctccggtagttatcccgctgcgcgcatcatgagtggcgacggtgtgccgaatttcgatgttttctgcgacgcacctcttgcaggcctagccaactcgaactacacggcccaaaactcatattatgcctccgccgactttcaagatgctgtgggtgatccgagcagtgcaactctgacggcggcagagataaatacgatcaacacgcaagttggacaagctcatgcacgaggattagtcgttcgatattggaatctcccgggtgactatgtttgggagccattggaacaacttggtgtcgatctgcttaatgctgatgatctatatgatactgcaaggctaccacgcctttcagcataa

SEQ ID NO: 12431 - protein, 473 aa, Muscodor strobelii
  misc_feature: SGI Peptide ID NO. 564037
  misc_feature (191)..(467): NCBI GI: 39968715 Blast Desc: MGG_02450 [Magnaporthe grisea 70-15] gi|145013946|gb|EDJ98587.1| MGG_02450 [Magnaporthe grisea 70-15]
  misc_feature (225)..(468): NCBI GI: 46126163 Blast Desc: FG07459.1 [Gibberella zeae PH-1]
  misc_feature (220)..(467): NCBI GI: 255953025 Blast Desc: Pc21g02000 [Penicillium chrysogenum Wisconsin 54-1255] gi|211588976|emb|CAP95097.1| Pc21g02000 [Penicillium chrysogenum Wisconsin 54-1255]
  misc_feature (220)..(467): NCBI GI: 115388021 Blast Desc: conserved [Aspergillus terreus NIH2624] gi|114195600|gb|EAU37300.1| conserved [Aspergillus terreus NIH2624]
  misc_feature (199)..(462): NCBI GI: 258573395 Blast Desc: conserved [Uncinocarpus reesii 1704] gi|237901145|gb|EEP75546.1| conserved [Uncinocarpus reesii 1704]
  misc_feature (207)..(462): NCBI GI: 67523377 Blast Desc: AN2145.2 [Aspergillus nidulans FGSC A4] gi|40745033|gb|EAA64189.1| AN2145.2 [Aspergillus nidulans FGSC A4] gi|259487524|tpe|CBF86266.1| TPA: [Aspergillus nidulans FGSC
  misc_feature (235)..(462): NCBI GI: 212541674 Blast Desc: conserved [Penicillium marneffei ATCC 18224] gi|210068291|gb|EEA22383.1| conserved [Penicillium marneffei ATCC 18224]
  misc_feature (196)..(462): NCBI GI: 159129998 Blast Desc: conserved [Aspergillus fumigatus A1163]
  misc_feature (212)..(462): NCBI GI: 116206560 Blast Desc: CHGG_02573 [Chaetomium globosum CBS 148.51] gi|88183170|gb|EAQ90638.1| CHGG_02573 [Chaetomium globosum CBS 148.51]
  misc_feature (214)..(462): NCBI GI: 238488513 Blast Desc: conserved [Aspergillus flavus NRRL3357] gi|220697882|gb|EED54222.1| conserved [Aspergillus flavus NRRL3357]
  misc_feature: Useful for introducing or modulating the production of volatile compounds
MHTKRSVLFAASVACVLAGTVPLRSPLPFNYTTLAAASNRTDSTNSTLVALVTDGISSCGSTWMAIPDVTIGSNTDSRTGFTTAVNKFCSMANGLTVASQGYLSMATEVYLDGGGNPPAYGLLGYVYFEIHNKQSAAHIVDTASCQAHLNTLSASGGKCYGSDHGDTKGGTYQVGAEAVSYHALGFGTPPTQDALNKLYTSAALAAQTPNKGSGAPLNPWPLDSLNAVKPTSCHSHNDYDHDIPLFQALAAGCIGVEADVWLVSGNLYIGHLLPTTGRTLTAQYINPLKAIIDHNGGFVYKAQPSRALSLLVDFKTSDTGTLDAVVKALDPLRQAGYLSRIQNGRFVKGAVTVVASGSYPAARIMSGDGVPNFDVFCDAPLAGLANSNYTAQNSYYASADFQDAVGDPSSATLTAAEINTINTQVGQAHARGLVVRYWNLPGDYVWEPLEQLGVDLLNADDLYDTARLPRLSA

SEQ ID NO: 12432 - DNA, 2257 bp, Muscodor strobelii
  misc_feature: SGI EST ID NO. CUFF.29634.2
  misc_feature: Variant of the nucleotide sequence at SEQ ID NO 12430
cgcaccatgtacaatatcacgagaaccctggttctatgattgtgatgttcaccggtggatgtatggggtggatgttttaatcgaaatggatcgttgcatgcttgatcagcttgagaagccattagtatataaatgaagtgctcaagtcgccatccttaagatgtgatgtgtacgtggtttgatgtgtgcagaagttcttcacgatctgattgcgtgagttgcaagatgcatactaagaggtcagtcctttttgcggccagcgtcgcctgcgtgcttgcaggaaccgtaccgttgcgcagcccgctccctttcaactacaccacgttggcagcagcatcaaaccgaacggactctacaaacagtacgctcgtagccttagttacagatggcatttccagctgtggtagcacgtggatggcaattccagatgtcactatcggaagcaacaccgacagccgcaccgggttcacgacggccgtaaacaagttttgtagtatggcaaatgggttgaccgtggccagccaaggttacttgtccatggctaccgaggtttatctggatggtggcggcaatcctcccgcctatggattgctaggatatgtctacttcgaaattcataacaagcagagtgcagcccatatagtagacacggcttcgtgccaggcgcatcttaatacgctctcggcttccggtggaaaatgctacggcagcgatcacggcgatacgaaaggcggcacatatcaagtgggagccgaagccgtatcgtaccatgcccttggatttggaacccctccaactcaggacgctctcaacaagttgtacacgtctgccgcactcgctgcccaaacgccaaacaaaggttctggagcacccttgaatccgtggcctctagactcgctcaatgcggttaaaccaacttcttgccacagtcataacgattacgaccatgacattccgctatttcaggcactggccgctggttgtattggggttgaagcggatgtctggcttgtgtctggaaatctgtacattggccatcttctgccaacgactggcagaacgctaaccgcccaatatatcaaccctctgaaggcaattatagaccacaacggtggttttgtgtacaaggcgcaaccaagtcgagcgctctcgttactggtggattttaagacaagcgataccggaacattagacgcagtcgtgaaggcacttgaccccctacgacaggctggatatctctcaagaatccagaatgggcggtttgtgaaaggagcagtaactgtagttgcctccggtagttatcccgctgcgcgcatcatgagtggcgacggtgtgccgaatttcgatgttttctgcgacgcacctcttgcaggcctagccaactcgaactacacggcccaaaactcatattatgcctccgccgactttcaagatgctgtgggtgatccgagcagtgcaactctgacggcggcagagataaatacgatcaacacgcaagttggacaagctcatgcacgaggattagtcgttcgatattggaatctcccgggtgactatgtttgggagccattggaacaacttggtgtcgatctgcttaatgctgatgatctatatgatactgcaaggctaccacgcctttcagcataacgcgtatgaacatgatgagatatgatacccaggctatattgagtagatggacttaatattgtggcatagatggaccggtgtggattgtaacgaaatcgcgccaagcatatatgattcttaatttcacttcgatataagtaatgccccattaacgatctaaaatacattgtgagcagccacactctccatattgaacattgagtgatctatcaccctaatgatcgcacaagaagtttacctatatgagatcattgatactgtagaatgaagacagcttctctgcctaacagttcaatccttttttcatcataactgaaaagatccctgaaaagccactttgtgtcgcacgagttcatagagggttgagaccagatggcatgaaattacgttgatggtgctaacaagagttcagcgtgtagacttgagaaaattattgaatttaaccgcccacggggcctggccgcccgtggagttggaaatcgaccaggccgaggtctgctgtcggaaaacgaccatgacatccgaccgaaacattgttcgcaaatttgacgttgacggccgtagtaccaaatctcggttgagctcggaaaagtttaataagggtccggcg

SEQ ID NO: 12433 - DNA, 1806 bp, Muscodor strobelii
  misc_feature: SGI cDNA ID NO. 564038
  misc_feature: Encodes the peptide sequence at SEQ ID NO 12434
atggactctgtttctcggaatgagatgaaccatataccgaggaagccagtcgcccagtttgccccgactccgtcgtccgcgtcctatgatattgtcgatgatatcttagacgactatttcgaggctcctgttgacggatcagctcccttaccgcagactgaagtgcgaataaatgaggtacatcaggacacggcctttgttgcgccaccccaacgccaggcttctgctccccttatgatctcaaatgacccggagccatctctcctgctcaccccaagtccttcgcaaccggtcacgtcggccccgtcccggtcaaaatggaagactgtcgtcgacgagactgtctacttggcgggaggactaatctctcgcccttctgagtctactaggcattataccatactccgccactcagctggactagtattctataaaggctcttccacgagtatcgtcatcaccgtctttgcagacactgatctacctgcagataggacattctggcttcagagaaaaggattctctgggaacatgggaatggcagccagcgctttgatgagaactacgtcgaattggattgatatcacaccctccgccgaagcactgacctcggcacttcccgaaggcgatgagcgtggatggcaaagagatatcaggaaatttcagaagaaagtcaccggtgataagcgtctcgtgaaacatactccacgagagacctgtgtgctgcgcattccggcgtcttgcagcgatgggtatctacgcattgtcatgtgcacgggccaaacttcaaagaaatcactttgtccatcgcctacatttcgattggcgagtatctcgtccgatatcagcgtctttcgcggcgcgagtttggctacaatgcctgtcgaggccggtcttaagatagcatccgtagttggcaacgcgtacgtccagagggtggtaggacccgctcaggccgccgtagggaatagggtcaaacagatgcagccggcttttgtcgcccaaaacgcggtcgttctatctttggcgaaggaccaggtaggggaacagttcgcctcattcgaagaaaatttcgacgtaaccagggacgttacctacgatccttttcgccaagagaacgctacaggtgagcttccggatataatcggaagcgatattggtccggacgagccgttccctattgcattcgaaggcaaagtaatccccgggacatcgtgtcaccctcttaagaacaaaacaccaacggcacttttatctgatgttcccgatgacttaatactgcgcctcaagggtgtctacattggctgggcttccgttcgatccaaaaagagcttgaataatgtctctcaaggttggcatgaggccataattacgattggccccaccacgaagtcaacaccgcaagtggtatctcgaaacgtggtcaatgtccacataattcgcgattttggcgaacatacgacattcttcgacgccaagctcaagatcatactcatggctttcctacgacctatactaaagactgtcttttctgggtcttcccccgtgccgtctctagacataaaccaagacaagcttgttgcggtcgccagccttagtcgacagcattggcttcacggtactattgtccaagtattagaagagcgaaataagaagaagaccaccacagagagatatgtagatctccggtccaatgtacaaaggagagtagatagcattccaatccacttggcaggtgttcgctcagatcgcgccgaactcaaagaccttgcacatggtcggggcggcttctttgtgcggagatga

SEQ ID NO: 12434 - protein, 601 aa, Muscodor strobelii
  misc_feature: SGI Peptide ID NO. 564038
  misc_feature (67)..(601): NCBI GI: 256726443 Blast Desc: NECHADRAFT_39295 [Nectria haematococca mpVI 77-13-4]
  misc_feature (105)..(601): NCBI GI: 46124235 Blast Desc: FG06495.1 [Gibberella zeae PH-1]
  misc_feature (100)..(601): NCBI GI: 39972633 Blast Desc: MGG_07618 [Magnaporthe grisea 70-15] gi|145016827|gb|EDK01257.1| MGG_07618 [Magnaporthe grisea 70-15]
  misc_feature (108)..(442): NCBI GI: 261353993 Blast Desc: conserved [Verticillium albo-atrum VaMs.102]
  misc_feature (108)..(478): NCBI GI: 116208242 Blast Desc: CHGG_03414 [Chaetomium globosum CBS 148.51] gi|88184011|gb|EAQ91479.1| CHGG_03414 [Chaetomium globosum CBS 148.51]
  misc_feature (107)..(601): NCBI GI: 85078105 Blast Desc: NCU08763 [Neurospora crassa OR74A] gi|28881209|emb|CAD70448.1| [Neurospora crassa] gi|28917159|gb|EAA26876.1| [Neurospora crassa OR74A]
  misc_feature (89)..(601): NCBI GI: 119488600 Blast Desc: NFIA_113840 [Neosartorya fischeri NRRL 181] gi|119410908|gb|EAW20853.1| conserved [Neosartorya fischeri NRRL 181]
  misc_feature (113)..(601): NCBI GI: 169785401 Blast Desc: [Aspergillus oryzae RIB40] gi|83775909|dbj|BAE66028.1| protein product [Aspergillus oryzae]
  misc_feature (64)..(601): NCBI GI: 115402339 Blast Desc: conserved [Aspergillus terreus NIH2624] gi|114189092|gb|EAU30792.1| conserved [Aspergillus terreus NIH2624]
  misc_feature (113)..(601): NCBI GI: 159122942 Blast Desc: LipA and NB-ARC domain protein [Aspergillus fumigatus A1163]
MDSVSRNEMNHIPRKPVAQFAPTPSSASYDIVDDILDDYFEAPVDGSAPLPQTEVRINEVHQDTAFVAPPQRQASAPLMISNDPEPSLLLTPSPSQPVTSAPSRSKWKTVVDETVYLAGGLISRPSESTRHYTILRHSAGLVFYKGSSTSIVITVFADTDLPADRTFWLQRKGFSGNMGMAASALMRTTSNWIDITPSAEALTSALPEGDERGWQRDIRKFQKKVTGDKRLVKHTPRETCVLRIPASCSDGYLRIVMCTGQTSKKSLCPSPTFRLASISSDISVFRGASLATMPVEAGLKIASVVGNAYVQRVVGPAQAAVGNRVKQMQPAFVAQNAVVLSLAKDQVGEQFASFEENFDVTRDVTYDPFRQENATGELPDIIGSDIGPDEPFPIAFEGKVIPGTSCHPLKNKTPTALLSDVPDDLILRLKGVYIGWASVRSKKSLNNVSQGWHEAIITIGPTTKSTPQVVSRNVVNVHIIRDFGEHTTFFDAKLKIILMAFLRPILKTVFSGSSPVPSLDINQDKLVAVASLSRQHWLHGTIVQVLEERNKKKTTTERYVDLRSNVQRRVDSIPIHLAGVRSDRAELKDLAHGRGGFFVRR

SEQ ID NO: 12435 - DNA, 2910 bp, Muscodor strobelii
  misc_feature: SGI EST ID NO. CUFF.29448.0
  misc_feature: Variant of the nucleotide sequence at SEQ ID NO 12433
ctttggaatttacttcgccttcaacgagctccagccgaatagtcctaaaggtgcattatcattcaagaaacccgcaagtgccaatccatcgacttatggagcacttcatacactagagacatcggagtctaaccttgcgagaattgaacttcgggcgcatatcgtgagacatggttgtcgcccaggcgggagcatgatgatactatcggccgggcaattctttaatctagatgggaagtccggcagccttcaacattgacttacctcatttggcggccaaatcgatctcagacacaatgatgtgctctttttgattttcttgccatcgcaaaacgactcagatggactctgtttctcggaatgagatgaaccatataccgaggaagccagtcgcccagtttgccccgactccgtcgtccgcgtcctatgatattgtcgatgatatcttagacgactatttcgaggctcctgttgacggatcagctcccttaccgcagactgaagtgcgaataaatgaggtacatcaggacacggcctttgttgcgccaccccaacgccaggcttctgctccccttatgatctcaaatgacccggagccatctctcctgctcaccccaagtccttcgcaaccggtcacgtcggccccgtcccggtcaaaatggaagactgtcgtcgacgagactgtctacttggcgggaggactaatctctcgcccttctgagtctactaggcattataccatactccgccactcagctggactagtattctataaaggctcttccacgagtatcgtcatcaccgtctttgcagacactgatctacctgcagataggacattctggcttcagagaaaaggattctctgggaacatgggaatggcagccagcgctttgatgagaactacgtcgaattggattgatatcacaccctccgccgaagcactgacctcggcacttcccgaaggcgatgagcgtggatggcaaagagatatcaggaaatttcagaagaaagtcaccggtgataagcgtctcgtgaaacatactccacgagagacctgtgtgctgcgcattccggcgtcttgcagcgatgggtatctacgcattgtcatgtgcacgggccaaacttcaaagaaatcactttgtccatcgcctacatttcgattggcgagtatctcgtccgatatcagcgtctttcgcggcgcgagtttggctacaatgcctgtcgaggccggtcttaagatagcatccgtagttggcaacgcgtacgtccagagggtggtaggacccgctcaggccgccgtagggaatagggtcaaacagatgcagccggcttttgtcgcccaaaacgcggtcgttctatctttggcgaaggaccaggtaggggaacagttcgcctcattcgaagaaaatttcgacgtaaccagggacgttacctacgatccttttcgccaagagaacgctacaggtgagcttccggatataatcggaagcgatattggtccggacgagccgttccctattgcattcgaaggcaaagtaatccccgggacatcgtgtcaccctcttaagaacaaaacaccaacggcacttttatctgatgttcccgatgacttaatactgcgcctcaagggtgtctacattggctgggcttccgttcgatccaaaaagagcttgaataatgtctctcaaggttggcatgaggccataattacgattggccccaccacgaagtcaacaccgcaagtggtatctcgaaacgtggtcaatgtccacataattcgcgattttggcgaacatacgacattcttcgacgccaagctcaagatcatactcatggctttcctacgacctatactaaagactgtcttttctgggtcttcccccgtgccgtctctagacataaaccaagacaagcttgttgcggtcgccagccttagtcgacagcattggcttcacggtactattgtccaagtattagaagagcgaaataagaagaagaccaccacagagagatatgtagatctccggtccaatgtacaaaggagagtagatagcattccaatccacttggcaggtgttcgctcagatcgcgccgaactcaaagaccttgcacatggtcggggcggcttctttgtgcggagatgatagtcttgcattttatacatcaccagttacggcattatatatatatatatactcatgtacatcactgccatccacgaatagagtctttcttgaaatttgatggatgtcgatgttctgtcttcgaggtcgagatgatctctattgaacaggaacaaaagattcctccccgtcttctatcaccacggtcgccggacttcttgatagtcaagatcacgtctctttgccttcgatgggcgacatacgtcttcgcattccgtaacattatcacaccaatacgtgcgattcgtgcgacagactgggtgttgcgcacatcgtccttctttctcgcatcggcatggacccaggttcttgctcgtcttgactgccgtttcataatatgtcgcgcttggttggcccaccgtccagcaaagatatagtacccaggctagtatcacagatccaatcacgcatcccacgacgatgcccgcgattgctcccccactgagtgtgctttgcactccgttggtacttgagtagtaaacatcgccaggcgtatctcgaggctcatatcgtggtcgtggggagagtgctgcgtggcgcgcccgtgcggctgcgatttggcgaatgcgatcagtaatttggtgctgctgttgccgcacgggctcgtatgataatatctcgaatggtggcgccatattacgtgctggtgtaactgatctttccaccgtcgattgtcgaaaaattgaagcttctaggtctatgaattctgaaagctctaaaacga

SEQ ID NO: 12436 - DNA, 1533 bp, Muscodor strobelii
  misc_feature: SGI cDNA ID NO. 564039
  misc_feature: Encodes the peptide sequence at SEQ ID NO 12437
atggcttcttcaaccagcccagcctcgtcgcattcggcgcccaggtcccgccccgactcgctgaatgcctcgttccgcaactccaactcgtaccatgactccatccccgtcgaggtcctcgtccaccatctcctcgatgccaaacgctctctgtcgtcgatgcagctcgtcctgcgcgccaacgagctcgtccactccgcccgcaaggcccacgaagagtccgtcgttctctcggcgcagtcccagttcatccgccgagccatcgcagaccagatgcgcgtgctctaccgcgtccgcaagaacctggtgcgcacctacgacgacggcaagcgagagttcaaacagaccatcaagagcctggacctgaccaacacccgtctcgaggacaccatgaacatcctccgcagtcgccccgtagacagcgccttcagacccctcggcgaggagaggcggagtctgctggactttgtcgacgaggcgcaagtcgaaggcatgagagaggcactgaaggagaacatccaggcgctgcagagcacgcagcagtcctttgacggcgatctcctgcaattcgagaccgacttacgcagcctcaaagtcatcatgacctccgcgccttcgaccaagtcgccctctacttcacacacagacccgtccctcgtgcatatcctgtcttccatgatgatgaactcccacgccatggctgagcttctcacctctcttaccaagcatttcgatctctgtgtcaccgccgtccgcacaaccgagggaggggcagccttggccaagatcaaggcggccgaggcgacccagactcctggtgacgaagatgtttccatatccggcgtcatctcggatcaggagtcgcacatgcctcccttcgagcacttgtctcccgaagaacgtgcgcaaatgctcgacattgtcgtacaggattcgtccgaagtcgacgacgtcgtccaggaactcaatgagcgtctgcaatccgtcgaggccgacttcggcattctcgacgacgagacaaaccgcatcaagctcgcctacctggccaccatcaaggcattccacgcactggatgatatcggcacccgccttcaggactacctgacttctgaaaccgaatttcgggatcggtggatgcaggaacaggagatcatccatgacaaaatcgccgaaatggaggacatgcgaatcttttatgagaaatacgccggtacttacgatcatctcgtcctggaagtcgagcgcaggaaggtggtcgaagagaagatagccagcatatggaagaaggctaaggatagcgtggagaagctgatcgatgcagatcagaaacagcgagacatctttcgtcaagacgttgccgatcatttgcccactgatctgtggccaggcatggacgatcctatccgcaggtgggagctgatgccaagcggggacggtccaatcaataggaaccaggagtttggaggcacgccgtcgttgggtaagagtgtcgtcgagagcgccataaggcgacagttttccggtgggaaatga

SEQ ID NO: 12437 - protein, 510 aa, Muscodor strobelii
  misc_feature: SGI Peptide ID NO. 564039
  misc_feature (398)..(467): Pfam Id: PF04108 Pfam Desc: Autophagy protein Apg17
  misc_feature (34)..(504): NCBI GI: 46124265 Blast Desc: FG06510.1 [Gibberella zeae PH-1]
  misc_feature (34)..(504): NCBI GI: 256726429 Blast Desc: [Nectria haematococca mpVI 77-13-4]
  misc_feature (1)..(480): NCBI GI: 171685148 Blast Desc: protein product [Podospora anserina] gi|170942535|emb|CAP68186.1| protein product [Podospora anserina]
  misc_feature (34)..(504): NCBI GI: 261353994 Blast Desc: conserved [Verticillium albo-atrum VaMs.102]
  misc_feature (9)..(495): NCBI GI: 116208660 Blast Desc: CHGG_03623 [Chaetomium globosum CBS 148.51] gi|88184220|gb|EAQ91688.1| CHGG_03623 [Chaetomium globosum CBS 148.51]
  misc_feature (34)..(474): NCBI GI: 73622260 Blast Desc: CHGG_03623 [Chaetomium globosum CBS 148.51] gi|88184220|gb|EAQ91688.1| CHGG_03623 [Chaetomium globosum CBS 148.51]
  misc_feature (33)..(478): NCBI GI: 85078117 Blast Desc: NCU08766 [Neurospora crassa OR74A] gi|73622261|sp|Q872W1.1|ATG17_NEUCR RecName: Full=Autophagy-related protein 17 gi|28881213|emb|CAD70452.1| to
  misc_feature (12)..(504): NCBI GI: 156052395 Blast Desc: SS1G_06363 [Sclerotinia sclerotiorum 1980] gi|166989513|sp|A7EM16.1|ATG17_SCLS1 RecName: Full=Autophagy-related protein 17 gi|154704143|gb|EDO03882.1|
  misc_feature (1)..(504): NCBI GI: 154298757 Blast Desc: BC1G_11270 [Botryotinia fuckeliana B05.10] gi|166989509|sp|A6SG03.1|ATG17_BOTFB RecName: Full=Autophagy-related protein 17 gi|150857666|gb|EDN32858.1|
  misc_feature (131)..(474): NCBI GI: 145609515 Blast Desc: MGG_07667 [Magnaporthe grisea 70-15] gi|145016882|gb|EDK01312.1| MGG_07667 [Magnaporthe grisea 70-15]
MASSTSPASSHSAPRSRPDSLNASFRNSNSYHDSIPVEVLVHHLLDAKRSLSSMQLVLRANELVHSARKAHEESVVLSAQSQFIRRAIADQMRVLYRVRKNLVRTYDDGKREFKQTIKSLDLTNTRLEDTMNILRSRPVDSAFRPLGEERRSLLDFVDEAQVEGMREALKENIQALQSTQQSFDGDLLQFETDLRSLKVIMTSAPSTKSPSTSHTDPSLVHILSSMMMNSHAMAELLTSLTKHFDLCVTAVRTTEGGAALAKIKAAEATQTPGDEDVSISGVISDQESHMPPFEHLSPEERAQMLDIVVQDSSEVDDVVQELNERLQSVEADFGILDDETNRIKLAYLATIKAFHALDDIGTRLQDYLTSETEFRDRWMQEQEIIHDKIAEMEDMRIFYEKYAGTYDHLVLEVERRKVVEEKIASIWKKAKDSVEKLIDADQKQRDIFRQDVADHLPTDLWPGMDDPIRRWELMPSGDGPINRNQEFGGTPSLGKSVVESAIRRQFSGGK

SEQ ID NO: 12438 - DNA, 2167 bp, Muscodor strobelii
  misc_feature: SGI EST ID NO. CUFF.29451.0
  misc_feature: Variant of the nucleotide sequence at SEQ ID NO 12436
tgaagcgatgctatggagcgatatgcacccactgcactggcagcactggaaatgcagctagcgcgctatgctgcaggcactggctgacagcaaggtacttagtagagagctacctagctcggaggctcgccagggtgctagggtcgaaatagtcaccgtcgtcatgcttatcacaacccggcacctaagctcgccgtgagtgccctgacagacagagcctcacctctctttttcgtccgttcttttcttctccttcttttcgtcccattcttttcatccagcacacatattagcccttgttatcttttcgccatctcccattgtcctgcgaggcagctgagaatgtagatgctggtgttgtctcagcgctgagctgccacttttgactcgccagtatcaactacataggtaggtacctaccttacctctacgatggcttcttcaaccagcccagcctcgtcgcattcggcgcccaggtcccgccccgactcgctgaatgcctcgttccgcaactccaactcgtaccatgactccatccccgtcgaggtcctcgtccaccatctcctcgatgccaaacgctctctgtcgtcgatgcagctcgtcctgcgcgccaacgagctcgtccactccgcccgcaaggcccacgaagagtccgtcgttctctcggcgcagtcccagttcatccgccgagccatcgcagaccagatgcgcgtgctctaccgcgtccgcaagaacctggtgcgcacctacgacgacggcaagcgagagttcaaacagaccatcaagagcctggacctgaccaacacccgtctcgaggacaccatgaacatcctccgcagtcgccccgtagacagcgccttcagacccctcggcgaggagaggcggagtctgctggactttgtcgacgaggcgcaagtcgaaggcatgagagaggcactgaaggagaacatccaggcgctgcagagcacgcagcagtcctttgacggcgatctcctgcaattcgagaccgacttacgcagcctcaaagtcatcatgacctccgcgccttcgaccaagtcgccctctacttcacacacagacccgtccctcgtgcatatcctgtcttccatgatgatgaactcccacgccatggctgagcttctcacctctcttaccaagcatttcgatctctgtgtcaccgccgtccgcacaaccgagggaggggcagccttggccaagatcaaggcggccgaggcgacccagactcctggtgacgaagatgtttccatatccggcgtcatctcggatcaggagtcgcacatgcctcccttcgagcacttgtctcccgaagaacgtgcgcaaatgctcgacattgtcgtacaggattcgtccgaagtcgacgacgtcgtccaggaactcaatgagcgtctgcaatccgtcgaggccgacttcggcattctcgacgacgagacaaaccgcatcaagctcgcctacctggccaccatcaaggcattccacgcactggatgatatcggcacccgccttcaggactacctgacttctgaaaccgaatttcgggatcggtggatgcaggaacaggagatcatccatgacaaaatcgccgaaatggaggacatgcgaatcttttatgagaaatacgccggtacttacgatcatctcgtcctggaagtcgagcgcaggaaggtggtcgaagagaagatagccagcatatggaagaaggctaaggatagcgtggagaagctgatcgatgcagatcagaaacagcgagacatctttcgtcaagacgttgccgatcatttgcccactgatctgtggccaggcatggacgatcctatccgcaggtgggagctgatgccaagcggggacggtccaatcaataggaaccaggagtttggaggcacgccgtcgttgggtaagagtgtcgtcgagagcgccataaggcgacagttttccggtgggaaatgatttgtgttcaaagatcattggcgttgtgatgacaggatatggggcgttctggatttatggagaggaatctattatgaattgtattgtgaggcgtattggagttgaagctatctgttcggaattccaaggatactctaaacttagggataggtttgttcgaattgcagagaattgaatgtccaaattgattatccaactgagg

SEQ ID NO: 12439 - DNA, 1785 bp, Muscodor strobelii
  misc_feature: SGI cDNA ID NO. 564040
  misc_feature: Encodes the peptide sequence at SEQ ID NO 12440
atgaaccaagaaataactcagacatgcgatgaagaggtcgaggccgacaatgatagtatatatagccaagaagagctatacaccgaggatgagagtactccgaaccatggcgtaagtccgactactgactcgatcttcgacttcaactcccatcaaggataccgcgatccacgatccgtatcctcttggaagagtgtcggccgacacggaattcttagttttctcggatcgtcgatatcatacgaacagaatgcgcagcatcacgtacaactccacgatggccaaagcagtccgacagaccatgctgcgattgagctcgaaggctacataggaggacgctcacaatctttcaataacagatattattcgcagtcggataatgcgatcgatatcacaaaacacacgattaatgatgggctaagcacaggtgctgtgggtatcatttgcgactcccacgaggtcttacctggccgattagtatctgggtcaacatgcctaagcattagcggcaagatgttcacattgcgaaagctgagaacaacagcaccgttagcgcgtggaacttcgggagcatgggtagttcgaaacaacgagctcgttgggaatatcatcgccatctcggccttggagccatatgcatttatgatgccagcggagcaagtattcaacaacataaagatcagcgacccttccattgaagcggtcgaggtctcaacgccgaacgtgaaggaaatggcacacaaattagacggtttgacaaggcgaaaatggccgctgaggagacaatcaagtcaggacaccagttttgacaggaaatcgacaagcgatatgtctatccgagatctaagcggtaggtcaaagatgtcgcggggcttaagatctttcagagcctcgttttcatcggcaggcaactccccaaaaggtgcttcggaatccagacgcggcataatgaatcggccaaataattccttacatgacctcttgtctgatgtcttcggcaatggcgtcaaggagatcattcctcgtgccggtcagcaagatatcaagagccggggcttatccaagggagaggccccaacaccgatgattcggccgccagtgagatctaaatggcatggacaaagaaggaaactagtttctgcactggagcccatcacagagatcattcctgtcaagccctcgaccgtacaaaccaatttaatccctgaatacgtctttgtacagtccaccccatatacaatgacgaaaaatacttttcgccatggacctatccgtctcgacaagtcagatgtggtaccagaacgagaattgaacatcaggggcgatggagactcaccagaatacgccacagcactcacagaagcagctcatcattggctgtcaaataactatgaaaaccgacagaacgaacaatttgaagacgaagtagacgatatcactgactggtgggagtcatggggatacgaaaccggtgacctaattggggaagaatcgcataagccctctcgacctgcaagcgtaataagcctgagcttcccgggcgcttcgtttagcgacacgacttctgaagattcgctgggcaccggtgatgaagagagcagcctgcgatcattggctaattctttcaacgacaatactattggagatgaccaagtctctatagattgcatctctgaagaaaacggtgcgaagaatggacatgacttaattggtggccaaaatcttgtgggcagtttctcggaaccattcaggatggttagctcttcacatgttctcaagctttga

SEQ ID NO: 12440 - protein, 594 aa, Muscodor strobelii
  misc_feature: SGI Peptide ID NO. 564040
  misc_feature (341)..(502): NCBI GI: 171694928 Blast Desc: protein product [Podospora anserina] gi|170947706|emb|CAP59868.1| protein product [Podospora anserina]
  misc_feature (390)..(513): NCBI GI: 46105308 Blast Desc: FG00282.1 [Gibberella zeae PH-1]
  misc_feature (95)..(225): NCBI GI: 115397115 Blast Desc: [Aspergillus terreus NIH2624] gi|114192340|gb|EAU34040.1| [Aspergillus terreus NIH2624]
  misc_feature (403)..(497): NCBI GI: 256735531 Blast Desc: [Nectria haematococca mpVI 77-13-4]
  misc_feature (358)..(579): NCBI GI: 116182558 Blast Desc: CHGG_01907 [Chaetomium globosum CBS 148.51] gi|88186204|gb|EAQ93672.1| CHGG_01907 [Chaetomium globosum CBS 148.51]
  misc_feature (403)..(524): NCBI GI: 261355321 Blast Desc: conserved [Verticillium albo-atrum VaMs.102]
  misc_feature (166)..(278): NCBI GI: 46133899 Blast Desc: FG09089.1 [Gibberella zeae PH-1]
MNQEITQTCDEEVEADNDSIYSQEELYTEDESTPNHGVSPTTDSIFDFNSHQGYRDPRSVSSWKSVGRHGILSFLGSSISYEQNAQHHVQLHDGQSSPTDHAAIELEGYIGGRSQSFNNRYYSQSDNAIDITKHTINDGLSTGAVGIICDSHEVLPGRLVSGSTCLSISGKMFTLRKLRTTAPLARGTSGAWVVRNNELVGNIIAISALEPYAFMMPAEQVFNNIKISDPSIEAVEVSTPNVKEMAHKLDGLTRRKWPLRRQSSQDTSFDRKSTSDMSIRDLSGRSKMSRGLRSFRASFSSAGNSPKGASESRRGIMNRPNNSLHDLLSDVFGNGVKEIIPRAGQQDIKSRGLSKGEAPTPMIRPPVRSKWHGQRRKLVSALEPITEIIPVKPSTVQTNLIPEYVFVQSTPYTMTKNTFRHGPIRLDKSDVVPERELNIRGDGDSPEYATALTEAAHHWLSNNYENRQNEQFEDEVDDITDWWESWGYETGDLIGEESHKPSRPASVISLSFPGASFSDTTSEDSLGTGDEESSLRSLANSFNDNTIGDDQVSIDCISEENGAKNGHDLIGGQNLVGSFSEPFRMVSSSHVLKL

SEQ ID NO: 12441 - DNA, 3833 bp, Muscodor strobelii
  misc_feature: SGI EST ID NO. CUFF.29460.0
  misc_feature: Variant of the nucleotide sequence at SEQ ID NO 12439
ggcgattttggatcaatgtgcaattctttgtctgtattttgattacacgacgagatgacaagcattcgcgcaactacaacttctactcttactagtcccgtcaaccttggagaaacaacgccatcgcaatcccgctcatggagaaaaaggctcgagaagcgtgtgagctcttggacaaatcgggtagagactgatacactcaaagaagatgcgatatcactcgcgtcaacacctaaaggtgtatctccgtccaaccaagtgctcacgttacagtcagactctttagtctctctgacaactgcttctctctacagccgaagatcttatccctccgtattcagtaattcgactgatgcaacctctttatcgtgcctctctacgccctgcggggtgacttattcggtgaacagcacatcaatcagatctttcaagaggctacgggatggcattataatatatctagcccacgatgacattgaaataccgccagaagttttgcgtcaatgggaggaagtcgactcggatcgattgagaacagacctccgcgatgtcgtgatgcagatctatcgcaagggcgttgatcgagaatccaggcggcctaggaataggctggatgttcatcaaggatcccacgagtacgatatttcattcgaacttcggatggccggacgtgcaacacgcgattctcaacatgttttagtaagtccgtgcatctggattacgtgcggaagtatatgggcatgtaaggaagtcagaacagcaatgggaagaatcacttggccgacactacctttggaaatccatgagggtcgcagtccgctaccctctgtgatggatggatctctggacattgcaaagctagacttgaacaacggactttcactcgacggcgatattacaatctacatccacgtggaagacaaaacaaatgacacttctgtgtgtggactgctgtgttgtgtcacgatcaaagaaggcaatacgtactctcatcatttcagtcggattggcggcttgatcacgacgacgaacactctcatgtcaacgcactttggtttaacaacgggacatggaatactcgaccatccttggtggcacaaaaaagtttgcgaaaaactcataggtactcggatgaaccaagaaataactcagacatgcgatgaagaggtcgaggccgacaatgatagtatatatagccaagaagagctatacaccgaggatgagagtactccgaaccatggcgtaagtccgactactgactcgatcttcgacttcaactcccatcaaggataccgcgatccacgatccgtatcctcttggaagagtgtcggccgacacggaattcttagttttctcggatcgtcgatatcatacgaacagaatgcgcagcatcacgtacaactccacgatggccaaagcagtccgacagaccatgctgcgattgagctcgaaggctacataggaggacgctcacaatctttcaataacagatattattcgcagtcggataatgcgatcgatatcacaaaacacacgattaatgatgggctaagcacaggtgctgtgggtatcatttgcgactcccacgaggtcttacctggccgattagtatctgggtcaacatgcctaagcattagcggcaagatgttcacattgcgaaagctgagaacaacagcaccgttagcgcgtggaacttcgggagcatgggtagttcgaaacaacgagctcgttgggaatatcatcgccatctcggccttggagccatatgcatttatgatgccagcggagcaagtattcaacaacataaagatcagcgacccttccattgaagcggtcgaggtctcaacgccgaacgtgaaggaaatggcacacaaattagacggtttgacaaggcgaaaatggccgctgaggagacaatcaagtcaggacaccagttttgacaggaaatcgacaagcgatatgtctatccgagatctaagcggtaggtcaaagatgtcgcggggcttaagatctttcagagcctcgttttcatcggcaggcaactccccaaaaggtgcttcggaatccagacgcggcataatgaatcggccaaataattccttacatgacctcttgtctgatgtcttcggcaatggcgtcaaggagatcattcctcgtgccggtcagcaagatatcaagagccggggcttatccaagggagaggccccaacaccgatgattcggccgccagtgagatctaaatggcatggacaaagaaggaaactagtttctgcactggagcccatcacagagatcattcctgtcaagccctcgaccgtacaaaccaatttaatccctgaatacgtctttgtacagtccaccccatatacaatgacgaaaaatacttttcgccatggacctatccgtctcgacaagtcagatgtggtaccagaacgagaattgaacatcaggggcgatggagactcaccagaatacgccacagcactcacagaagcagctcatcattggctgtcaaataactatgaaaaccgacagaacgaacaatttgaagacgaagtagacgatatcactgactggtgggagtcatggggatacgaaaccggtgacctaattggggaagaatcgcataagccctctcgacctgcaagcgtaataagcctgagcttcccgggcgcttcgtttagcgacacgacttctgaagattcgctgggcaccggtgatgaagagagcagcctgcgatcattggctaattctttcaacgacaatactattggagatgaccaagtctctatagattgcatctctgaagaaaacggtgcgaagaatggacatgacttaattggtggccaaaatcttgtgggcagtttctcggaaccattcaggatggttagctcttcacatgttctcaagctttgattaagaaccgagtaccgactttggtgttaagattcgtaatatccctacagcgagaagatgaaatacttggagacatgagactcgtgcgaacgttgaggtctagtcagacttatatcgctgaagagtacatatgatcatcagcgagtcctgtataatttacgcagttacagggcatagttaattcaacccctcgcataataaaagcatgtattagccagtatgatcatcgtgataatggttcctagtgatttctattgatgctgatatgatatcgattcgccctagatttttgcggctaccaaactcatatatataccccaaagaagaccaatgaagttcaggaatacgatcctgtgttcaacaggcacgaagctaaagctgacgatcgacgcaaatggccaaagtttgtagcccgccacaatgagtgggatggtctccgtgcggatgttttcaagaatagtaggtactggttgccacttcaggatgcccatcaatatgaagaacgcgacagtgttgaagatggctccgatcgtgatacagtcaatgaaccacttggtaaacgtgtttttcagattgagtttgcctctatgctccagcgcactgctttcatgttgtttctcgatgtcgcggggacttttcggagatgcattgccgctgttggtttgtgtgtgcccgtaggccgggaatgttctttcaaggagttgctgccataggtagtttggcggcgcagcgatgaatgtgaacgttacgaaacggaggaacatggcaatgtcgaaagacaacggtcgctggtcgcgataagcctcgaggaactgtgctaaaatgttcgacgctcccgatagcgcagcggccgcaactgtggccttaaacataggcgatgacatcgtgctgcactcggccgacgtgctcgattgata

SEQ ID NO: 12442 - DNA, 603 bp, Muscodor strobelii
  misc_feature: SGI cDNA ID NO. 564041
  misc_feature: Elevated expression when VOC is produced
  misc_feature: Encodes the peptide sequence at SEQ ID NO 12443
atgtcatcgcctatgtttaaggccacagttgcggccgctgcgctatcgggagcgtcgaacattttagcacagttcctcgaggcttatcgcgaccagcgaccgttgtctttcgacattgccatgttcctccgtttcgtaacgttcacattcatcgctgcgccgccaaactacctatggcagcaactccttgaaagaacattcccggcctacgggcacacacaaaccaacagcggcaatgcatctccgaaaagtccccgcgacatcgagaaacaacatgaaagcagtgcgctggagcatagaggcaaactcaatctgaaaaacacgtttaccaagtggttcattgactgtatcacgatcggagccatcttcaacactgtcgcgttcttcatattgatgggcatcctgaagtggcaaccagtacctactattcttgaaaacatccgcacggagaccatcccactcattgtggcgggctacaaactttggccatttgcgtcgatcgtcagctttagcttcgtgcctgttgaacacaggatcgtattcctgaacttcattggtcttctttggggtatatatatgagtttggtagccgcaaaaatctag

SEQ ID NO: 12443 - protein, 200 aa, Muscodor strobelii
  misc_feature: SGI Peptide ID NO. 564041
  misc_feature (132)..(199): Pfam Id: PF04117 Pfam Desc: Mpv17 / PMP22 family
  misc_feature (132)..(196): Pfam Id: PF04117 Pfam Desc: Mpv17 / PMP22 family
  misc_feature (1)..(200): NCBI GI: 46122597 Blast Desc: FG05676.1 [Gibberella zeae PH-1]
  misc_feature (1)..(200): NCBI GI: 261354986 Blast Desc: Mpv17 / PMP22 family protein [Verticillium albo-atrum VaMs.102]
  misc_feature (4)..(200): NCBI GI: 189209592 Blast Desc: conserved [Pyrenophora tritici-repentis Pt-1C-BFP] gi|187977221|gb|EDU43847.1| conserved [Pyrenophora tritici-repentis Pt-1C-BFP]
  misc_feature (4)..(200): NCBI GI: 169621337 Blast Desc: SNOG_13878 [Phaeosphaeria nodorum SN15] gi|111057782|gb|EAT78902.1| SNOG_13878 [Phaeosphaeria nodorum SN15]
  misc_feature (4)..(198): NCBI GI: 238494244 Blast Desc: integral membrane protein, Mpv17/PMP22 family, [Aspergillus flavus NRRL3357] gi|220695008|gb|EED51351.1| integral membrane protein, Mpv17/PMP22 family, [Aspergillus
  misc_feature (4)..(198): NCBI GI: 121703796 Blast Desc: integral membrane protein, Mpv17/PMP22 family, [Aspergillus clavatus NRRL 1] gi|119398306|gb|EAW08736.1| integral membrane protein, Mpv17/PMP22 family, [Aspergillus NRRL
  misc_feature (4)..(198): NCBI GI: 119467582 Blast Desc: integral membrane protein, Mpv17/PMP22 family, [Neosartorya fischeri NRRL 181] gi|119405749|gb|EAW15700.1| integral membrane protein, Mpv17/PMP22 family, [Neosartorya NRRL
  misc_feature (4)..(198): NCBI GI: 70984344 Blast Desc: integral membrane protein, Mpv17/PMP22 family [Aspergillus fumigatus Af293] gi|66845313|gb|EAL85648.1| integral membrane protein, Mpv17/PMP22 family, [Aspergillus fumigatus
  misc_feature (4)..(200): NCBI GI: 67540912 Blast Desc: AN6626.2 [Aspergillus nidulans FGSC A4] gi|40738965|gb|EAA58155.1| AN6626.2 [Aspergillus nidulans FGSC A4]
  misc_feature (4)..(198): NCBI GI: 259480206 Blast Desc: TPA: integral membrane protein, Mpv17/PMP22 family, (AFU_orthologue; AFUA_6G03910) [Aspergillus nidulans FGSC A4]
  misc_feature: Useful for introducing or modulating the production of volatile compounds
MSSPMFKATVAAAALSGASNILAQFLEAYRDQRPLSFDIAMFLRFVTFTFIAAPPNYLWQQLLERTFPAYGHTQTNSGNASPKSPRDIEKQHESSALEHRGKLNLKNTFTKWFIDCITIGAIFNTVAFFILMGILKWQPVPTILENIRTETIPLIVAGYKLWPFASIVSFSFVPVEHRIVFLNFIGLLWGIYMSLVAAKI

SEQ ID NO: 12444 - DNA, 3429 bp, Muscodor strobelii
  misc_feature: SGI cDNA ID NO. 564042
  misc_feature: Elevated expression when VOC is produced
  misc_feature: Encodes the peptide sequence at SEQ ID NO 12445
atgcaagagctcgtgcaaaaggttcccaatacccagtctccagtattcaagaaaggccaagtcgggtatgatctggatgtgaaagagattctgcccttcgttcacaaagacactatcacagaaaatggggctttcagtagtgttttcaaagtcacaattcatgacagccactctgaacatgagtctcaagtggttgctataaaagacatacggatcaaccacgaatcaagcaagtatagcaacacggacgcagcctgggaacttgaggcgcgagccctcaacatagcgaatgctgtggaccatcaccatatggttaagtgcttggctgctattcgcaagggtaatcgaagattgctcatgtttccctgggcgcgaggcggtagcttacgagatttttggtcgagaaacccaaggccaaacctaacgggacagctcattcaccaagccgtgcatcagctttacggccttgcagatgccctgttccatcttcataaatatgattcaaaaccacaaatagagtcagcagacgtattcaaggcagggtcatcgaccactaacggcgaagcagtgaaggctgatgggttgccagagatcatcatagatgaagtgggcgggcagtcggtcatagatcgagacgattttggtaatgggagtattcgtcacggtaatttgaaaccagagaatatattgagtttcttcagcgcggaggaagcacgcagagatcccggtacaatgggcacgctcaggatagctgacatgggcctggctacgcgtcatgctgtggcaactcagtcaagaattaaactgatgagcacgtggtacggcactgctctctacgaggctcctgaggcggctctcgtgagtcaaagagctcgttctcgcttatatgatgtttggtccatgggctgtattatgttcgagttcatcctgtggatgctctacggcaatgatgtgatcgccgacttacatgaccatctaaaaaaatcgggtaacagtacatattacgaaaagttggggcaggacactgctcgacttcatccaattgttcgccaatggatcatgaagttgcagaatggcgaccccgagtgtgtacctggcttggcaattggcgatttactaagactgattgcatctaaacttcttgttgtggccatatcgcctcgtggtcaaagccgcagaaggtgggagagtttgccaccagaacttctttttgagcagccactagatggaagcgatcggattcaataccgaggcacctcagaggatttactgtacggcttgaaagcgatactttttcgactagaacacgaagaaagccccctttctaacgcaccacgattccacgtgatcccacctaatacatcaactgcgatgagcagtgacacaaattcttcgtcaatggtgacacagatcggagttactcgagtgcatcaatctacgttagaggtacgagcaggtctcatggcgcatagtagtatatccaagatggaaatcgccgaagctgactacgctttaccgccgcttgaagactgggaatatgctattgacaatgcctttgcgctgagtgtgataggcgcaattggcaaggaaaccttgcaaccaataaatcccaaagaacctattcaatgtcaaccatgtatgcgtcttgatttctggaaaggcggatttgccattgaagacaagccttacgatctccaatgccgagctcattattgctctctctgtcaaatgctttggaaagcttatcaaactttcggcacgcagaaggcaagaaaagtccgattcgaacgcgttcaatcagcgttaaagctgttggataccgagtaccctcttccagtgttgtccatcgttcgtagtcctgaattgaaaacgccaactacaatacaaatcgggttccctgagctcttgcaacccggaacggaacccttctttcaattactagggctctggctccaagactgtgatagtaggcatgaagggtgtcatactcacaagcgatcggtactaccgactcggctgattgatgtcggaacaaaacgaaacccgacactccgtctgatagaaacaactcgtgccaagttggaagatgccaagtatgttgcgctctcacatccatggggcgatcagaagaaacacccaccttttagtaccctgaggagagatccgagtggcagaggccgagagctggagactctgaaaactgcgatcccgttcgaacaactgccggcaacattcagagatgcgatactcactaccagagctttgcagataccattcctctggatagactcgatgtgcataatacaaggcgaagatggcgatttcaatgaagagtcaagaaaaatggaagatgtttttagctgcgcatactgtgtattagcggcaagccgagccaagggtcagcacgacggcttcctgcagaagcaaaattcaagagaatacattacaataaaacaggcactaggggggccgttctatatatgcgacgcgatcgacgatttcagtgaagatgtgcttgaaggatccctgagcactcgcggttggaccctgcaggaacgagcattggcaagacgaacaatttattttacggagaatcaggcatattttgagtgtggacaaggcatacggtgtcagtcgtttgcaaaaatgcacaacaatatggccaattttctcggtgacccaaatttccctaataaggctatgaatgtgaaacggggtctcaagatacgatatttccaggacctctacaagcagtactcgagattggatttcactcacatacaagaccgtccgtttgcaattaatggcctggaaactcgcctctgcgctgcttacaacacaaatggtgcgtacggtatctttgatgatggccagggcaatggattgtttcatcgaagtcttctgtggcagcgaggcgaagaaccaggagataaagggttgaaacgtatcgatttttctcttcgaaagattgctgttcctacatggtcatggatggcgtttgaaggcggtattgaatacctcgaccctcctttcgaccaaacagtgtgggagacagaagatattcacccaccacgtgcagagggagacaatatcagtggcttaatgcccggccttctttatggaaatacaagcttggagttgattgctgtagctcgctgtttcaatgtcgcgggccattcgaagcaagaggttaacattgtctatgacatggagcggactcaactagacggcgcaagagtacagtgtgtagtaattgctaggtcgggagatccagaaatacgtcgaaacagaaaacactatgttctactggtatcttcactggagtctagtggagggggtaatcaggtttacgagcgagttggagcgggctggatgcttggaaaattcatcgtctttgatcaaccagctcaacaagctcggattcgttaa

SEQ ID NO: 12445 - protein, 1142 aa, Muscodor strobelii
  misc_feature: SGI Peptide ID NO. 564042
  misc_feature (699)..(852): Pfam Id: PF06985 Pfam Desc: Heterokaryon incompatibility protein (HET)
  misc_feature (699)..(795): Pfam Id: PF06985 Pfam Desc: Heterokaryon incompatibility protein (HET)
  misc_feature (224)..(310): Pfam Id: PF00069 Pfam Desc: Protein kinase domain
  misc_feature (136)..(1141): NCBI GI: 169607331 Blast Desc: SNOG_06722 [Phaeosphaeria nodorum SN15] gi|160701390|gb|EAT85373.2| SNOG_06722 [Phaeosphaeria nodorum SN15]
  misc_feature (13)..(1141): NCBI GI: 256729997 Blast Desc: NECHADRAFT_82546 [Nectria haematococca mpVI 77-13-4]
  misc_feature (14)..(1111): NCBI GI: 256722820 Blast Desc: NECHADRAFT_87137 [Nectria haematococca mpVI 77-13-4]
  misc_feature (13)..(1131): NCBI GI: 46110541 Blast Desc: FG02152.1 [Gibberella zeae PH-1]
  misc_feature (13)..(1142): NCBI GI: 256723790 Blast Desc: NECHADRAFT_78344 [Nectria haematococca mpVI 77-13-4]
  misc_feature (3)..(1106): NCBI GI: 256721865 Blast Desc: NECHADRAFT_88069 [Nectria haematococca mpVI 77-13-4]
  misc_feature (86)..(1123): NCBI GI: 171690764 Blast Desc: protein product [Podospora anserina] gi|170945330|emb|CAP71442.1| protein product [Podospora anserina]
  misc_feature (628)..(1130): NCBI GI: 170940327 Blast Desc: protein product [Podospora anserina]
  misc_feature (627)..(1142): NCBI GI: 164425000 Blast Desc: NCU06583 [Neurospora crassa OR74A] gi|157070747|gb|EAA32707.2| NCU06583 [Neurospora crassa OR74A]
  misc_feature (593)..(1141): NCBI GI: 171694810 Blast Desc: protein product [Podospora anserina] gi|170947647|emb|CAP59809.1| protein product [Podospora anserina]
  misc_feature: Useful for introducing or modulating the production of volatile compounds
MQELVQKVPNTQSPVFKKGQVGYDLDVKEILPFVHKDTITENGAFSSVFKVTIHDSHSEHESQVVAIKDIRINHESSKYSNTDAAWELEARALNIANAVDHHHMVKCLAAIRKGNRRLLMFPWARGGSLRDFWSRNPRPNLTGQLIHQAVHQLYGLADALFHLHKYDSKPQIESADVFKAGSSTTNGEAVKADGLPEIIIDEVGGQSVIDRDDFGNGSIRHGNLKPENILSFFSAEEARRDPGTMGTLRIADMGLATRHAVATQSRIKLMSTWYGTALYEAPEAALVSQRARSRLYDVWSMGCIMFEFILWMLYGNDVIADLHDHLKKSGNSTYYEKLGQDTARLHPIVRQWIMKLQNGDPECVPGLAIGDLLRLIASKLLVVAISPRGQSRRRWESLPPELLFEQPLDGSDRIQYRGTSEDLLYGLKAILFRLEHEESPLSNAPRFHVIPPNTSTAMSSDTNSSSMVTQIGVTRVHQSTLEVRAGLMAHSSISKMEIAEADYALPPLEDWEYAIDNAFALSVIGAIGKETLQPINPKEPIQCQPCMRLDFWKGGFAIEDKPYDLQCRAHYCSLCQMLWKAYQTFGTQKARKVRFERVQSALKLLDTEYPLPVLSIVRSPELKTPTTIQIGFPELLQPGTEPFFQLLGLWLQDCDSRHEGCHTHKRSVLPTRLIDVGTKRNPTLRLIETTRAKLEDAKYVALSHPWGDQKKHPPFSTLRRDPSGRGRELETLKTAIPFEQLPATFRDAILTTRALQIPFLWIDSMCIIQGEDGDFNEESRKMEDVFSCAYCVLAASRAKGQHDGFLQKQNSREYITIKQALGGPFYICDAIDDFSEDVLEGSLSTRGWTLQERALARRTIYFTENQAYFECGQGIRCQSFAKMHNNMANFLGDPNFPNKAMNVKRGLKIRYFQDLYKQYSRLDFTHIQDRPFAINGLETRLCAAYNTNGAYGIFDDGQGNGLFHRSLLWQRGEEPGDKGLKRIDFSLRKIAVPTWSWMAFEGGIEYLDPPFDQTVWETEDIHPPRAEGDNISGLMPGLLYGNTSLELIAVARCFNVAGHSKQEVNIVYDMERTQLDGARVQCVVIARSGDPEIRRNRKHYVLLVSSLESSGGGNQVYERVGAGWMLGKFIVFDQPAQQARIR

SEQ ID NO: 12446 - DNA, 4505 bp, Muscodor strobelii
  misc_feature: SGI EST ID NO. CUFF.29533.0
  misc_feature: Variant of the nucleotide sequence at SEQ ID NO 12444
gctaaatagcgacgcgctcaggacaaataattgttaaacaagtggtcattggctcgaagcaaatgaaagccggagtaggccgtctatgaatgtatggttgaagagataatcgacaggtacctgacaaccaccagccaataccttagtcaccgagtcagttgataaaattcccacatcaagcattcagcaccagatcgctcaaaaatacaagacgctaagtgccaggatacataggttcggataccggtattcgtcccaattcaccaccgaatatttgtccaatgttccagaaacatgtcacaaatttcaaagcacacaagaatcatgactccagataaggacctgttctatggtccatcttgtgaaaccgtgcaactgattctgtacttataggtgctactgctaccacccgtatttcccttccagtatgcctggctagaaactcacgtcttctctctactcctcattgtcgatactcagcgaagtcaaagcccatcatgcatctcaccaacattgcaaccaccctgattacgttgttcctgctcgcatcaagcgcccaggcgacctacgtgctagacttattccaagacggcgaatgccagatccccctggtggatcagcccacgactaaagtgctctcgggaacatgtgacaccaacgttaaaacaggctggagctcggtcattatcactcacaaatgggcttcacctgctggcactatcacatttttcgagaaaaatgcctgcgttggcgaccagtggtcatctgtcacctaccacaacccagataaaaacaaatgtcacacattgggattcactgcgaatgccgcctatctcataggataagaggtgttcgaactccgctgctgggtcgagagtctccagtgaatgggatcatgtgaaaggaggatgaagatttggtggagaacgacgaagtgattactttctgtaccatcagtcattgcttattaagggcgatagtttctccaacagatcatatttcttaagtatacctcatgtacagtagtagtgttactaccacacaagagtggcttaatcctcaaggagtgatattgaggatccagcgcaattaagttatcagctcttttgactgccgactgagtaattgcttaacccctagtattctaacaagctatgtgtatttgaagtggaaataattataagtgtgattgtcaaagtcgacatatagactaatagcaacacaagtagaaacttagcggtgcatgattttcgtaatgatcatgcatgcatggcatgtgaggaggtaacatacggtcttcgtaggcttggctgagatcatggttcgattgaggtataatttagcattaaatatcttttgaagatgtatggtgccagtggtcgatgtgttcctagtgtctccaaatggggtttacagcctaccggtagtaccccgcacgcagactgcctgtatacttggatggagcgattcatcttcggaattctctgacggacgttttgccacacacatactttagtatagtgcaacacgttagccggaaagcgttctctcttgtcttatattccaagttcgatgaatgacaaacggcacaagaacaataatgagaacaaaagccacgaaaacaaggcggacaacgcgacccatcgtcttgtgtaaggctcgggatgctcgagtatcgttgcagtactattcggtcatatggtttgcatgcggcatgctctgccaaccgatttgttagacgaatgtgtccggaagaggtagcctgcttctcgtgtgatggttttcaaaagattgcgacagagcctgctttcgatgtgacgatactataccaattctggctttgcgcatgaggtttccgctggctatacagccaaaagcacccgcatcgacccgtagatcgtatcatgaatgcgatcgtggcgttgatctcagaagccaacggcgcacactacgccccaaaggcaaccctgtttcatgcaaccagttgtacacccacactatccttccaaatgatagcgagtatggctatgcacagcgccaggctggatgagccgagaatcaaggcccgaacttgggtcgagaatataagtataagacattgtatcagcatgtagagaagatagacataagctactgctaaatctcgacctttataacaagagccgaatctcaaagtaatcatttgtaacggtctcgtatccttgctctcattgcattgttcactttatctagtacggtggcaatggctcattatccagactcgggctatactacctcagactcgggatcgaatacagaagatgagattctcaatatgggcatggttcgggacagtttggcagatcgtttaaccgttgcttatactctcagtcacttcaatgattcctctgaaaaattcttgccggaaattctagtagccaatttggtcacgcaagagacgatcatggcggaacttgatgggagtctctcgaaaatccctgaagaaagccagcggtcggattttattaattggatctgtgaaaaggctccgaaggtctttctcattctgatagaaattcatgtcgatcagcccacattatttcacctgatgcggatattcaagaggaagaattttgatgattcaagacttccagttgatcatccttcctgctccagctcatgcaagagctcgtgcaaaaggttcccaatacccagtcgtctcacccaccttagaaacaagtttcatgatgaccaatggaggttcttaagtccagtattcaagaaaggccaagtcgggtatgatctggatgtgaaagagattctgcccttcgttcacaaagacactatcacagaaaatggggctttcagtagtgttttcaaagtcacaattcatgacagccactctgaacatgagtctcaagtggttgctataaaagacatacggatcaaccacgaatcaagcaagtatagcaacacggacgcagcctgggaacttgaggcgcgagccctcaacatagcgaatgctgtggaccatcaccatatggttaagtgcttggctgctattcgcaagggtaatcgaagattgctcatgtttccctgggcgcgaggcggtagcttacgagatttttggtcgagaaacccaaggccaaacctaacgggacagctcattcaccaagccgtgcatcagctttacggccttgcagatgccctgttccatcttcataaatatgattcaaaaccacaaatagagtcagcagacgtattcaaggcagggtcatcgaccactaacggcgaagcagtgaaggctgatgggttgccagagatcatcatagatgaagtgggcgggcagtcggtcatagatcgagacgattttggtaatgggagtattcgtcacggtaatttgaaaccagagaatatattgagtttcttcagcgcggaggaagcacgcagagatcccggtacaatgggcacgctcaggatagctgacatgggcctggctacgcgtcatgctgtggcaactcagtcaagaattaaactgatgagcacgtgggtaagcattagcagacgcgattgggacagtctgagaagtggctgtttcgaattcacgatgaacgcgatgaatgagcttctaacttcgaatagtacggcactgctctctacgaggctcctgaggcggctctcgtgagtcaaagagctcgttctcgcttatatgatgtttggtccatgggctgtattatgttcgagttcatcctgtggatgctctacggcaatgatgtgatcgccgacttacatgaccatctaaaaaaatcgggtaacagtacatattacgaaaagttggggcaggacactgctcgacttcatccaattgttcgccaatggatcatgaagttgcagaatggcgaccccgagtgtgtacctggcttggcaattggcgatttactaagactgattgcatctaaacttcttgttgtggccatatcgcctcgtggtcaaagccgcagaaggtgggagagtttgccaccagaacttctttttgagcagccactagatggaagcgatcggattcaataccgaggcacctcagaggatttactgtacggcttgaaagcgatactttttcgactagaacacgaagaaagccccctttctaacgcaccacgattccacgtgatcccacctaatacatcaactgcgatgagcagtgacacaaattcttcgtcaatggtgacacagatcggagttactcgagtgcatcaatctacgttagaggtacgagcaggtctcatggcgcatagtagtatatccaagatggaaatcgccgaagctgactacgctttaccgccgcttgaagactgggaatatgctattgacaatgcctttgcgctgagtgtgataggcgcaattggcaaggaaaccttgcaaccaataaatcccaaagaacctattcaatgtcaaccatgtatgcgtcttgatttctggaaaggcggatttgccattgaagacaagccttacgatctccaatgccg

SEQ ID NO: 12447 - DNA, 336 bp, Muscodor strobelii
  misc_feature: SGI cDNA ID NO. 564043
  misc_feature: Encodes the peptide sequence at SEQ ID NO 12448
atggatgatgctaaaaatccaactcaagatgataatcccgataccacgaaggatgggagtgagtcaaaacaggaccccggctctgtcattcagcagagctccaaagcagacacgacagatatgaacaactctaaagaggacgccaacatcactaccgaagtagtcgatcagatcatccctggacgacacatacgtgctgccaaacttgaagccctactaaagagaacattcggcgagaagggatacgattcatttatgatgcacaatcaatttcacattaaagcgcctagaaagctatctgctagcgagattgctgcatgcagacacgatgtctaa

SEQ ID NO: 12448 - protein, 111 aa, Muscodor strobelii
  misc_feature: SGI Peptide ID NO. 564043
  misc_feature (46)..(108): NCBI GI: 170940329 Blast Desc: protein product [Podospora anserina]
MDDAKNPTQDDNPDTTKDGSESKQDPGSVIQQSSKADTTDMNNSKEDANITTEVVDQIIPGRHIRAAKLEALLKRTFGEKGYDSFMMHNQFHIKAPRKLSASEIAACRHDV

SEQ ID NO: 12449 - DNA, 374 bp, Muscodor strobelii
  misc_feature: SGI EST ID NO. CUFF.29485.0
  misc_feature: Variant of the nucleotide sequence at SEQ ID NO 12447
cgcctagaaagctatctgctagcgagattgctgcatgcagacacgatgtctaagcagcacgtactgcataggccccgtttgcctttcttgtttgtaaaatgccaagagacacattcatttctaacatctgcggctatccgagcatgctccgagggtaacgttcgttgtctttttgccgattttaactcccgagtgcatagggcgtggatttcaatacactttgtctggcgatgggcggtttgggattcgtactttcattatgaatgtcgatttttgagggcgtactaaggcgattgagagcatgcgggagaactcttatggatatagtgagaactcaaatagaaaatgaatagaacagtccagcctaacagtcg

SEQ ID NO: 12450 - DNA, 972 bp, Muscodor strobelii
  misc_feature: SGI cDNA ID NO. 564044
  misc_feature: Elevated expression when VOC is produced
  misc_feature: Encodes the peptide sequence at SEQ ID NO 12451
atggcacccaaaaatgagacctctatcgttgagtttcggaagctcgtcaagtccagcaaccgtatcgtagcgctttgcggtgctggactatccgccgcatctggtctgccaacatttcgtggcgatggtggactttggcgtaaccacgaacccactgacctcgctacgcctgaagcattcgaggaggacccggcgctggtctggcttttctatggtccgtataaaccatcacgccctgttatttcaaactatcgctttcctgatgaacctccgctgacgtctgttctagcttggcgcaaacatatggcgctgaaggcccagcccaacaacggacactatgctttagcagaattagccaagaagaaggagaactttctgtgcttgacacagaatgttgatggactatcgcctcgtgcgggtcatccagaatcacagctgaggctcctacacggaagtatactcgacgtgaaatgcttcatcgactgtggttatgtggaacgcaacaatctggccgatccaccttgtccggcactggctgccgcctcggaagattaccccacaggccagactatgcctctgctcgatcccactgttccagcgccgagtatcaaaatggaggatctgccattgtgcccaagctgcaaagaaggtcttctccgacctggtgtcgtttggtttggtgaagcgcttgatcaggatatgctcatgggcgtggataactggatcgcgcaagacaaggttgatctcatgcttgtaatcggcacttccgctgttgttcaccccgctgctgggtatgtgcgcaaggcccagcggaaaggagccgttgtcgccgtagtgaacccagatccggactctgcacagggtctcacaagtaaagattattttttccaaggaagtgcggcagagatcttaccagaattatttgagggtgttattggcaaaatcagggagaatggtcgtccatatcgctag

SEQ ID NO: 12451 - protein, 323 aa, Muscodor strobelii
  misc_feature: SGI Peptide ID NO. 564044
  misc_feature (27)..(261): Pfam Id: PF02146 Pfam Desc: Sir2 family
  misc_feature (97)..(261): Pfam Id: PF02146 Pfam Desc: Sir2 family
  misc_feature (27)..(71): Pfam Id: PF02146 Pfam Desc: Sir2 family
  misc_feature (1)..(311): NCBI GI: 46134931 Blast Desc: FG09314.1 [Gibberella zeae PH-1]
  misc_feature (7)..(315): NCBI GI: 256727712 Blast Desc: NECHADRAFT_105923 [Nectria haematococca mpVI 77-13-4]
  misc_feature (12)..(316): NCBI GI: 169606502 Blast Desc: SNOG_06294 [Phaeosphaeria nodorum SN15] gi|111065005|gb|EAT86125.1| SNOG_06294 [Phaeosphaeria nodorum SN15]
  misc_feature (12)..(315): NCBI GI: 189191294 Blast Desc: NAD-dependent deacetylase sirtuin-5 [Pyrenophora tritici-repentis Pt-1C-BFP] gi|187973592|gb|EDU41091.1| NAD-dependent deacetylase sirtuin-5 [Pyrenophora tritici-repentis
  misc_feature (12)..(315): NCBI GI: 119470471 Blast Desc: SIR2 family histone deacetylase, [Neosartorya fischeri NRRL 181] gi|119406191|gb|EAW16142.1| SIR2 family histone deacetylase, [Neosartorya fischeri NRRL 181]
  misc_feature (12)..(315): NCBI GI: 121699526 Blast Desc: SIR2 family histone deacetylase, [Aspergillus clavatus NRRL 1] gi|119396191|gb|EAW06623.1| SIR2 family histone deacetylase, [Aspergillus clavatus NRRL 1]
  misc_feature (12)..(315): NCBI GI: 238501730 Blast Desc: SIR2 family histone deacetylase, [Aspergillus flavus NRRL3357] gi|220692336|gb|EED48683.1| SIR2 family histone deacetylase, [Aspergillus flavus NRRL3357]
  misc_feature (9)..(315): NCBI GI: 67522651 Blast Desc: AN1782.2 [Aspergillus nidulans FGSC A4] gi|40744802|gb|EAA63958.1| AN1782.2 [Aspergillus nidulans FGSC A4] gi|259487127|tpe|CBF85551.1| TPA: SIR2 family histone FGSC
  misc_feature (12)..(315): NCBI GI: 70991921 Blast Desc: SIR2 family histone deacetylase [Aspergillus fumigatus Af293] gi|66848442|gb|EAL88771.1| SIR2 family histone deacetylase, [Aspergillus fumigatus Af293] SIR2 family histone
  misc_feature (12)..(315): NCBI GI: 169769274 Blast Desc: [Aspergillus oryzae RIB40] gi|83766965|dbj|BAE57105.1| protein product [Aspergillus oryzae]
  misc_feature: Useful for introducing or modulating the production of volatile compounds
MAPKNETSIVEFRKLVKSSNRIVALCGAGLSAASGLPTFRGDGGLWRNHEPTDLATPEAFEEDPALVWLFYGPYKPSRPVISNYRFPDEPPLTSVLAWRKHMALKAQPNNGHYALAELAKKKENFLCLTQNVDGLSPRAGHPESQLRLLHGSILDVKCFIDCGYVERNNLADPPCPALAAASEDYPTGQTMPLLDPTVPAPSIKMEDLPLCPSCKEGLLRPGVVWFGEALDQDMLMGVDNWIAQDKVDLMLVIGTSAVVHPAAGYVRKAQRKGAVVAVVNPDPDSAQGLTSKDYFFQGSAAEILPELFEGVIGKIRENGRPYR

SEQ ID NO: 12452 - DNA, 894 bp, Muscodor strobelii
  misc_feature: SGI EST ID NO. CUFF.29492.0
  misc_feature: Variant of the nucleotide sequence at SEQ ID NO 12450
gcaaacatatggcgctgaaggcccagcccaacaacggacactatgctttagcagaattagccaagaagaaggagaactttctgtgcttgacacagaatgttgatggactatcgcctcgtgcgggtcatccagaatcacagctgaggctcctacacggaagtatactcgacgtgaaatgcttcatcgactgtggttatgtggaacgcaacaatctggccgatccaccttgtccggcactggctgccgcctcggaagattaccccacaggccagactatgcctctgctcgatcccactgttccagcgccgagtatcaaaatggaggatctgccattgtgcccaagctgcaaagaaggtcttctccgacctggtgtcgtttggtttggtgaagcgcttgatcaggatatgctcatgggcgtggataactggatcgcgcaagacaaggttgatctcatgcttgtaatcggcacttccgctgttgttcaccccgctgctgggtatgtgcgcaaggcccagcggaaaggagccgttgtcgccgtagtgaacccagatccggactctgcacagggtctcacaagtaaagattattttttccaaggaagtgcggcagagatcttaccagaattatttgagggtgttattggcaaaatcagggagaatggtcgtccatatcgctagggcataatatctctatccattgctctttacgtgtaactaggtcactaaggcagtcattcaagagcttgctatagccgtaaatacacgaatggccgaataatatgattacacgcggctcaaaccacaccatcacgaaacaagacatattgtgtatcctgtaagcatctgagaacggaattggtaaaaagacattgcccatgcgtagggtattctccgg

SEQ ID NO: 12453 - DNA, 1119 bp, Muscodor strobelii
  misc_feature: SGI cDNA ID NO. 564045
  misc_feature: Encodes the peptide sequence at SEQ ID NO 12454
atggatacagtaaggcgtgaagaaatcaactcgcgggttctgcgaaacctggaaaactcgcagtacgcggccacatcacttgtaccgcttgctggaggaacggccaattttatctaccacgccaatctcaaaacgccattacaggacggcacgagagacgtccttgtcaagcacggtgaggactttgtcgccaactcaccgtcgttcaagattgcattatctcgctgtcgtgtcgaagaggaatctttgaaaacattgtcaaatttaccaattaaagcccaggctgagtcaagcggtagcaacttcgtcgtgaggacaccgaaattctatcattttgacaaacagaacaatacccagatccaagaaatcctgctgaacggtaacaatttgaaaacatatgctcttacgacgtactcgccaaatacaccagattcgttgcgcagtgaatgccatcagctcggtcaagcgttgggcaagtggctgcacaattttcatcgttggtccgcaacgcagtcagagttgcgcaagactctggcaggtaacaaggagatgcaacagttgaaacacatgatcaacttctcatggctccaagaccgcgtggtgcagtttccagctctctctgaggcgaaagatatttttgcacaggttaaggacatggcagctaaagagctcgaagacgaaagtcaattacaaccaattcatggtgatttttggaccggaaacattttattgcctggaggttcaattcaagagggcggtgaagtgacaatgtttgttatagactgggagatgtcacaaattgggttgccaaatctcgatttgggtcaaatgattggcgaaatgtacgaattaaagctctataaagacatcaccgctggcctatggatgatgcagggcttcttagaaggctatggcactgtgactgaagactttgcctatcgcactgcgattcaaatgggtgcccatttggtgtgttttgggggtgtcgaaggttggggaacagcggaacaagtagagatggttgcttgcatgggaaaagacatcatcatccacgcatggcagaaagagaggaagtggtttgatggcggtgaactcgcttgcctgttccattcctgttga

SEQ ID NO: 12454 - protein, 372 aa, Muscodor strobelii
  misc_feature: SGI Peptide ID NO. 564045
  misc_feature (13)..(369): NCBI GI: 256721201 Blast Desc: NECHADRAFT_17138 [Nectria haematococca mpVI 77-13-4]
  misc_feature (8)..(371): NCBI GI: 256729753 Blast Desc: NECHADRAFT_71201 [Nectria haematococca mpVI 77-13-4]
  misc_feature (1)..(369): NCBI GI: 119496349 Blast Desc: NFIA_017520 [Neosartorya fischeri NRRL 181] gi|119413110|gb|EAW23051.1| conserved [Neosartorya fischeri NRRL 181]
  misc_feature (1)..(371): NCBI GI: 116191719 Blast Desc: CHGG_05577 [Chaetomium globosum CBS 148.51] gi|88181490|gb|EAQ88958.1| CHGG_05577 [Chaetomium globosum CBS 148.51]
  misc_feature (6)..(369): NCBI GI: 46122077 Blast Desc: FG05416.1 [Gibberella zeae PH-1]
  misc_feature (9)..(365): NCBI GI: 157488551 Blast Desc: [Claviceps fusiformis]
  misc_feature (3)..(369): NCBI GI: 255934110 Blast Desc: Pc12g15340 [Penicillium chrysogenum Wisconsin 54-1255] gi|211582955|emb|CAP81161.1| Pc12g15340 [Penicillium chrysogenum Wisconsin 54-1255]
  misc_feature (5)..(369): NCBI GI: 171687062 Blast Desc: protein product [Podospora anserina] gi|170943492|emb|CAP69145.1| protein product [Podospora anserina]
  misc_feature (7)..(369): NCBI GI: 121702357 Blast Desc: conserved [Aspergillus clavatus NRRL 1] gi|119397586|gb|EAW08017.1| conserved [Aspergillus clavatus NRRL 1]
  misc_feature (7)..(369): NCBI GI: 70991236 Blast Desc: conserved [Aspergillus fumigatus Af293] gi|66848099|gb|EAL88429.1| conserved [Aspergillus fumigatus Af293] gi|159130940|gb|EDP56053.1| conserved [Aspergillus A1163]
MDTVRREEINSRVLRNLENSQYAATSLVPLAGGTANFIYHANLKTPLQDGTRDVLVKHGEDFVANSPSFKIALSRCRVEEESLKTLSNLPIKAQAESSGSNFVVRTPKFYHFDKQNNTQIQEILLNGNNLKTYALTTYSPNTPDSLRSECHQLGQALGKWLHNFHRWSATQSELRKTLAGNKEMQQLKHMINFSWLQDRVVQFPALSEAKDIFAQVKDMAAKELEDESQLQPIHGDFWTGNILLPGGSIQEGGEVTMFVIDWEMSQIGLPNLDLGQMIGEMYELKLYKDITAGLWMMQGFLEGYGTVTEDFAYRTAIQMGAHLVCFGGVEGWGTAEQVEMVACMGKDIIIHAWQKERKWFDGGELACLFHSC

SEQ ID NO: 12455 - DNA, 657 bp, Muscodor strobelii
  misc_feature: SGI EST ID NO. CUFF.29501.0
  misc_feature: Variant of the nucleotide sequence at SEQ ID NO 12453
agactctggcaggtaacaaggagatgcaacagttgaaacacatgatcaacttctcatggctccaagaccgcgtggtgcagtttccagctctctctgaggcgaaagatatttttgcacaggttaaggacatggcagctaaagagctcgaagacgaaagtcaattacaaccaattcatggtgatttttggaccggaaacattttattgcctggaggttcaattcaagagggcggtgaagtgacaatgtttgttatagactgggagatgtcacaaattgggttgccaaatctcgatttgggtcaaatgattggcgaaatgtacgaattaaagctctataaagacatcaccgctggcctatggatgatgcagggcttcttagaaggctatggcactgtgactgaagactttgcctatcgcactgcgattcaaatgggtgcccatttggtgtgttttgggggtgtcgaaggttggggaacagcggaacaagtagagatggttgcttgcatgggaaaagacatcatcatccacgcatggcagaaagagaggaagtggtttgatggcggtgaactcgcttgcctgttccattcctgttgagcaggtaatttcaggtaccgagaagagacttgagaaagccgaatagccgaaagcttgccataaa

SEQ ID NO: 12456 - DNA, 966 bp, Muscodor strobelii
  misc_feature: SGI cDNA ID NO. 564046
  misc_feature: Encodes the peptide sequence at SEQ ID NO 12457
atgtcttcgaccgaaatcgctacgaccgacctgccgacgggcgaccccgtgccctcctcagtgccagcaccagctccgaaaccgaagcctttccctctgggcgccctgctcgcggccggtccatcaaacatcgatgccttcctggcgcatctgcagcgatgtctgtcgacgccgacgggcatcgacacgatcctgctcttcgtgtgctatacctctcgcctcagcagcgcagccctcacaaccctggtccagccagctcttcaccgcagtgccgagcgcctgatcacactggtgagcttcttaccaccgtccgcaacgctcttcttcagcgccaaagccctgccctcgacgagcgtagctgtagtcctcgagcttgctagacggctcaaggcactctccggtttgacgagtgaggcccgcactatcatgcgattatggggactgctgggaatgtacttctgggctcgtcgccttgtcttcaagagacgcgagcagaaagcgggcaatgcgccacaggaagataagttggagaccgcaatcgcatggtcgcaactcggagcttgcatcttgttccagggccttgagaacgttgctttcctctcagccaaaggcgtcctcggcctggcgcccgcgaaccaggccaaggctggcagatggagcgcccgattctggggttcgttcgtcggtctcgagctcatccgtctgttctacgagtcctcgaagcgcggccgtcggacacaggccgagaagttcgcgggcgacaagactatggccgtgttccggaaggaagagcaggagtggacggagacatggcgcaaggctgttgtcagacatttggcttgggcaccactcacgctgcactggagcttggaacagggactggtttctgagatgagtgtgggcgcgctcgcttctattcctagtttgatacagatgcgcgatctatggcagaagacagcagaataa

SEQ ID NO: 12457 - protein, 321 aa, Muscodor strobelii
  misc_feature: SGI Peptide ID NO. 564046
  misc_feature (2)..(320): NCBI GI: 145601995 Blast Desc: MGG_05271 [Magnaporthe grisea 70-15] gi|145010447|gb|EDJ95103.1| MGG_05271 [Magnaporthe grisea 70-15]
  misc_feature (7)..(320): NCBI GI: 261358372 Blast Desc: conserved [Verticillium albo-atrum VaMs.102]
  misc_feature (10)..(320): NCBI GI: 85109360 Blast Desc: NCU06275 [Neurospora crassa OR74A] gi|28924520|gb|EAA33643.1| [Neurospora crassa OR74A]
  misc_feature (42)..(320): NCBI GI: 154303056 Blast Desc: BC1G_09548 [Botryotinia fuckeliana B05.10] gi|150855011|gb|EDN30203.1| BC1G_09548 [Botryotinia fuckeliana B05.10]
  misc_feature (12)..(320): NCBI GI: 256725790 Blast Desc: NECHADRAFT_81857 [Nectria haematococca mpVI 77-13-4]
  misc_feature (28)..(317): NCBI GI: 46111329 Blast Desc: FG02546.1 [Gibberella zeae PH-1]
  misc_feature (3)..(321): NCBI GI: 256724358 Blast Desc: NECHADRAFT_53446 [Nectria haematococca mpVI 77-13-4]
  misc_feature (12)..(320): NCBI GI: 169614209 Blast Desc: SNOG_10242 [Phaeosphaeria nodorum SN15] gi|111061457|gb|EAT82577.1| SNOG_10242 [Phaeosphaeria nodorum SN15]
  misc_feature (10)..(193): NCBI GI: 171685904 Blast Desc: protein product [Podospora anserina] gi|170942913|emb|CAP68566.1| protein product [Podospora anserina]
  misc_feature (45)..(319): NCBI GI: 189199052 Blast Desc: conserved [Pyrenophora tritici-repentis Pt-1C-BFP] gi|187982962|gb|EDU48450.1| conserved [Pyrenophora tritici-repentis Pt-1C-BFP]
MSSTEIATTDLPTGDPVPSSVPAPAPKPKPFPLGALLAAGPSNIDAFLAHLQRCLSTPTGIDTILLFVCYTSRLSSAALTTLVQPALHRSAERLITLVSFLPPSATLFFSAKALPSTSVAVVLELARRLKALSGLTSEARTIMRLWGLLGMYFWARRLVFKRREQKAGNAPQEDKLETAIAWSQLGACILFQGLENVAFLSAKGVLGLAPANQAKAGRWSARFWGSFVGLELIRLFYESSKRGRRTQAEKFAGDKTMAVFRKEEQEWTETWRKAVVRHLAWAPLTLHWSLEQGLVSEMSVGALASIPSLIQMRDLWQKTAE

SEQ ID NO: 12458 - DNA, 2554 bp, Muscodor strobelii
  misc_feature: SGI EST ID NO. CUFF.29518.0
  misc_feature: Variant of the nucleotide sequence at SEQ ID NO 12456
ctgcatccttccagcgggcttcttgacccccaatgcgagtgaaccatgggtattgcatgagggcaagcaatctccgagaatatgttcttacgtgactttgcggcctagcgttcggtctgttgtgcttctctgattgatttctagcatccttgttacttgatatcatcctattgaataaccgacagatcatcgggttcctgtccctcggtattctgctgaagtagtgtttgatcgagcctcatttacttgccgagtttctcccttgctagacgtggtttgttcgcccaagaaacctcgcggtgttgttgagccagctgtcaatctattcgttgcgcccgtctatctagaactgtcgatacatcccgagcgactgtattgcagccaaccaaggtgatcagtattatgtcttcgaccgaaatcgctacgaccgacctgccgacgggcgaccccgtgccctcctcagtgccagcaccagctccgaaaccgaagcctttccctctgggcgccctgctcgcggccggtccatcaaacatcgatgccttcctggcgcatctgcagcgatgtctgtcgacgccgacgggcatcgacacgatcctgctcttcgtgtgctatacctctcgcctcagcagcgcagccctcacaaccctggtccagccagctcttcaccgcagtgccgagcgcctgatcacactggtgagcttcttaccaccgtccgcaacgctcttcttcagcgccaaagccctgccctcgacgagcgtagctgtagtcctcgagcttgctagacggctcaaggcactctccggtttgacgagtgaggcccgcactatcatgcgattatggggactgctgggaatgtacttctgggctcgtcgccttgtcttcaagagacgcgagcagaaagcgggcaatgcgccacaggaagataagttggagaccgcaatcgcatggtcgcaactcggagcttgcatcttgttccagggccttgagaacgttgctttcctctcagccaaaggcgtcctcggcctggcgcccgcgaaccaggccaaggctggcagatggagcgcccgattctggggttcgttcgtcggtctcgagctcatccgtctgttctacgagtcctcgaagcgcggccgtcggacacaggccgagaagttcgcgggcgacaagactatggccgtgttccggaaggaagagcaggagtggacggagacatggcgcaaggctgttgtcagacatttggcttgggcaccactcacgctgcactggagcttggaacagggactggtttctgagatgagtgtgggcgcgctcgcttctattcctagtttgatacagatgcgcgatctatggcagaagacagcagaataaatacgcggtgtatgagagatgtgatgaaggcggaagagacgatgcatatgtgacgggcttattgctttctcatgttttctagtattgtcagcaggcaatacaagataaagtgttcttagtctgagctggagaggaggatatatcatgaacaactaggacaaacaggacggtatcgagctccattcatcgatagagattgcagaataggttcaaacacttagctctcctaacattacaaataggcacgattaacagcccaccagaacaagtatccctacaataatcacctacaggcctaatttataatctctcgaggtcatactatagagcaggaactcacaaatgcgatgtcatggcttacgaagttccggtctcgtgcctttcaggagcatatatattgattaggctacgaagcagatgcatgaagccacgatttttgaggaagcaaaatacaattcctgcaaagctgcaattgttattgtcttgatacaacttcaaaagtctctatctctcgtaattatacatgcgtcttctcgttcaaaatcatgtacttggtatcatcctagggaccgaccgaaaaacgccttgctgatgaagttcacaacaccctgtactcgcctccagattccacattattttcatttactcctattctttggttgcccgaatgctcctcgactgactagcctgcaagtaaggcgatgatccagattgttgtcaaagctccgaccataattccggtcctgcctggcgatgtccttgcagatccagcaataatgacggggtcaaatggactgccgccgccggacgatcccctgccagggcccgctgttttggtggcggatggcgtactcgtgctttcagacgtcaccgtcgttgagacggcgagagtggtgccgagagtggtgctggtggtagcttgctgttcggtcgtcgtggagctctcttcggaactcgcttcagaacttgatgtcgttgaggtcgtctcgctactagcgctgctactagtttgagcagttgttgttccccttgttagagttggtattgagacctcggactgcgacgtactcggctgtaccgtcgttgttatcgtagtagtgaaaaatccaggacataagtcatcaaagagcactccttggatggcggcagccaatggggtgcccaattgtatgctcacacctcgaca

SEQ ID NO: 12459 - DNA, 3033 bp, Muscodor strobelii
  misc_feature: SGI cDNA ID NO. 564047
  misc_feature: Encodes the peptide sequence at SEQ ID NO 12460
atggatccggtcacagtagcaaagttgacagcaaaggccgtgctgatatgtggcaaatatgtcattgctgttctaaatgcgaaagatgaaatggaaaatatcaggacccccttaatgatgttcgaggcgaccgtcaatgacttagaacgagccatacaaatgagtatcgacaatggtgttgacaatgtcagtattgttgcacctctaactcagagaggtggtgtactccatcagtctgctcagcatgtcatggaagtcatcaagctccttggaggcgatgaagaccctggcgacgatactcttgagaatgtgggtattaccaagagacttcgccaactcactctagatgactttctatggccaaagagacggcgagagatacgagggttactagacaagatagaggtgtgcagaggggtcattcatggagcatttccaaatctcactgcccaaatgatacctaaagtcctcgtccaactcaatgactttgagaccaagaggattaccaaatggctgtgtcctgatggcgatgagatccgaacaatgcatacagagaagattagtcttcaagaacaagacacatgcacatggctgctccaagaacaggagtggaaaagttggttgcgtcagggcacagcctcgacaaccgataccaagaagttcatgtggatccatggcatccctggtgctgggaaaacagtcatggcgtctttcatcattgagagagttgcacacgtttgtagatgcaaagggtttgcatactactactgcctacacagccggaagcaagacgaaaccgttcacttcctccagtggacactcaggcaactttgcagacaagcaggcagcgttattcccaacaaaatacacgaagcctacacagcagaacaagggctaggtacgagagatctcttgtgtgccctgagagaaatttctcagcacttcaagaccgtctacatcatcgttgatgctgtcgatgagagcagtcctcgggagaatttgatcaagaccctggtcgagatcggaaccggtcctggattcgataatgtgtcgttgttgttcaccagtcgacatgagccagatattgtgagtcacattgatcgtgtcaaatcaaagtgcagcgaaatctcaatgtccaatcccaatgtctgtgcggacatcaagtgctacatccgcaagcagttggacggtccagattggcggagatggcgcgaagactttctcaaagagatagagaatcgcatcgctcacgaggccaagggaatgtttcgatatgctgtttgccagctggatgtactcaagcgacttggtaacgaggagagcattcgcgatgctcttcagtctcttccaaaagacttgcatgccacttatgagagaatcctagacagcattcacggagcagatcagaaatttgccagaaccgcattggctctgatctgtagcgacaccgccaaggtcccaagtgcagaaatcctagtaaaggcgtgcgtgcacgacattgcttggaaccgcattactcatttcactgttgagagtttgcagcagatctgcggatgtttgatcacgttatcgaccctgcggaatccgccacagacaatatttaatcgagagagggagccatctgttcgatttcatcgtgttcgccttgctcattacagtgtgaaggagtatctgttctactctggtacagcccagggaccggctaagttctttgctctttcagacgacgatattcgaaatctcgatctaactgttgttttcaatggactgggccactgtggcctgctgcgcgacgaagctgatgatccaaaaatgagaatgacccgctatgaggagtactgcttgacgatgacggaaaaggccatcacagaaaatgaccgcgaaagtcgacgctcagatattgtacgcaatgacaagcttcgagatattgtcttgaggacactaactcccgatcatcagcactttagatttctctcaagagcgcacggcatggttctcgttatgaagaacaatttcccaaactggaacaaactcctgatctgggaacgatggccagccgcgaaaagcactggaatcatagcaaatctcgtcctcctgaaatggcttgagcttgcacagcgatatctctctacggagctttttacgaccatgtcccatagcgagaaaaaggtcatgtggaccgcgctcttcaaatccagggacaaggaaagaccgcggaacctccttacgatatgcctggaggagaaagaagtgtccttcttgcgtctcttcatccgccatggcgcaacgtttgaagatgagaccgaggctctctacaccgtgatgcgaattttctacaaggaggatgcaaacggcattgacgtacaccagaatctcaaaatgctcctcgacgcgtgtgcatctgccaacccgagccctgccaatcctaacgatacacaagaattgaacgaaaagactggagatcgacgcatcaagaccacaaacttcatattcacccccttgcaatacgcggtctacaacctcgaacaagactgggtcgagactcttctcgaagaaggtgcagagccaaacatgatcggaacattcgccggtgtcgtccctttcgccttcgaggaggacccgcaacttgatagtaacgatatcgaggtgctcaagaaagtaggtcaacaatcatgtcttcagatctgtgcaagcaccaaaccggcttgggggaggacggcgaattacgctgtgaagggggcgagacagggcatcaataatctgttgctgaagcatggcgccgtggagtttgaggaagaagaagaagatgccactatggcagatgagccaggagagggacctgactctcgtccttcgtctacgacgggcaatgcttcggattcaacgaccgccgattcgcgtcgtcttggtgtgcagagtgaggaagacactggtgttgtctttatgggcatcaggactgttcatgggagcccgccgtcgcgggagcgaagcccggcgaacggtcctgctagaggaactcgctatcgtggttga

SEQ ID NO: 12460 - protein, 1010 aa, Muscodor strobelii
  misc_feature: SGI Peptide ID NO. 564047
  misc_feature (102)..(614): NCBI GI: 116181338 Blast Desc: CHGG_01297 [Chaetomium globosum CBS 148.51] gi|88185594|gb|EAQ93062.1| CHGG_01297 [Chaetomium globosum CBS 148.51]
  misc_feature (183)..(588): NCBI GI: 116208640 Blast Desc: CHGG_03613 [Chaetomium globosum CBS 148.51] gi|88184210|gb|EAQ91678.1| CHGG_03613 [Chaetomium globosum CBS 148.51]
  misc_feature (1)..(558): NCBI GI: 85092908 Blast Desc: NCU02194 [Neurospora crassa OR74A] gi|28921031|gb|EAA30352.1| [Neurospora crassa OR74A]
  misc_feature (4)..(571): NCBI GI: 261361237 Blast Desc: ankyrin repeat protein [Verticillium albo-atrum VaMs.102]
  misc_feature (56)..(860): NCBI GI: 171685124 Blast Desc: protein product [Podospora anserina] gi|170942523|emb|CAP68174.1| protein product [Podospora anserina]
  misc_feature (197)..(654): NCBI GI: 116201001 Blast Desc: CHGG_08385 [Chaetomium globosum CBS 148.51] gi|88176903|gb|EAQ84371.1| CHGG_08385 [Chaetomium globosum CBS 148.51]
  misc_feature (162)..(558): NCBI GI: 119473749 Blast Desc: Ankyrin repeat protein [Neosartorya fischeri NRRL 181] gi|119406903|gb|EAW16853.1| Ankyrin repeat protein [Neosartorya fischeri NRRL 181]
  misc_feature (167)..(571): NCBI GI: 169607437 Blast Desc: SNOG_06775 [Phaeosphaeria nodorum SN15] gi|160701409|gb|EAT85426.2| SNOG_06775 [Phaeosphaeria nodorum SN15]
  misc_feature (1)..(571): NCBI GI: 240281360 Blast Desc: ankyrin repeat protein [Ajellomyces capsulatus H143]
  misc_feature (159)..(559): NCBI GI: 169596849 Blast Desc: SNOG_01194 [Phaeosphaeria nodorum SN15] gi|111069723|gb|EAT90843.1| SNOG_01194 [Phaeosphaeria nodorum SN15]
MDPVTVAKLTAKAVLICGKYVIAVLNAKDEMENIRTPLMMFEATVNDLERAIQMSIDNGVDNVSIVAPLTQRGGVLHQSAQHVMEVIKLLGGDEDPGDDTLENVGITKRLRQLTLDDFLWPKRRREIRGLLDKIEVCRGVIHGAFPNLTAQMIPKVLVQLNDFETKRITKWLCPDGDEIRTMHTEKISLQEQDTCTWLLQEQEWKSWLRQGTASTTDTKKFMWIHGIPGAGKTVMASFIIERVAHVCRCKGFAYYYCLHSRKQDETVHFLQWTLRQLCRQAGSVIPNKIHEAYTAEQGLGTRDLLCALREISQHFKTVYIIVDAVDESSPRENLIKTLVEIGTGPGFDNVSLLFTSRHEPDIVSHIDRVKSKCSEISMSNPNVCADIKCYIRKQLDGPDWRRWREDFLKEIENRIAHEAKGMFRYAVCQLDVLKRLGNEESIRDALQSLPKDLHATYERILDSIHGADQKFARTALALICSDTAKVPSAEILVKACVHDIAWNRITHFTVESLQQICGCLITLSTLRNPPQTIFNREREPSVRFHRVRLAHYSVKEYLFYSGTAQGPAKFFALSDDDIRNLDLTVVFNGLGHCGLLRDEADDPKMRMTRYEEYCLTMTEKAITENDRESRRSDIVRNDKLRDIVLRTLTPDHQHFRFLSRAHGMVLVMKNNFPNWNKLLIWERWPAAKSTGIIANLVLLKWLELAQRYLSTELFTTMSHSEKKVMWTALFKSRDKERPRNLLTICLEEKEVSFLRLFIRHGATFEDETEALYTVMRIFYKEDANGIDVHQNLKMLLDACASANPSPANPNDTQELNEKTGDRRIKTTNFIFTPLQYAVYNLEQDWVETLLEEGAEPNMIGTFAGVVPFAFEEDPQLDSNDIEVLKKVGQQSCLQICASTKPAWGRTANYAVKGARQGINNLLLKHGAVEFEEEEEDATMADEPGEGPDSRPSSTTGNASDSTTADSRRLGVQSEEDTGVVFMGIRTVHGSPPSRERSPANGPARGTRYRG

SEQ ID NO: 12461 - DNA, 4054 bp, Muscodor strobelii
  misc_feature: SGI EST ID NO. CUFF.29536.0
  misc_feature: Variant of the nucleotide sequence at SEQ ID NO 12459
cgaagctgatgatccaaaaatgagaatgacccgctatgaggagtactgcttgacgatgacggaaaaggccatcacagaaaatgaccgcgaaagtcgacgctcagatattgtacgcaatgacaagcttcgagatattgtcttgaggacactaactcccgatcatcagcactttagatttctctcaagagcgcacggcatggttctcgttatgaagaacaatttcccaaactggaacaaactcctgatctgggaacgatggccagccgcgaaaagcactggaatcatagcaaatctcgtcctcctgaaatggcttgagcttgcacagcgatatctctctacggagctttttacgaccatgtcccatagcgagaaaaaggtcatgtggaccgcgctcttcaaatccagggacaaggaaagaccgcggaacctccttacgatatgcctggaggagaaagaagtgtccttcttgcgtctcttcatccgccatggcgcaacgtttgaagatgagaccgaggctctctacaccgtgatgcgaattttctacaaggaggatgcaaacggcattgacgtacaccagaatctcaaaatgctcctcgacgcgtgtgcatctgccaacccgagccctgccaatcctaacgatacacaagaattgaacgaaaagactggagatcgacgcatcaagaccacaaacttcatattcacccccttgcaatacgcggtctacaacctcgaacaagactgggtcgagactcttctcgaagaaggtgcagagccaaacatgatcggaacattcgccggtgtcgtccctttcgccttcgaggaggacccgcaacttgatagtaacgatatcgaggtgctcaagaaagtaggtcaacaatcatgtcttcagatctgtgcaagcaccaaaccggcttgggggaggacggcgaattacgctgtgaagggggcgagacagggcatcaataatctgttgctgaagcatggcgccgtggagtttgaggaagaagaagaagatgccactatggcagatgagccaggagagggacctgactctcgtccttcgtctacgacgggcaatgcttcggattcaacgaccgccgattcgcgtcgtcttggtgtgcagagtgaggaagacactggtgttgtctttatgggcatcaggactgttcatgggagcccgccgtcgcgggagcgaagcccggcgaacggtcctgctagaggaactcgctatcgtggttgatcattgcccttctttagattgactgagaacacttgggaagcgagcgaccagagaatatatcacggacaggagccggtacctacaactgttttgggtacagaatgtgtggctccggatcattctcattatttcggtacatgaagatatgtaccaaaaggaagtgcatgatgtgggagatgagtcgtatgtctagagaaagttgagaacttagacctggatgctgctagctctaggctagatagctgtcgatgaagtgtcatcgacaaaaaaagtagttctctctcttaaaaaatgctatttgatccgcaaaacgtgacgaaattgcaacattcaatactctcagctcatttatagtggtttggtctttatccgaaatacgtacgaaatgcgtgtacatccgactctcctctcgcatacaatagttggctatacaatgattgcaacagatgatatacactcaaactgaatactctcaactcatgatgcaatgcttcatattcagctgctaagaacaatccagcctatccatgccaagaaacacaatatgatatccgcgtcaaggctttcaaaagctgacaatgaagcaaccccaaactccatgcaatgaatccgacaaatgacgaatctgaaacacagctacgatcgtttctggcccatttcctccatccctatgtcatcccaatcctgaccccactcccctatctttccaccgatccatatcccgcctgccgttgcagcgctcgccaacaagaaccagccctcaaaccacctgtccacgaaacttggctcgagcgcgctttcgagggcatcgccgactgcgctgccgacttccttgggaagattgctgcgcaggagcaatgctgcggagataacgtagatagcgctgatctgcccgattagcagagccaaattcgcttgtgcctggtacaataaccccggtgtccacttggcgaatagatggaaagtctgaaggacactgttcgcactggctgccagtatgacgccagacagcagaaaggatatctgtctcgcccaagcgatctgatccagcttcggatcccaatgtttggccaacagtcccaagaaccggttgatgggatcggaggatgagaatgatgcgccacccgagtacaatcggcgcagcgtcgtcaaggttgtggccaagattctgtaaacacaatacagactgaaagcgtacgtcggtacgatgagcaatcttcctaatggagtcgctgcacgctcggattgcgcttgtcgagacttcagcatgcttaatgagttcgcaagattcgcttccatggtctcaagaccggaaatctcgaggcgtaaccctttgatctcggcagcgtcgtttccgccccgaatgctcccgatcattttggtgagatatcctgatttctcattggcggaagcatcggctactttgcgctgtaggaactgcaggcggtgacgcttggtgacgagcatctcgttggtagcatccagaccagcttgctttcgcgcaacgtcggcgtccgtgactggccgccgagacgccttgtttccgaaagtatgccatggtgaggataccgaggcgaaccccgacaaaagcgccatgagagaaatgccgatgacgccaatgcgctcaaggcaggcccgcgccaagctgcccgacggagcaggagatcgaggcttggcaatctgggaacttatgtgcatgatttcgtctttgacaggcaccaggtttcctaaagaccagaacacgaagagccatgcgccgaacagactaaattgcaaaatccacggtatccgcggccatttccctcgcgctgtcttttggaacgaccaaccagatccggaaataatagattgaagctcgaggaacggaataaggacgatgaggaggaacaagagcgtaggcacggtgatgcgcaaggcgatggctcgcgtatgcgggctgacgagctctgaaatttcgcaaagaatcagctcggccagcacagcagcaagaccgatagttgtcgcaaacgcggcagcggccacccgtcgtctcgtagatttggagccatgttcggcatgggcttgttgcaatgctagaggcgcgtcggagggtagatagtggtcatcaccgtccctcgagccttgaaaacgagcaagctgggggaacaagttgcgcagcacgacggcagagacgatgacgaaggtgaagatgaagggcgtcagcgagacggtcgtggacagcagagacggggcggcgcccggcgccgagcaggaatcgtcgtcgcagctgaacagtcgcatctggagtcggttttgtcgggttgacgattattcgaaaattgtgaatataggctggcacgtcgcgggtgtggaggctggctgttagaggggcggagagtggaacgtcatccggtaaaagaggatatgacaaggtgttcaaactatcgatgttgaagtgatggatgcatttggagaaagcgtcggcatccgtcgcggtgaatttgcaaaacgataaacactagacagagggcagaggggatgtgggattacagtaattggtagagatatctgcgatcttcatcagcctcaatttgggactcctgttgggatatgggatgaggattcgcaatccagctctcttagcgtcgtgatagtgcacatggtaaaatgacgaacgggactggctaggcaagacgatgtggggacataggtcgagattatgcaggaaccaccccactattcatctggttctgggaagtcctgcctacgtctcgagcctggcgggtttggtctggatcagaaacgagcctttgaggtgaggaaatgctatcaccc

SEQ ID NO: 12462 - DNA, 1644 bp, Muscodor strobelii
  misc_feature: SGI cDNA ID NO. 564048
  misc_feature: Encodes the peptide sequence at SEQ ID NO 12463
atgcgactgttcagctgcgacgacgattcctgctcggcgccgggcgccgccccgtctctgctgtccacgaccgtctcgctgacgcccttcatcttcaccttcgtcatcgtctctgccgtcgtgctgcgcaacttgttcccccagcttgctcgttttcaaggctcgagggacggtgatgaccactatctaccctccgacgcgcctctagcattgcaacaagcccatgccgaacatggctccaaatctacgagacgacgggtggccgctgccgcgtttgcgacaactatcggtcttgctgctgtgctggccgagctgattctttgcgaaatttcagagctcgtcagcccgcatacgcgagccatcgccttgcgcatcaccgtgcctacgctcttgttcctcctcatcgtccttattccgttcctcgagcttcaatctattatttccggatctggttggtcgttccaaaagacagcgcgagggaaatggccgcggataccgtggattttgcaatttagtctgttcggcgcatggctcttcgtgttctggtctttaggaaacctggtgcctgtcaaagacgaaatcatgcacataagttcccagattgccaagcctcgatctcctgctccgtcgggcagcttggcgcgggcctgccttgagcgcattggcgtcatcggcatttctctcatggcgcttttgtcggggttcgcctcggtatcctcaccatggcatactttcggaaacaaggcgtctcggcggccagtcacggacgccgacgttgcgcgaaagcaagctggtctggatgctaccaacgagatgctcgtcaccaagcgtcaccgcctgcagttcctacagcgcaaagtagccgatgcttccgccaatgagaaatcaggatatctcaccaaaatgatcgggagcattcggggcggaaacgacgctgccgagatcaaagggttacgcctcgagatttccggtcttgagaccatggaagcgaatcttgcgaactcattaagcatgctgaagtctcgacaagcgcaatccgagcgtgcagcgactccattaggaagattgctcatcgtaccgacgtacgctttcagtctgtattgtgtttacagaatcttggccacaaccttgacgacgctgcgccgattgtactcgggtggcgcatcattctcatcctccgatcccatcaaccggttcttgggactgttggccaaacattgggatccgaagctggatcagatcgcttgggcgagacagatatcctttctgctgtctggcgtcatactggcagccagtgcgaacagtgtccttcagactttccatctattcgccaagtggacaccggggttattgtaccaggcacaagcgaatttggctctgctaatcgggcagatcagcgctatctacgttatctccgcagcattgctcctgcgcagcaatcttcccaaggaagtcggcagcgcagtcggcgatgccctcgaaagcgcgctcgagccaagtttcgtggacaggtggtttgagggctggttcttgttggcgagcgctgcaacggcaggcgggatatggatcggtggaaagataggggagtggggtcaggattgggatgacatagggatggaggaaatgggccagaaacgatcgtag

SEQ ID NO: 12463 - protein, 547 aa, Muscodor strobelii
  misc_feature: SGI Peptide ID NO. 564048
  misc_feature (1)..(547): NCBI GI: 39939942 Blast Desc: MGG_05269 [Magnaporthe grisea 70-15] gi|145010449|gb|EDJ95105.1| MGG_05269 [Magnaporthe grisea 70-15]
  misc_feature (6)..(547): NCBI GI: 46111383 Blast Desc: FG02573.1 [Gibberella zeae PH-1]
  misc_feature (4)..(547): NCBI GI: 85082833 Blast Desc: NCU00005 [Neurospora crassa OR74A] gi|28918075|gb|EAA27756.1| conserved [Neurospora crassa OR74A]
  misc_feature (8)..(547): NCBI GI: 156065091 Blast Desc: SS1G_00556 [Sclerotinia sclerotiorum 1980] gi|154691415|gb|EDN91153.1| SS1G_00556 [Sclerotinia sclerotiorum 1980]
  misc_feature (21)..(530): NCBI GI: 189205294 Blast Desc: conserved [Pyrenophora tritici-repentis Pt-1C-BFP] gi|187986081|gb|EDU51569.1| conserved [Pyrenophora tritici-repentis Pt-1C-BFP]
  misc_feature (7)..(534): NCBI GI: 169609975 Blast Desc: SNOG_08079 [Phaeosphaeria nodorum SN15] gi|160701953|gb|EAT84355.2| SNOG_08079 [Phaeosphaeria nodorum SN15]
  misc_feature (229)..(547): NCBI GI: 116207564 Blast Desc: CHGG_03075 [Chaetomium globosum CBS 148.51] gi|88183672|gb|EAQ91140.1| CHGG_03075 [Chaetomium globosum CBS 148.51]
  misc_feature (215)..(547): NCBI GI: 171686018 Blast Desc: protein product [Podospora anserina] gi|170942970|emb|CAP68623.1| protein product [Podospora anserina]
  misc_feature (329)..(547): NCBI GI: 261358404 Blast Desc: conserved [Verticillium albo-atrum VaMs.102]
  misc_feature (5)..(194): NCBI GI: 261358404 Blast Desc: conserved [Verticillium albo-atrum VaMs.102]
MRLFSCDDDSCSAPGAAPSLLSTTVSLTPFIFTFVIVSAVVLRNLFPQLARFQGSRDGDDHYLPSDAPLALQQAHAEHGSKSTRRRVAAAAFATTIGLAAVLAELILCEISELVSPHTRAIALRITVPTLLFLLIVLIPFLELQSIISGSGWSFQKTARGKWPRIPWILQFSLFGAWLFVFWSLGNLVPVKDEIMHISSQIAKPRSPAPSGSLARACLERIGVIGISLMALLSGFASVSSPWHTFGNKASRRPVTDADVARKQAGLDATNEMLVTKRHRLQFLQRKVADASANEKSGYLTKMIGSIRGGNDAAEIKGLRLEISGLETMEANLANSLSMLKSRQAQSERAATPLGRLLIVPTYAFSLYCVYRILATTLTTLRRLYSGGASFSSSDPINRFLGLLAKHWDPKLDQIAWARQISFLLSGVILAASANSVLQTFHLFAKWTPGLLYQAQANLALLIGQISAIYVISAALLLRSNLPKEVGSAVGDALESALEPSFVDRWFEGWFLLASAATAGGIWIGGKIGEWGQDWDDIGMEEMGQKRS

SEQ ID NO: 12464 - DNA, 1020 bp, Muscodor strobelii
  misc_feature: SGI cDNA ID NO. 564049
  misc_feature: Encodes the peptide sequence at SEQ ID NO 12465
atggcagccccgagtaggggtggcactgctgctgccgctctattcaaaaggtcagcgaacatatgcaacagctgtcgaaatgcccaattccggccctattccgacgccgctaccatggccgaagctcaccacctcaagcccaccgaatcacaaccacaccctcctttcacagcctcccgcaagaatgaatacagaataaaaagcggtgtcatcctcacgagaccgccactcctcacccgcggtctcacccccttcgagaacgccttctacttctaccaaaagcgcctgaacgagcgattggtcctccccttccgccacactctctacttcaagaaggataccgcttccgacctcgactggcgcataaagtttgaagagcgtggcagaatcgccgccaaggaactgggtcgctactatgcccagggccgcaatgcctggaacgacgagctgctggtcggcagtaccctgagcgacgaggagcgtgtccgccagatcttgttgaaggacgctgagctgcgcgtcactgaggatggtgaagaggcgccccctgatgagatcgtgcccgttgagcagcctcagccacgagagactgaggcagacaagacgaatgatgtacaccggttagatcgcaaactggaccgcacgctttacttggtggtccagcatagcgattactcatggcagttccctgccatagacatgtctaccgaggagaggttgcacgagactgccacccgggcactcgagtcggccgctggtgtcaacatgaatacttggatggtcggacgtgtcccagtggcacacgtcgtcaagcagcccgtcttcaacgaggacaccacgatggcgcagcgtggccagaagactttcttcctcaagggtagaatcatggctggtcaggccgatctcaagaataacacgatgggtttgagagatttcaattggttgactaaggaggagctgaagactaagtttgacagcgactatatgcacgctgttagaaatatgatggcggacaggtag

SEQ ID NO: 12465 - protein, 339 aa, Muscodor strobelii
  misc_feature: SGI Peptide ID NO. 564049
  misc_feature (1)..(339): NCBI GI: 39940140 Blast Desc: MGG_05170 [Magnaporthe grisea 70-15] gi|145010567|gb|EDJ95223.1| MGG_05170 [Magnaporthe grisea 70-15]
  misc_feature (1)..(339): NCBI GI: 46124755 Blast Desc: FG06755.1 [Gibberella zeae PH-1]
  misc_feature (57)..(339): NCBI GI: 85090829 Blast Desc: NCU07560 [Neurospora crassa OR74A] gi|28919980|gb|EAA29369.1| conserved [Neurospora crassa OR74A]
  misc_feature (1)..(339): NCBI GI: 256732737 Blast Desc: NECHADRAFT_79243 [Nectria haematococca mpVI 77-13-4]
  misc_feature (64)..(339): NCBI GI: 171686274 Blast Desc: protein product [Podospora anserina] gi|170943098|emb|CAP68751.1| protein product [Podospora anserina]
  misc_feature (1)..(336): NCBI GI: 116207776 Blast Desc: CHGG_03181 [Chaetomium globosum CBS 148.51] gi|88183778|gb|EAQ91246.1| CHGG_03181 [Chaetomium globosum CBS 148.51]
  misc_feature (20)..(339): NCBI GI: 189209640 Blast Desc: 50S ribosomal subunit L30 [Pyrenophora tritici-repentis Pt-1C-BFP] gi|187977245|gb|EDU43871.1| 50S ribosomal subunit L30 [Pyrenophora tritici-repentis Pt-1C-BFP]
  misc_feature (1)..(339): NCBI GI: 259483367 Blast Desc: TPA: 50S ribosomal subunit L30 (AFU_orthologue; AFUA_2G16970) [Aspergillus nidulans FGSC A4]
  misc_feature (1)..(339): NCBI GI: 242761633 Blast Desc: 50S ribosomal subunit L30 [Talaromyces stipitatus ATCC 10500] gi|218723414|gb|EED22831.1| 50S ribosomal subunit L30 [Talaromyces stipitatus ATCC 10500]
  misc_feature (1)..(339): NCBI GI: 67900594 Blast Desc: AN7284.2 [Aspergillus nidulans FGSC A4] gi|40742145|gb|EAA61335.1| AN7284.2 [Aspergillus nidulans FGSC A4]
MAAPSRGGTAAAALFKRSANICNSCRNAQFRPYSDAATMAEAHHLKPTESQPHPPFTASRKNEYRIKSGVILTRPPLLTRGLTPFENAFYFYQKRLNERLVLPFRHTLYFKKDTASDLDWRIKFEERGRIAAKELGRYYAQGRNAWNDELLVGSTLSDEERVRQILLKDAELRVTEDGEEAPPDEIVPVEQPQPRETEADKTNDVHRLDRKLDRTLYLVVQHSDYSWQFPAIDMSTEERLHETATRALESAAGVNMNTWMVGRVPVAHVVKQPVFNEDTTMAQRGQKTFFLKGRIMAGQADLKNNTMGLRDFNWLTKEELKTKFDSDYMHAVRNMMADR

SEQ ID NO: 12466 - DNA, 1352 bp, Muscodor strobelii
  misc_feature: SGI EST ID NO. CUFF.29578.0
  misc_feature: Variant of the nucleotide sequence at SEQ ID NO 12464
agaaaaaagtcgagtgcatctcgtcaacctagacagctcctggcgcgacttggagccgtgtgttgaagacgacattccattgcgatcggatatcccggctactgcacatctctctcaacgcacgacgtggaagactgtgcagcctattctcatcatggcagccccgagtaggggtggcactgctgctgccgctctattcaaaaggtcagcgaacatatgcaacagctgtcgaaatgcccaattccggccctattccgacgccgctaccatggccgaagctcaccacctcaagcccaccgaatcacaaccacaccctcctttcacagcctcccgcaagaatgaatacagaataaaaagcggtgtcatcctcacgagaccgccactcctcacccgcggtctcacccccttcgagaacgccttctacttctaccaaaagcgcctgaacgagcgattggtcctccccttccgccacactctctacttcaagaaggataccgcttccgacctcgactggcgcataaagtttgaagagcgtggcagaatcgccgccaaggaactgggtcgctactatgcccagggccgcaatgcctggaacgacgagctgctggtcggcagtaccctgagcgacgaggagcgtgtccgccagatcttgttgaaggacgctgagctgcgcgtcactgaggatggtgaagaggcgccccctgatgagatcgtgcccgttgagcagcctcagccacgagagactgaggcagacaagacgaatgatgtacaccggttagatcgcaaactggaccgcacgctttacttggtggtccagcatagcgattactcatggcagttccctgccatagacatgtctaccgaggagaggttgcacgagactgccacccgggcactcgagtcggccgctggtgtcaacatgaatacttggatggtcggacgtgtcccagtggcacacgtcgtcaagcagcccgtcttcaacgaggacaccacgatggcgcagcgtggccagaagactttcttcctcaagggtagaatcatggctggtcaggccgatctcaagaataacacgatgggtttgagagatttcaattggttgactaaggaggagctgaagactaagtttgacagcgactatatgcacgctgttagaaatatgatggcggacaggtagaggtagacgcgaaagcgaggttgagagtaggaaggaaccatggacaagcccatggctgccacttgtaatatacaaacgctgacatagctgtcacagtgtatctacgcattgtatcttatcactgtactatgaatataaataaagcctgaacgcatgcacgcgcccagaactcaaacct

SEQ ID NO: 12467 - DNA, 1353 bp, Muscodor strobelii
  misc_feature: SGI cDNA ID NO. 564050
  misc_feature: Encodes the peptide sequence at SEQ ID NO 12468
atggatgtattggttcaacatcatcctgaatacgtgtcgcttgcgtggggggccatgaagttcctattcgttggtgtagtgaatcatcaaaacctgatacatcgactttccaatggcctttgcgaaatcgcgggcctactatcacgggcagagttagcgctacaattgtttccaacacaacaaactcgtcatatagtcttgtccctctacgcctacatactgaagttcttactccgagctttacgttggtatcaagagagtaaagctatgcaccttgtccacgctatcacgcagcctgctgaactacgatacgacgacatcttgaaaacgatatcagcactgtctcgcaatttgttcgaaacagcagtcttgattggcttggccgagcaacgagatatgcatacggcccagtcaactgcgaagagtgaggtcaaagagctgacaataatagtgagagacattcaaagatcaatcgccgaagaacacactatcaacgcatcagcacggatagaactacgccaaaatttaacagaaattcaagtaggccacgttatcaactttctgtcaactacgaccctcctcgacgcgggtaaaactctacaagtctcgacattcatgcgcaacagacggcgactacgaagctcatctcgtgggcctagtttctggcttgactcgcaaatgcaacagtggaaccaaaaacaagaatcaagtttcataatgattagtgggacgcgtagactacgattccacgtccgggacttctgcacagattcgataatattacttcgcgagacacagatccccgtaatatgggcattgaaagcgacagatattctatccactgaaactgagaacaacttacaccaacaaatcacaatgatagaaattctgaaatgcttaatttcccaagcaatccaaatcaacacatcgctccacacagacgccgctctcacacctcggctagcagcctaccatgcagcaaggacagagaaagactggatggacatctttgcttcagtcatacaagggattccccaactatatgtcttcatagaccaggagctaatccactcccaatggacacaaggagacgtgtcatggccaaccacaatccagaggatgcttgacgatttacgtcagcggaattgtccgagtatcatcaaactagctcttgtaagctacggatctcgcactttccaagaaatgggcaaagctagcccgattgtgcgtgttggtgggatgcacaacaaccgcgaagctaccaaatcgagacgaggaagaggaggtattggtgccgcaactttggcgcaaagggggaaaatgaacctgagacagcgtgggatgcgcttgtaa

SEQ ID NO: 12468 - protein, 450 aa, Muscodor strobelii
  misc_feature: SGI Peptide ID NO. 564050
  misc_feature (92)..(443): NCBI GI: 154293404 Blast Desc: BC1G_14328 [Botryotinia fuckeliana B05.10] gi|150845309|gb|EDN20502.1| BC1G_14328 [Botryotinia fuckeliana B05.10]
  misc_feature (1)..(398): NCBI GI: 115449839 Blast Desc: [Aspergillus terreus NIH2624] gi|114187658|gb|EAU29358.1| [Aspergillus terreus NIH2624]
  misc_feature (26)..(431): NCBI GI: 116204351 Blast Desc: CHGG_10059 [Chaetomium globosum CBS 148.51] gi|88176187|gb|EAQ83655.1| CHGG_10059 [Chaetomium globosum CBS 148.51]
  misc_feature (1)..(394): NCBI GI: 256726536 Blast Desc: NECHADRAFT_39343 [Nectria haematococca mpVI 77-13-4]
  misc_feature (1)..(399): NCBI GI: 149210699 Blast Desc: MGCH7_ch7g822 [Magnaporthe grisea 70-15] gi|86196777|gb|EAQ71415.1| MGCH7_ch7g822 [Magnaporthe grisea 70-15]
  misc_feature (1)..(399): NCBI GI: 145609736 Blast Desc: MGG_03034 [Magnaporthe grisea 70-15] gi|145017126|gb|EDK01489.1| MGG_03034 [Magnaporthe grisea 70-15]
  misc_feature (40)..(392): NCBI GI: 46105202 Blast Desc: FG00229.1 [Gibberella zeae PH-1]
  misc_feature (1)..(151): NCBI GI: 171685450 Blast Desc: protein product [Podospora anserina] gi|170942686|emb|CAP68339.1| protein product [Podospora anserina]
  misc_feature (1)..(421): NCBI GI: 169604254 Blast Desc: SNOG_05138 [Phaeosphaeria nodorum SN15] gi|160706528|gb|EAT87529.2| SNOG_05138 [Phaeosphaeria nodorum SN15]
  misc_feature (1)..(375): NCBI GI: 189205346 Blast Desc: conserved [Pyrenophora tritici-repentis Pt-1C-BFP] gi|187986107|gb|EDU51595.1| conserved [Pyrenophora tritici-repentis Pt-1C-BFP]
MDVLVQHHPEYVSLAWGAMKFLFVGVVNHQNLIHRLSNGLCEIAGLLSRAELALQLFPTQQTRHIVLSLYAYILKFLLRALRWYQESKAMHLVHAITQPAELRYDDILKTISALSRNLFETAVLIGLAEQRDMHTAQSTAKSEVKELTIIVRDIQRSIAEEHTINASARIELRQNLTEIQVGHVINFLSTTTLLDAGKTLQVSTFMRNRRRLRSSSRGPSFWLDSQMQQWNQKQESSFIMISGTRRLRFHVRDFCTDSIILLRETQIPVIWALKATDILSTETENNLHQQITMIEILKCLISQAIQINTSLHTDAALTPRLAAYHAARTEKDWMDIFASVIQGIPQLYVFIDQELIHSQWTQGDVSWPTTIQRMLDDLRQRNCPSIIKLALVSYGSRTFQEMGKASPIVRVGGMHNNREATKSRRGRGGIGAATLAQRGKMNLRQRGMRL

SEQ ID NO: 12469 - DNA, 1797 bp, Muscodor strobelii
  misc_feature: SGI EST ID NO. CUFF.29543.0
  misc_feature: Variant of the nucleotide sequence at SEQ ID NO 12467
ctggattcaataccatgtacaatcaccgacgtgctagcttctgtgcagagtgctcagcgccattacgaagcacgcaaaggaggctcaaagacacgacagattctcgtagacgtctctgagaagattcatcactatggcttcgtcatggatgtattggttcaacatcatcctgaatacgtgtcgcttgcgtggggggccatgaagttcctattcgttggtgtagtgaatcatcaaaacctgatacatcgactttccaatggcctttgcgaaatcgcgggcctactatcacgggcagagttagcgctacaattgtttccaacacaacaaactcgtcatatagtcttgtccctctacgcctacatactgaagttcttactccgagctttacgttggtatcaagagagtaaagctatgcaccttgtccacgctatcacgcagcctgctgaactacgatacgacgacatcttgaaaacgatatcagcactgtctcgcaatttgttcgaaacagcagtcttgattggcttggccgagcaacgagatatgcatacggcccagtcaactgcgaagagtgaggtcaaagagctgacaataatagtgagagacattcaaagatcaatcgccgaagaacacactatcaacgcatcagcacggatagaactacgccaaaatttaacagaaattcaagtaggccacgttatcaactttctgtcaactacgaccctcctcgacgcgggtaaaactctacaagtctcgacattcatgcgcaacagacggcgactacgaagctcatctcgtgggcctagtttctggcttgactcgcaaatgcaacagtggaaccaaaaacaagaatcaagtttcataatgattagtgggacgcgtagactacgattccacgtccgggacttctgcacagattcgataatattacttcgcgagacacagatccccgtaatatgggcattgaaagcgacagatattctatccactgaaactgagaacaacttacaccaacaaatcacaatgatagaaattctgaaatgcttaatttcccaagcaatccaaatcaacacatcgctccacacagacgccgctctcacacctcggctagcagcctaccatgcagcaaggacagagaaagactggatggacatctttgcttcagtcatacaagggattccccaactatatgtcttcatagaccaggagctaatccactcccaatggacacaaggagacgtgtcatggccaaccacaatccagaggatgcttgacgatttacgtcagcggaattgtccgagtatcatcaaactagctcttgtaagctacggatctcgcactttccaagaaatgggcaaagctagcccgattgtgcgtgttggtgggatgcacaacaaccgcgaagctaccaaatcgagacgaggaagaggaggtattggtgccgcaactttggcgcaaagggggaaaatgaacctgagacagcgtgggatgcgcttgtaagacgattcggccaggtatttacagtgtgtcgttccttaactcgaaacgcgtacgaaatacgtgcgcatctgatcctcaataaatacagtggtcaaaatacaattaagactattcaatctggatcggcgatgctccaagtgactaaaaaccagctcacacactatctaatggcggcggtccatcgaattcagctaggtgtacattgatgtcgatgtaatgtacaaaccatgaagaaataattggtaactcctccaaaaagttgcaataccaccgggtcaaaaaatagggtgacgaaggaaa

SEQ ID NO: 12470 - DNA, 1638 bp, Muscodor strobelii
  misc_feature: SGI cDNA ID NO. 564051
  misc_feature: Encodes the peptide sequence at SEQ ID NO 12471
atggctgccttcatcgatacactatcggctgatgagaaggtccagttccagttgctgctggattatgtcatgttcgaatacgagaaagagtatgtctcagtcgataatttattgcagaacggcaagattctcgctggtcacgttatgtaccttttcagaccgaatgagatattggtggagggcagagacaacaacatcagagcttataagaccacatcatggctacgtcaatcatccaaagatgcacgaaatctacgcaggtcgccgaaggaaacatcgcggccacataagtcacgcaagagtcagcaagacacgccaaatttagtggataaatccacaccaaaaacacaaatttgggtaattgattcctccggctggaactattccggtatcttttcacgcgagagtaaacgacatgaactgaaaatagatgcgcgggaaaacgctgagttgtgtatcgaagacctgacaataagaccgttgagacattctggagaagtctcagaacggctccatcgcagaggttcaatgttttggagatgtcgttttcgacatctcgtctcgtaccacgatgaacaggcccacaaaactcagtataccagcaatgagagattcatggttgatatgtccgtataccgggagcttcataagaacgaaaacgtcccgaaagatgatctgggaagtgagctcatgggaaaagaatccccaccatttgacatgttcatgtacctgatgcctcccactatcaagggctttggcctgaaaacaaagaagtggttcgatctttgggtcgacaacatggccgaagtcacctggaataaagatgcttttgagagtctcgttgtggataggaagacaaagaacctgatccgagccttggtgagcaaccaaattcaggccgagaagtcgaccgatttgatacacggcaaaggaaacggcttgatcctgcttctccatggagggcccggaaccggaaagacgctcacagctgaaagtgttgcagagatcgccgaaaggccactttatcccgtaacctgtggcgacattgggacagagcctaggatggtcgaatcctacctcgagtctgtccttcatctaggtaaaacatggggctgcgttgttcttttagacgaagcagatgtatttcttgagcaaagacgccttgaagatctccaaagaaacgctctagtatctgttttcttgagagtcctagaatactacgatggcatactggtattgacaagcaatcgtgttgggacattcgatgaggcgttcaaatcacgcattcagcttgctttgcactacccaaaccttagtgcatatcaacgaatacaaatttggaacaatttcataaaccgtttggagaaattagaggagtcagatattgatttcgacagtctgcgagataatgttgaacaccttgcaaagcataagatgaacggccgacaaatacgcaataccatcacgacagcgagacagtatgcgaagtgggagaatcaaaagctggactataagatgatggaagatatcattgagacatcgggccgatttgacaggtatatcgagaaactaaatggcggctactcgcaagatcaattggccgaagacgaaggggttagattgtcggaagctgtatga

SEQ ID NO: 12471 - protein, 545 aa, Muscodor strobelii
  misc_feature: SGI Peptide ID NO. 564051
  misc_feature (315)..(497): Pfam Id: PF00004 Pfam Desc: ATPase family associated with various cellular activities (AAA)
  misc_feature (315)..(495): Pfam Id: PF00004 Pfam Desc: ATPase family associated with various cellular activities (AAA)
  misc_feature (8)..(527): NCBI GI: 255932979 Blast Desc: Pc12g11420 [Penicillium chrysogenum Wisconsin 54-1255] gi|211582579|emb|CAP80769.1| Pc12g11420 [Penicillium chrysogenum Wisconsin 54-1255]
  misc_feature (8)..(540): NCBI GI: 115449835 Blast Desc: [Aspergillus terreus NIH2624] gi|114187657|gb|EAU29357.1| [Aspergillus terreus NIH2624]
  misc_feature (8)..(540): NCBI GI: 212545270 Blast Desc: conserved [Penicillium marneffei ATCC 18224] gi|210065758|gb|EEA19852.1| conserved [Penicillium marneffei ATCC 18224]
  misc_feature (3)..(540): NCBI GI: 46105200 Blast Desc: FG00228.1 [Gibberella zeae PH-1]
  misc_feature (5)..(540): NCBI GI: 171685452 Blast Desc: protein product [Podospora anserina] gi|170942687|emb|CAP68340.1| protein product [Podospora anserina]
  misc_feature (3)..(540): NCBI GI: 169619754 Blast Desc: SNOG_13075 [Phaeosphaeria nodorum SN15] gi|111058282|gb|EAT79402.1| SNOG_13075 [Phaeosphaeria nodorum SN15]
  misc_feature (18)..(540): NCBI GI: 46133953 Blast Desc: FG09116.1 [Gibberella zeae PH-1]
  misc_feature (8)..(539): NCBI GI: 212532637 Blast Desc: conserved [Penicillium marneffei ATCC 18224] gi|210071839|gb|EEA25928.1| conserved [Penicillium marneffei ATCC 18224]
  misc_feature (231)..(540): NCBI GI: 169615523 Blast Desc: SNOG_10919 [Phaeosphaeria nodorum SN15] gi|160702979|gb|EAT81418.2| SNOG_10919 [Phaeosphaeria nodorum SN15]
  misc_feature (201)..(540): NCBI GI: 212545829 Blast Desc: conserved [Penicillium marneffei ATCC 18224] gi|210064588|gb|EEA18683.1| conserved [Penicillium marneffei ATCC 18224]
MAAFIDTLSADEKVQFQLLLDYVMFEYEKEYVSVDNLLQNGKILAGHVMYLFRPNEILVEGRDNNIRAYKTTSWLRQSSKDARNLRRSPKETSRPHKSRKSQQDTPNLVDKSTPKTQIWVIDSSGWNYSGIFSRESKRHELKIDARENAELCIEDLTIRPLRHSGEVSERLHRRGSMFWRCRFRHLVSYHDEQAHKTQYTSNERFMVDMSVYRELHKNENVPKDDLGSELMGKESPPFDMFMYLMPPTIKGFGLKTKKWFDLWVDNMAEVTWNKDAFESLVVDRKTKNLIRALVSNQIQAEKSTDLIHGKGNGLILLLHGGPGTGKTLTAESVAEIAERPLYPVTCGDIGTEPRMVESYLESVLHLGKTWGCVVLLDEADVFLEQRRLEDLQRNALVSVFLRVLEYYDGILVLTSNRVGTFDEAFKSRIQLALHYPNLSAYQRIQIWNNFINRLEKLEESDIDFDSLRDNVEHLAKHKMNGRQIRNTITTARQYAKWENQKLDYKMMEDIIETSGRFDRYIEKLNGGYSQDQLAEDEGVRLSEAV

SEQ ID NO: 12472 - DNA, 471 bp, Muscodor strobelii
  misc_feature: SGI EST ID NO. CUFF.29551.0
  misc_feature: Variant of the nucleotide sequence at SEQ ID NO 12470
ctttttcaacatacctttagcattgatttagacgaggagtttgaagaagaatctttgcagaaaattcttgtggctccttacctaatatttttccacagccgttggaacatggctgccttcatcgatacactatcggctgatgagaaggtccagttccagttgctgctggattatgtcatgttcgaatacgagaaagagtatgtctcagtcgataatttattgcagaacggcaagattctcgctggtcacgttatgtaccttttcagaccgaatgagatattggtggagggcagagacaacaacatcagagcttataagaccacatcatggctacgtcaatcatccaaagatgcacgaaatctacgcaggtcgccgaaggaaacatcgcggccacataagtcacgcaagagtcagcaagacacgccaaatttagtggataaatccacaccaaaaacacaaatttgggtaatt

SEQ ID NO: 12473 - DNA, 480 bp, Muscodor strobelii
  misc_feature: SGI cDNA ID NO. 564052
  misc_feature: Encodes the peptide sequence at SEQ ID NO 12474
atggagacgcacgcgggcccccgtcgcggtccaggttccgaacttatcacctacacgacaccactcgattggctatcgcgctttaccggagctcaggaattcaagcgctgggcctcggctctgaatctcaattatagcgaatggcgcgtgcagcggactcgggctatcgaccgagagcttgtatatcactacttctcaccgaccaccggctgcatggataagtcgcagcttttgaagggctaccaagatatgatgagggctacagggcgtgaaccggatgaagactccaaggctatggattgccggctcagtctagtgctctttgaagcgcccgatgttatcggtttaattgacttcaaaagaacaggtcagccgatgcccgactccagacaaacaactaagaaccccaggtctgccaatgatgccgggttcactgccctcagccatcgggaagccaaagtaagtgatttaacctattaa

SEQ ID NO: 12474 - protein, 159 aa, Muscodor strobelii
  misc_feature: SGI Peptide ID NO. 564052
METHAGPRRGPGSELITYTTPLDWLSRFTGAQEFKRWASALNLNYSEWRVQRTRAIDRELVYHYFSPTTGCMDKSQLLKGYQDMMRATGREPDEDSKAMDCRLSLVLFEAPDVIGLIDFKRTGQPMPDSRQTTKNPRSANDAGFTALSHREAKVSDLTY

SEQ ID NO: 12475 - DNA, 1356 bp, Muscodor strobelii
  misc_feature: SGI cDNA ID NO. 564053
  misc_feature: Encodes the peptide sequence at SEQ ID NO 12476
atggcgagtcgcttcctggcagcgttgctggctgttgtgccctggatggtctcagctcaggcagagaagccagtatatgcacatttcatggttggcattgtcgaaaaatacacggtggatgattggaaggcggacattgcacaggcacaggctatcggtattgatggcttcgcattaaactgcgcgccggagcgggtcgacagctacactcccaagcagcttgccaatgcttatcaagctgccgaggagatgggcttcacagtgttcatctccttcgacttcgcgtactggtctaccggtgatacggccctaatcaccgatattgttggaaactacagctctcatccagctcaggctcgctatagcgaggcgcgccaaaggcgcaatcataagctcacaacatcacacatagatgatggtgcgatcgtaagcacgttcgtcggcgataacatggactggaatgcggtcaagaatgctctaccaggccaaaagatcaccgcgctgcccaacattcaggacccatcatttttggcgagcgcgcagactggactcgacggcgccttctcgtggtatgggtggcctaccgacggtggtaatagtattgattttgaacaccgactaacgaggactctttttggttatcagattcccggtccaattaccacaatctgggacgaccgcttcatctcgaacctcgccgggagaccatatatggctcctgtatcgccttggttctttactcactttaacacgaagaactgggttttcatttgcgaggagcagccgactatccgttgggaacagatgctcagcatgaaaccccaacttgttgaaattatcacatggaacgattttggcgaaagccattacatcagtgggagcgagccgaaccattcggacgacggctctagcgcctgggctacaggctatcctcacgatggctggcgtacgctctgggcgccttacatagcagcatataagtccggcgctgacgcaccgaccgtcaagtccgatcaactcgtatactggtatcgcacaacaccaaaagcgaccgtgtgcacgggagacacactcggccgaccaaatggcgttgacttgttggccgatgttgtgttcgttgctacgatgttgacctcgcccgccgagttgaccgtcacgagcggtagcaatgcgccagtaaccgtgaccgtggaggcgggtatacatacgtctaacttcacgatgggagttggccagcagactttttcagtctcacgcaatggcgcgcagatcattagtggtactagcgagaaggatattgcgagctcgtgcgtcacgtacaactacaatccttatgttggcgtgttgtctgcttga

SEQ ID NO: 12476 - protein, 451 aa, Muscodor strobelii
  misc_feature: SGI Peptide ID NO. 564053
  misc_feature (24)..(429): Pfam Id: PF03659 Pfam Desc: Glycosyl hydrolase family 71
  misc_feature (230)..(429): Pfam Id: PF03659 Pfam Desc: Glycosyl hydrolase family 71
  misc_feature (25)..(121): Pfam Id: PF03659 Pfam Desc: Glycosyl hydrolase family 71
  misc_feature (1)..(451): NCBI GI: 212544786 Blast Desc: glucan endo-1,3-alpha-glucosidase agn1 precursor, [Penicillium marneffei ATCC 18224] gi|210065516|gb|EEA19610.1| glucan endo-1,3-alpha-glucosidase agn1 precursor, [Penicillium
  misc_feature (6)..(447): NCBI GI: 255932057 Blast Desc: Pc12g07500 [Penicillium chrysogenum Wisconsin 54-1255] gi|211582204|emb|CAP80377.1| Pc12g07500 [Penicillium chrysogenum Wisconsin 54-1255]
  misc_feature (21)..(450): NCBI GI: 27263094 Blast Desc: alpha-1,3-glucanase [Penicillium funiculosum]
  misc_feature (20)..(447): NCBI GI: 169779815 Blast Desc: [Aspergillus oryzae RIB40] gi|83773111|dbj|BAE63239.1| protein product [Aspergillus oryzae]
  misc_feature (1)..(451): NCBI GI: 156045345 Blast Desc: SS1G_09861 [Sclerotinia sclerotiorum 1980] gi|154694256|gb|EDN93994.1| SS1G_09861 [Sclerotinia sclerotiorum 1980]
  misc_feature (20)..(447): NCBI GI: 145236461 Blast Desc: An06g00510 [Aspergillus niger] gi|134075332|emb|CAK44966.1| protein product [Aspergillus niger]
  misc_feature (8)..(451): NCBI GI: 154318698 Blast Desc: BC1G_02738 [Botryotinia fuckeliana B05.10] gi|150857868|gb|EDN33060.1| BC1G_02738 [Botryotinia fuckeliana B05.10]
  misc_feature (17)..(451): NCBI GI: 67900724 Blast Desc: AN7349.2 [Aspergillus nidulans FGSC A4] gi|15072711|emb|CAC48025.1| Mutanase [Emericella nidulans] gi|40742530|gb|EAA61720.1| AN7349.2 [Aspergillus nidulans FGSC ;;
  misc_feature (22)..(451): NCBI GI: 242786665 Blast Desc: alpha-1,3-glucanase/mutanase, [Talaromyces stipitatus ATCC 10500] gi|218720998|gb|EED20417.1| alpha-1,3-glucanase/mutanase, [Talaromyces stipitatus ATCC 10500]
  misc_feature (22)..(451): NCBI GI: 212543429 Blast Desc: alpha-1,3-glucanase/mutanase, [Penicillium marneffei ATCC 18224] gi|210066776|gb|EEA20869.1| alpha-1,3-glucanase/mutanase, [Penicillium marneffei ATCC 18224]
  misc_feature (20)..(449): SWISSPROT Homolog: EC 3.2.1.59 Glucan endo-1,3-alpha-glucosidase
MASRFLAALLAVVPWMVSAQAEKPVYAHFMVGIVEKYTVDDWKADIAQAQAIGIDGFALNCAPERVDSYTPKQLANAYQAAEEMGFTVFISFDFAYWSTGDTALITDIVGNYSSHPAQARYSEARQRRNHKLTTSHIDDGAIVSTFVGDNMDWNAVKNALPGQKITALPNIQDPSFLASAQTGLDGAFSWYGWPTDGGNSIDFEHRLTRTLFGYQIPGPITTIWDDRFISNLAGRPYMAPVSPWFFTHFNTKNWVFICEEQPTIRWEQMLSMKPQLVEIITWNDFGESHYISGSEPNHSDDGSSAWATGYPHDGWRTLWAPYIAAYKSGADAPTVKSDQLVYWYRTTPKATVCTGDTLGRPNGVDLLADVVFVATMLTSPAELTVTSGSNAPVTVTVEAGIHTSNFTMGVGQQTFSVSRNGAQIISGTSEKDIASSCVTYNYNPYVGVLSA

SEQ ID NO: 12477 - DNA, 1281 bp, Muscodor strobelii
  misc_feature: SGI cDNA ID NO. 564054
  misc_feature: Encodes the peptide sequence at SEQ ID NO 12478
atggcctcgtttgcgaccgccacccgcctgtctgcccgcctcgtctcccggcgcgtcgctcaagatgctaccaccagagggttccgcacctcgagtgcttcattagccgcccagaacttcacgatgcccgccttgtcgcctaccatgaccgaggggaatatcgcgagctggaaagtgaaggagggtgactctttctccgccggcgacgtgctgctcgaaatcgagaccgacaaggcctccatggacgtcgaggcccaggacgacggaattctcatgaagatcatgcagggcgacggcgccaagagtgttcaggtcggcgccagaatcggtgtcctcgcagagtctggcgacgatattagctctctggagatccctgccgacgagcagccgtcgaaaaaggaggccaagcaggaagcgcctgcagaaaaggacgactccaagcaggccagcaagtcggaacagacacagaaacaacccagaaaatctggcgaaaaagcaccgccgcaaaagtaccctctgtacccctcggtcgcacacctgataaaggaaaataagctagacgagtctgccatcagcgagatgacaccaactggtcccggtggccgactattgaagggcgatgtgctagcatacctcggaagtgtgtctcccgagcgacctgaggaaatcatgacacgcttcaaccacaacgcacacctcgacctctccaacatcaagatcgccccgcccaaggaggcacctaagaaagccgagaaggcgcctaaagatgtacctgttcccgaggacatactggtgtctttgcccatatctctcgcagctgtcatcgaggcacaaaagaaggtggaaaagacactggggactttcatgcccctatccacattcatcgctcgcgccaccgaactcgccaatgacgagctccccttaccgtctaactataagtcatctgccgacgagctcttcaaccaagttctaggtctcgacaaagtgggacccaagggctcaaggggtcactatctcccccaaatcgctgctctccctccgtctactctcaccggcgttgctcccaaacctaaggccaaggtagacattatcgacttcctcgctagcggttccaagaaatccgctcccaaaacgaggcgtaatcccctgcagcctgggatttccaccggcaccaacttcttcagtctcatggtccctaaggctgaggagaagcgcgccaaagcattcttgcagagagtcaagactgtcttggaggctgagccaggaagactggtgttgtga

SEQ ID NO: 12478 - protein, 426 aa, Muscodor strobelii
  misc_feature: SGI Peptide ID NO. 564054
  misc_feature (38)..(112): Pfam Id: PF00364 Pfam Desc: Biotin-requiring enzyme
  misc_feature (169)..(210): Pfam Id: PF02817 Pfam Desc: e3 binding domain
  misc_feature (175)..(210): Pfam Id: PF02817 Pfam Desc: e3 binding domain
  misc_feature (1)..(426): NCBI GI: 171686760 Blast Desc: protein product [Podospora anserina] gi|170943341|emb|CAP68994.1| protein product [Podospora anserina]
  misc_feature (1)..(426): NCBI GI: 116192087 Blast Desc: CHGG_05761 [Chaetomium globosum CBS 148.51] gi|88181674|gb|EAQ89142.1| CHGG_05761 [Chaetomium globosum CBS 148.51]
  misc_feature (1)..(426): NCBI GI: 46125701 Blast Desc: FG07228.1 [Gibberella zeae PH-1]
  misc_feature (28)..(426): NCBI GI: 256732796 Blast Desc: NECHADRAFT_38763 [Nectria haematococca mpVI 77-13-4]
  misc_feature (1)..(425): NCBI GI: 164428782 Blast Desc: NCU00050 [Neurospora crassa OR74A] gi|157072278|gb|EAA26925.2| NCU00050 [Neurospora crassa OR74A]
  misc_feature (28)..(426): NCBI GI: 169595864 Blast Desc: SNOG_00677 [Phaeosphaeria nodorum SN15] gi|111071052|gb|EAT92172.1| SNOG_00677 [Phaeosphaeria nodorum SN15]
  misc_feature (1)..(426): NCBI GI: 39953580 Blast Desc: MGG_08842 [Magnaporthe grisea 70-15] gi|145021223|gb|EDK05352.1| MGG_08842 [Magnaporthe grisea 70-15]
  misc_feature (42)..(426): NCBI GI: 189202552 Blast Desc: pyruvate dehydrogenase protein x component [Pyrenophora tritici-repentis Pt-1C-BFP] gi|187984711|gb|EDU50199.1| pyruvate dehydrogenase protein x
  misc_feature (49)..(426): NCBI GI: 156037724 Blast Desc: SS1G_12576 [Sclerotinia sclerotiorum 1980] gi|154697984|gb|EDN97722.1| SS1G_12576 [Sclerotinia sclerotiorum 1980]
  misc_feature (42)..(426): NCBI GI: 154299138 Blast Desc: BC1G_11747 [Botryotinia fuckeliana B05.10] gi|150857450|gb|EDN32642.1| BC1G_11747 [Botryotinia fuckeliana B05.10]
  misc_feature (6)..(218): SWISSPROT Homolog: EC 2.3.1.12 Dihydrolipoyllysine-residue acetyltransferase
MASFATATRLSARLVSRRVAQDATTRGFRTSSASLAAQNFTMPALSPTMTEGNIASWKVKEGDSFSAGDVLLEIETDKASMDVEAQDDGILMKIMQGDGAKSVQVGARIGVLAESGDDISSLEIPADEQPSKKEAKQEAPAEKDDSKQASKSEQTQKQPRKSGEKAPPQKYPLYPSVAHLIKENKLDESAISEMTPTGPGGRLLKGDVLAYLGSVSPERPEEIMTRFNHNAHLDLSNIKIAPPKEAPKKAEKAPKDVPVPEDILVSLPISLAAVIEAQKKVEKTLGTFMPLSTFIARATELANDELPLPSNYKSSADELFNQVLGLDKVGPKGSRGHYLPQIAALPPSTLTGVAPKPKAKVDIIDFLASGSKKSAPKTRRNPLQPGISTGTNFFSLMVPKAEEKRAKAFLQRVKTVLEAEPGRLVL

SEQ ID NO: 12479 - DNA, 1551 bp, Muscodor strobelii
  misc_feature: SGI EST ID NO. CUFF.29609.0
  misc_feature: Variant of the nucleotide sequence at SEQ ID NO 12477
tggggagtgagctaacataatctaagctccgaaatattactaggcccgactcccgacctccaagtccagtcctcaactccacgaccaaaggcgcagagtatcgaggccaaaaaaagctcaattgagcttcaccatcgtcccaacaatggcctcgtttgcgaccgccacccgcctgtctgcccgcctcgtctcccggcgcgtcgctcaagatgctaccaccagagggttccgcacctcgagtgcttcattagccgcccagaacttcacgatgcccgccttgtcgcctaccatgaccgaggggaatatcgcgagctggaaagtgaaggagggtgactctttctccgccggcgacgtgctgctcgaaatcgagaccgacaaggcctccatggacgtcgaggcccaggacgacggaattctcatgaagatcatgcagggcgacggcgccaagagtgttcaggtcggcgccagaatcggtgtcctcgcagagtctggcgacgatattagctctctggagatccctgccgacgagcagccgtcgaaaaaggaggccaagcaggaagcgcctgcagaaaaggacgactccaagcaggccagcaagtcggaacagacacagaaacaacccagaaaatctggcgaaaaagcaccgccgcaaaagtaccctctgtacccctcggtcgcacacctgataaaggaaaataagctagacgagtctgccatcagcgagatgacaccaactggtcccggtggccgactattgaagggcgatgtgctagcatacctcggaagtgtgtctcccgagcgacctgaggaaatcatgacacgcttcaaccacaacgcacacctcgacctctccaacatcaagatcgccccgcccaaggaggcacctaagaaagccgagaaggcgcctaaagatgtacctgttcccgaggacatactggtgtctttgcccatatctctcgcagctgtcatcgaggcacaaaagaaggtggaaaagacactggggactttcatgcccctatccacattcatcgctcgcgccaccgaactcgccaatgacgagctccccttaccgtctaactataagtcatctgccgacgagctcttcaaccaagttctaggtctcgacaaagtgggacccaagggctcaaggggtcactatctcccccaaatcgctgctctccctccgtctactctcaccggcgttgctcccaaacctaaggccaaggtagacattatcgacttcctcgctagcggttccaagaaatccgctcccaaaacgaggcgtaatcccctgcagcctgggatttccaccggcaccaacttcttcagtctcatggtccctaaggctgaggagaagcgcgccaaagcattcttgcagagagtcaagactgtcttggaggctgagccaggaagactggtgttgtgaggggtgtggcgggaatactgtacctatagatatcttgtaatgctgaatatgggcgtaaactatagactaaatacctacttgaatgttttcatacgaataaccctttatgttattcattcgctgat

SEQ ID NO: 12480 - DNA, 834 bp, Muscodor strobelii
  misc_feature: SGI cDNA ID NO. 564055
  misc_feature: Reduced expression when VOC is produced
  misc_feature: Encodes the peptide sequence at SEQ ID NO 12481
atggctcctaaatcatctaaaccaaactcgctaaagccatcactaaagccgctcgccactgccatcagtcaacccagccaaccggccctaggcttcgcccaccgcctcgccgccaaatctagtcccaccactttatacgaagcctcgtcccagaaagttttcgcagcctcgagctacacagccggggcattctgcttcggctgcgccctcgtcaacagttggttcaacgtctacaatctccccgtgggcgtatcgcagtttgtccccgtcggcttcggcatcatcgccattgccttcacagctataggcaccatgttcgccttgagaccgagtctagtcattcagtctataaaaatactaccctcgtcacaaacaaagaccccacaaaccacgcagggcctcccacaagttatgctcgaggtcgtagtccgccgcaatttgcctttccctctgccctttcacaagatgcgcgtccgccccgatgaagtcgtgctaccgtatcgcatgatgcagcgccagccggttctgacggagcagcagagagatgcgcagagactggcagatatcaagcgcaggaaggaagagcgcgagtacgaaatgaaccatattatgactgcacccttccgtgatggtggtaaagccggatctatgatttgggctagcattcgtcgtgggctaactggagagggtttcatgccggttttcgtccagggcagtcagttgaagctggatgtcaatggtgggtatgcgctcgaaaacggtcaagcattggaccgcatcgtgaagattgagccggatttggatagggcccagttatcttccaagggcgcttga

SEQ ID NO: 12481 - protein, 277 aa, Muscodor strobelii
  misc_feature: SGI Peptide ID NO. 564055
  misc_feature (12)..(266): NCBI GI: 171686758 Blast Desc: protein product [Podospora anserina] gi|170943340|emb|CAP68993.1| protein product [Podospora anserina]
  misc_feature (18)..(268): NCBI GI: 85078394 Blast Desc: NCU00051 [Neurospora crassa OR74A] gi|28917212|gb|EAA26926.1| [Neurospora crassa OR74A]
  misc_feature (13)..(266): NCBI GI: 116192085 Blast Desc: CHGG_05760 [Chaetomium globosum CBS 148.51] gi|88181673|gb|EAQ89141.1| CHGG_05760 [Chaetomium globosum CBS 148.51]
  misc_feature (23)..(264): NCBI GI: 39969175 Blast Desc: MGG_10198 [Magnaporthe grisea 70-15] gi|145021255|gb|EDK05384.1| MGG_10198 [Magnaporthe grisea 70-15]
  misc_feature (32)..(264): NCBI GI: 154299136 Blast Desc: [Botryotinia fuckeliana B05.10] gi|150857449|gb|EDN32641.1| [Botryotinia fuckeliana B05.10]
  misc_feature (12)..(264): NCBI GI: 156037722 Blast Desc: [Sclerotinia sclerotiorum 1980] gi|154697983|gb|EDN97721.1| [Sclerotinia sclerotiorum 1980]
  misc_feature (35)..(264): NCBI GI: 261360217 Blast Desc: conserved [Verticillium albo-atrum VaMs.102]
  misc_feature (17)..(264): NCBI GI: 256733251 Blast Desc: NECHADRAFT_79356 [Nectria haematococca mpVI 77-13-4]
  misc_feature (31)..(240): NCBI GI: 46125703 Blast Desc: FG07229.1 [Gibberella zeae PH-1]
  misc_feature (1)..(252): NCBI GI: 226292660 Blast Desc: conserved [Paracoccidioides brasiliensis Pb18]
  misc_feature: Useful for introducing or modulating the production of volatile compounds
MAPKSSKPNSLKPSLKPLATAISQPSQPALGFAHRLAAKSSPTTLYEASSQKVFAASSYTAGAFCFGCALVNSWFNVYNLPVGVSQFVPVGFGIIAIAFTAIGTMFALRPSLVIQSIKILPSSQTKTPQTTQGLPQVMLEVVVRRNLPFPLPFHKMRVRPDEVVLPYRMMQRQPVLTEQQRDAQRLADIKRRKEEREYEMNHIMTAPFRDGGKAGSMIWASIRRGLTGEGFMPVFVQGSQLKLDVNGGYALENGQALDRIVKIEPDLDRAQLSSKGA

SEQ ID NO: 12482 - DNA, 1364 bp, Muscodor strobelii
  misc_feature: SGI EST ID NO. CUFF.29590.0
  misc_feature: Variant of the nucleotide sequence at SEQ ID NO 12480
cgacgttgcgcatagtcgggacatcgcaatgcgacaaccgccacttcgtggtagtttctaatgcgaatatgacaatcaccatgccggcctgcaggggcttcacacatccttttcttttcctcgttcgtaataccctccgaacaccagcaaacctcagcatagctcggcctgccataaccactgcactatgtctcccctcgactttggcgcgacaatcgagaaatctctcacaatgcagagctctgcgccaaaagaccactaagccaatggctcctaaatcatctaaaccaaactcgctaaagccatcactaaagccgctcgccactgccatcagtcaacccagccaaccggccctaggcttcgcccaccgcctcgccgccaaatctagtcccaccactttatacgaagcctcgtcccagaaagttttcgcagcctcgagctacacagccggggcattctgcttcggctgcgccctcgtcaacagttggttcaacgtctacaatctccccgtgggcgtatcgcagtttgtccccgtcggcttcggcatcatcgccattgccttcacagctataggcaccatgttcgccttgagaccgagtctagtcattcagtctataaaaatactaccctcgtcacaaacaaagaccccacaaaccacgcagggcctcccacaagttatgctcgaggtcgtagtccgccgcaatttgcctttccctctgccctttcacaagatgcgcgtccgccccgatgaagtcgtgctaccgtatcgcatgatgcagcgccagccggttctgacggagcagcagagagatgcgcagagactggcagatatcaagcgcaggaaggaagagcgcgagtacgaaatgaaccatattatgactgcacccttccgtgatggtggtaaagccggatctatgatttgggctagcattcgtcgtgggctaactggagagggtttcatgccggttttcgtccagggcagtcagttgaagctggatgtcaatggtgggtatgcgctcgaaaacggtcaagcattggaccgcatcgtgaagattgagccggatttggatagggcccagttatcttccaagggcgcttgagaaagattttgataacgtggcaaaagtgcatcgcgtgtatattgaattagcgtgagctgaaggtggcttctgagcagccatgtgtattcgcatttgtaagaaacaggttaaagtgtacaaaagaagatcgggctgtcctggaaggatggatgcatgcagatctaccagtagaggacctgtaatcctataataaaattgaaacccatgagttttagacggctcaaatcaatcagctctaaccagagtactgttcaaacatggaga

SEQ ID NO: 12483 - DNA, 1191 bp, Muscodor strobelii
  misc_feature: SGI cDNA ID NO. 564056
  misc_feature: Elevated expression when VOC is produced
  misc_feature: Encodes the peptide sequence at SEQ ID NO 12484
atgcagtcgttgcacaatgaagtatgcgaagttacaattatcgatcagggctcgcaggattctcgaatcgaaaatgataccaccttcaacctccccccaacatcacaatcggctcagctaccccaggacttagtgaccctgttgtcagcgcgcgaccgacaaaagacacgctggatcaattatataggatggtcatcggcgcttgttagtgatctctcggcgcgatatctcgagaaccacgggtgcttagatctacatgaaccaaaatcccagacactcggtggcccgatcgagaatacacaaggcggtcatttcgcctggattcaaacatcaatctggcaagtctcgccttttgcccaggatatgtcctcagtccgttcctgcacgctagtcatggtcatctgccttccgaccccgaccaccgctggtacaattattacaaacttcattggtagacgaaacctgattgagggattcggacgtagcatggttcgcaagatgcttgccgaccatgccatggggtctcaagctatgagctgtgtctgggtactcgccttgtcccttcttcgaaccatattgacagctccattagaggatatatcttcaattttcgatcccttaacgcgggaaacttttgagattcctcagcttgccgaacttccgtatcttttgaaacagtcacatgaattaatttcaatcgaccgctacgcgtctagactaagtgagatgctagcgttcttcgactcggtcaaggccttccaacataagcaacacgccggggctgccagtaacagctattcgatcgtttcgacgcgctcttctcttgagtcagagctaaccaagaacaagatcctccatgttcagcaattatgcaagacatataccaagcagcacgagaatttactccagatgatgctgtcccatagcgcaaccaagattgcagttcgccttgacggtgggcagcgacttgttgagagattgaccgtgattggacttgtgctggcctcgacgtctgtcatcacagcgccgctctctattctgacagcctattacggcatgaatgtacaggagtttgttgagggatcggctctaacccttttcggtttctggcagactgcgattccagttattgctttgtctaccgcaggtgtcttcttcatagtaacgcgagcgctgattcaaggcgcatga

SEQ ID NO: 12484 - protein, 396 aa, Muscodor strobelii
  misc_feature: SGI Peptide ID NO. 564056
  misc_feature: Useful for introducing or modulating the production of volatile compounds
MQSLHNEVCEVTIIDQGSQDSRIENDTTFNLPPTSQSAQLPQDLVTLLSARDRQKTRWINYIGWSSALVSDLSARYLENHGCLDLHEPKSQTLGGPIENTQGGHFAWIQTSIWQVSPFAQDMSSVRSCTLVMVICLPTPTTAGTIITNFIGRRNLIEGFGRSMVRKMLADHAMGSQAMSCVWVLALSLLRTILTAPLEDISSIFDPLTRETFEIPQLAELPYLLKQSHELISIDRYASRLSEMLAFFDSVKAFQHKQHAGAASNSYSIVSTRSSLESELTKNKILHVQQLCKTYTKQHENLLQMMLSHSATKIAVRLDGGQRLVERLTVIGLVLASTSVITAPLSILTAYYGMNVQEFVEGSALTLFGFWQTAIPVIALSTAGVFFIVTRALIQGA

SEQ ID NO: 12485 - DNA, 1555 bp, Muscodor strobelii
  misc_feature: SGI EST ID NO. CUFF.29594.0
  misc_feature: Variant of the nucleotide sequence at SEQ ID NO 12483
ttacactcagctaaagctgaactttcgagaaccggttcatgacttatcatgctctggaataacagtatctaactctatgctatcttgatacctctctcagcgagaaaccaataaacaccgcccctcgtcactgagatgatattccgcaagtaaatgatcgcgctgtcatggacccgggccagcatgatataatcggcatgaggtcattgctgacgagatcaccctcaattcattcaagtagaacgagtatcgacatgcagtcgttgcacaatgaagtatgcgaagttacaattatcgatcagggctcgcaggattctcgaatcgaaaatgataccaccttcaacctccccccaacatcacaatcggctcagctaccccaggacttagtgaccctgttgtcagcgcgcgaccgacaaaagacacgctggatcaattatataggatggtcatcggcgcttgttagtgatctctcggcgcgatatctcgagaaccacgggtgcttagatctacatgaaccaaaatcccagacactcggtggcccgatcgagaatacacaaggcggtcatttcgcctggattcaaacatcaatctggcaagtctcgccttttgcccaggatatgtcctcagtccgttcctgcacgctagtcatggtcatctgccttccgaccccgaccaccgctggtacaattattacaaacttcattggtagacgaaacctgattgagggattcggacgtagcatggttcgcaagatgcttgccgaccatgccatggggtctcaagctatgagctgtgtctgggtactcgccttgtcccttcttcgaaccatattgacagctccattagaggatatatcttcaattttcgatcccttaacgcgggaaacttttgagattcctcagcttgccgaacttccgtatcttttgaaacagtcacatgaattaatttcaatcgaccgctacgcgtctagactaagtgagatgctagcgttcttcgactcggtcaaggccttccaacataagcaacacgccggggctgccagtaacagctattcgatcgtttcgacgcgctcttctcttgagtcagagctaaccaagaacaagatcctccatgttcagcaattatgcaagacatataccaagcagcacgagaatttactccagatgatgctgtcccatagcgcaaccaagattgcagttcgccttgacggtgggcagcgacttgttgagagattgaccgtgattggacttgtgctggcctcgacgtctgtcatcacagcgccgctctctattctgacagcctattacggcatgaatgtacaggagtttgttgagggatcggctctaacccttttcggtttctggcagactgcgattccagttattgctttgtctaccgcaggtgtcttcttcatagtaacgcgagcgctgattcaaggcgcatgagggctaaaactcaccggcatgttgttgtcacgatttacgtaacaaagttcctgagcagaatcgcagtgatttactccttggtttttcgtccaatgcaattctcatcattg

SEQ ID NO: 12486 - DNA, 1560 bp, Muscodor strobelii
  misc_feature: SGI cDNA ID NO. 564057
  misc_feature: Elevated expression when VOC is produced
  misc_feature: Encodes the peptide sequence at SEQ ID NO 12487
atggatcccgatacgcagatcgatctagcaaaagatgaggcttcggctcaccaggccttacgtagcctgcttgcgacgaacgcagacacaaataatgcgcttctatcgccagcttcggcacttgagcccgatgaaccggcaaatgaatcaagacggtcttcaagaggtaccattgccagcacctttcaagttcgactcaagcctccgtcgtcgtctcgagcccggtcaagcagcaccggtcgaactagtccatctgttgtttcgccgagtgctggaacggagaaggcttccgaagaatacgttgttgcggagctccgacctgtggatcatggattcggcgcgtggagctatgtagccgccgccttctccatgtttatagtcgtatggggttttcctcaagcctttcccattttccagacatatctctccaccggtcctggggcagcataccctaactcgatagcaatcaggctactagctcctgggctacaagacatcgaagaagggatcatattcccattacttcccagaggctccaaataccgacgcaaactagttgttgttggcatactcataatactcgtgtcgctcctacttgccagttacgctacgtcagactggcaaatagttcttttccaaggaattgtttttgggattggtggcatcttcatcaactttgcccatgtctccctcttctcggagtggtttgataagcgcaaaggacaggccatgggcattatttggaccggttggcgagtcggagctctgggcttccccctgatctgtcagtggctgctctatgaacatggatttcaaaagacaattcatgttctcattgggcccatgttgagccttctggtccccgcaatactgcttttcaggggaaggtttgaccacacaatcgtaggatcagctccagatcctccagccatcccgaaacttcgtgctctacgcgcaccatcagttttatactatctggtcgctagtgtcttatttttcctcatcatcaatgtccctagaatgtttattacgacctttgcagccgacattggtctgaaaccttcggatcaagctctcagtctcgtgttgcttacgttaggagacatgatcggcacgtacgctcttggatggttaagtgatacggttcatcatgaagtcctcacggcttgtcttgcgttgctgacgtctttatcaaatgtactgggactcggtttgtctaagaccaaggtcggtgtatttgcctatgccatatctgtaggtctggctagtggtggattcagcaattgtctttttacattctacggcgacctagccaacggcaatggtcagcttttcactgccatacatggtcttttcagtctctttcgcggaagtgctatcctcagtgttggtcctgttggagcagagatcctgcgacgctcccctgccgtagaaattgaagccttcgctatcaatcgatatcgatatcttcttgcctacgccgccggtggtagctttctgagcagtgtgatgattctgtcgaagcacctacttaagagatacaagacaactgtagattag

SEQ ID NO: 12487 - protein, 519 aa, Muscodor strobelii
  misc_feature: SGI Peptide ID NO. 564057
  misc_feature (117)..(464): Pfam Id: PF07690 Pfam Desc: Major Facilitator Superfamily
  misc_feature (182)..(464): Pfam Id: PF07690 Pfam Desc: Major Facilitator Superfamily
  misc_feature (94)..(510): NCBI GI: 189194439 Blast Desc: conserved [Pyrenophora tritici-repentis Pt-1C-BFP] gi|187979122|gb|EDU45748.1| conserved [Pyrenophora tritici-repentis Pt-1C-BFP]
  misc_feature (77)..(475): NCBI GI: 225555322 Blast Desc: conserved [Ajellomyces capsulatus G186AR]
  misc_feature (72)..(428): NCBI GI: 255948384 Blast Desc: Pc22g09470 [Penicillium chrysogenum Wisconsin 54-1255] gi|211591976|emb|CAP98235.1| Pc22g09470 [Penicillium chrysogenum Wisconsin 54-1255]
  misc_feature (93)..(474): NCBI GI: 169619561 Blast Desc: SNOG_12979 [Phaeosphaeria nodorum SN15] gi|160703852|gb|EAT79779.2| SNOG_12979 [Phaeosphaeria nodorum SN15]
  misc_feature (90)..(508): NCBI GI: 261358315 Blast Desc: conserved [Verticillium albo-atrum VaMs.102]
  misc_feature (77)..(428): NCBI GI: 154286848 Blast Desc: conserved [Ajellomyces capsulatus NAm1] gi|150407860|gb|EDN03401.1| conserved [Ajellomyces capsulatus NAm1]
  misc_feature (73)..(428): NCBI GI: 154316530 Blast Desc: BC1G_04196 [Botryotinia fuckeliana B05.10] gi|150845996|gb|EDN21189.1| BC1G_04196 [Botryotinia fuckeliana B05.10]
  misc_feature (88)..(428): NCBI GI: 121712267 Blast Desc: MFS monocarboxylate transporter, [Aspergillus clavatus NRRL 1] gi|119401897|gb|EAW12319.1| MFS monocarboxylate transporter, [Aspergillus clavatus NRRL 1]
  misc_feature (81)..(483): NCBI GI: 238499151 Blast Desc: MFS monocarboxylate transporter, [Aspergillus flavus NRRL3357] gi|220692563|gb|EED48909.1| MFS monocarboxylate transporter, [Aspergillus flavus NRRL3357]
  misc_feature (108)..(475): NCBI GI: 261193839 Blast Desc: MFS monocarboxylate transporter [Ajellomyces dermatitidis SLH14081] gi|239588930|gb|EEQ71573.1| MFS monocarboxylate transporter [Ajellomyces dermatitidis SLH14081]
  misc_feature: Useful for introducing or modulating the production of volatile compounds
MDPDTQIDLAKDEASAHQALRSLLATNADTNNALLSPASALEPDEPANESRRSSRGTIASTFQVRLKPPSSSRARSSSTGRTSPSVVSPSAGTEKASEEYVVAELRPVDHGFGAWSYVAAAFSMFIVVWGFPQAFPIFQTYLSTGPGAAYPNSIAIRLLAPGLQDIEEGIIFPLLPRGSKYRRKLVVVGILIILVSLLLASYATSDWQIVLFQGIVFGIGGIFINFAHVSLFSEWFDKRKGQAMGIIWTGWRVGALGFPLICQWLLYEHGFQKTIHVLIGPMLSLLVPAILLFRGRFDHTIVGSAPDPPAIPKLRALRAPSVLYYLVASVLFFLIINVPRMFITTFAADIGLKPSDQALSLVLLTLGDMIGTYALGWLSDTVHHEVLTACLALLTSLSNVLGLGLSKTKVGVFAYAISVGLASGGFSNCLFTFYGDLANGNGQLFTAIHGLFSLFRGSAILSVGPVGAEILRRSPAVEIEAFAINRYRYLLAYAAGGSFLSSVMILSKHLLKRYKTTVD

SEQ ID NO: 12488 - DNA, 1845 bp, Muscodor strobelii
  misc_feature: SGI EST ID NO. CUFF.29597.0
  misc_feature: Variant of the nucleotide sequence at SEQ ID NO 12486
cagggatggctagaaaaggcacgataggcgagcaggaggaacatcgacaatgtatatcatatcacagcctttcgaggctacctgtcccagcgactcaatctgggaactggtagccattatggcaattctacgagtctaattagcatctctctttccatcccactctaacaactggaccttagactcatgccaaatgctcgaatcgcagaactgctctttcgcggttgttcattctacattgcgtcatggatcccgatacgcagatcgatctagcaaaagatgaggcttcggctcaccaggccttacgtagcctgcttgcgacgaacgcagacacaaataatgcgcttctatcgccagcttcggcacttgagcccgatgaaccggcaaatgaatcaagacggtcttcaagaggtaccattgccagcacctttcaagttcgactcaagcctccgtcgtcgtctcgagcccggtcaagcagcaccggtcgaactagtccatctgttgtttcgccgagtgctggaacggagaaggcttccgaagaatacgttgttgcggagctccgacctgtggatcatggattcggcgcgtggagctatgtagccgccgccttctccatgtttatagtcgtatggggttttcctcaagcctttcccattttccagacatatctctccaccggtcctggggcagcataccctaactcgatagcaatcaggctactagctcctgggctacaagacatcgaagaagggatcatattcccattacttcccagaggctccaaataccgacgcaaactagttgttgttggcatactcataatactcgtgtcgctcctacttgccagttacgctacgtcagactggcaaatagttcttttccaaggaattgtttttgggattggtggcatcttcatcaactttgcccatgtctccctcttctcggagtggtttgataagcgcaaaggacaggccatgggcattatttggaccggttggcgagtcggagctctgggcttccccctgatctgtcagtggctgctctatgaacatggatttcaaaagacaattcatgttctcattgggcccatgttgagccttctggtccccgcaatactgcttttcaggggaaggtttgaccacacaatcgtaggatcagctccagatcctccagccatcccgaaacttcgtgctctacgcgcaccatcagttttatactatctggtcgctagtgtcttatttttcctcatcatcaatgtccctagaatgtttattacgacctttgcagccgacattggtctgaaaccttcggatcaagctctcagtctcgtgttgcttacgttaggagacatgatcggcacgtacgctcttggatggttaagtgatacggttcatcatgaagtcctcacggcttgtcttgcgttgctgacgtctttatcaaatgtactgggactcggtttgtctaagaccaaggtcggtgtatttgcctatgccatatctgtaggtctggctagtggtggattcagcaattgtctttttacattctacggcgacctagccaacggcaatggtcagcttttcactgccatacatggtcttttcagtctctttcgcggaagtgctatcctcagtgttggtcctgttggagcagagatcctgcgacgctcccctgccgtagaaattgaagccttcgctatcaatcgatatcgatatcttcttgcctacgccgccggtggtagctttctgagcagtgtgatgattctgtcgaagcacctacttaagagatacaagacaactgtagattagatgataatagtaataacttcgaagattaattacattctcc

SEQ ID NO: 12489 - DNA, 1179 bp, Muscodor strobelii
  misc_feature: SGI cDNA ID NO. 564058
  misc_feature: Elevated expression when VOC is produced
  misc_feature: Encodes the peptide sequence at SEQ ID NO 12490
atgagcgagtgggcatcattaaggtcgaagacgtattccacgggctatagtccgagaggcggacaagtgcggaatccgtttaatttgatgaaaagccctttcgggtccagttcgggttctgcagtggccgtgtccgcaaatttcgttcctatcgcatttggtaccgaaaccgacacatctattatcggtccggcttcaattaatggcgtagttggtatcaaacctaccgtgggactaacgtcacgagctggcgttattcctatcagtcgacatatggatagcgtagggccaattgcgcgcaccgtagctgatgctgtgtatgcgttagacgccactgccggcgaagatcccgatgatatggcaacagtaacccaggaaaggcctgttcaagaacttccgtatagccagtatctgtcttctgcagaagccctccaaggggcacgatttgggcttcctgtgaagaggtgctgggagtttgtaccacccagctgcaaggcggtcgctaccaacgttctcgatgctatgaagcgagctggagctgaagttatcgaggaacgtactaacgaaagcggtacctgggactgggagcacggagaacctccatattcagagtggacggtcgccaaagtagacgcatataacgatatcaactcatatatccatgatcttaccgaaagcccggtgcgatcaatcgaagacattattgagtacaatacggaaaatgcaggcacagaaggcggtttaccgggagttatcccagcttttgacggtcaacccaacttcgaggaaatagtgcagtcaaaaggtgtcgaagacgagacctataggtccgctctgtctcatatacgccggcaaactcgggacaacggactcgacagtgcattggtatacaaggggagtatgcttgatgccctgattttttgcgaccgtcgaggtataggtcagcaatacgctgcgcaagctggatatccgatcatatgtattccgatcgggcttgatagccacggcatgcctatcagtctctcgttccagcaaaccgcgtggggagaatcgaaactagtcaaatgggccagcgcagttgaagatctatggaataaagaaaagggttggagggccataccgacatttgacaatgttcatgccaagaacattcccatcgagaaagttgtcaacgattga

SEQ ID NO: 12490 - protein, 392 aa, Muscodor strobelii
  misc_feature: SGI Peptide ID NO. 564058
  misc_feature (2)..(354): Pfam Id: PF01425 Pfam Desc: Amidase
  misc_feature (13)..(184): Pfam Id: PF01425 Pfam Desc: Amidase
  misc_feature (1)..(386): NCBI GI: 115399428 Blast Desc: conserved [Aspergillus terreus NIH2624] gi|114192186|gb|EAU33886.1| conserved [Aspergillus terreus NIH2624]
  misc_feature (1)..(386): NCBI GI: 242789754 Blast Desc: amidase family protein [Talaromyces stipitatus ATCC 10500] gi|218718016|gb|EED17436.1| amidase family protein [Talaromyces stipitatus ATCC 10500]
  misc_feature (1)..(389): NCBI GI: 171683744 Blast Desc: protein product [Podospora anserina] gi|170941832|emb|CAP67485.1| protein product [Podospora anserina]
  misc_feature (1)..(386): NCBI GI: 70992933 Blast Desc: amidase family protein [Aspergillus fumigatus Af293] gi|66848948|gb|EAL89277.1| amidase family protein [Aspergillus fumigatus Af293]
  misc_feature (1)..(386): NCBI GI: 154302426 Blast Desc: BC1G_09997 [Botryotinia fuckeliana B05.10] gi|150855485|gb|EDN30677.1| BC1G_09997 [Botryotinia fuckeliana B05.10]
  misc_feature (1)..(386): NCBI GI: 159130232 Blast Desc: amidase family protein [Aspergillus fumigatus A1163]
  misc_feature (1)..(386): NCBI GI: 255954539 Blast Desc: Pc21g09860 [Penicillium chrysogenum Wisconsin 54-1255] gi|211589733|emb|CAP95883.1| Pc21g09860 [Penicillium chrysogenum Wisconsin 54-1255]
  misc_feature (1)..(386): NCBI GI: 145231345 Blast Desc: An02g00190 [Aspergillus niger] gi|134056059|emb|CAK96234.1| protein product [Aspergillus niger]
  misc_feature (1)..(386): NCBI GI: 19115930 Blast Desc: amidase () [Schizosaccharomyces pombe] gi|74638855|sp|Q9URY4.1|YI01_SCHPO RecName: Full= amidase C869.01; Flags: Precursor gi|6224592|emb|CAB60011.1| amidase ()
  misc_feature (1)..(386): NCBI GI: 119473329 Blast Desc: amidase family protein [Neosartorya fischeri NRRL 181] gi|119406721|gb|EAW16672.1| amidase family protein [Neosartorya fischeri NRRL 181]
  misc_feature (1)..(386): SWISSPROT Homolog: EC 3.5.1.4 Amidase
  misc_feature: Useful for introducing or modulating the production of volatile compounds
MSEWASLRSKTYSTGYSPRGGQVRNPFNLMKSPFGSSSGSAVAVSANFVPIAFGTETDTSIIGPASINGVVGIKPTVGLTSRAGVIPISRHMDSVGPIARTVADAVYALDATAGEDPDDMATVTQERPVQELPYSQYLSSAEALQGARFGLPVKRCWEFVPPSCKAVATNVLDAMKRAGAEVIEERTNESGTWDWEHGEPPYSEWTVAKVDAYNDINSYIHDLTESPVRSIEDIIEYNTENAGTEGGLPGVIPAFDGQPNFEEIVQSKGVEDETYRSALSHIRRQTRDNGLDSALVYKGSMLDALIFCDRRGIGQQYAAQAGYPIICIPIGLDSHGMPISLSFQQTAWGESKLVKWASAVEDLWNKEKGWRAIPTFDNVHAKNIPIEKVVND

SEQ ID NO: 12491 - DNA, 181 bp, Muscodor strobelii
  misc_feature: SGI cDNA ID NO. 564059
  misc_feature: Reduced expression when VOC is produced
  misc_feature: Encodes the peptide sequence at SEQ ID NO 12492
atgccgcgtctactctccactctcctgaccctgcgtcgcgaccctcggctcctgaagctgccgccgtacctgtcgctgacgtgcatcgtcgtcggcgtggcctggctgctgttgctgccgctcaacgactactcgcggcgcacctacatctcggagaatgcgctgctgccgggccaggtcc

SEQ ID NO: 12492 - protein, 60 aa, Muscodor strobelii
  misc_feature: SGI Peptide ID NO. 564059
  misc_feature (1)..(60): NCBI GI: 85093926 Blast Desc: NCU02368 [Neurospora crassa OR74A] gi|28921243|gb|EAA30553.1| conserved [Neurospora crassa OR74A]
  misc_feature (1)..(60): NCBI GI: 261358898 Blast Desc: GPI transamidase component GAA1 [Verticillium albo-atrum VaMs.102]
  misc_feature (1)..(60): NCBI GI: 189091880 Blast Desc: [Podospora anserina] gi|27803050|emb|CAD60753.1| protein product [Podospora anserina] gi|188219293|emb|CAP49273.1| protein product [Podospora anserina]
  misc_feature (1)..(60): NCBI GI: 145616164 Blast Desc: MGG_03523 [Magnaporthe grisea 70-15] gi|145009916|gb|EDJ94572.1| MGG_03523 [Magnaporthe grisea 70-15]
  misc_feature (4)..(60): NCBI GI: 189194567 Blast Desc: membrane protein END2 [Pyrenophora tritici-repentis Pt-1C-BFP] gi|187979186|gb|EDU45812.1| membrane protein END2 [Pyrenophora tritici-repentis Pt-1C-BFP]
  misc_feature (1)..(60): NCBI GI: 46127155 Blast Desc: FG07955.1 [Gibberella zeae PH-1]
  misc_feature (6)..(60): NCBI GI: 256721613 Blast Desc: [Nectria haematococca mpVI 77-13-4]
  misc_feature (4)..(60): NCBI GI: 116179566 Blast Desc: conserved [Chaetomium globosum CBS 148.51] gi|88184708|gb|EAQ92176.1| conserved [Chaetomium globosum CBS 148.51]
  misc_feature (8)..(60): NCBI GI: 225683991 Blast Desc: GPI transamidase component (GAA1) [Paracoccidioides brasiliensis Pb03]
  misc_feature (8)..(60): NCBI GI: 258567978 Blast Desc: conserved [Uncinocarpus reesii 1704] gi|237906179|gb|EEP80580.1| conserved [Uncinocarpus reesii 1704]
  misc_feature: Useful for introducing or modulating the production of volatile compounds
MPRLLSTLLTLRRDPRLLKLPPYLSLTCIVVGVAWLLLLPLNDYSRRTYISENALLPGQV

SEQ ID NO: 12493 - DNA, 1505 bp, Muscodor strobelii
  misc_feature: SGI EST ID NO. CUFF.29672.0
  misc_feature: Variant of the nucleotide sequence at SEQ ID NO 12491
ttgaacactcctgtcatgggggctagtatctgggtcttcctcctgcttggcgtggaggccatccgcacatacaagaccaatccacatctcgtcatcgggacacatcacgtgccgacgtggacaacgccgctgttcatggtgctcgttgtcgaggctctgattcctggcacgagcttcatcggccacctgtgcggagttggcacaggctacctctgtaagccggctggaaacccctcggcggtccaaacatgccttggatagaaatactgacatgctacatagttggccttggttacctcaaggtcctagcaccgccggagaaggcgctgcggtggatcgaggggcggctgaacctgctggggcggctgccacactacatcagcgtcgaccaccagacgtacgggcggttcggggtgcttccgtcgaacacgtcgagcagcgggacgacgccggtgggcctgatcggcagtacgcagcggctcggaccctagcaggagacggacgaggctgggattgtattcttgtattaatatgagcagccccctatgtcagggcggcaacgggaccaggctgcgtatcttgacttgcatgacagcggcgttggggatatcgttgcactcatggtgttattattgttattattactgctgcgtcagtcgcgtgtgacgcatttggcctgcgaggcagctgcttgtcgttggaataaagaccagaaaggggccgtcttgatgcgctccgctttggcgtcgagatttagctgcgttatatggtattatgtacggtgtattagataagagttgagtcgctcaagtaagaagcaagaatattcgagtgagacttgagcgacgaggaaatattgctgtaacaatcgagggcatcattgccgagagagcaggtgccattctaatgaggtaacctatcgagcttggtgtggggtgaaatcgcaacagctttaagtctcaataccggaagaaaggacatgacgtgcaagcaatctcgacatggtgatagaaatgtaaaaaataccgttattcgagcaaacaaaagagcttcgataatcaggggagggcggtgtaagtggccgacggtgagggtagttggagacggacggaggaggtatgatggcatgtgcttaccccaaaaagtacgaagcagaattataattttggtcgaatgcatacctacctcataacacgtctccgacccaggtccgcattgattgatggatggatccgcctccactacctcgagagatcatcaggtctgcgcccatccgtgaagtgaatttgacgacgagcttcgaggctcggttcgcgcgagagccatgccgcgtctactctccactctcctgaccctgcgtcgcgaccctcggctcctgaagctgccgccgtacctgtcgctgacgtgcatcgtcgtcggcgtggcctggctgctgttgctgccgctcaacgactactcgcggcgcacctacatctcggagaatgcgctgctgccgggccaggtcc

SEQ ID NO: 12494 - DNA, 423 bp, Muscodor strobelii
  misc_feature: SGI cDNA ID NO. 564060
  misc_feature: Reduced expression when VOC is produced
  misc_feature: Encodes the peptide sequence at SEQ ID NO 12495
ttgaacactcctgtcatgggggctagtatctgggtcttcctcctgcttggcgtggaggccatccgcacatacaagaccaatccacatctcgtcatcgggacacatcacgtgccgacgtggacaacgccgctgttcatggtgctcgttgtcgaggctctgattcctggcacgagcttcatcggccacctgtgcggagttggcacaggctacctctttggccttggttacctcaaggtcctagcaccgccggagaaggcgctgcggtggatcgaggggcggctgaacctgctggggcggctgccacactacatcagcgtcgaccaccagacgtacgggcggttcggggtgcttccgtcgaacacgtcgagcagcgggacgacgccggtgggcctgatcggcagtacgcagcggctcggaccctag

SEQ ID NO: 12495 - protein, 140 aa, Muscodor strobelii
  misc_feature: SGI Peptide ID NO. 564060
  misc_feature (2)..(139): NCBI GI: 39942884 Blast Desc: MGG_03522 [Magnaporthe grisea 70-15] gi|145009917|gb|EDJ94573.1| MGG_03522 [Magnaporthe grisea 70-15]
  misc_feature (2)..(139): NCBI GI: 261358897 Blast Desc: rhomboid protein [Verticillium albo-atrum VaMs.102]
  misc_feature (2)..(140): NCBI GI: 225683990 Blast Desc: rhomboid protein [Paracoccidioides brasiliensis Pb03]
  misc_feature (2)..(140): NCBI GI: 121700128 Blast Desc: rhomboid family protein, [Aspergillus clavatus NRRL 1] gi|119396471|gb|EAW06903.1| rhomboid family protein, [Aspergillus clavatus NRRL 1]
  misc_feature (2)..(140): NCBI GI: 238487390 Blast Desc: rhomboid family protein, [Aspergillus flavus NRRL3357] gi|220699812|gb|EED56151.1| rhomboid family protein, [Aspergillus flavus NRRL3357]
  misc_feature (2)..(140): NCBI GI: 189091878 Blast Desc: [Podospora anserina] gi|188219292|emb|CAP49272.1| protein product [Podospora anserina]
  misc_feature (2)..(140): NCBI GI: 85093939 Blast Desc: rhomboid protein 2 [Neurospora crassa OR74A] gi|74615719|sp|Q7S4V5.1|RBD2_NEUCR RecName: Full=Rhomboid protein 2 gi|28921246|gb|EAA30556.1| rhomboid protein 2 [Neurospora
  misc_feature (2)..(140): NCBI GI: 256721612 Blast Desc: NECHADRAFT_99865 [Nectria haematococca mpVI 77-13-4]
  misc_feature (2)..(140): NCBI GI: 261203681 Blast Desc: rhomboid protein 2 [Ajellomyces dermatitidis SLH14081] gi|239586839|gb|EEQ69482.1| rhomboid protein 2 [Ajellomyces dermatitidis SLH14081] gi|239608127|gb|EEQ85114.1| rhomboid 2
  misc_feature (2)..(140): NCBI GI: 119194665 Blast Desc: CIMG_01707 [Coccidioides immitis RS]
  misc_feature: Useful for introducing or modulating the production of volatile compounds
LNTPVMGASIWVFLLLGVEAIRTYKTNPHLVIGTHHVPTWTTPLFMVLVVEALIPGTSFIGHLCGVGTGYLFGLGYLKVLAPPEKALRWIEGRLNLLGRLPHYISVDHQTYGRFGVLPSNTSSSGTTPVGLIGSTQRLGP

SEQ ID NO: 12496 - DNA, 1505 bp, Muscodor strobelii; identical to SEQ ID NO: 12493
  misc_feature: SGI EST ID NO. CUFF.29672.0
  misc_feature: Variant of the nucleotide sequence at SEQ ID NO 12494

SEQ ID NO: 12497 - DNA, 528 bp, Muscodor strobelii
  misc_feature: SGI cDNA ID NO. 564061
  misc_feature: Reduced expression when VOC is produced
  misc_feature: Encodes the peptide sequence at SEQ ID NO 12498
aacaaggtcaccggcctctacctgctgctgctgctgacccagggccgctactccgagttccactccgagctcgaggccctcagcacccgcgcccagtccgcccagtccgccgccggcgccgaccacatcgagaccgaccgctacctcggctaccccatcaagctcgagcgctggctgatggagggcagctacgaccgcgtctggaaggccatgaagagccgcgaggtccccagcgaggagtacgccgtcttctccgagattttaacccgccagatccgctccgagatcgcctcgagcagcgagcgcgcatacccgtctctacccctgagcagcacaaagtccctcttgttcttagagtccgaaggcgcagtcgtcgacttcgcccgccacagaggctgggctatccgcgacggccagatctacttccccaccgccgatgctgatgaaggagccgacgacaaagacctcagccagatggtcatcgagaatacgctgggctatgcccgtgagttggagactattgtctga

SEQ ID NO: 12498 - protein, 175 aa, Muscodor strobelii
  misc_feature: SGI Peptide ID NO. 564061
  misc_feature (4)..(118): Pfam Id: PF03399 Pfam Desc: SAC3/GANP/Nin1/mts3/eIF-3 p25 family
  misc_feature (1)..(175): NCBI GI: 261358921 Blast Desc: 26S proteasome regulatory subunit rpn12 [Verticillium albo-atrum VaMs.102]
  misc_feature (1)..(175): NCBI GI: 39942864 Blast Desc: MGG_03512 [Magnaporthe grisea 70-15] gi|145009929|gb|EDJ94585.1| MGG_03512 [Magnaporthe grisea 70-15]
  misc_feature (1)..(175): NCBI GI: 256721603 Blast Desc: [Nectria haematococca mpVI 77-13-4]
  misc_feature (1)..(175): NCBI GI: 46127121 Blast Desc: FG07938.1 [Gibberella zeae PH-1]
  misc_feature (1)..(175): NCBI GI: 189091942 Blast Desc: [Podospora anserina] gi|188219324|emb|CAP49304.1| protein product [Podospora anserina]
  misc_feature (1)..(175): NCBI GI: 85088980 Blast Desc: NCU10067 [Neurospora crassa OR74A] gi|28919143|gb|EAA28646.1| conserved [Neurospora crassa OR74A]
  misc_feature (1)..(175): NCBI GI: 27803080 Blast Desc: protein product [Podospora anserina]
  misc_feature (1)..(175): NCBI GI: 156050653 Blast Desc: SS1G_07914 [Sclerotinia sclerotiorum 1980] gi|154692314|gb|EDN92052.1| SS1G_07914 [Sclerotinia sclerotiorum 1980]
  misc_feature (1)..(175): NCBI GI: 121705298 Blast Desc: proteasome regulatory particle subunit (RpnL), [Aspergillus clavatus NRRL 1] gi|119399058|gb|EAW09486.1| proteasome regulatory particle subunit (RpnL), [Aspergillus NRRL
  misc_feature (1)..(175): NCBI GI: 119492153 Blast Desc: proteasome regulatory particle subunit (RpnL), [Neosartorya fischeri NRRL 181] gi|119411707|gb|EAW21650.1| proteasome regulatory particle subunit (RpnL), [Neosartorya NRRL
  misc_feature: Useful for introducing or modulating the production of volatile compounds
NKVTGLYLLLLLTQGRYSEFHSELEALSTRAQSAQSAAGADHIETDRYLGYPIKLERWLMEGSYDRVWKAMKSREVPSEEYAVFSEILTRQIRSEIASSSERAYPSLPLSSTKSLLFLESEGAVVDFARHRGWAIRDGQIYFPTADADEGADDKDLSQMVIENTLGYARELETIV

SEQ ID NO: 12499 - DNA, 911 bp, Muscodor strobelii
  misc_feature: SGI EST ID NO. CUFF.29674.0
  misc_feature: Variant of the nucleotide sequence at SEQ ID NO 12497
aacaaggtcaccggcctctacctgctgctgctgctgacccagggccgctactccgagttccactccgagctcgaggccctcagcacccgcgcccagtccgcccagtccgccgccggcgccgaccacatcgagaccgaccgctacctcggctaccccatcaagctcgagcgctggctgatggagggcagctacgaccgcgtctggaaggccatgaagagccgcgaggtccccagcgaggagtacgccgtcttctccgaggtgagttcttcgctccttgctctctgtctcgtgcgacgcgctgtacgcagtctaatcgtgtgctgtcccgcagattttaacccgccagatccgctccgagatcgcctcgagcagcgagcgcgcatacccgtctctacccctgagcagcacaaagtccctcttgttcttagagtccgaaggcgcagtcgtcgacttcgcccgccacagaggctgggctatccgcgacggccagatctacttccccaccgccgatgctgatgaaggagccgacgacaaagacctcagccagatggtcatcgagaatacgctgggctatgcccgtgagttggagactattgtctgagctatgggataggggagaatgaggggatttatacgaaaagctttacgactgcatgcatatgagcggactactcggttaagagacacaggaaaagtggcgcgagtgcatgtcaagagacggatgccggcgctagacattaatacaaacgatgcggacgatcctcttgagcacctaggtaaggaccgggagtatcatgattgagccactctatcacaccattcgagtatgcaaatgagatatagcacatcaatttttagagaatagagtcccgcacgaagcacttgatggccttctatccaagctggtgatg

SEQ ID NO: 12500 - DNA, 1290 bp, Muscodor strobelii
  misc_feature: SGI cDNA ID NO. 564062
  misc_feature: Encodes the peptide sequence at SEQ ID NO 12501
atgcatagcgcaagtcggggacaggttactcctgcatggcttcagcatgttgtaaacagcaaggaccagcccccaccgatactgtacgcctggacgcctgcgaatttggacccgacctcctatgctcctagctctgcacaggtggatagaaatgagaaaagacgtattcatatcttgggcataggtaatgtaagtgtcgtacttatcaagtacctgaaacgattctttgtcttgagagctgaggttataccgcctattactctcgtggtgcacaagaaagaacttctcgaacactggataagagaacctggtgtcaagcttacgcgtcacggagtagtagatgaaaataaggactttgacatcgagtggtggaccgacacaagacctgaccgtggtcctatatgcgaactagctaccagaggctcagacattagcaatctcatcatcacgacgaaggcatcagatgctatgccacaggtagaccgcattcgcaagtacttgacaggtaattccacggtggcttttgcacagaatggaatgtgtaaactctggccgccgcttggcgaagcatatatccggacgagatttggaaatgaagccccgagctggattgcctgcgtaacaacacatggcgtaacttcgcaaggtctgtttaacagcgtacacgcatcacctgcagacgcaattgttggtcccgttcttggaacaccgcgcaaggaggcccaaatctgttatctgatgcaacagataggaaacgcacctgacttagctgctcgccaggtatcgagaaaagacctttgggtctcacagctcgagaagcttgttgtcaatgtaatcatcaatccgctcacaggtatactggattgcgagaacggcgagatatttgtcaaccgtagcgatgcattgccactcgtcatcgatacattgctcatggaaacaagcaacatattgcaggctctgatacaagatgaaacaagcaaggatatcttgactgcgacggacgcgacggacgaacttcttgctcgcgtctccttctcgctactcaagacgatgctctatgatgttggtgctaaggttacagcaaacacaagctcaatgctgcaggatgtccgtgcagggaggcagacagagattgacgatatgaacgggtggctagttggaacggcgaagatgctcagtggcacgctctctatgtcaactcacgagaagataatcaccctcataaagcgtcgaacgaggctctcgcggaaggatttatgcgctcatcttcttgaaggctcccagtcataa

SEQ ID NO: 12501 - protein, 429 aa, Muscodor strobelii
  misc_feature: SGI Peptide ID NO. 564062
  misc_feature (56)..(235): Pfam Id: PF02558 Pfam Desc: Ketopantoate reductase PanE/ApbA
  misc_feature (265)..(412): Pfam Id: PF08546 Pfam Desc: Ketopantoate reductase PanE/ApbA C terminal
  misc_feature (87)..(235): Pfam Id: PF02558 Pfam Desc: Ketopantoate reductase PanE/ApbA
  misc_feature (265)..(379): Pfam Id: PF08546 Pfam Desc: Ketopantoate reductase PanE/ApbA C terminal
  misc_feature (10)..(423): NCBI GI: 256725793 Blast Desc: NECHADRAFT_43146 [Nectria haematococca mpVI 77-13-4]
  misc_feature (11)..(423): NCBI GI: 46111315 Blast Desc: FG02539.1 [Gibberella zeae PH-1]
  misc_feature (7)..(409): NCBI GI: 85109520 Blast Desc: NCU07836 [Neurospora crassa OR74A] gi|28924602|gb|EAA33721.1| [Neurospora crassa OR74A]
  misc_feature (11)..(424): NCBI GI: 208658292 Blast Desc: ketoisovalerate reductase [Beauveria bassiana]
  misc_feature (1)..(423): NCBI GI: 261358380 Blast Desc: conserved [Verticillium albo-atrum VaMs.102]
  misc_feature (26)..(419): NCBI GI: 157382467 Blast Desc: bassianolide synthetase [Xylaria sp. BCC 1067]
  misc_feature (55)..(411): NCBI GI: 259482403 Blast Desc: TPA: 2-dehydropantoate 2-reductase, (AFU_orthologue; AFUA_3G06390) [Aspergillus nidulans FGSC A4]
  misc_feature (54)..(423): NCBI GI: 119192108 Blast Desc: CIMG_00431 [Coccidioides immitis RS]
  misc_feature (54)..(423): NCBI GI: 240106218 Blast Desc: 2-dehydropantoate 2-reductase, [Coccidioides posadasii C735 delta SOWgp]
  misc_feature (55)..(417): NCBI GI: 115402593 Blast Desc: [Aspergillus terreus NIH2624] gi|114189219|gb|EAU30919.1| [Aspergillus terreus NIH2624]
  misc_feature (144)..(416): SWISSPROT Homolog: EC 1.1.1.169 2-dehydropantoate 2-reductase
  misc_feature: Useful for introducing or modulating the production of volatile compounds
MHSASRGQVTPAWLQHVVNSKDQPPPILYAWTPANLDPTSYAPSSAQVDRNEKRRIHILGIGNVSVVLIKYLKRFFVLRAEVIPPITLVVHKKELLEHWIREPGVKLTRHGVVDENKDFDIEWWTDTRPDRGPICELATRGSDISNLIITTKASDAMPQVDRIRKYLTGNSTVAFAQNGMCKLWPPLGEAYIRTRFGNEAPSWIACVTTHGVTSQGLFNSVHASPADAIVGPVLGTPRKEAQICYLMQQIGNAPDLAARQVSRKDLWVSQLEKLVVNVIINPLTGILDCENGEIFVNRSDALPLVIDTLLMETSNILQALIQDETSKDILTATDATDELLARVSFSLLKTMLYDVGAKVTANTSSMLQDVRAGRQTEIDDMNGWLVGTAKMLSGTLSMSTHEKIITLIKRRTRLSRKDLCAHLLEGSQS

SEQ ID NO: 12502 - DNA, 1699 bp, Muscodor strobelii
  misc_feature: SGI EST ID NO. CUFF.29650.0
  misc_feature: Variant of the nucleotide sequence at SEQ ID NO 12500
cttgagagctgaggttatgtaaggtgaagtcgcaattaatagctaacgccaggcccttctgccaatagatcgggcgcctatacgcaatgtgtctttctaaacttgttgatagaccgcctattactctcgtggtgcacaagaaagaacttctcgaacactggataagagaacctggtgtcaagcttacgcgtcacggagtagtagatgaaaataaggactttgacatcgagtggtggaccgacacaagacctgaccgtggtcctatatgcgaactagctaccagaggctcagacattagcaatctcatcatcacgacgaaggcatcagatgctatgccacaggtagaccgcattcgcaagtacttgacaggtaattccacggtggcttttgcacagaatggaatgtgtaaactctggccgccgcttggcgaagcatatatccggacgagatttggaaatgaagccccgagctggattgcctgcgtaacaacacatggcgtaacttcgcaaggtctgtttaacagcgtacacgcatcacctgcagacgcaattgttggtcccgttcttggaacaccgcgcaaggaggcccaaatctgttatctgatgcaacagataggaaacgcacctgacttagctgctcgccaggtatcgagaaaagacctttgggtctcacagctcgagaagcttgttgtcaatgtaatcatcaatccgctcacaggtatactggattgcgagaacggcgagatatttgtcaaccgtagcgatgcattgccactcgtcatcgatacattgctcatggaaacaagcaacatattgcaggctctgatacaagatgaaacaagcaaggatatcttgactgcgacggacgcgacggacgaacttcttgctcgcgtctccttctcgctactcaagacgatgctctatgatgttggtgctaaggttacagcaaacacaagctcaatgctgcaggatgtccgtgcagggaggcagacagagattgacgatatgaacgggtggctagttggaacggcgaagatgctcagtggcacgctctctatgtcaactcacgagaagataatcaccctcataaagcgtcgaacgaggctctcgcggaaggatttatgcgctcatcttcttgaaggctcccagtcataaaagtcgccgtctcaactagaacacatttggattggattcattacttcatacgaccttcgaacagaaagcacgtaccagtgcccaaccctttcccgttgcaatatgcgttgacgaagtcctattttgatatttgcgaattcgaacgtcatggctattctgggtgcccaacttgattatgggcttaaatagaataaatatggactattcgttgaatatcactagagaggtactgtagccattcataccggctggcgatctcgagcgagtttctgtcttaataggatcaataactttaggtatatatctcgagataatgtggcaccgcatgaatcactctgcttgagtacaacaggctaaagtaaaccatcaagaaaatatcaggcttctgttgtggtaaagctgtgttatttaaagacgttcctgatgactccataaagtagaaagtggaagtgatcgaattcctatctctacgaaaacgatcaaccttaggatcgagacctatcaacttaaaaaacgtctcacaagagctacgtttacggttctcc

SEQ ID NO: 12503 - DNA, 456 bp, Muscodor strobelii
  misc_feature: SGI cDNA ID NO. 564063
  misc_feature: Encodes the peptide sequence at SEQ ID NO 12504
atgttgtcaattattctccaactcggggttctcgcggccgtcgtccaaggacatggcttcattgctacaccggccatgcgaatgcctagcaatgcaacgactgcagcgtgcggcaaatcggtggtctcggatatcaatagagacaaaacatcgcacgtcgaagggcttcctgagctcgccgctaaggattctggctacaacaaagcagtgtgtaatctctggctatgccgaggagtccaatttggcgacaactctgccaacgtgcagagttatacgccaggccaaaaggtgccaatcaaggtcacactgaccattccacacgttggatccgcaaacgtctccattgtagacaccaagaccaatacggtcgtcggacaacctctgctcaactggccaagtggctatgcggatgagaaacgtaagtactctactggactgatggaaaataccggttga

SEQ ID NO: 12504 - protein, 151 aa, Muscodor strobelii
  misc_feature: SGI Peptide ID NO. 564063
  misc_feature (1)..(141): NCBI GI: 169623305 Blast Desc: SNOG_14889 [Phaeosphaeria nodorum SN15] gi|111056621|gb|EAT77741.1| SNOG_14889 [Phaeosphaeria nodorum SN15]
  misc_feature (8)..(136): NCBI GI: 189192400 Blast Desc: conserved [Pyrenophora tritici-repentis Pt-1C-BFP] gi|187974145|gb|EDU41644.1| conserved [Pyrenophora tritici-repentis Pt-1C-BFP]
  misc_feature (1)..(137): NCBI GI: 154273823 Blast Desc: conserved [Ajellomyces capsulatus NAm1] gi|150415371|gb|EDN10724.1| conserved [Ajellomyces capsulatus NAm1]
  misc_feature (1)..(140): NCBI GI: 225559190 Blast Desc: conserved [Ajellomyces capsulatus G186AR]
  misc_feature (1)..(140): NCBI GI: 240282121 Blast Desc: chitin binding protein [Ajellomyces capsulatus H143]
  misc_feature (6)..(149): NCBI GI: 255941668 Blast Desc: Pc16g13040 [Penicillium chrysogenum Wisconsin 54-1255] gi|211586226|emb|CAP93974.1| Pc16g13040 [Penicillium chrysogenum Wisconsin 54-1255]
  misc_feature (5)..(149): NCBI GI: 145230774 Blast Desc: An01g12440 [Aspergillus niger] gi|134055772|emb|CAK37296.1| protein product [Aspergillus niger]
  misc_feature (5)..(151): NCBI GI: 121701105 Blast Desc: chitin binding protein, [Aspergillus clavatus NRRL 1] gi|119396960|gb|EAW07391.1| chitin binding protein, [Aspergillus clavatus NRRL 1]
  misc_feature (1)..(136): NCBI GI: 116200333 Blast Desc: CHGG_08322 [Chaetomium globosum CBS 148.51] gi|88179601|gb|EAQ87069.1| CHGG_08322 [Chaetomium globosum CBS 148.51]
  misc_feature (5)..(151): NCBI GI: 238492845 Blast Desc: chitin binding protein, [Aspergillus flavus NRRL3357] gi|220696153|gb|EED52495.1| chitin binding protein, [Aspergillus flavus NRRL3357]
MLSIILQLGVLAAVVQGHGFIATPAMRMPSNATTAACGKSVVSDINRDKTSHVEGLPELAAKDSGYNKAVCNLWLCRGVQFGDNSANVQSYTPGQKVPIKVTLTIPHVGSANVSIVDTKTNTVVGQPLLNWPSGYADEKRKYSTGLMENTG

SEQ ID NO: 12505 - DNA, 205 bp, Muscodor strobelii
  misc_feature: SGI EST ID NO. CUFF.29646.0
  misc_feature: Variant of the nucleotide sequence at SEQ ID NO 12503
gcagtgtgtaatctctggctatgccgaggagtccaatttggcgacaactctgccaacgtgcagagttatacgccaggccaaaaggtgccaatcaaggtcacactgaccattccacacgttggatccgcaaacgtctccattgtagacaccaagaccaatacggtcgtcggacaacctctgctcaactggccaagtggctatgcgg

SEQ ID NO: 12506 - DNA, 831 bp, Muscodor strobelii
  misc_feature: SGI cDNA ID NO. 564064
  misc_feature: Encodes the peptide sequence at SEQ ID NO 12507
atgtctatcaaggtcgagcgggacacggtccgcaaagtcaccgagtccgcaggcgacgccgccgccgccgccgctcctcgtggcgatgggcctcttccgggaaccagtggcaagcatcccattgctgaggccattggtaccgccatcaccggcggcaagaagaatgcgggcaccaagggctacttgatggcatacataagtgagctcgagaagaaccccttgcgcaccaagatgctcacggcgggcaccctggccggtctgcaggagttccttgcctcctggctggccaaggaccgcaacaagcacggcaactacttcacctcgcgcgtgcccaagatggctgcctacggtgccctcgtcagcgctcccctcggccatttcctgatctggctgcttcagaaggctttcaagggccgtacgagtctgcgcgccaagatcctgcagattctggtgagcaatctggtggtcgctccaattcagaattccgtatatctggtcgctatggctctgattgctggtgctcggacatatcaccaagtccgtgccacggtgcgtgttggttttatgaaggtcatgaaggtatcctggatcacctcgccgatttgtcttgcgtttgcccagcagttcctgcctgaggtcgcctgggttccattcttcaacttcgtcgccttcgtcattggcacttacatcaatacggtcacgaagaagaagcgtcttgctgccctgcgcaagaagcacttcggcgatggccggccgggctccatgggacccccgggcccttcttcacgcccggaagactatccaccattgggccctaaccccccgtactag

SEQ ID NO: 12507 - protein, 276 aa, Muscodor strobelii
  misc_feature: SGI Peptide ID NO. 564064
  misc_feature (1)..(276): NCBI GI: 145601967 Blast Desc: MGG_05292 [Magnaporthe grisea 70-15] gi|145010424|gb|EDJ95080.1| MGG_05292 [Magnaporthe grisea 70-15]
  misc_feature (2)..(276): NCBI GI: 171687142 Blast Desc: protein product [Podospora anserina] gi|170943532|emb|CAP69185.1| protein product [Podospora anserina]
  misc_feature (1)..(276): NCBI GI: 116191645 Blast Desc: CHGG_05540 [Chaetomium globosum CBS 148.51] gi|88181453|gb|EAQ88921.1| CHGG_05540 [Chaetomium globosum CBS 148.51]
  misc_feature (4)..(267): NCBI GI: 46116554 Blast Desc: FG04119.1 [Gibberella zeae PH-1]
  misc_feature (10)..(248): NCBI GI: 256725737 Blast Desc: [Nectria haematococca mpVI 77-13-4]
  misc_feature (1)..(276): NCBI GI: 261358087 Blast Desc: integral membrane protein [Verticillium albo-atrum VaMs.102]
  misc_feature (1)..(276): NCBI GI: 85109819 Blast Desc: NCU07842 [Neurospora crassa OR74A] gi|28924755|gb|EAA33867.1| NCU07842 [Neurospora crassa OR74A]
  misc_feature (1)..(266): NCBI GI: 169614191 Blast Desc: SNOG_10232 [Phaeosphaeria nodorum SN15] gi|111061447|gb|EAT82567.1| SNOG_10232 [Phaeosphaeria nodorum SN15]
  misc_feature (1)..(273): NCBI GI: 154303060 Blast Desc: BC1G_09550 [Botryotinia fuckeliana B05.10] gi|150855013|gb|EDN30205.1| BC1G_09550 [Botryotinia fuckeliana B05.10]
  misc_feature (1)..(268): NCBI GI: 189199042 Blast Desc: integral membrane protein [Pyrenophora tritici-repentis Pt-1C-BFP] gi|187982957|gb|EDU48445.1| integral membrane protein [Pyrenophora tritici-repentis Pt-1C-BFP]
MSIKVERDTVRKVTESAGDAAAAAAPRGDGPLPGTSGKHPIAEAIGTAITGGKKNAGTKGYLMAYISELEKNPLRTKMLTAGTLAGLQEFLASWLAKDRNKHGNYFTSRVPKMAAYGALVSAPLGHFLIWLLQKAFKGRTSLRAKILQILVSNLVVAPIQNSVYLVAMALIAGARTYHQVRATVRVGFMKVMKVSWITSPICLAFAQQFLPEVAWVPFFNFVAFVIGTYINTVTKKKRLAALRKKHFGDGRPGSMGPPGPSSRPEDYPPLGPNPPY

SEQ ID NO: 12508 - DNA, 1625 bp, Muscodor strobelii
  misc_feature: SGI EST ID NO. CUFF.29730.1
  misc_feature: Variant of the nucleotide sequence at SEQ ID NO 12506
cagctgtgtagagctcagcacccacccccagagcctttgcaacctaggtatccaacctcgccaacctcgtcctccccatcgccaaccatctggctctctctccccaccgcctgcccaattcctccccaaccacgacgccgcaatccaatgaccctcggactcggccattaaccacgctggccgataactgcctctgcgacacgaccgcctagatattccgtccccagacgccccgggccccgatcgctgtcgctgtcgctgtcgctgttgccagaagcagtcgggccaatttgccgaggcaactcgagtcgcatcttttagttttgcctttgccgccctcgccgtctgacgtactgattgctcgggaccatgtctatcaaggtcgagcgggacacggtccgcaaagtcaccgagtccgcaggcgacgccgccgccgccgccgctcctcgtggcgatgggcctcttccgggaaccagtggcaagcatcccattgctgaggccattggtaccgccatcaccggcggcaagaagaatgcgggcaccaagggctacttgatggcatacataagtgagctcgagaagaaccccttgcgcaccaagatgctcacggcgggcaccctggccggtctgcaggagttccttgcctcctggctggccaaggaccgcaacaagcacggcaactacttcacctcgcgcgtgcccaagatggctgcctacggtgccctcgtcagcgctcccctcggccatttcctgatctggctgcttcagaaggctttcaagggccgtacgagtctgcgcgccaagatcctgcagattctggtgagcaatctggtggtcgctccaattcagaattccgtatatctggtcgctatggctctgattgctggtgctcggacatatcaccaagtccgtgccacggtgcgtgttggttttatgaaggtcatgaaggtatcctggatcacctcgccgatttgtcttgcgtttgcccagcagttcctgcctgaggtcgcctgggttccattcttcaacttcgtcgccttcgtcattggcacttacatcaatacggtcacgaagaagaagcgtcttgctgccctgcgcaagaagcacttcggcgatggccggccgggctccatgggacccccgggcccttcttcacgcccggaagactatccaccattgggccctaaccccccgtactagtatgcaagctatgtctaacgaacgaatattgtataatgcgaaaaatactagctgcggccgtgtgtacattgaaaagcagtcatggacatcttgagagcataataaattcacatatatagtgctatcgggtaaacggaccggggtgggaggtgtcaaggaacgatcaacgcagttcgggattatctcacttgtatagttgcgcttgggtgatttttgcaatgtttagtgtttcttcaaccattccctcaaacgctgttccgattgaccatctgtccattttcacttgtccgctcataaccggcgcctatgtctactcctactccgtcttatgcgtgaaacctccgcgcgaccggtgccgcaactgtgaaatcgatgcaagactcgtaggtctgcttcgctccagtgccataccaccaccattgaat

SEQ ID NO: 12509 - DNA, 1158 bp, Muscodor strobelii
  misc_feature: SGI cDNA ID NO. 564065
  misc_feature: Encodes the peptide sequence at SEQ ID NO 12510
atggcagtccttttaccgtctacttactattttttatgtttcttagatacaccggcccagatcgctcaaattctgctgcagcgagataatcttcacgacgtcctttctcagcatacgcgacaagtaccgtcaatcccgtcttaccctcctgtcgggattctggctgagcgccggagcctttggggacctccgcctggattcgattttcccggatcgcttgagaagcaacagcagaaaccatgggtccccttgagcgatgaggaatgcaagttggccttgtttggaagacgccaagccaagtattgtcgacgatgccgtccttcttgcgaggcgcgttcttatctttgtttgaacggaatcgtcaatggggaaatccctccgactgccgcaacgggatttgggttccatcgacttggtactagaccagttgttgatgtggacatcattcgatacattggcttgcgagctgtgccattgcctgaagcagtagccagcgcagtcacgacgcattcacctggtatatccgaaaggtccgtacctaatataatcaagatacagaaaggtggtgtggttgcttccaaggcggagctgacttcggaaaatagcgatgtatccgaaggtgacaagaccagctcttcgctgtcacaccaatgggcggagccgcgacctgcttggtcaccgcctccaacgccgattagctggactgggctgatgcttcacgagagcggtgcctcaaattttgagaaccgcccattcgtctgcgacggtcgaagcccggactcgttgaggacgaacgaactagtccgtcagcaagttgttacgtcgatagacggcctcatcaaccaagatctagacgaggaacagaccgcggaatatcaatcgctcctgcagccagcatcatgcgacacttcggacggcagtggtagagcgacgatagcatctcccatgatgcgagaggagatgcaagagggccgctttcacgaagagcccctcgaggttagcgctggagtcgcagtcttggtgagtcatcatctagttttcaactccaaaactcggcggcgaggagagcgttggtctgggagtgccgacatgagccagcaggtccggagtctgagtgaagagcaacgactaacgtggttcaccttcgatacgcagtga

SEQ ID NO: 12510 - protein, 385 aa, Muscodor strobelii
  misc_feature: SGI Peptide ID NO. 564065
  misc_feature (18)..(255): NCBI GI: 261358086 Blast Desc: conserved [Verticillium albo-atrum VaMs.102]
  misc_feature (18)..(153): NCBI GI: 46116592 Blast Desc: FG04138.1 [Gibberella zeae PH-1]
  misc_feature (17)..(160): NCBI GI: 154303064 Blast Desc: BC1G_09552 [Botryotinia fuckeliana B05.10] gi|150855015|gb|EDN30207.1| BC1G_09552 [Botryotinia fuckeliana B05.10]
  misc_feature (17)..(340): NCBI GI: 156058710 Blast Desc: SS1G_03367 [Sclerotinia sclerotiorum 1980] gi|154701154|gb|EDO00893.1| SS1G_03367 [Sclerotinia sclerotiorum 1980]
  misc_feature (79)..(160): NCBI GI: 145601965 Blast Desc: MGG_05293 [Magnaporthe grisea 70-15] gi|145010423|gb|EDJ95079.1| MGG_05293 [Magnaporthe grisea 70-15]
  misc_feature (17)..(159): NCBI GI: 171687140 Blast Desc: protein product [Podospora anserina] gi|170943531|emb|CAP69184.1| protein product [Podospora anserina]
  misc_feature (17)..(160): NCBI GI: 85109050 Blast Desc: NCU07841 [Neurospora crassa OR74A] gi|28924341|gb|EAA33486.1| [Neurospora crassa OR74A]
MAVLLPSTYYFLCFLDTPAQIAQILLQRDNLHDVLSQHTRQVPSIPSYPPVGILAERRSLWGPPPGFDFPGSLEKQQQKPWVPLSDEECKLALFGRRQAKYCRRCRPSCEARSYLCLNGIVNGEIPPTAATGFGFHRLGTRPVVDVDIIRYIGLRAVPLPEAVASAVTTHSPGISERSVPNIIKIQKGGVVASKAELTSENSDVSEGDKTSSSLSHQWAEPRPAWSPPPTPISWTGLMLHESGASNFENRPFVCDGRSPDSLRTNELVRQQVVTSIDGLINQDLDEEQTAEYQSLLQPASCDTSDGSGRATIASPMMREEMQEGRFHEEPLEVSAGVAVLVSHHLVFNSKTRRRGERWSGSADMSQQVRSLSEEQRLTWFTFDTQ

SEQ ID NO: 12511 - DNA, 257 bp, Muscodor strobelii
  misc_feature: SGI EST ID NO. CUFF.29665.0
  misc_feature: Variant of the nucleotide sequence at SEQ ID NO 12509
cattcgtctgcgacggtcgaagcccggactcgttgaggacgaacgaactagtccgtcagcaagttgttacgtcgatagacggcctcatcaaccaagatctagacgaggaacagaccgcggaatatcaatcgctcctgcagccagcatcatgcgacacttcggacggcagtggtagagcgacgatagcatctcccatgatgcgagaggagatgcaagagggccgctttcacgaagagcccctcgaggttagcgctgga

SEQ ID NO: 12512 - DNA, 804 bp, Muscodor strobelii
  misc_feature: SGI cDNA ID NO. 564066
  misc_feature: Encodes the peptide sequence at SEQ ID NO 12513
atgcctcctataccgtgttcccacgctccgtccgcagcgaggttgttcgtccagctgtatgctcgccgcaacgcatcttccctcgccggcacacaggtcccagcctcgatctcgatcctcgaggtcctactcccgccccgggctcagtcgcgggcactacggggcagcagcagagcgttcgccagccaaactcgaccgtcgacgaggacttcagtccaggtttgcagcgcctcgccgcgcgccatcgccggcaagcaaacattcagtacttccgcagcgctcgctcgaacgcgggccgtacacaactcgcaaacggacgaggatggaaacgagatggccatggaaatcacccctcgcgcggcaaaccgcctctcgcagatcatggccaaggactccaacccctacctcgcactgcggatacaagtcgaatccggcggctgtcacggcttccaatacctaatgtctctgaccacgctcccgaccaccatcccctcatcgctgcccccggcccccgaagagattgcgccctccacaacgaccaccgcgacaccctccgcacccacgctcaccgaagatgacgtaatcttcgtcttttcccccgattccgaggtcgcctcaagcgacggggctgctgagatcctgaccaagcccaagatcattctggacaccccaagtctcgagctcctgaagggaagcaaagtagacttcacaatggagttgatcggcagccagttcaagatcgtggataaccctctagccacgagcagctgtggttgtggcacgagtttcgacatcaagatgtga

SEQ ID NO: 12513 - protein, 267 aa, Muscodor strobelii
  misc_feature: SGI Peptide ID NO. 564066
  misc_feature (114)..(251): Pfam Id: PF01521 Pfam Desc: Iron-sulphur cluster biosynthesis
  misc_feature (114)..(156): Pfam Id: PF01521 Pfam Desc: Iron-sulphur cluster biosynthesis
  misc_feature (218)..(251): Pfam Id: PF01521 Pfam Desc: Iron-sulphur cluster biosynthesis
  misc_feature (1)..(267): NCBI GI: 171687170 Blast Desc: protein product [Podospora anserina] gi|170943546|emb|CAP69199.1| protein product [Podospora anserina]
  misc_feature (1)..(267): NCBI GI: 116191625 Blast Desc: CHGG_05530 [Chaetomium globosum CBS 148.51] gi|88181443|gb|EAQ88911.1| CHGG_05530 [Chaetomium globosum CBS 148.51]
  misc_feature (6)..(267): NCBI GI: 39940008 Blast Desc: MGG_05236 [Magnaporthe grisea 70-15] gi|145010488|gb|EDJ95144.1| MGG_05236 [Magnaporthe grisea 70-15]
  misc_feature (1)..(267): NCBI GI: 46111323 Blast Desc: FG02543.1 [Gibberella zeae PH-1]
  misc_feature (1)..(267): NCBI GI: 85109504 Blast Desc: NCU07828 [Neurospora crassa OR74A] gi|28924594|gb|EAA33713.1| conserved [Neurospora crassa OR74A]
  misc_feature (1)..(267): NCBI GI: 256725791 Blast Desc: NECHADRAFT_43837 [Nectria haematococca mpVI 77-13-4]
  misc_feature (1)..(267): NCBI GI: 261358367 Blast Desc: iron sulfur assembly protein [Verticillium albo-atrum VaMs.102]
  misc_feature (88)..(267): NCBI GI: 154290824 Blast Desc: BC1G_15451 [Botryotinia fuckeliana B05.10] gi|150847402|gb|EDN22595.1| BC1G_15451 [Botryotinia fuckeliana B05.10]
  misc_feature (58)..(266): NCBI GI: 119480981 Blast Desc: iron-sulfur cluster assembly accessory protein Isa2, [Neosartorya fischeri NRRL 181] gi|119408673|gb|EAW18622.1| iron-sulfur cluster assembly accessory protein Isa2, [Neosartorya
  misc_feature (88)..(265): NCBI GI: 238493295 Blast Desc: iron sulfur assembly protein, [Aspergillus flavus NRRL3357] gi|220696378|gb|EED52720.1| iron sulfur assembly protein, [Aspergillus flavus NRRL3357]
MPPIPCSHAPSAARLFVQLYARRNASSLAGTQVPASISILEVLLPPRAQSRALRGSSRAFASQTRPSTRTSVQVCSASPRAIAGKQTFSTSAALARTRAVHNSQTDEDGNEMAMEITPRAANRLSQIMAKDSNPYLALRIQVESGGCHGFQYLMSLTTLPTTIPSSLPPAPEEIAPSTTTTATPSAPTLTEDDVIFVFSPDSEVASSDGAAEILTKPKIILDTPSLELLKGSKVDFTMELIGSQFKIVDNPLATSSCGCGTSFDIKM

SEQ ID NO: 12514 - DNA, 3091 bp, Muscodor strobelii
  misc_feature: SGI EST ID NO. CUFF.30298.0
  misc_feature: Variant of the nucleotide sequence at SEQ ID NO 12512
gccgaaataatttgactgctggttgcaaatcactcttacctacgcccttgcaatagatatccaacctaacgtccagcatcaacagagaagaagatgcctcctataccgtgttcccacgctccgtccgcagcgaggttgttcgtccagctgtatgctcgccgcaacgcatcttccctcgccggcacacaggtcccagcctcgatctcgatcctcgaggtcctactcccgccccgggctcagtcgcgggcactacggggcagcagcagagcgttcgccagccaaactcgaccgtcgacgaggacttcagtccaggtttgcagcgcctcgccgcgcgccatcgccggcaagcaaacattcagtacttccgcagcgctcgctcgaacgcgggccgtacacaactcgcaaacggacgaggatggaaacgagatggccatggaaatcacccctcgcgcggcaaaccgcctctcgcagatcatggccaaggactccaacccctacctcgcactgcggatacaagtcgaatccggcggctgtcacggcttccaatacctaatgtctctgaccacgctcccgaccaccatcccctcatcgctgcccccggcccccgaagagattgcgccctccacaacgaccaccgcgacaccctccgcacccacgctcaccgaagatgacgtaatcttcgtcttttcccccgattccgaggtcgcctcaagcgacggggctgctgagatcctgaccaagcccaagatcattctggacaccccaagtctcgagctcctgaagggaagcaaagtagacttcacaatggagttgatcggcagccagttcaagatcgtggataaccctctagccacgagcagctgtggttgtggcacgagtttcgacatcaagatgtgaacgcgttgcccatcggcgcggaaagacgctcttcgtaaaagtgccatgatggtgatgtgttcatttagcttgacaattgtaagacagacatgattatataatattcacgtgagctgcgaagctgccaacagaaatcatttggtcacacgaggacatttcttttataccgatgattgtgtaacatacagatattcaccaaagtctctcaactacctggactttgcaacatggggtctccatgatttgcgatggtctgaggactagccttctacgactaattcttagcaagctgaacgcatgatcattacatactggagctgtttatcaaagtcctacgttatgaagggcacatggtctggtgaagtaatcatggtattgtgggaacatgcgaactcagaggtcgtaatcatctcgtaatctcaaattcagtgtaagcttccgaaggctcttttttatgaacgccgccgaccatgcaaaagcagtacccgcattacccgcaataccagaccctatgaacccatggagaagagaacagacagacgaccgctctagttcatctggcggatgagagcgttgatcttctcctcgcggttgccaagatcaccgccctcgatgaagtgcttgaattttctgggccggaatccaccgttggggttgctgagcttgaagggccacaggaagttggaagcctgcttgaagttggggccgacggtgatgatctcgtgaaccagatcctccatgcagatgatgccgtacttgccgaggttctcctcgatgatggagttgtcggtgagcgggatgcgctgcttgttgaccttgccgtatccgcgcttgtagatgagctccttgacgctcttgaggttagggtagccgtaagcaacccagggctcgacaatcttgatcatctcagcggtggccttggtgacacggacgaagacaccgttgttgatctggaggagacggaggagctggaggatcttgcgcggcttgggggcaatcttgttgatacccttgatgcggatgacgaagatcaacttctcctcggcaggaacgtggaagttgccctcctgcttggcgatgcggttgaggcggaccttctcacgctcggcgtcacggtactcggtgacatacttctcggcacgcttgaagatgaccgaacgcttctccttgttggcctgtgacgatcgttagcaacgtattcgtaggtgatgattgcaagccaagacacgtctcgtcttcgtcattcagacccgaaagatggttaattttgcaacagcattgaccttggtctagtcgcaaagggtttttatacatcatacaacgccgccaccgcatatcgacagatttgtcaaggatagttggactgaccttcttctgcttctcctgctcggccgtcttctcggcgcgagccttctcctggctcttgcgcttcttgagaagggtctcggggacgaggacctggtccttggtgggaacggtactgcatgtcaagctagattagtacgtagtccacatgcatacatggtaacacgtatggattgagcgccggttggagaactgccgattgcaacgcgacattctcagcggaggctgactcggaaataatttcaaccggtgagactcaaggagccggccgacgcagcacagtagatgtgccacagcggctgacgattttgagcatttctctcatccgacaacagcttggcacagggcgcaagattgagtgctcgccacacacatgaagccttggggtccggcaagttatgcttgaccatcaggcagcgtgtaggcggcaattgaatttaagagagaaggacgaggccttcatctccaacagcccgtgcaacgtctctcagtctgcaggctgcatagcaagcctggaggaaagagggagaagcacaggatagaatcgagctgacttgccatgcgcctagcaccgtgtttcagatgctcgcagcagagggcgacccagccgagaggaccacgacaatctacaatgttccagggaccgggccgggggtgggaagaagtgcgcgtctcgaatgcatcgagaagcgggagggaagtagcttacggagccatggtgttgtgtgctgtgggctgtgtcgtggtggttagtcgactcgggttcgtggtgttgatggttgacgaaggacgaggagcaagaagaaggggagagactggcataaatttc

SEQ ID NO: 12515 - DNA, 747 bp, Muscodor strobelii
  misc_feature: SGI cDNA ID NO. 564067
  misc_feature: Reduced expression when VOC is produced
  misc_feature: Encodes the peptide sequence at SEQ ID NO 12516
atggctcctaccgttcccaccaaggaccaggtcctcgtccccgagacccttctcaagaagcgcaagagccaggagaaggctcgcgccgagaagacggccgagcaggagaagcagaagaaggccaacaaggagaagcgttcggtcatcttcaagcgtgccgagaagtatgtcaccgagtaccgtgacgccgagcgtgagaaggtccgcctcaaccgcatcgccaagcaggagggcaacttccacgttcctgccgaggagaagttgatcttcgtcatccgcatcaagggtatcaacaagattgcccccaagccgcgcaagatcctccagctcctccgtctcctccagatcaacaacggtgtcttcgtccgtgtcaccaaggccaccgctgagatgatcaagattgtcgagccctgggttgcttacggctaccctaacctcaagagcgtcaaggagctcatctacaagcgcggatacggcaaggtcaacaagcagcgcatcccgctcaccgacaactccatcatcgaggagaacctcggcaagtacggcatcatctgcatggaggatctggttcacgagatcatcaccgtcggccccaacttcaagcaggcttccaacttcctgtggcccttcaagctcagcaaccccaacggtggattccggcccagaaaattcaagcacttcatcgagggcggtgatcttggcaaccgcgaggagaagatcaacgctctcatccgccagatgaactag

SEQ ID NO: 12516 - protein, 248 aa, Muscodor strobelii
  misc_feature: SGI Peptide ID NO. 564067
  misc_feature (88)..(139): Pfam Id: PF00327 Pfam Desc: Ribosomal protein L30p/L7e
  misc_feature (16)..(86): Pfam Id: PF08079 Pfam Desc: Ribosomal L30 N-terminal domain
  misc_feature (1)..(248): NCBI GI: 116191627 Blast Desc: 60S ribosomal protein L7 [Chaetomium globosum CBS 148.51] gi|88181444|gb|EAQ88912.1| 60S ribosomal protein L7 [Chaetomium globosum CBS 148.51]
  misc_feature (1)..(248): NCBI GI: 68160371 Blast Desc: 60S ribosomal protein L7 [Chaetomium globosum]
  misc_feature (1)..(248): NCBI GI: 145602037 Blast Desc: 60S ribosomal protein L7 [Magnaporthe grisea 70-15] gi|145010487|gb|EDJ95143.1| 60S ribosomal protein L7 [Magnaporthe grisea 70-15]
  misc_feature (1)..(248): NCBI GI: 154271063 Blast Desc: 60S ribosomal protein L7 [Ajellomyces capsulatus NAm1] gi|150409608|gb|EDN05052.1| 60S ribosomal protein L7 [Ajellomyces capsulatus NAm1]
  misc_feature (2)..(248): NCBI GI: 225555680 Blast Desc: 60S ribosomal protein L7 [Ajellomyces capsulatus G186AR] gi|240276501|gb|EER40013.1| 60S ribosomal protein L7 [Ajellomyces capsulatus H143]
  misc_feature (4)..(248): NCBI GI: 261358368 Blast Desc: 60S ribosomal protein L7 [Verticillium albo-atrum VaMs.102]
  misc_feature (1)..(248): NCBI GI: 239615019 Blast Desc: 60S ribosomal protein L7 [Ajellomyces dermatitidis ER-3]
  misc_feature (4)..(248): NCBI GI: 171687168 Blast Desc: protein product [Podospora anserina] gi|170943545|emb|CAP69198.1| protein product [Podospora anserina]
  misc_feature (1)..(248): NCBI GI: 164424179 Blast Desc: 60S ribosomal protein L7 [Neurospora crassa OR74A] gi|189042747|sp|Q7SBD5.2|RL7_NEUCR RecName: Full=60S ribosomal protein L7 gi|157070407|gb|EAA33714.2| 60S ribosomal protein L7
  misc_feature (4)..(248): NCBI GI: 256726194 Blast Desc: [Nectria haematococca mpVI 77-13-4]
  misc_feature: Useful for introducing or modulating the production of volatile compounds
MAPTVPTKDQVLVPETLLKKRKSQEKARAEKTAEQEKQKKANKEKRSVIFKRAEKYVTEYRDAEREKVRLNRIAKQEGNFHVPAEEKLIFVIRIKGINKIAPKPRKILQLLRLLQINNGVFVRVTKATAEMIKIVEPWVAYGYPNLKSVKELIYKRGYGKVNKQRIPLTDNSIIEENLGKYGIICMEDLVHEIITVGPNFKQASNFLWPFKLSNPNGGFRPRKFKHFIEGGDLGNREEKINALIRQMN

SEQ ID NO: 12517 - DNA, 1869 bp, Muscodor strobelii
  misc_feature: SGI EST ID NO. CUFF.30299.2
  misc_feature: Variant of the nucleotide sequence at SEQ ID NO 12515
gaaatttatgccagtctctccccttcttcttgctcctcgtccttcgtcaaccatcaacaccacgaacccgagtcgactaaccaccacgacacagcccacagcacacaacaccatggctcctaccgttcccaccaaggaccaggtcctcgtccccgagacccttctcaagaagcgcaagagccaggagaaggctcgcgccgagaagacggccgagcaggagaagcagaagaaggccaacaaggagaagcgttcggtcatcttcaagcgtgccgagaagtatgtcaccgagtaccgtgacgccgagcgtgagaaggtccgcctcaaccgcatcgccaagcaggagggcaacttccacgttcctgccgaggagaagttgatcttcgtcatccgcatcaagggtatcaacaagattgcccccaagccgcgcaagatcctccagctcctccgtctcctccagatcaacaacggtgtcttcgtccgtgtcaccaaggccaccgctgagatgatcaagattgtcgagccctgggttgcttacggctaccctaacctcaagagcgtcaaggagctcatctacaagcgcggatacggcaaggtcaacaagcagcgcatcccgctcaccgacaactccatcatcgaggagaacctcggcaagtacggcatcatctgcatggaggatctggttcacgagatcatcaccgtcggccccaacttcaagcaggcttccaacttcctgtggcccttcaagctcagcaaccccaacggtggattccggcccagaaaattcaagcacttcatcgagggcggtgatcttggcaaccgcgaggagaagatcaacgctctcatccgccagatgaactagagcggtcgtctgtctgttctcttctccatgggttcatagggtctggtattgcgggtaatgcgggtactgcttttgcatggtcggcggcgttcataaaaaagagccttcggaagcttacactgaatttgagattacgagatgattacgacctctgagttcgcatgttcccacaataccatgattacttcaccagaccatgtgcccttcataacgtaggactttgataaacagctccagtatgtaatgatcatgcgttcagcttgctaagaattagtcgtagaaggctagtcctcagaccatcgcaaatcatggagaccccatgttgcaaagtccaggtagttgagagactttggtgaatatctgtatgttacacaatcatcggtataaaagaaatgtcctcgtgtgaccaaatgatttctgttggcagcttcgcagctcacgtgaatattatataatcatgtctgtcttacaattgtcaagctaaatgaacacatcaccatcatggcacttttacgaagagcgtctttccgcgccgatgggcaacgcgttcacatcttgatgtcgaaactcgtgccacaaccacagctgctcgtggctagagggttatccacgatcttgaactggctgccgatcaactccattgtgaagtctactttgcttcccttcaggagctcgagacttggggtgtccagaatgatcttgggcttggtcaggatctcagcagccccgtcgcttgaggcgacctcggaatcgggggaaaagacgaagattacgtcatcttcggtgagcgtgggtgcggagggtgtcgcggtggtcgttgtggagggcgcaatctcttcgggggccgggggcagcgatgaggggatggtggtcgggagcgtggtcagagacattaggtattggaagccgtgacagccgccggattcgacttgtatccgcagtgcgaggtaggggttggagtccttggccatgatctgcgagaggcgctgggagggtttgcgttagcaagc

SEQ ID NO: 12518 - DNA, 453 bp, Muscodor strobelii
  misc_feature: SGI cDNA ID NO. 564068
  misc_feature: Reduced expression when VOC is produced
  misc_feature: Encodes the peptide sequence at SEQ ID NO 12519
atggcacccaagaccaagaccgtcaagccccaggagaacatcagcctcggcccccaggcccgcgagggcgagctggtctttggcgtggctcgcatctttgcctccttcaacgataccttcatccacgtcaccgatctgtctggccgtgagaccatcactcgtgtcactggtggcatgaaggtcaaggccgaccgcgacgagtcctctccctacgctgccatgttggctgcccaggatgttgctcaacgctgcaaggaccttggcatcaacgccctccacatcaagatccgcgccaccggtggtaacggaaccaagacccccggccccggtgcccagtccgccctccgtgctctcgcccgttctggcatgagaatcggccgcatcgaggacgtcacccccacgccctccgacagcactcgcagaaagggtggtcgccgtggtcgtcgtctgtga

SEQ ID NO: 12519 - protein, 150 aa, Muscodor strobelii
  misc_feature: SGI Peptide ID NO. 564068
  misc_feature (28)..(146): Pfam Id: PF00411 Pfam Desc: Ribosomal protein S11
  misc_feature (4)..(139): NCBI GI: 46111319 Blast Desc: RS14_NEUCR 40S ribosomal protein S14 (CRP2) [Gibberella zeae PH-1]
  misc_feature (1)..(139): NCBI GI: 261358369 Blast Desc: 40S ribosomal protein S14 [Verticillium albo-atrum VaMs.102]
  misc_feature (1)..(139): NCBI GI: 169783484 Blast Desc: [Aspergillus oryzae RIB40] gi|238493285|ref|XP_002377879.1| 40S ribosomal protein S11 [Aspergillus flavus NRRL3357] gi|83774948|dbj|BAE65071.1| protein
  misc_feature (1)..(139): NCBI GI: 116191629 Blast Desc: 40S ribosomal protein S14 [Chaetomium globosum CBS 148.51] gi|88181445|gb|EAQ88913.1| 40S ribosomal protein S14 [Chaetomium globosum CBS 148.51]
  misc_feature (1)..(139): NCBI GI: 256725792 Blast Desc: [Nectria haematococca mpVI 77-13-4]
  misc_feature (3)..(139): NCBI GI: 39940004 Blast Desc: 40S ribosomal protein S14 [Magnaporthe grisea 70-15] gi|59802861|gb|AAX07644.1| 40S ribosomal protein S14-like protein [Magnaporthe grisea] gi|145010486|gb|EDJ95142.1| 40S ribosomal
  misc_feature (1)..(139): NCBI GI: 171687166 Blast Desc: protein product [Podospora anserina] gi|170943544|emb|CAP69197.1| protein product [Podospora anserina]
  misc_feature (1)..(139): NCBI GI: 85109508 Blast Desc: 40S ribosomal protein S14 [Neurospora crassa OR74A] gi|28924596|gb|EAA33715.1| 40S ribosomal protein S14 [Neurospora crassa OR74A]
  misc_feature (1)..(139): NCBI GI: 115384692 Blast Desc: 40S ribosomal protein S14 [Aspergillus terreus NIH2624] gi|114196585|gb|EAU38285.1| 40S ribosomal protein S14 [Aspergillus terreus NIH2624]
  misc_feature (1)..(139): NCBI GI: 261192356 Blast Desc: 40S ribosomal protein S14 [Ajellomyces dermatitidis SLH14081] gi|239589460|gb|EEQ72103.1| 40S ribosomal protein S14 [Ajellomyces dermatitidis SLH14081] gi|239615174|gb|EEQ92161.1|
  misc_feature: Useful for introducing or modulating the production of volatile compounds
MAPKTKTVKPQENISLGPQAREGELVFGVARIFASFNDTFIHVTDLSGRETITRVTGGMKVKADRDESSPYAAMLAAQDVAQRCKDLGINALHIKIRATGGNGTKTPGPGAQSALRALARSGMRIGRIEDVTPTPSDSTRRKGGRRGRRL

SEQ ID NO: 12520 - DNA, 5029 bp, Muscodor strobelii
  misc_feature: SGI EST ID NO. CUFF.29686.0
  misc_feature: Variant of the nucleotide sequence at SEQ ID NO 12518
gccgcctacagtagacagccccaccacttctcccaccacttctcccaccgcaccactgcgataccgactgttctgcctccactgaccgcccgtcacttttgcgcccaccaagccatcgcccgttcgatcaacaccaccatcacagtctccggccctctgcaaaaccatcctccaatcccgagcaccggcaatcaccatggcacccaagaccaagaccgtcaagccccaggagaacatcagcctcggcccccaggcccgcgagggcgagctggtctttggcgtggctcgcatctttgcctccttcaacgataccttcatccacgtcaccgatctgtctggccgtgagaccatcactcgtgtcactggtggcatgaaggtcaaggccgaccgcgacgagtcctctccctacgctgccatgttggctgcccaggatgttgctcaacgctgcaaggaccttggcatcaacgccctccacatcaagatccgcgccaccggtggtaacggaaccaagacccccggccccggtgcccagtccgccctccgtgctctcgcccgttctggcatgagaatcggccgcatcgaggacgtcacccccacgccctccgacagcactcgcagaaagggtggtcgccgtggtcgtcgtctgtgatcgctcccaattggatcccttccgcccacgaagcgatgctcttcgcctgggtatggcttgtatggtttgggcagcggcgactcgggcgttctcgagaggatcacgcggtttctggcacatctgggcctcggcgcccctgtccctgtggcgctgacagttacgaggagaacggcgtgtgtctttctatgaagagaacatatgcctggtctccaatcccatctggggaattggcctggccaacaaatgtcacatgatgcttatggcacacccacggtagatagcaaaaaatgaaagaaacatctggattcgatccagaccacccctcctggtgccgtgattctttctgactactcaacgtgcacatgtgacagaagcatgaagatggacgactgtatagtgatctatatataattgtgaatccatcgcagcaaatcaatctctcgctttgcgcccatttgctatgctatataaccttgacttagttttacatgtagatcgtaactccacagctagcctgctggagtaagtgtccctgactgtgccgatgagcggacaagctctcgggcagattctacgactcatcacgcaatacccacgtagcacgcatagaagaacccttcgtatccatcttggcaacgcgactgagcgcttgcttgaaatccgccgtctgctccttcgtcttgcattttggattgaagtggtccacaagagactttgtcggcaccctcccgccatgacgcttgatgaatgctggaatcgccgtcatgaagtcacctaggcccatgccgcctcgtgcagggctaggggtctgagtaaggccctgccgagacgagagattggagagcacggaggccgatccgggcccggctcggcctcgccggatgttggacggccggccaccctcgcctacttcacccgtccacgttacggtgccgatagcgacatggcgcgcctgttctttggcctggcggagggcggtcgctgcttcggctgcgacgcgcgctgcctcctgttgcagcatttgtcggtcagcgcggggcttccgcttcccgtctacgatggcgtcatgttcgtgggccgagtggacaccggtacgagcgaagaggccctccatgatgcgatcttcctccttcgtattgttggcctttgcttcctcgttgttttggtagtcttcaagaccggcgaagccatctatgtcttggaattgctcttgtttctcggtagcaattgcttggcgagggtgaacattcgaagcgcttctccgagaatttctagacgcatcggcttccgttgatttcgtaaaattgacttcagtttccttgaataacctccctgtctctgtcgtcgcttcgtctgacgaccctaacgtaaataggtcgtgtaaatcgttcagattaaaggtagtccggtgcttaggatctttgagaaccttattgctaagaaattgtttgaaaatctgtctgtggtagatcttctcttcaatcgtgcctgcggtcattagtcggaagatagtcacatctttcttctggccgaggcgccacgctctctcgcgcgcttgaacatccgttgacggattccaatccggatcatagatgataactcgattggcacctgtcaaattgactcccagaccgccgactttggtagtcaacaggaacaagtccataaccggatcctggttgaactcatcgacaagcttttgcctcatttttataggcgttttcccatccattctcaaatacttgatgttgcctagatcttgcacaaactgctcgaggatatcaagcatttgtacagtctgcgagaatagtagtgtcttatggccgagacgcttccacatgcccagcagtgctttcaggacttgcatcttgccagacttactgggagcaccgaaattttcagggtgctttgatttcatatggaggtcgagcagatctgggtgattgcaaatcttgcggagtctatcaattccgaagaatgactgagtggttcctctgaaaatctctcccatctctctggagttcagaaaagtctgataggcatcatattgcagctttgtgagcttgcagaagagtacctgttctctcttcttcggaaggtcagctgcaacatcgattttgagtcgctgaagtagatatgggctgatgttttccttgagggcttgcgcagtcttctctgcggtcatgatctgcagatgcgaagcatttgcatacccgccgattttgatagggatttcgatcgccttgcggaaatctacgagcgtcccgagtcgcatagggtagacaaagtcgaacaatgaccacagctccacaaggttgttctgtataggtgttccagacagaatcacccgatttggagtgcacaattctttgcaggcaatagtcacagccgcgttggggttccgaattttatggccctcgtccaatacagcatagccccaatctatcgtcgaaagcatatcgccgtaaatttgcacgctggcataagtggtaactagtacgtgaccatgcctgacaacgcgatcgacgaccctcttcgctgccttgttggcgacgcgtgggcctcgtctttgatcccaggtcagctcttcatcctcaatctcattctctcgattcatattgagcattccagaaccggaggagtgcagcatggaaactcggagtggtggccaccagcggtggaactcgttgacccattgctgtagcacagtagctggggcgacaataagaacaggtttatccagctgcttgctgtagtgcaacgctgcgataaaagaaatgacttgaacggtcttgccgagccccatttcgtccccgatgatcccccctacctgttgagaatataactcggaaagccactccacccccgtcttctggtagtcaaataacgcagggtaaacatcacctgggagtttaaggccgtggggcaggtgatgatctggctcgtctggagacggacgaaaccattcttcttctgcggcatcggcatcttcgggtagaccctttgtgtcgtcaggctcacttttctcccgttgtctctgaagccttgctcgacgtcgtctatcgacccaatccgacaaccttctctgatagttagattcaaccccatcatcaagtttgctcagatccactctctcatcatccgtgatttttctagttctctttgatggacgctcggtcatatcaaaatcttccgactcttcgccctctgacatagcatcgtctctggatcctgtagttagggggacaaattcgtccgacgatgcgtcgtcttgttggactcgacgccgctttcgtggacgtagcgagaactctgcttccgcagccacagtgactgcttcagtatcctcaataaagccaggggctcgtaggttctggtgagaacgtggttcgtaaccggcttgctcctccaactcatttgctgctgcttcctcttcgacctcagccaaagcgctggctagttctcctccgacaccatcggggcgtggtccaccaatctttgcaaaaggggtgattttaccggtccggatgaggaactcccgatggctttcactaggcagttttctatttcctgctacggcagactccgtcccttggctttcttgatgtctgttttcaatacgggtttgaaattgagtgatgtcatcatttgtcaaatcgatctctgactcgagacgagtgatctcatcacggatcttctgtttgagttcgggtcggccggcagctttgcgataacgctcctcttgcacatctttttgtgccttcaatttcttgatattgttgcgagctttctcgatacgggtcgcatctttcttgtcctctgcttcagccaaggctagactggcctggaaagtgatatctctctcaagatcatcttgatcgcgcacatccgcagtgagatttctcagagcggaatcctcgtcatagatatcaagcgaaacttcatccacatgcccatcatcggcatcgatcccacgcattgtggatatgggggtatgctggagactggatgaagtggtttgatgtgtaagcggctgttgttcgcaagttgtgttcccagaccccgataggtcaccattagactgttgtccgtccatttgaatgcctggatggtatgagaggaacaaaagccctgcgcatatgtggaaagaagctccgggggttggtgtagatgtctaagggttgcatcacaatgaaggtagggcttcacacatggaagtcgctccttatgcactctgaacctatgcgggaaggaaccgatcagtatgccatagccttgatacctatcgcatagacaactcagataagtcaggactatcagaaaaattgcagcatgaagccaggaataaagaatattggaattaggtaatattgattaaag

SEQ ID NO: 12521 - DNA, 3408 bp, Muscodor strobelii
  misc_feature: SGI cDNA ID NO. 564069
  misc_feature: Encodes the peptide sequence at SEQ ID NO 12522
atgcgtgggatcgatgccgatgatgggcatgtggatgaagtttcgcttgatatctatgacgaggattccgctctgagaaatctcactgcggatgtgcgcgatcaagatgatcttgagagagatatcactttccaggccagtctagccttggctgaagcagaggacaagaaagatgcgacccgtatcgagaaagctcgcaacaatatcaagaaattgaaggcacaaaaagatgtgcaagaggagcgttatcgcaaagctgccggccgacccgaactcaaacagaagatccgtgatgagatcactcgtctcgagtcagagatcgatttgacaaatgatgacatcactcaatttcaaacccgtattgaaaacagacatcaagaaagccaagggacggagtctgccgtagcaggaaatagaaaactgcctagtgaaagccatcgggagttcctcatccggaccggtaaaatcaccccttttgcaaagattggtggaccacgccccgatggtgtcggaggagaactagccagcgctttggctgaggtcgaagaggaagcagcagcaaatgagttggaggagcaagccggttacgaaccacgttctcaccagaacctacgagcccctggctttattgaggatactgaagcagtcactgtggctgcggaagcagagttctcgctacgtccacgaaagcggcgtcgagtccaacaagacgacgcatcgtcggacgaatttgtccccctaactacaggatccagagacgatgctatgtcagagggcgaagagtcggaagattttgatatgaccgagcgtccatcaaagagaactagaaaaatcacggatgatgagagagtggatctgagcaaacttgatgatggggttgaatctaactatcagagaaggttgtcggattgggtcgatagacgacgtcgagcaaggcttcagagacaacgggagaaaagtgagcctgacgacacaaagggtctacccgaagatgccgatgccgcagaagaagaatggtttcgtccgtctccagacgagccagatcatcacctgccccacggccttaaactcccaggtgatgtttaccctgcgttatttgactaccagaagacgggggtggagtggctttccgagttatattctcaacaggtaggggggatcatcggggacgaaatggggctcggcaagaccgttcaagtcatttcttttatcgcagcgttgcactacagcaagcagctggataaacctgttcttattgtcgccccagctactgtgctacagcaatgggtcaacgagttccaccgctggtggccaccactccgagtttccatgctgcactcctccggttctggaatgctcaatatgaatcgagagaatgagattgaggatgaagagctgacctgggatcaaagacgaggcccacgcgtcgccaacaaggcagcgaagagggtcgtcgatcgcgttgtcaggcatggtcacgtactagttaccacttatgccagcgtgcaaatttacggcgatatgctttcgacgatagattggggctatgctgtattggacgagggccataaaattcggaaccccaacgcggctgtgactattgcctgcaaagaattgtgcactccaaatcgggtgattctgtctggaacacctatacagaacaaccttgtggagctgtggtcattgttcgactttgtctaccctatgcgactcgggacgctcgtagatttccgcaaggcgatcgaaatccctatcaaaatcggcgggtatgcaaatgcttcgcatctgcagatcatgaccgcagagaagactgcgcaagccctcaaggaaaacatcagcccatatctacttcagcgactcaaaatcgatgttgcagctgaccttccgaagaagagagaacaggtactcttctgcaagctcacaaagctgcaatatgatgcctatcagacttttctgaactccagagagatgggagagattttcagaggaaccactcagtcattcttcggaattgatagactccgcaagatttgcaatcacccagatctgctcgacctccatatgaaatcaaagcaccctgaaaatttcggtgctcccagtaagtctggcaagatgcaagtcctgaaagcactgctgggcatgtggaagcgtctcggccataagacactactattctcgcagactgtacaaatgcttgatatcctcgagcagtttgtgcaagatctaggcaacatcaagtatttgagaatggatgggaaaacgcctataaaaatgaggcaaaagcttgtcgatgagttcaaccaggatccggttatggacttgttcctgttgactaccaaagtcggcggtctgggagtcaatttgacaggtgccaatcgagttatcatctatgatccggattggaatccgtcaacggatgttcaagcgcgcgagagagcgtggcgcctcggccagaagaaagatgtgactatcttccgactaatgaccgcaggcacgattgaagagaagatctaccacagacagattttcaaacaatttcttagcaataaggttctcaaagatcctaagcaccggactacctttaatctgaacgatttacacgacctatttacgttagggtcgtcagacgaagcgacgacagagacagggaggttattcaaggaaactgaagtcaattttacgaaatcaacggaagccgatgcgtctagaaattctcggagaagcgcttcgaatgttcaccctcgccaagcaattgctaccgagaaacaagagcaattccaagacatagatggcttcgccggtcttgaagactaccaaaacaacgaggaagcaaaggccaacaatacgaaggaggaagatcgcatcatggagggcctcttcgctcgtaccggtgtccactcggcccacgaacatgacgccatcgtagacgggaagcggaagccccgcgctgaccgacaaatgctgcaacaggaggcagcgcgcgtcgcagccgaagcagcgaccgccctccgccaggccaaagaacaggcgcgccatgtcgctatcggcaccgtaacgtggacgggtgaagtaggcgagggtggccggccgtccaacatccggcgaggccgagccgggcccggatcggcctccgtgctctccaatctctcgtctcggcagggccttactcagacccctagccctgcacgaggcggcatgggcctaggtgacttcatgacggcgattccagcattcatcaagcgtcatggcgggagggtgccgacaaagtctcttgtggaccacttcaatccaaaatgcaagacgaaggagcagacggcggatttcaagcaagcgctcagtcgcgttgccaagatggatacgaagggttcttctatgcgtgctacgtgggtattgcgtgatgagtcgtag

SEQ ID NO: 12522 - protein, 1135 aa, Muscodor strobelii
  misc_feature: SGI Peptide ID NO. 564069
  misc_feature (739)..(817): Pfam Id: PF00271 Pfam Desc: Helicase conserved C-terminal domain
  misc_feature (368)..(684): Pfam Id: PF00176 Pfam Desc: SNF2 family N-terminal domain
  misc_feature (17)..(1132): NCBI GI: 261358370 Blast Desc: DNA repair and recombination protein RAD26 [Verticillium albo-atrum VaMs.102]
  misc_feature (4)..(1132): NCBI GI: 46111317 Blast Desc: FG02540.1 [Gibberella zeae PH-1]
  misc_feature (20)..(1132): NCBI GI: 256726195 Blast Desc: transcription-coupled repair protein CSB/RAD26 [Nectria haematococca mpVI 77-13-4]
  misc_feature (20)..(1134): NCBI GI: 121714457 Blast Desc: DNA repair protein Rhp26/Rad26, [Aspergillus clavatus NRRL 1] gi|119402993|gb|EAW13413.1| DNA repair protein Rhp26/Rad26, [Aspergillus clavatus NRRL 1]
  misc_feature (20)..(1134): NCBI GI: 145602035 Blast Desc: MGG_05239 [Magnaporthe grisea 70-15] gi|145010485|gb|EDJ95141.1| MGG_05239 [Magnaporthe grisea 70-15]
  misc_feature (20)..(1122): NCBI GI: 67541879 Blast Desc: AN7103.2 [Aspergillus nidulans FGSC A4] gi|40742118|gb|EAA61308.1| AN7103.2 [Aspergillus nidulans FGSC A4] gi|259483574|tpe|CBF79076.1| TPA: DNA repair protein nidulans
  misc_feature (18)..(1134): NCBI GI: 70982085 Blast Desc: DNA repair protein Rhp26/Rad26 [Aspergillus fumigatus Af293] gi|66844194|gb|EAL84533.1| DNA repair protein Rhp26/Rad26, [Aspergillus fumigatus Af293] gi|159122195|gb|EDP47317.1| DNA
  misc_feature (18)..(1134): NCBI GI: 119487132 Blast Desc: DNA repair protein Rhp26/Rad26, [Neosartorya fischeri NRRL 181] gi|119410578|gb|EAW20524.1| DNA repair protein Rhp26/Rad26, [Neosartorya fischeri NRRL 181]
  misc_feature (20)..(1134): NCBI GI: 115387749 Blast Desc: ATEG_02202 [Aspergillus terreus NIH2624] gi|114195464|gb|EAU37164.1| ATEG_02202 [Aspergillus terreus NIH2624]
  misc_feature (20)..(1134): NCBI GI: 240107514 Blast Desc: SNF2 family N-terminal domain containing protein [Coccidioides posadasii C735 delta SOWgp]
MRGIDADDGHVDEVSLDIYDEDSALRNLTADVRDQDDLERDITFQASLALAEAEDKKDATRIEKARNNIKKLKAQKDVQEERYRKAAGRPELKQKIRDEITRLESEIDLTNDDITQFQTRIENRHQESQGTESAVAGNRKLPSESHREFLIRTGKITPFAKIGGPRPDGVGGELASALAEVEEEAAANELEEQAGYEPRSHQNLRAPGFIEDTEAVTVAAEAEFSLRPRKRRRVQQDDASSDEFVPLTTGSRDDAMSEGEESEDFDMTERPSKRTRKITDDERVDLSKLDDGVESNYQRRLSDWVDRRRRARLQRQREKSEPDDTKGLPEDADAAEEEWFRPSPDEPDHHLPHGLKLPGDVYPALFDYQKTGVEWLSELYSQQVGGIIGDEMGLGKTVQVISFIAALHYSKQLDKPVLIVAPATVLQQWVNEFHRWWPPLRVSMLHSSGSGMLNMNRENEIEDEELTWDQRRGPRVANKAAKRVVDRVVRHGHVLVTTYASVQIYGDMLSTIDWGYAVLDEGHKIRNPNAAVTIACKELCTPNRVILSGTPIQNNLVELWSLFDFVYPMRLGTLVDFRKAIEIPIKIGGYANASHLQIMTAEKTAQALKENISPYLLQRLKIDVAADLPKKREQVLFCKLTKLQYDAYQTFLNSREMGEIFRGTTQSFFGIDRLRKICNHPDLLDLHMKSKHPENFGAPSKSGKMQVLKALLGMWKRLGHKTLLFSQTVQMLDILEQFVQDLGNIKYLRMDGKTPIKMRQKLVDEFNQDPVMDLFLLTTKVGGLGVNLTGANRVIIYDPDWNPSTDVQARERAWRLGQKKDVTIFRLMTAGTIEEKIYHRQIFKQFLSNKVLKDPKHRTTFNLNDLHDLFTLGSSDEATTETGRLFKETEVNFTKSTEADASRNSRRSASNVHPRQAIATEKQEQFQDIDGFAGLEDYQNNEEAKANNTKEEDRIMEGLFARTGVHSAHEHDAIVDGKRKPRADRQMLQQEAARVAAEAATALRQAKEQARHVAIGTVTWTGEVGEGGRPSNIRRGRAGPGSASVLSNLSSRQGLTQTPSPARGGMGLGDFMTAIPAFIKRHGGRVPTKSLVDHFNPKCKTKEQTADFKQALSRVAKMDTKGSSMRATWVLRDES

SEQ ID NO: 12523 - DNA, 1161 bp, Muscodor strobelii
  misc_feature: SGI cDNA ID NO. 564070
  misc_feature: Encodes the peptide sequence at SEQ ID NO 12524
atggatgggaaaacgcctataaaaatgaggcaaaagcttgtcgatgagttcaaccaggatccggttatggacttgttcctgttgactaccaaagtcggcggtctgggagtcaatttgacaggtgccaatcgagttatcatctatgatccggattggaatccgtcaacggatgttcaagcgcgcgagagagcgtggcgcctcggccagaagaaagatgtgactatcttccgactaatgaccgcaggcacgattgaagagaagatctaccacagacagattttcaaacaatttcttagcaataaggttctcaaagatcctaagcaccggactacctttaatctgaacgatttacacgacctatttacgttagggtcgtcagacgaagcgacgacagagacagggaggttattcaaggaaactgaagtcaattttacgaaatcaacggaagccgatgcgtctagaaattctcggagaagcgcttcgaatgttcaccctcgccaagcaattgctaccgagaaacaagagcaattccaagacatagatggcttcgccggtcttgaagactaccaaaacaacgaggaagcaaaggccaacaatacgaaggaggaagatcgcatcatggagggcctcttcgctcgtaccggtgtccactcggcccacgaacatgacgccatcgtagacgggaagcggaagccccgcgctgaccgacaaatgctgcaacaggaggcagcgcgcgtcgcagccgaagcagcgaccgccctccgccaggccaaagaacaggcgcgccatgtcgctatcggcaccgtaacgtggacgggtgaagtaggcgagggtggccggccgtccaacatccggcgaggccgagccgggcccggatcggcctccgtgctctccaatctctcgtctcggcagggccttactcagacccctagccctgcacgaggcggcatgggcctaggtgacttcatgacggcgattccagcattcatcaagcgtcatggcgggagggtgccgacaaagtctcttgtggaccacttcaatccaaaatgcaagacgaaggagcagacggcggatttcaagcaagcgctcagtcgcgttgccaagatggatacgaagggttcttctatgcgtgctacgtgggtattgcgtgatgagtcgtag

SEQ ID NO: 12524 - protein, 386 aa, Muscodor strobelii
  misc_feature: SGI Peptide ID NO. 564070
  misc_feature (1)..(68): Pfam Id: PF00271 Pfam Desc: Helicase conserved C-terminal domain
  misc_feature (1)..(383): NCBI GI: 171687146 Blast Desc: protein product [Podospora anserina] gi|170943534|emb|CAP69187.1| protein product [Podospora anserina]
  misc_feature (1)..(384): NCBI GI: 154312352 Blast Desc: BC1G_06209 [Botryotinia fuckeliana B05.10] gi|150850172|gb|EDN25365.1| BC1G_06209 [Botryotinia fuckeliana B05.10]
  misc_feature (1)..(373): NCBI GI: 67541879 Blast Desc: AN7103.2 [Aspergillus nidulans FGSC A4] gi|40742118|gb|EAA61308.1| AN7103.2 [Aspergillus nidulans FGSC A4] gi|259483574|tpe|CBF79076.1| TPA: DNA repair protein nidulans
  misc_feature (1)..(385): NCBI GI: 115387749 Blast Desc: ATEG_02202 [Aspergillus terreus NIH2624] gi|114195464|gb|EAU37164.1| ATEG_02202 [Aspergillus terreus NIH2624]
  misc_feature (1)..(385): NCBI GI: 85109522 Blast Desc: NCU07837 [Neurospora crassa OR74A] gi|28924603|gb|EAA33722.1| NCU07837 [Neurospora crassa OR74A]
  misc_feature (1)..(385): NCBI GI: 121714457 Blast Desc: DNA repair protein Rhp26/Rad26, [Aspergillus clavatus NRRL 1] gi|119402993|gb|EAW13413.1| DNA repair protein Rhp26/Rad26, [Aspergillus clavatus NRRL 1]
  misc_feature (1)..(385): NCBI GI: 145248792 Blast Desc: An14g01060 [Aspergillus niger] gi|134081405|emb|CAK46446.1| protein product [Aspergillus niger]
  misc_feature (1)..(385): NCBI GI: 119487132 Blast Desc: DNA repair protein Rhp26/Rad26, [Neosartorya fischeri NRRL 181] gi|119410578|gb|EAW20524.1| DNA repair protein Rhp26/Rad26, [Neosartorya fischeri NRRL 181]
  misc_feature (1)..(385): NCBI GI: 70982085 Blast Desc: DNA repair protein Rhp26/Rad26 [Aspergillus fumigatus Af293] gi|66844194|gb|EAL84533.1| DNA repair protein Rhp26/Rad26, [Aspergillus fumigatus Af293] gi|159122195|gb|EDP47317.1| DNA
  misc_feature (1)..(385): NCBI GI: 145602035 Blast Desc: MGG_05239 [Magnaporthe grisea 70-15] gi|145010485|gb|EDJ95141.1| MGG_05239 [Magnaporthe grisea 70-15]
MDGKTPIKMRQKLVDEFNQDPVMDLFLLTTKVGGLGVNLTGANRVIIYDPDWNPSTDVQARERAWRLGQKKDVTIFRLMTAGTIEEKIYHRQIFKQFLSNKVLKDPKHRTTFNLNDLHDLFTLGSSDEATTETGRLFKETEVNFTKSTEADASRNSRRSASNVHPRQAIATEKQEQFQDIDGFAGLEDYQNNEEAKANNTKEEDRIMEGLFARTGVHSAHEHDAIVDGKRKPRADRQMLQQEAARVAAEAATALRQAKEQARHVAIGTVTWTGEVGEGGRPSNIRRGRAGPGSASVLSNLSSRQGLTQTPSPARGGMGLGDFMTAIPAFIKRHGGRVPTKSLVDHFNPKCKTKEQTADFKQALSRVAKMDTKGSSMRATWVLRDES

SEQ ID NO: 12525 - DNA, 1197 bp, Muscodor strobelii
  misc_feature: SGI cDNA ID NO. 564071
  misc_feature: Reduced expression when VOC is produced
  misc_feature: Encodes the peptide sequence at SEQ ID NO 12526
atgggagcgcacagacggaatcgcagcattgcccagaagcaggagcgcgcaaagagcacccgcgaagcccggttccgaaggaagaaagaggaggacagagatcccgagctgagaagacagcgtgtcgccaggaaccagcctgtcaccctcgaccagaagagagtgtacgacgacattgatgacgatgcactcaccagcagtgtcaatctggaacacctgctcaagaagcgacgcatacaagaagacgaagacgcggaaagagaagagctggtagcagcaagagctgccgagggtctagacgatgctggagatgacgacgacgatgatgtggacagtatgctcgggtccgacgacgacgcagatgaggaccacgacgaagacctagccgcgcgagcccgcgcaaagagggtcatcagagacgatagtcttgcgccctccactacctcgaccaatcttgacatcacccccgaatccctcatgactcgcttcccatccctattctcggacgaccgcccaaaagagcccaagattttgatcacgacgaccctcaactccactctgcaccaagtcgccgagattttcaccaatataatacccaactctcagtacatacgccggactgcgcacaagtatggtcacaaatacagtgtacgggaaatagcatcgttcgccacaaatagaggcttcacctctctgatgattctacgagaggatcagaagaaacctatcggcgttgatgttgtcgatctaattgggaaaacaactttccatttcagcatttcctcgtgggttgagggcaaaaagcttcccggtcacggcaacgctacgaatcactatcccgagctattattgaacaatttttcgactcccctaggtctactcaccgcaaaaatattgcaaacattggtttccggccacgccagaactagctggacgacaatgcgcttttttcgccgccatcgctacattatacgggataagagagcaacagagaagagtgttgttggcgctgatggcaaagaactaaagggagtcgaaaatatacgggcaggactccaagagcttgggccgagattcactttaaagctaaggaggattgataaaggtgttggcagagctggatcagaccaagatgacccgttccattggaaatggaaagccaaaagtgagtatctgaggatgatgtgttgcccctga

SEQ ID NO: 12526 - protein, 398 aa, Muscodor strobelii
  misc_feature: SGI Peptide ID NO. 564071
  misc_feature (178)..(366): Pfam Id: PF04427 Pfam Desc: Brix domain
  misc_feature (178)..(310): Pfam Id: PF04427 Pfam Desc: Brix domain
  misc_feature (316)..(366): Pfam Id: PF04427 Pfam Desc: Brix domain
  misc_feature (33)..(390): NCBI GI: 46122177 Blast Desc: FG05466.1 [Gibberella zeae PH-1]
  misc_feature (5)..(393): NCBI GI: 156065257 Blast Desc: SS1G_00639 [Sclerotinia sclerotiorum 1980] gi|154691498|gb|EDN91236.1| SS1G_00639 [Sclerotinia sclerotiorum 1980]
  misc_feature (5)..(393): NCBI GI: 154311323 Blast Desc: BC1G_06514 [Botryotinia fuckeliana B05.10] gi|150850911|gb|EDN26104.1| BC1G_06514 [Botryotinia fuckeliana B05.10]
  misc_feature (10)..(393): NCBI GI: 258571684 Blast Desc: UREG_04162 [Uncinocarpus reesii 1704] gi|237904915|gb|EEP79316.1| UREG_04162 [Uncinocarpus reesii 1704]
  misc_feature (5)..(393): NCBI GI: 39976839 Blast Desc: MGG_06322 [Magnaporthe grisea 70-15] gi|145016281|gb|EDK00771.1| MGG_06322 [Magnaporthe grisea 70-15]
  misc_feature (10)..(393): NCBI GI: 119182386 Blast Desc: CIMG_06224 [Coccidioides immitis RS]
  misc_feature (10)..(393): NCBI GI: 240109255 Blast Desc: Brix domain containing protein [Coccidioides posadasii C735 delta SOWgp]
  misc_feature (6)..(393): NCBI GI: 70998634 Blast Desc: RNA processing factor 1 [Aspergillus fumigatus Af293] gi|66851675|gb|EAL92001.1| RNA processing factor 1 [Aspergillus fumigatus Af293]
  misc_feature (6)..(393): NCBI GI: 159126227 Blast Desc: RNA processing factor 1 [Aspergillus fumigatus A1163]
  misc_feature (5)..(395): NCBI GI: 255943791 Blast Desc: Pc20g01020 [Penicillium chrysogenum Wisconsin 54-1255] gi|211587398|emb|CAP85431.1| Pc20g01020 [Penicillium chrysogenum Wisconsin 54-1255]
  misc_feature: Useful for introducing or modulating the production of volatile compounds
MGAHRRNRSIAQKQERAKSTREARFRRKKEEDRDPELRRQRVARNQPVTLDQKRVYDDIDDDALTSSVNLEHLLKKRRIQEDEDAEREELVAARAAEGLDDAGDDDDDDVDSMLGSDDDADEDHDEDLAARARAKRVIRDDSLAPSTTSTNLDITPESLMTRFPSLFSDDRPKEPKILITTTLNSTLHQVAEIFTNIIPNSQYIRRTAHKYGHKYSVREIASFATNRGFTSLMILREDQKKPIGVDVVDLIGKTTFHFSISSWVEGKKLPGHGNATNHYPELLLNNFSTPLGLLTAKILQTLVSGHARTSWTTMRFFRRHRYIIRDKRATEKSVVGADGKELKGVENIRAGLQELGPRFTLKLRRIDKGVGRAGSDQDDPFHWKWKAKSEYLRMMCCP

SEQ ID NO: 12527 - DNA, 2001 bp, Muscodor strobelii
  misc_feature: SGI EST ID NO. CUFF.29733.0
  misc_feature: Variant of the nucleotide sequence at SEQ ID NO 12525
ggaaggctgagcagatatatcatcgcgacgggattcgcagtgaatatttgatagggtcaccgggcattcgatgtagtatctacggttgcctaggagttgaggcattcatataggtctcaaagctgttggcgattgcaattgttcattgaaacggaaagcctagccacgcctagatagggattgggcaaagacggggaggcacaagcgcatctacaaagttatagcttatcgcttatcagcagcccatcccacctcttatttgctctcaatgaagcaggaccccactaaattttttgagatcaatccatgtcaatcagttcagggcgtttatgcacaacgggtagctctcacacgaagtatccaagcgctcgtttctgtgctgctgaaaagcctccttcctcgcttgtcgcctttcactgctgcggtggttgctgcaatcctacgacaacaagatgggagcgcacagacggaatcgcagcattgcccagaagcaggagcgcgcaaagagcacccgcgaagcccggttccgaaggaagaaagaggaggacagagatcccgagctgagaagacagcgtgtcgccaggaaccagcctgtcaccctcgaccagaagagagtgtacgacgacattgatgacgatgcactcaccagcagtgtcaatctggaacacctgctcaagaagcgacgcatacaagaagacgaagacgcggaaagagaagagctggtagcagcaagagctgccgagggtctagacgatgctggagatgacgacgacgatgatgtggacagtatgctcgggtccgacgacgacgcagatgaggaccacgacgaagacctagccgcgcgagcccgcgcaaagagggtcatcagagacgatagtcttgcgccctccactacctcgaccaatcttgacatcacccccgaatccctcatgactcgcttcccatccctattctcggacgaccgcccaaaagagcccaagattttgatcacgacgaccctcaactccactctgcaccaagtcgccgagattttcaccaatataatacccaactctcagtacatacgccggactgcgcacaagtatggtcacaaatacagtgtacgggaaatagcatcgttcgccacaaatagaggcttcacctctctgatgattctacgagaggatcagaagaaacctatcggcgttgatgttgtcgatctaattgggaaaacaactttccatttcagcatttcctcgtgggttgagggcaaaaagcttcccggtcacggcaacgctacgaatcactatcccgagctattattgaacaatttttcgactcccctaggtctactcaccgcaaaaatattgcaaacattggtatgagggcctaaagttgcgtcgtatcacaaacaacgacgccactctccttgtaggtgcaacgagtacactatcagactgacataacgtagtttccggccacgccagaactagctggacgacaatgcgcttttttcgccgccatcgctacattatacgggataagagagcaacagagaagagtgttgttggcgctgatggcaaagaactaaagggagtcgaaaatatacgggcaggactccaagagcttgggccgagattcactttaaagctaaggaggattgataaaggtgttggcagagctggatcagaccaagatgacccgttccattggaaatggaaagccaaaagtgagtatctgaggatgatgtgttgcccctgagacaaaactcctcaccgtggatcgtctcgaacggcagtaattccgagcagaagacaaacgctgacgtattacagtggaaaagaatcgcaagcgtttcaatttataaattcaacctgtagtccatccgcacttttacagaatcgcaggaacggaacttgccattattatatagaatgcgataagtccgcaagctccaacgatgataataccaaatcaggagtacaaccagatagctcaacgaataattatcttaaccctgta

SEQ ID NO: 12528 - DNA, 2580 bp, Muscodor strobelii
  misc_feature: SGI cDNA ID NO. 564072
  misc_feature: Encodes the peptide sequence at SEQ ID NO 12529
atgccgctgcatgacgatagcctctactcgaacaaccagttcatgaacccgggccccgcgccaagaccgcccaccgaccgcccgcggctggctctgacgcccaataccaacatgcccggcagcatggccaacatggtcggctcgcctatcacgcgcaccgccacctccacgtacacgggctccaccatctcgcttccgctcgcgcgcgaacgatcaaaccagacagatggcatgggcggtgtcgcagtgatcaaggagggctgggcgcaggtcaaggagagccgcaacttcatccagccgtggaagcagaagtacctgatcctgcgcaaggagcatctcgacttccacaagaccgagggtggcaaagtgtcctacaccttgtacctgaaggatgtcgtcaacgtggggagagtcgaagctgccggcaccatctttgaaatcaagagacacgccaacggatcctccaatagccccggcgacgacgatggagcagtccgaactctgcacatcaaggtcaagtcggacgatgacctctacgactggatagacctcttgtacgggcgatgtcccaccatgggaggagtgagcaacccgacaaacttctcacatgctgttcatgtcggcttcgatccccagaccgggcagtttgtgggcctaccaccggagtggtccaagctactgaattcgtccgctatcacgaaagaggactacgagcggaatccccaggctgttttcgaagtgttggacttctattcggatttgaccaaacgagcaggagatcctcaacagtatcctagtctgacacccaccccccctccaggtagccagggaaacaagcagcttgggtacggtgcaggcggcaactccgtcgcgcctccgagaccgatgccgccgcagcaaaagagcagctatgccaatatacccactcaacaacaaacgccgccgccgcggcctcctccgccggatagcagtacccagcagaggcagcagatgcagaatatggcgactaattacataccaccagacgcttcccgtgatgagcaacgcaaaaaacttgaattgcggcagcgagaaatggaggaccagaacagacgagacctagaggcttacaatgcctctctgccacagaagaaggtgccccttgcgcagcaggagatcggtggcggcggctatggcggttctacaccggcagatcgatataaccctactcgcgcagctccaccggcgccaaagacagcaactccccaacaaaacggccttcgagcgcagcgaccagcgcctccagcgcctggccagtcatcatcctcgcggccccctatggctcagcagccaagttccggcccgggccaacctccacgagaccctcagccgaactcaggagtccagcgtgcaccgccaagagctgaccaatcatcaccaactacaagatatcccaacgccagcaacacgaatggatcctctcaagcccgttccaatggccaaaatgcatctccgtctcgtgcccctgcccctgtcaagccgttgaacgttccagccaagccgaaccagcctcaacaaagcgaaagcgtcaaggccgcggaagctgccctcactgccaagccaccgccttctgagcggaaacaggatgtgcgcatgtcaaccatgtctgagaaagaagtcatggcgaagctcatagaagtagtttcaaaagatgatcccaacatgtcctattccaaacagaaaaagatcggccagggtgcttctggctctgtttatgtggccaaggtcaaagagggtgctatgtcgccagtagcgcgggaggtgctccgtaatttcggttctcgggctcaagttgctattaaacaaatggacttggctcaccaacctcgcaaggagctgatcgtaaacgagatcatggtcatgaaggacagcaaacaccgcaacatcgtcaacttcctcgatgctttccttcgcaacaacaactctgaattatgggtggtgatggagtatatggagggtggcgccttgaccgacgttatcgacaacaacccagtcatctcggaggaacagatatctaccatttgcctcgagacgtgccgagggctgcaacacttgcactcccagaacataattcatcgtgacatcaaaagtgataatgtgctcttagatgctcgtggcaatgtcaaaattaccgattttggattttgcgccaaattgacagaaaccaaatcgaagcgagccactatggttggcacgccttactggatggcccccgaggtcgtcaagcaaaaggagtatggacccaaagtcgatatctggtcactgggtatcatggcaatcgagatgatcgagtcggaaccaccgtatctcaacgaggagcccctcaaggcgctctacctcattgccaccaatggaacaccccgcctcaagaagccggagaagctcagtaaggagctgaaagcgtttttgtctgtctgtctttgcgtggatgtcaagagtcgcgcctctgccgatgaacttctccaacacgatttcttgaagcatggttgtcccttgggcagcctatcggagctcctagcctttcgaaagcacgctaaatag

SEQ ID NO: 12529 - protein, 859 aa, Muscodor strobelii
  misc_feature: SGI Peptide ID NO. 564072
  misc_feature (83)..(190): Pfam Id: PF00169 Pfam Desc: PH domain
  misc_feature (194)..(252): Pfam Id: PF00786 Pfam Desc: P21-Rho-binding domain
  misc_feature (570)..(839): Pfam Id: PF00069 Pfam Desc: Protein kinase domain
  misc_feature (570)..(839): Pfam Id: PF07714 Pfam Desc: Protein tyrosine kinase
  misc_feature (15)..(859): NCBI GI: 39976835 Blast Desc: MGG_06320 [Magnaporthe grisea 70-15] gi|32332123|gb|AAL15449.2| protein kinase CHM1 [Magnaporthe grisea] gi|145016283|gb|EDK00773.1| MGG_06320 [Magnaporthe grisea
  misc_feature (45)..(859): NCBI GI: 256733164 Blast Desc: NECHADRAFT_38822 [Nectria haematococca mpVI 77-13-4]
  misc_feature (71)..(859): NCBI GI: 46125159 Blast Desc: FG06957.1 [Gibberella zeae PH-1]
  misc_feature (15)..(859): NCBI GI: 164511885 Blast Desc: PAK kinase [Claviceps purpurea]
  misc_feature (6)..(859): NCBI GI: 156065253 Blast Desc: SS1G_00637 [Sclerotinia sclerotiorum 1980] gi|154691496|gb|EDN91234.1| SS1G_00637 [Sclerotinia sclerotiorum 1980]
  misc_feature (4)..(859): NCBI GI: 85084309 Blast Desc: NCU00406 [Neurospora crassa OR74A] gi|28918381|gb|EAA28056.1| NCU00406 [Neurospora crassa OR74A]
  misc_feature (7)..(859): NCBI GI: 171686514 Blast Desc: protein product [Podospora anserina] gi|170943218|emb|CAP68871.1| protein product [Podospora anserina]
  misc_feature (8)..(858): NCBI GI: 119498577 Blast Desc: protein kinase (Chm1), [Neosartorya fischeri NRRL 181] gi|119414210|gb|EAW24149.1| protein kinase (Chm1), [Neosartorya fischeri NRRL 181]
  misc_feature (8)..(858): NCBI GI: 121712622 Blast Desc: protein kinase (Chm1), [Aspergillus clavatus NRRL 1] gi|119402075|gb|EAW12496.1| protein kinase (Chm1), [Aspergillus clavatus NRRL 1]
  misc_feature (8)..(858): NCBI GI: 70998640 Blast Desc: protein kinase (Chm1) [Aspergillus fumigatus Af293] gi|66851678|gb|EAL92004.1| protein kinase (Chm1), [Aspergillus fumigatus Af293]
MPLHDDSLYSNNQFMNPGPAPRPPTDRPRLALTPNTNMPGSMANMVGSPITRTATSTYTGSTISLPLARERSNQTDGMGGVAVIKEGWAQVKESRNFIQPWKQKYLILRKEHLDFHKTEGGKVSYTLYLKDVVNVGRVEAAGTIFEIKRHANGSSNSPGDDDGAVRTLHIKVKSDDDLYDWIDLLYGRCPTMGGVSNPTNFSHAVHVGFDPQTGQFVGLPPEWSKLLNSSAITKEDYERNPQAVFEVLDFYSDLTKRAGDPQQYPSLTPTPPPGSQGNKQLGYGAGGNSVAPPRPMPPQQKSSYANIPTQQQTPPPRPPPPDSSTQQRQQMQNMATNYIPPDASRDEQRKKLELRQREMEDQNRRDLEAYNASLPQKKVPLAQQEIGGGGYGGSTPADRYNPTRAAPPAPKTATPQQNGLRAQRPAPPAPGQSSSSRPPMAQQPSSGPGQPPRDPQPNSGVQRAPPRADQSSPTTRYPNASNTNGSSQARSNGQNASPSRAPAPVKPLNVPAKPNQPQQSESVKAAEAALTAKPPPSERKQDVRMSTMSEKEVMAKLIEVVSKDDPNMSYSKQKKIGQGASGSVYVAKVKEGAMSPVAREVLRNFGSRAQVAIKQMDLAHQPRKELIVNEIMVMKDSKHRNIVNFLDAFLRNNNSELWVVMEYMEGGALTDVIDNNPVISEEQISTICLETCRGLQHLHSQNIIHRDIKSDNVLLDARGNVKITDFGFCAKLTETKSKRATMVGTPYWMAPEVVKQKEYGPKVDIWSLGIMAIEMIESEPPYLNEEPLKALYLIATNGTPRLKKPEKLSKELKAFLSVCLCVDVKSRASADELLQHDFLKHGCPLGSLSELLAFRKHAK

SEQ ID NO: 12530 - DNA, 3980 bp, Muscodor strobelii
  misc_feature: SGI EST ID NO. CUFF.30068.0
  misc_feature: Variant of the nucleotide sequence at SEQ ID NO 12528
cagaaatcggtgggcggataggagggagaaatatacctaggtgtgcccgggctgacaagtgcctgacagacagcacacctcgtcgtaactgtgaggatatttgtaaatgaccgtagtggcggtgacttggattcggtactctcaacaacaacaaccaacaaccagcgcatctaattcgcgtaaaagcggaaggtcagacaggtcgcagagagtggccggcgtccactagcgagcggtgtctttggaggacgagttggatttagtacggggcaagaccaggggatcagggtgtggagatgtgtcgcctctgccgccttctgggagcatcagcggctgggccattgccaatccccctccacagccacccacacaacttgagtgccttgactgattgagaagagctgcttgatatctcaccaacaacaccacttgtatccgccaatccgttctctgccttctcagccaacctacctccaaagccagcactctgcccttctccttgccactaccggtgcagtcaagagaaggcttctatcgttgtcatcggcgtcggtgactgcggcttgcacctcgacctgtgggccgctgtcgaattggccggtatctactgcccctaaggaggcgccctcgttcgtgctgctggtctcttcagcacggttccggatgtgagcctgagctggtctttcaacaagctcgacaagctcgacaagcaagacgggcacactctttatcccacctccaacgctccgggccgtcgcgtgcctcgacaccggcgcagactcccaggtccccagactcgcagcaccgcagagcgccggccatcgtctctggctaaatatacgacgcagtgcgcctgcccctgagacgtatccattcagcttgttcccctcctcacgcctcacacgcctgcatccgcctgcctgcctgccagcatcggcatcgacatcaacgctgttctttttcccgcatcccaactcatccctactctccgttctattccacccggtcccgagcccctccccgcctctctacctctctgtgcctctctcatttgaggagccgccattcaaacggctaattggccccccattgtccacaatgtcggcgccaaatggcctctactcgaacaaccagttcatgaacccgggccccgcgccaagaccgcccaccgaccgcccgcggctggctctgacgcccaataccaacatgcccggcagcatggccaacatggtcggctcgcctatcacgcgcaccgccacctccacgtacacgggctccaccatctcgcttccgctcgcgcgcgaacgatcaaaccagacagatggcatgggcggtgtcgcagtgatcaaggagggctgggcgcaggtcaaggagagccgcaacttcatccagccgtggaagcagaagtacctgatcctgcgcaaggagcatctcgacttccacaagaccgagggtggcaaagtgtcctacaccttgtacctgaaggatgtcgtcaacgtggggagagtcgaagctgccggcaccatctttgaaatcaagagacacgccaacggatcctccaatagccccggcgacgacgatggagcagtccgaactctgcacatcaaggtcaagtcggacgatgacctctacgactggatagacctcttgtacgggcgatgtcccaccatgggaggagtgagcaacccgacaaacttctcacatgctgttcatgtcggcttcgatccccagaccgggcagtttgtgggcctaccaccggagtggtccaagctactgaattcgtccgctatcacgaaagaggactacgagcggaatccccaggctgttttcgaagtgttggacttctattcggatttgaccaaacgagcaggagatcctcaacagtatcctagtctgacacccaccccccctccaggtagccagggaaacaagcagcttgggtacggtgcaggcggcaactccgtcgcgcctccgagaccgatgccgccgcagcaaaagagcagctatgccaatatacccactcaacaacaaacgccgccgccgcggcctcctccgccggatagcagtacccagcagaggcagcagatgcagaatatggcgactaattacataccaccagacgcttcccgtgatgagcaacgcaaaaaacttgaattgcggcagcgagaaatggaggaccagaacagacgagacctagaggcttacaatgcctctctgccacagaagaaggtgccccttgcgcagcaggagatcggtggcggcggctatggcggttctacaccggcagatcgatataaccctactcgcgcagctccaccggcgccaaagacagcaactccccaacaaaacggccttcgagcgcagcgaccagcgcctccagcgcctggccagtcatcatcctcgcggccccctatggctcagcagccaagttccggcccgggccaacctccacgagaccctcagccgaactcaggagtccagcgtgcaccgccaagagctgaccaatcatcaccaactacaagatatcccaacgccagcaacacgaatggatcctctcaagcccgttccaatggccaaaatgcatctccgtctcgtgcccctgcccctgtcaagccgttgaacgttccagccaagccgaaccagcctcaacaaagcgaaagcgtcaaggccgcggaagctgccctcactgccaagccaccgccttctgagcggaaacaggatgtgcgcatgtcaaccatgtctgagaaagaagtcatggcgaagctcatagaagtagtttcaaaagatgatcccaacatgtcctattccaaacagaaaaagatcggccagggtgcttctggctctgtttatgtggccaaggtcaaagagggtgctatgtcgccagtagcgcgggaggtgctccgtaatttcggttctcgggctcaagttgctattaaacaaatggacttggctcaccaacctcgcaaggagctgatcgtaaacgagatcatggtcatgaaggacagcaaacaccgcaacatcgtcaacttcctcgatgctttccttcgcaacaacaactctgaattatgggtggtgatggagtatatggagggtggcgccttgaccgacgttatcgacaacaacccagtcatctcggaggaacagatatctaccatttgcctcgagacgtgccgagggctgcaacacttgcactcccagaacataattcatcgtgacatcaaaagtgataatgtgctcttagatgctcgtggcaatgtcaaaattaccgattttggattttgcgccaaattgacagaaaccaaatcgaagcgagccactatggttggcacgccttactggatggcccccgaggtcgtcaagcaaaaggagtatggacccaaagtcgatatctggtcactgggtatcatggcaatcgagatgatcgagtcggaaccaccgtatctcaacgaggagcccctcaaggcgctctacctcattgccaccaatggaacaccccgcctcaagaagccggagaagctcagtaaggagctgaaagcgtttttgtctgtctgtctttgcgtggatgtcaagagtcgcgcctctgccgatgaacttctccaacacgatttcttgaagcatggttgtcccttgggcagcctatcggagctcctagcctttcgaaagcacgctaaatagaacagcagatatgatgaacaacgataccccatttttagactagcttaatgatgattctgaatggtactcgggcgaaaagggaccatgtttgacttgtgtgtatggatgatgcttctagatggcagctgatcggcattgggtggatctatatagtcctacatgaccaaaaaactgcatgagacgaatgggttactatttcgagaatggcgccagagcacttcgtataatatggtgttattgccagatcagcatatattcaaagtgacggtctttcatataagacgagacgatgcacttctcttgtg

SEQ ID NO: 12531 - DNA, 2577 bp, Muscodor strobelii
  misc_feature: SGI cDNA ID NO. 564073
  misc_feature: Encodes the peptide sequence at SEQ ID NO 12532
atgtcggcgccaaatggcctctactcgaacaaccagttcatgaacccgggccccgcgccaagaccgcccaccgaccgcccgcggctggctctgacgcccaataccaacatgcccggcagcatggccaacatggtcggctcgcctatcacgcgcaccgccacctccacgtacacgggctccaccatctcgcttccgctcgcgcgcgaacgatcaaaccagacagatggcatgggcggtgtcgcagtgatcaaggagggctgggcgcaggtcaaggagagccgcaacttcatccagccgtggaagcagaagtacctgatcctgcgcaaggagcatctcgacttccacaagaccgagggtggcaaagtgtcctacaccttgtacctgaaggatgtcgtcaacgtggggagagtcgaagctgccggcaccatctttgaaatcaagagacacgccaacggatcctccaatagccccggcgacgacgatggagcagtccgaactctgcacatcaaggtcaagtcggacgatgacctctacgactggatagacctcttgtacgggcgatgtcccaccatgggaggagtgagcaacccgacaaacttctcacatgctgttcatgtcggcttcgatccccagaccgggcagtttgtgggcctaccaccggagtggtccaagctactgaattcgtccgctatcacgaaagaggactacgagcggaatccccaggctgttttcgaagtgttggacttctattcggatttgaccaaacgagcaggagatcctcaacagtatcctagtctgacacccaccccccctccaggtagccagggaaacaagcagcttgggtacggtgcaggcggcaactccgtcgcgcctccgagaccgatgccgccgcagcaaaagagcagctatgccaatatacccactcaacaacaaacgccgccgccgcggcctcctccgccggatagcagtacccagcagaggcagcagatgcagaatatggcgactaattacataccaccagacgcttcccgtgatgagcaacgcaaaaaacttgaattgcggcagcgagaaatggaggaccagaacagacgagacctagaggcttacaatgcctctctgccacagaagaaggtgccccttgcgcagcaggagatcggtggcggcggctatggcggttctacaccggcagatcgatataaccctactcgcgcagctccaccggcgccaaagacagcaactccccaacaaaacggccttcgagcgcagcgaccagcgcctccagcgcctggccagtcatcatcctcgcggccccctatggctcagcagccaagttccggcccgggccaacctccacgagaccctcagccgaactcaggagtccagcgtgcaccgccaagagctgaccaatcatcaccaactacaagatatcccaacgccagcaacacgaatggatcctctcaagcccgttccaatggccaaaatgcatctccgtctcgtgcccctgcccctgtcaagccgttgaacgttccagccaagccgaaccagcctcaacaaagcgaaagcgtcaaggccgcggaagctgccctcactgccaagccaccgccttctgagcggaaacaggatgtgcgcatgtcaaccatgtctgagaaagaagtcatggcgaagctcatagaagtagtttcaaaagatgatcccaacatgtcctattccaaacagaaaaagatcggccagggtgcttctggctctgtttatgtggccaaggtcaaagagggtgctatgtcgccagtagcgcgggaggtgctccgtaatttcggttctcgggctcaagttgctattaaacaaatggacttggctcaccaacctcgcaaggagctgatcgtaaacgagatcatggtcatgaaggacagcaaacaccgcaacatcgtcaacttcctcgatgctttccttcgcaacaacaactctgaattatgggtggtgatggagtatatggagggtggcgccttgaccgacgttatcgacaacaacccagtcatctcggaggaacagatatctaccatttgcctcgagacgtgccgagggctgcaacacttgcactcccagaacataattcatcgtgacatcaaaagtgataatgtgctcttagatgctcgtggcaatgtcaaaattaccgattttggattttgcgccaaattgacagaaaccaaatcgaagcgagccactatggttggcacgccttactggatggcccccgaggtcgtcaagcaaaaggagtatggacccaaagtcgatatctggtcactgggtatcatggcaatcgagatgatcgagtcggaaccaccgtatctcaacgaggagcccctcaaggcgctctacctcattgccaccaatggaacaccccgcctcaagaagccggagaagctcagtaaggagctgaaagcgtttttgtctgtctgtctttgcgtggatgtcaagagtcgcgcctctgccgatgaacttctccaacacgatttcttgaagcatggttgtcccttgggcagcctatcggagctcctagcctttcgaaagcacgctaaatag

SEQ ID NO: 12532 - protein, 858 aa, Muscodor strobelii
  misc_feature: SGI Peptide ID NO. 564073
  misc_feature (82)..(189): Pfam Id: PF00169 Pfam Desc: PH domain
  misc_feature (193)..(251): Pfam Id: PF00786 Pfam Desc: P21-Rho-binding domain
  misc_feature (569)..(838): Pfam Id: PF00069 Pfam Desc: Protein kinase domain
  misc_feature (569)..(838): Pfam Id: PF07714 Pfam Desc: Protein tyrosine kinase
  misc_feature (14)..(858): NCBI GI: 39976835 Blast Desc: MGG_06320 [Magnaporthe grisea 70-15] gi|32332123|gb|AAL15449.2| protein kinase CHM1 [Magnaporthe grisea] gi|145016283|gb|EDK00773.1| MGG_06320 [Magnaporthe grisea
  misc_feature (44)..(858): NCBI GI: 256733164 Blast Desc: NECHADRAFT_38822 [Nectria haematococca mpVI 77-13-4]
  misc_feature (70)..(858): NCBI GI: 46125159 Blast Desc: FG06957.1 [Gibberella zeae PH-1]
  misc_feature (14)..(858): NCBI GI: 164511885 Blast Desc: PAK kinase [Claviceps purpurea]
  misc_feature (1)..(858): NCBI GI: 156065253 Blast Desc: SS1G_00637 [Sclerotinia sclerotiorum 1980] gi|154691496|gb|EDN91234.1| SS1G_00637 [Sclerotinia sclerotiorum 1980]
  misc_feature (1)..(858): NCBI GI: 85084309 Blast Desc: NCU00406 [Neurospora crassa OR74A] gi|28918381|gb|EAA28056.1| NCU00406 [Neurospora crassa OR74A]
  misc_feature (7)..(858): NCBI GI: 171686514 Blast Desc: protein product [Podospora anserina] gi|170943218|emb|CAP68871.1| protein product [Podospora anserina]
  misc_feature (7)..(857): NCBI GI: 119498577 Blast Desc: protein kinase (Chm1), [Neosartorya fischeri NRRL 181] gi|119414210|gb|EAW24149.1| protein kinase (Chm1), [Neosartorya fischeri NRRL 181]
  misc_feature (7)..(857): NCBI GI: 121712622 Blast Desc: protein kinase (Chm1), [Aspergillus clavatus NRRL 1] gi|119402075|gb|EAW12496.1| protein kinase (Chm1), [Aspergillus clavatus NRRL 1]
  misc_feature (7)..(857): NCBI GI: 70998640 Blast Desc: protein kinase (Chm1) [Aspergillus fumigatus Af293] gi|66851678|gb|EAL92004.1| protein kinase (Chm1), [Aspergillus fumigatus Af293]
MSAPNGLYSNNQFMNPGPAPRPPTDRPRLALTPNTNMPGSMANMVGSPITRTATSTYTGSTISLPLARERSNQTDGMGGVAVIKEGWAQVKESRNFIQPWKQKYLILRKEHLDFHKTEGGKVSYTLYLKDVVNVGRVEAAGTIFEIKRHANGSSNSPGDDDGAVRTLHIKVKSDDDLYDWIDLLYGRCPTMGGVSNPTNFSHAVHVGFDPQTGQFVGLPPEWSKLLNSSAITKEDYERNPQAVFEVLDFYSDLTKRAGDPQQYPSLTPTPPPGSQGNKQLGYGAGGNSVAPPRPMPPQQKSSYANIPTQQQTPPPRPPPPDSSTQQRQQMQNMATNYIPPDASRDEQRKKLELRQREMEDQNRRDLEAYNASLPQKKVPLAQQEIGGGGYGGSTPADRYNPTRAAPPAPKTATPQQNGLRAQRPAPPAPGQSSSSRPPMAQQPSSGPGQPPRDPQPNSGVQRAPPRADQSSPTTRYPNASNTNGSSQARSNGQNASPSRAPAPVKPLNVPAKPNQPQQSESVKAAEAALTAKPPPSERKQDVRMSTMSEKEVMAKLIEVVSKDDPNMSYSKQKKIGQGASGSVYVAKVKEGAMSPVAREVLRNFGSRAQVAIKQMDLAHQPRKELIVNEIMVMKDSKHRNIVNFLDAFLRNNNSELWVVMEYMEGGALTDVIDNNPVISEEQISTICLETCRGLQHLHSQNIIHRDIKSDNVLLDARGNVKITDFGFCAKLTETKSKRATMVGTPYWMAPEVVKQKEYGPKVDIWSLGIMAIEMIESEPPYLNEEPLKALYLIATNGTPRLKKPEKLSKELKAFLSVCLCVDVKSRASADELLQHDFLKHGCPLGSLSELLAFRKHAK

SEQ ID NO: 12533 - DNA, 3980 bp, Muscodor strobelii; identical to SEQ ID NO: 12530
  misc_feature: SGI EST ID NO. CUFF.30068.0
  misc_feature: Variant of the nucleotide sequence at SEQ ID NO 12531

SEQ ID NO: 12534 - DNA, 579 bp, Muscodor strobelii
  misc_feature: SGI cDNA ID NO. 564074
  misc_feature: Encodes the peptide sequence at SEQ ID NO 12535
atgggtttctttaacgactatcctaaagagatggactatggcagcgatgctggtgtcacctatgctgagacccggatgaccgcattatctaacgacttcttccataatgccgatgacggaatgagctctgtcctcggagtatctgacgactgccgtgacgctactgattacggtgatcacgaaattggttcatccaaagagtttgcaagagatgcgccccttaatagagactctgatgtcattagcgacgaaaaacagaagattgcgtcgcccaacggtttctccgatgatgttagtgccataagccccattcttggagtatctaataactactacaacaccccgaattacgacatgctatttttcgattatatcactaatatcgccaagcatagaaagccttgcgaccatactctagaatcgagccgtaattttcttttatgggtacattattggactgctataacggcggaacaacgcaagcaagagcttcaaaagctgcacgtaatgatttcgactctggcctacgcaataagcaatgcagaagaattcatcgtcgaaacccgaacgccggcctaa

SEQ ID NO: 12535 - protein, 192 aa, Muscodor strobelii
  misc_feature: SGI Peptide ID NO. 564074
MGFFNDYPKEMDYGSDAGVTYAETRMTALSNDFFHNADDGMSSVLGVSDDCRDATDYGDHEIGSSKEFARDAPLNRDSDVISDEKQKIASPNGFSDDVSAISPILGVSNNYYNTPNYDMLFFDYITNIAKHRKPCDHTLESSRNFLLWVHYWTAITAEQRKQELQKLHVMISTLAYAISNAEEFIVETRTPA

SEQ ID NO: 12536 - DNA, 1194 bp, Muscodor strobelii
  misc_feature: SGI EST ID NO. CUFF.29692.0
  misc_feature: Variant of the nucleotide sequence at SEQ ID NO 12534
ctccccagcaacttcatattgccactttctttcctctgccaacaagccgcccgcattgtatcaaaacttacactattaatagtatatctcttaagtctgttttgcttgttcactcttaaacccttactttaatattcaacattccttcatcttgttacctaccgccaacacccaaaccaagccctaaataaaaggcggcacttactttatttcattatttattactactactacatactttagcaagatcgcctaccatgccttaaactttaatacgcagtatttatgtatttataggcctactaacgctataaactaaacgcgttgctcgccgcgttggttttttggttgacgagatccccgattttgatggcggtgctgattcggacgccactctgagtgacagcgctacctttgatgtcgaggatcgggaaatgggtttctttaacgactatcctaaagagatggactatggcagcgatgctggtgtcacctatgctgagacccggatgaccgcattatctaacgacttcttccataatgccgatgacggaatgagctctgtcctcggagtatctgacgactgccgtgacgctactgattacggtgatcacgaaattggttcatccaaagagtttgcaagagatgcgccccttaatagagactctgatgtcattagcgacgaaaaacagaagattgcgtcgcccaacggtttctccgatgataaagccttgcgaccatactctagaatcgagccgtaattttcttttatgggtacattattggactgctataacggcggaacaacgcaagcaagagcttcaaaagctgcacgtaatgatttcgactctggcctacgcaataagcaatgcagaagaattcatcgtcgaaacccgaacgccggcctaaggttctaccatataagaacggccatcagaattagtgccagtatgcctataaacattttatcgccgttgaatttggctttatactatttacacggcggaccatttagtctactcatatacaccttaattcgaggtttataacgtcggctttttgagtcaaaccgattaacatctcttcgttgcctgcaatgacggtaattcagtggtcctttatcctgtttcgcagtttataagcctataagattagtattgtttattaaggtatacggagcctttataccagcgg

SEQ ID NO: 12537 - DNA, 801 bp, Muscodor strobelii
  misc_feature: SGI cDNA ID NO. 564075
  misc_feature: Encodes the peptide sequence at SEQ ID NO 12538
atgtctcagcaccatcccgcccaccatcatcaccaccaaattctcatggactcagcgcacatcggtggacatccgggcgctcggcatatgggccaccagccttctccgtatggcgccggtccgtcaccgcacgccgtcgtaggcccgccgttatacccaactctcacgccaacccagccgcatagcgcgggttcgaagcgctcgcgacctgacgacctggacctgatcccagacctcgagcaaggcgacctagattccatgcagcaatcttctatgggtgcagcgtatgcgcaaactgcctcttcggccgctccaacccatcaccatcatcgccttcccgattcagggccaccgtcgaagatgctgaggcgcgaaggggatggaggaccaggtggtggaggagggggtgcgccaagtgtggtaggacaagcgggcatgccacccccggcgcctcgaccaagagggccaaaattgaaatttacgcccgaagatgatgcactacttattgatttgaaggagaacaagagtttgacttggaagcaaattgcggatttcttcccagggcggtcgtcgggtactctccaggttcgctattgtacgaagctcaaagccaagacaactcaatggacagacgagaccgaccagaagctacgcacagcgctccaggactacgagaatgagaaatggcgctacgtttcaaataaagtcggtccaggcttcaccccccaagcttgccgcgagcggatggcgcagttgtctggggagatgccggaggaattagaaccagaggaaggcttatag

SEQ ID NO: 12538 - protein, 266 aa, Muscodor strobelii
  misc_feature: SGI Peptide ID NO. 564075
  misc_feature (23)..(255): NCBI GI: 116191637 Blast Desc: CHGG_05536 [Chaetomium globosum CBS 148.51] gi|88181449|gb|EAQ88917.1| CHGG_05536 [Chaetomium globosum CBS 148.51]
  misc_feature (21)..(235): NCBI GI: 145602031 Blast Desc: MGG_05240 [Magnaporthe grisea 70-15] gi|145010483|gb|EDJ95139.1| MGG_05240 [Magnaporthe grisea 70-15]
  misc_feature (7)..(260): NCBI GI: 46111313 Blast Desc: FG02538.1 [Gibberella zeae PH-1]
  misc_feature (14)..(221): NCBI GI: 171687148 Blast Desc: protein product [Podospora anserina] gi|170943535|emb|CAP69188.1| protein product [Podospora anserina]
  misc_feature (1)..(252): NCBI GI: 256726196 Blast Desc: NECHADRAFT_81864 [Nectria haematococca mpVI 77-13-4]
  misc_feature (76)..(255): NCBI GI: 164424175 Blast Desc: NCU07834 [Neurospora crassa OR74A] gi|157070406|gb|EAA33719.2| conserved [Neurospora crassa OR74A]
  misc_feature (32)..(254): NCBI GI: 189209383 Blast Desc: MYB DNA-binding domain containing protein [Pyrenophora tritici-repentis Pt-1C-BFP] gi|187977117|gb|EDU43743.1| MYB DNA-binding domain containing protein [Pyrenophora Pt-1C-BFP]
  misc_feature (83)..(257): NCBI GI: 238843408 Blast Desc: MYB DNA-binding domain-containing protein [Microsporum canis CBS 113480]
  misc_feature (59)..(252): NCBI GI: 154310556 Blast Desc: BC1G_06752 [Botryotinia fuckeliana B05.10] gi|150851292|gb|EDN26485.1| BC1G_06752 [Botryotinia fuckeliana B05.10]
  misc_feature (108)..(252): NCBI GI: 156058388 Blast Desc: SS1G_03205 [Sclerotinia sclerotiorum 1980] gi|154700993|gb|EDO00732.1| SS1G_03205 [Sclerotinia sclerotiorum 1980]
MSQHHPAHHHHHQILMDSAHIGGHPGARHMGHQPSPYGAGPSPHAVVGPPLYPTLTPTQPHSAGSKRSRPDDLDLIPDLEQGDLDSMQQSSMGAAYAQTASSAAPTHHHHRLPDSGPPSKMLRREGDGGPGGGGGGAPSVVGQAGMPPPAPRPRGPKLKFTPEDDALLIDLKENKSLTWKQIADFFPGRSSGTLQVRYCTKLKAKTTQWTDETDQKLRTALQDYENEKWRYVSNKVGPGFTPQACRERMAQLSGEMPEELEPEEGL

SEQ ID NO: 12539 - DNA, 3816 bp, Muscodor strobelii
  misc_feature: SGI EST ID NO. CUFF.29709.0
  misc_feature: Variant of the nucleotide sequence at SEQ ID NO 12537
gcccacttgccaatctcccctagtcgtctagcataattgatcatttattgcttagagtgcctgagacgcgtctaattcatgcgaaactccccacgcaatcctctgcctttcagctttcgacaccagctgcatcctgcaattggcctggtcgctctattgcattggattgcgcaatgtcagaatgtcccagggcaagggtcacagtcatccgagagtaccggtccatgagttcggtgggttcgatggcccaagtccagatagaggcgcgaatggcgacaaatgcccactgggatcgccatctccgagcaacctcgtttggagaaataaggaaatgaagctcatagttggctaacgctcatctcggccctgactgtcgaccgcttgggaagtcgggcatgatagcaaaagggcccggcattgggtactcatggagatttcctcgcaagtgaatcaatcgcctttccccagatcttgttgcagaaaggtctactctcactatccggtttcaattatggatacccagagtactagcaccaaaattgaacaacgccgtcgcaggcagcttcgagagccctatcactgctgggtatggcatgtcaatgctcgagtggttcaaggcaagattcccctgccttgcttttctgttcggcaatctatctagcgtatcctggggccactcgcaaccttggtgctcaccctgccctatggcgtgtcagcatcgcatctctttgcctttctttgttataccaccccagtcgcaactatagccctcctagtggaggtgtgtgaacggcctagctgcccgatacttgtttcttatttgccttccaccagccatgttttgttgttgcgccacccaaagaccggcagtctgagcattcagggatggccaatgcctgggctcttttttctgacttgcacggtaagcagggagctcgcaattgtgtgtcgagcggtatgagatgcctctggacaggcttgtcatgctctccccagccgcatggtcagggtttgtttcatctctcattagttcattctgcgagcgttgatgctttttcatatgcttcatgtgcctttcgtcctatcgacttgaaatacagtgcagccccataagtctgccgagattggcatgaattcagtgttggtcgaggcgcctggccttatttgtttctccagccctgtccttgccgaccataccaaagctcgatccgccgtgctggttgttacccccagttgcatcatcacctccggccggggccttgtctcgtttctatatccggcaaacaggcagaccatggtggcataagatcaccaaattatgctaccgtcatcgccggccaaggtacccgaacctttccacccgttcaggaaccacagttgtctcgtacatgtcgaatatggtcaagtgctttaactctcggatgaaaatgacctagtccaggttcttacctgtcaatcctaacctcatcctagtctgggatggtaccaagagggaaatcagacgatataatgcagccgttgcccgcctgtgccccagtacactctaacgtctgtcaccatataatagagcatttaagaaatacaacgagaaaggcggatccccatacatacttcacgagcttgggcggcaatgaaatactaaacctctattaagcggaccgcgccgaatctgatctctgattccttcacagttgacaggaatcatcacctgtaaaacaccaacaccaacaacatacgtcacagtagcgcatcagaagctaggaaacaccatatacgaactgtcaacacatacgcaacatatgtacttagggcttggacgcgtgatacagcacttaacatccagttcgacggtgaacggacacgacgttgcgcctcgtcgagacacgcgacagtcggtctcctgcgctgctgcacactcggcagaaacccccgaagggttccaatattcagattctttccatccagattccggcgaccgtccagagcggttcgctctggcgggacccatgcatcgaggacacgctggcgggcaactatcgagtagggccggactaccatgtcgattactctccccaagagtcgcatgcgggcgagcaaagccatactccgcacacctacgattctcaccatcacgcgcgcggaaatccaatgcagcagcatacagcgcacggaggccttcatgagcagccatcgtcgcactctcatcataccatgtctcagcaccatcccgcccaccatcatcaccaccaaattctcatggactcagcgcacatcggtggacatccgggcgctcggcatatgggccaccagccttctccgtatggcgccggtccgtcaccgcacgccgtcgtaggcccgccgttatacccaactctcacgccaacccagccgcatagcgcgggttcgaagcgctcgcgacctgacgacctggacctgatcccagacctcgagcaaggcgacctagattccatgcagcaatcttctatgggtgcagcgtatgcgcaaactgcctcttcggccgctccaacccatcaccatcatcgccttcccgattcagggccaccgtcgaagatgctgaggcgcgaaggggatggaggaccaggtggtggaggagggggtgcgccaagtgtggtaggacaagcgggcatgccacccccggcgcctcgaccaagagggccaaaattgaaatttacgcccgaagatgatgcactacttattgatttgaaggagaacaagagtttgacttggaagcaaattgcggatttcttcccagggcggtcgtcgggtactctccaggttcgctattgtacgaagctcaaagccaagacaactcaatggacagacgagaccgaccagaagctacgcacagcgctccaggactacgagaatgagaaatggcgctacgtttcaaataaagtcggtccaggcttcaccccccaagcttgccgcgagcggatggcgcagttgtctggggagatgccggaggaattagaaccagaggaaggcttatagcctcaatggtctgcttctcaggcgttgcattttgaacacggcagtactttccactgaacggaggcattgcgtgggtgcaggtcattttcaactcgagagtatcgaaatatgtgtactgagcgacggagtccaaaaggttactacatacttcgcattccttcaagtatgggattctatggtttacgaatcgcgtcatacacctacacctgctcgaccttggactcgtttgaccagttttgttgttactcttccgaaccgcaacgagactgctgtccaaagtatctccagcttgcccgatgctcctctttgtcagatctttcccttcctttcaacagcgcagattctatagacatgtatcaggatgcagaaatgttggtttcggaaccggcgttaacgttctctacccctttttttattttcctttctatatataccataatgtatatcctcgcagtttcaacagtggtgttctatttcatttgtcgaggattgatggtctcctctctgctctttacgcgcttggcagtcgggcaaaaattaggggcttgtttttggtgagaagtgcctcaaggcttctattcacctttccaattgcattgacataacggcttcggggtagatcaggaaagagagaaggttgtactataattaatacttgggcgcgaaggaaagatacccccgaatgatgatatgactgagagaagggcgcgctgggcaatggcggtgagacgaggagcggcatgcagacctcgcacataacacgaatagtgatttgatctgcaggtaccgtccaacaatagacga

SEQ ID NO: 12540 - DNA, 1137 bp, Muscodor strobelii
  misc_feature: SGI cDNA ID NO. 564076
  misc_feature: Elevated expression when VOC is produced
  misc_feature: Encodes the peptide sequence at SEQ ID NO 12541
atgtcgacggctgtgatgggcatcattgccgtatgtcctgttctgtcttcgcttgaaaatgtcatcttgacgccacatacttcatgggtcccgggatttattatcgatctatggaaaaactggtggcgaggcccagagagcgccattgtcaggcagtttcttggacctgatgcggattttgagacttgcctttctggtgactgtttcggtccaaaattggatgatgaccttccacgaaatgcatcctacgcagggatcaaagatataccagtctacttagtgggtggtcagcaggatgtcacaacgccaatgtcgaatgtcatggacattgcaaactctttgagggcggatcgtgtcagtatgaatggctttggcgaccatgtcgaacttgaaaggaacatgagcctatttcacgaaaatggtgaaatactacagcacactgccctaccacgaggacgtcttccgctttcccttcatgatattagcctcgatgatttcctgcgccagaaaaacgaagaccttattgaggaggatccgaccactccaagagaccaccaggagcctgagactttcaactacgttcctccacagccgctaagaccagctgcaatagttgcgactagtttcattccaggtggtcatgcgttgttatacatgccttccacggttcgaatactcgctggaagagttagcgactttctacaaaatcaccttaccggacgattctcccgtgaggaatggcaacttcagttcctttctcgggaggggaagtgggatgtcaagaacttagcaaaatggcaaagtgtacaggctgtgtccgagccgatcggtgatatcttcagagcaatgaaaacattgagagaagttgatgaagagcattgccctagagtcttcgcttctaattggggaggcatcgtcaaagacgtgatagatataagtcatgcagagcccgtatacgacccgaagagcttcggtgatgggataaggtatcacaagtttccgactgtgtccaagatcccgccatctgcagcagaggttgccggcttcatcagacttgtggacaaaattcgcgacgatcaaaagacaaggtctattcaggagggttggggcgacaactatgtgattgctgttcagtga

SEQ ID NO: 12541 - protein, 378 aa, Muscodor strobelii
  misc_feature: SGI Peptide ID NO. 564076
  misc_feature (1)..(363): NCBI GI: 154309372 Blast Desc: BC1G_07580 [Botryotinia fuckeliana B05.10] gi|150852404|gb|EDN27596.1| BC1G_07580 [Botryotinia fuckeliana B05.10]
  misc_feature (1)..(378): NCBI GI: 156058254 Blast Desc: SS1G_03138 [Sclerotinia sclerotiorum 1980] gi|154700926|gb|EDO00665.1| SS1G_03138 [Sclerotinia sclerotiorum 1980]
  misc_feature (5)..(378): NCBI GI: 85091686 Blast Desc: NCU08995 [Neurospora crassa OR74A] gi|28920419|gb|EAA29787.1| conserved [Neurospora crassa OR74A]
  misc_feature (1)..(371): NCBI GI: 46116618 Blast Desc: FG04151.1 [Gibberella zeae PH-1]
  misc_feature (1)..(363): NCBI GI: 145601961 Blast Desc: MGG_05298 [Magnaporthe grisea 70-15] gi|145010418|gb|EDJ95074.1| MGG_05298 [Magnaporthe grisea 70-15]
  misc_feature (5)..(378): NCBI GI: 116207512 Blast Desc: CHGG_03049 [Chaetomium globosum CBS 148.51] gi|88183646|gb|EAQ91114.1| CHGG_03049 [Chaetomium globosum CBS 148.51]
  misc_feature (1)..(369): NCBI GI: 256725752 Blast Desc: NECHADRAFT_42949 [Nectria haematococca mpVI 77-13-4]
  misc_feature (1)..(364): NCBI GI: 261359144 Blast Desc: dual specificity phosphatase [Verticillium albo-atrum VaMs.102]
  misc_feature (1)..(361): NCBI GI: 169595614 Blast Desc: SNOG_00549 [Phaeosphaeria nodorum SN15] gi|160701126|gb|EAT92044.2| SNOG_00549 [Phaeosphaeria nodorum SN15]
  misc_feature (1)..(360): NCBI GI: 171686308 Blast Desc: protein product [Podospora anserina] gi|170943115|emb|CAP68768.1| protein product [Podospora anserina]
  misc_feature: Useful for introducing or modulating the production of volatile compounds
MSTAVMGIIAVCPVLSSLENVILTPHTSWVPGFIIDLWKNWWRGPESAIVRQFLGPDADFETCLSGDCFGPKLDDDLPRNASYAGIKDIPVYLVGGQQDVTTPMSNVMDIANSLRADRVSMNGFGDHVELERNMSLFHENGEILQHTALPRGRLPLSLHDISLDDFLRQKNEDLIEEDPTTPRDHQEPETFNYVPPQPLRPAAIVATSFIPGGHALLYMPSTVRILAGRVSDFLQNHLTGRFSREEWQLQFLSREGKWDVKNLAKWQSVQAVSEPIGDIFRAMKTLREVDEEHCPRVFASNWGGIVKDVIDISHAEPVYDPKSFGDGIRYHKFPTVSKIPPSAAEVAGFIRLVDKIRDDQKTRSIQEGWGDNYVIAVQ

SEQ ID NO: 12542 - DNA, 1095 bp, Muscodor strobelii
  misc_feature: SGI EST ID NO. CUFF.29786.0
  misc_feature: Variant of the nucleotide sequence at SEQ ID NO 12540
tggcaacttcagttcctttctcgggaggggaagtgggatgtcaagaacttagcaaaatggcaaagtgtacaggctgtgtccgagccgatcggtgatatcttcagagcaatgaaaacattgagagaagttgatgaagagcattgccctagagtcttcgcttctaattggcaagttggaagattcttgtacaacttattcaccatgagctaaatttcgaataggggaggcatcgtcaaagacgtgatagatataagtcatgcagagcccgtatacgacccgaagagcttcggtgatgggataaggtatcacaagtttccgactgtgtccaagatcccgccatctgcagcagaggttgccggcttcatcagacttgtggacaaaattcgcgacgatcaaaagacaaggtctattcaggagggttggggcgacaactatgtgattgctgttcagtgagtaatatatctttgagctgcgggaacctagccttttgcctcgtagaccgaagcaccaaatggtaatttatgaacgatactaacgcgaagctttctgtctactagctgccactatggatttaatcgtaccggatttttcgttgtgtcgtacctgattgaacgatgtggttacagcgtgcaagaagcgatcgacacatttgccgaggcgcgacctaatggtatccgccattcacattttctagaccgcttacacgttaggtatggtcaaaatggagaataagctatccggcctcatttgaggaacggatgagcatcgtgcgtgagttcaacttaatcacaaacgcaggaaagaaacgacgtctgctttgtttatattccattttatagctagcgggactgtggagcaaagccgtgtcagggccgtagtgagctctgccctcgccggggactctatctggaaaggagctggcagattttggacgtatacatgctttacagctaggttaaaggctctcggaggaataaggacgtttagggtcagttgacgttcatcagagacgtggtgttacgactttgatgcaacctttgtactagcgtgatgcatcgtatgtatatagtgaataccaatttagcgttactcctt

SEQ ID NO: 12543 - DNA, 693 bp, Muscodor strobelii
  misc_feature: SGI cDNA ID NO. 564077
  misc_feature: Encodes the peptide sequence at SEQ ID NO 12544
atggcctcgctattccgcgctgctcgacccatttgtggcgcagcagcaaactctatcctaagctgcccagcacgcagccggaagggtttcctcacagccgcaacgaagtcaatactccctccgagcaacaactccacgataccgaatcacttctccctgcgggtcgctcgcttccatgagacagcccttcgaggccagaaccagagcgatgagccgccaccaaccgactttgccgccatggacgtactgggcaatacgccagtgccctccaccgcagtcgatatctgcatgtccgatggattccaattgaacagcggcgccaagattcttgacggctcaggtgttatactcgtcggcggggaggccttcaagtggcaaccatggttaccacgtgcggaatatcgcctattgaatgcgaaagggcagtgggacataccgaatgagtctttgggtcttctatctttactatggccacgtccagatcttttgatattgggcctcggaccagagatccggcccattagccccgaactacggcgacatatcagcagtctaggtatgagagtcgaggtgcttgatacacgcaatgcggctgcgcaattcaatctgctggcaactgaacggggagtcaacgacgtggcagccgcactcatacctatagggtggcgagaaggcattggcacaaactggtga

SEQ ID NO: 12544 - protein, 230 aa, Muscodor strobelii
  misc_feature: SGI Peptide ID NO. 564077
  misc_feature (115)..(218): Pfam Id: PF04430 Pfam Desc: Domain of function (DUF498/DUF598)
  misc_feature (156)..(218): Pfam Id: PF04430 Pfam Desc: Domain of function (DUF498/DUF598)
  misc_feature (58)..(227): NCBI GI: 256725751 Blast Desc: NECHADRAFT_43301 [Nectria haematococca mpVI 77-13-4]
  misc_feature (73)..(224): NCBI GI: 171687114 Blast Desc: protein product [Podospora anserina] gi|170943518|emb|CAP69171.1| protein product [Podospora anserina]
  misc_feature (44)..(222): NCBI GI: 212540478 Blast Desc: conserved [Penicillium marneffei ATCC 18224] gi|210067693|gb|EEA21785.1| conserved [Penicillium marneffei ATCC 18224]
  misc_feature (42)..(222): NCBI GI: 242801668 Blast Desc: conserved [Talaromyces stipitatus ATCC 10500] gi|218717159|gb|EED16580.1| conserved [Talaromyces stipitatus ATCC 10500]
  misc_feature (68)..(223): NCBI GI: 169779091 Blast Desc: [Aspergillus oryzae RIB40] gi|238499701|ref|XP_002381085.1| conserved [Aspergillus flavus NRRL3357] gi|83772749|dbj|BAE62877.1| protein product oryzae]
  misc_feature (68)..(224): NCBI GI: 169613538 Blast Desc: SNOG_09900 [Phaeosphaeria nodorum SN15] gi|111062045|gb|EAT83165.1| SNOG_09900 [Phaeosphaeria nodorum SN15]
  misc_feature (75)..(221): NCBI GI: 119189033 Blast Desc: CIMG_04564 [Coccidioides immitis RS]
  misc_feature (75)..(221): NCBI GI: 240111390 Blast Desc: CPC735_072250 [Coccidioides posadasii C735 delta SOWgp]
  misc_feature (69)..(223): NCBI GI: 145238356 Blast Desc: An07g07510 [Aspergillus niger] gi|134076310|emb|CAK39566.1| protein product [Aspergillus niger]
  misc_feature (69)..(224): NCBI GI: 121710572 Blast Desc: DUF498 domain protein [Aspergillus clavatus NRRL 1] gi|119401052|gb|EAW11476.1| DUF498 domain protein [Aspergillus clavatus NRRL 1]
MASLFRAARPICGAAANSILSCPARSRKGFLTAATKSILPPSNNSTIPNHFSLRVARFHETALRGQNQSDEPPPTDFAAMDVLGNTPVPSTAVDICMSDGFQLNSGAKILDGSGVILVGGEAFKWQPWLPRAEYRLLNAKGQWDIPNESLGLLSLLWPRPDLLILGLGPEIRPISPELRRHISSLGMRVEVLDTRNAAAQFNLLATERGVNDVAAALIPIGWREGIGTNW

SEQ ID NO: 12545 - DNA, 1194 bp, Muscodor strobelii
  misc_feature: SGI EST ID NO. CUFF.29749.0
  misc_feature: Variant of the nucleotide sequence at SEQ ID NO 12543
cacaacgatagtttaatggctttcttccctgaaaagtcctcgattagaacatcaagaccatgacatgcgagtagtgcgactacgcgagtctcgctatggcctcgctattccgcgctgctcgacccatttgtggcgcagcagcaaactctatcctaagctgcccagcacgcagccggaagggtttcctcacagccgcaacgaagtcaatactccctccgagcaacaactccacgataccgaatcacttctccctgcgggtcgctcgcttccatgagacagcccttcgaggccagaaccagagcgatgagccgccaccaaccgactttgccgccatggacgtactgggcaatacgccagtgccctccaccgcagtcgatatctgcatgtccgatggattccaattgaacagcggcgccaagattcttgacggctcaggtgttatactcgtcggcggggaggccttcaagtggcaaccatggttaccacgtgcggaatatcgcctattgaatgcgaaagggcagtgggacataccgaatgagtctttgggtcttctatctttactatggccacgtccagatcttttgatattgggcctcggaccagagatccggcccattagccccgaactacggcgacatatcagcagtctaggtatgagagtcgaggtgcttgatacacgcaatgcggctgcgcaattcaatctgctggcaactgaacggggagtcaacgacgtggcagccgcactcatacctatagggtggcgagaaggcattggcacaaactggtgatggctgacaactatatccaccccggtcacgttgagcaacgcatcgctcgtttaggcctcggtgaatgctacgtttgaaaaggggagtcgctggggcgactgtaaattcccttaccagttcataagcagatcccaagtgataactgatgtgtattctttatgttacagactaatgatatatacatatgagtttcccctcagaataattcgtctcctacttcatatgggaattataagaccgagagaggatgaattaagagatggaatgagctcacttagggtgatagggaaggatatattacttttaagtagtagatcgtatgtatagcatacagaaataccgaaacttatatgaacgagataaattgtggaacgcagaccaatttccagataggcactcgtccaag

SEQ ID NO: 12546 - DNA, 351 bp, Muscodor strobelii
  misc_feature: SGI cDNA ID NO. 564078
  misc_feature: Reduced expression when VOC is produced
  misc_feature: Encodes the peptide sequence at SEQ ID NO 12547
atggccaacaacagagtcgcgtaccgccgtagaaacccctacaacaccacgagcaacaagacccggattgtccgtacccccggtggtgagctgcgaactctccacatcaagaaacgggcatctgctccccgctgcggcgattgcggttctaagctccccggtatccctgccctccgtccccgcgagtacgccaagctctccaagccgaagaaaaccgtttcgcgtgcgtacggggggtcacgctgctccaattgtgtccgtgaccgtgtcgtccgcgccttcctcgttgaggagcagaagatcgtcaagaaggtcctgaaggaacaggagcagggctccaagaagaaataa

SEQ ID NO: 12547 - protein, 116 aa, Muscodor strobelii
  misc_feature: SGI Peptide ID NO. 564078
  misc_feature (6)..(102): Pfam Id: PF01199 Pfam Desc: Ribosomal protein L34e
  misc_feature (1)..(116): NCBI GI: 85109849 Blast Desc: 60S ribosomal protein L34 [Neurospora crassa OR74A] gi|28924770|gb|EAA33882.1| 60S ribosomal protein L34 [Neurospora crassa OR74A]
  misc_feature (1)..(116): NCBI GI: 39939888 Blast Desc: ribosomal protein L34-like protein [Magnaporthe grisea 70-15] gi|59802867|gb|AAX07647.1| 60S ribosomal protein L34-B-like protein [Magnaporthe grisea] ribosomal protein protein
  misc_feature (1)..(116): NCBI GI: 171687116 Blast Desc: protein product [Podospora anserina] gi|170943519|emb|CAP69172.1| protein product [Podospora anserina]
  misc_feature (1)..(116): NCBI GI: 116191675 Blast Desc: conserved [Chaetomium globosum CBS 148.51] gi|88181468|gb|EAQ88936.1| conserved [Chaetomium globosum CBS 148.51]
  misc_feature (1)..(109): NCBI GI: 14269399 Blast Desc: ribosomal protein L34-like protein [Ophiostoma novo-ulmi]
  misc_feature (1)..(116): NCBI GI: 256725750 Blast Desc: [Nectria haematococca mpVI 77-13-4]
  misc_feature (1)..(116): NCBI GI: 261358072 Blast Desc: 60S ribosomal protein L34 [Verticillium albo-atrum VaMs.102]
  misc_feature (1)..(111): NCBI GI: 119498221 Blast Desc: ribosomal protein L34 protein, [Neosartorya fischeri NRRL 181] gi|119414032|gb|EAW23971.1| ribosomal protein L34 protein, [Neosartorya fischeri NRRL 181]
  misc_feature (1)..(111): NCBI GI: 154310564 Blast Desc: 60S ribosomal protein L34 [Botryotinia fuckeliana B05.10] gi|156058396|ref|XP_001595121.1| 60S ribosomal protein L34 [Sclerotinia sclerotiorum 1980] gi|150851296|gb|EDN26489.1|
  misc_feature (1)..(116): NCBI GI: 115442810 Blast Desc: 60S ribosomal protein L34-B [Aspergillus terreus NIH2624] gi|114188081|gb|EAU29781.1| 60S ribosomal protein L34-B [Aspergillus terreus NIH2624]
  misc_feature: Useful for introducing or modulating the production of volatile compounds
MANNRVAYRRRNPYNTTSNKTRIVRTPGGELRTLHIKKRASAPRCGDCGSKLPGIPALRPREYAKLSKPKKTVSRAYGGSRCSNCVRDRVVRAFLVEEQKIVKKVLKEQEQGSKKK

SEQ ID NO: 12548 - DNA, 848 bp, Muscodor strobelii
  misc_feature: SGI EST ID NO. CUFF.29752.0
  misc_feature: Variant of the nucleotide sequence at SEQ ID NO 12546
cacactcccaaggtacatattctcaaagttcgtccagtttgtccaggaagaaaacgccagccactctccccgcgacaaccgacaagatggccaacaacagagtcgcgtaccgccgtagaaacccctacaacaccacgagcaacaagacccggattgtccgtacccccggtggtgagctgcgaactctccacatcaagaaacgggcatctgctccccgctgcggcgattgcggttctaagctccccggtatccctgccctccgtccccgcgagtacgccaagctctccaagccgaagaaaaccgtttcgcgtgcgtacggggggtcacgctgctccaattgtgtccgtgaccgtgtcgtccgcgccttcctcgttgaggagcagaagatcgtcaagaaggtcctgaaggaacaggagcagggctccaagaagaaataagcggtgatggactccagggtcggttattcatgatttcggtgttcataaggggaacggattgcatgtcatacaaaaggctgccaaaatgtggcctacggtttgagggcttcttctcaacgtcaggtagatgagcaaaatggtatcaacgacatcttaagacggctcaaatgtgtgccacgtggtgacaaggaggcgttgcgagataatagcctagcggcaatgagacccaaaggcgccgcaattcgataaattgcgcgtgcagaggtcgtaaaactaagagagagatatgcagaatctcacgtgtaatgcgcatggcagtactacgaaatcttccatcaaaacgtttatgattatgtctcaggatcgtggaatctaatctgccagctcgttgggcgtgacatagtgtctggc

SEQ ID NO: 12549 - DNA, 1497 bp, Muscodor strobelii
  misc_feature: SGI cDNA ID NO. 564079
  misc_feature: Encodes the peptide sequence at SEQ ID NO 12550
atgagacttcgctcttcggcgaaattctattggatgcgtctgcccgcagaactccgtgtcatggtattggaagccatcacgcaacaaacatgttctgactgggcctgtgccgcagcggtctgcaaggaatggcaatacttcatcgagaagcggaagtttcaccagttgaagcttagagtgcctggcctggataatctcgaacgcctcagcattcggcggagaaatctcgtgcactacatatcgctcgacatagaattgcccacatacacatgccgcacttgcaaaaagcccgcgtcagactcctggatggaacgtaatagctccatcattagcaaggcaatttggaaactgttctgtattctaagcacctggaagccaatagatggcttgacgttggagcttaacgccttttctcccagcgactcggaccattggttcaagaactatcatttcgtctctgatcccgaaggtacctctagacaaggaaatgactgcaagtggcatgacgaaagccatggctggattgatggccaacaggttgggaaccctcccccattagcgatactccggctcttcggaatgctccttttacatttcccccaagaactcccaagggtcaatgccgttacctgcttcatcatacgtcgacagttccgtcgttggtttccccctcaaagcctttcagctatattagaaaagctctgttgtttagaacagctggtatacgagccatggagggtacgggacggcaaccggggagacacatgggatcgccatatctcacaattggttcaagaccggcttcccaagaccctaaagcgtatagtagttttcgaagacttcaacaggaatctcgctgcggtactacacaacgctcaaggcctcagcgtgcacatcatgtggctgcgggtgaacttgcaccgcatgtcggatgctaaagtcggtgcagcgtttgcccgcagaagtctcgacctcgaatacctctctgtctcctatatggtcgacgctatgcatttcttccaaggttgcatgccagacgcactaggtcagtactcggatcgagaagcctggacttggcagcatctgcagtctttggcactaacggcgcaatgcctacaacgtacgggtaaccgccgagagattgatactctgctgggtcgagctgcaaatgttgtcctgcggatgcctaaattgcatactttattactctggaatgacacggatgcctgtgcctttatatacacctgggactcggcgagaggttcgcgcatcacttggcgcggcacatgggagctggacctaaacccgtatgtgcaattctggcagacggtggcatcagaagtccattcttgtgaactccagattgtcaatgagggagtggacggcgtgataagatcccatggcgatgctatccatcatctgggcttgccctgccaagtggtaactcctgcgtccctctggcaaatacggcaggaaggaaacacgcatgcaggatga

SEQ ID NO: 12550 - protein, 498 aa, Muscodor strobelii
  misc_feature: SGI Peptide ID NO. 564079
  misc_feature (9)..(493): NCBI GI: 169610786 Blast Desc: SNOG_08501 [Phaeosphaeria nodorum SN15] gi|111062549|gb|EAT83669.1| SNOG_08501 [Phaeosphaeria nodorum SN15]
  misc_feature (11)..(492): NCBI GI: 256728390 Blast Desc: NECHADRAFT_25554 [Nectria haematococca mpVI 77-13-4]
  misc_feature (11)..(493): NCBI GI: 261359117 Blast Desc: conserved [Verticillium albo-atrum VaMs.102]
  misc_feature (11)..(493): NCBI GI: 256724033 Blast Desc: NECHADRAFT_86390 [Nectria haematococca mpVI 77-13-4]
  misc_feature (5)..(415): NCBI GI: 46110501 Blast Desc: FG02132.1 [Gibberella zeae PH-1]
  misc_feature (5)..(489): NCBI GI: 46114758 Blast Desc: FG03221.1 [Gibberella zeae PH-1]
  misc_feature (11)..(278): NCBI GI: 46107260 Blast Desc: FG00513.1 [Gibberella zeae PH-1]
  misc_feature (11)..(493): NCBI GI: 171696214 Blast Desc: protein product [Podospora anserina] gi|170948349|emb|CAP60513.1| protein product [Podospora anserina]
  misc_feature (14)..(435): NCBI GI: 256726719 Blast Desc: NECHADRAFT_76005 [Nectria haematococca mpVI 77-13-4]
  misc_feature (106)..(498): NCBI GI: 261355290 Blast Desc: conserved [Verticillium albo-atrum VaMs.102]
MRLRSSAKFYWMRLPAELRVMVLEAITQQTCSDWACAAAVCKEWQYFIEKRKFHQLKLRVPGLDNLERLSIRRRNLVHYISLDIELPTYTCRTCKKPASDSWMERNSSIISKAIWKLFCILSTWKPIDGLTLELNAFSPSDSDHWFKNYHFVSDPEGTSRQGNDCKWHDESHGWIDGQQVGNPPPLAILRLFGMLLLHFPQELPRVNAVTCFIIRRQFRRWFPPQSLSAILEKLCCLEQLVYEPWRVRDGNRGDTWDRHISQLVQDRLPKTLKRIVVFEDFNRNLAAVLHNAQGLSVHIMWLRVNLHRMSDAKVGAAFARRSLDLEYLSVSYMVDAMHFFQGCMPDALGQYSDREAWTWQHLQSLALTAQCLQRTGNRREIDTLLGRAANVVLRMPKLHTLLLWNDTDACAFIYTWDSARGSRITWRGTWELDLNPYVQFWQTVASEVHSCELQIVNEGVDGVIRSHGDAIHHLGLPCQVVTPASLWQIRQEGNTHAG

SEQ ID NO: 12551 - DNA, 2196 bp, Muscodor strobelii
  misc_feature: SGI EST ID NO. CUFF.29745.0
  misc_feature: Variant of the nucleotide sequence at SEQ ID NO 12549
aaaagtttctgttgtatttccttccgtgactgacatgctgcgacggcgttgatagccgtggtctgggtatgtgaatagcagaagtctaagcagcagcatgtgagatttgttgggattgctgttgtgagcctgttgttccccatcaaaagataagctaattcgatggacgccgccatcagatgcgtgttgcactgcacctgaatatatagtgtgtgagctgtttgtttttattacttggagcatttccgtaggatttaaaccgtattatcaccagttgcctttattgtattttttttaaaaaaatgtatgcgagagcagcgctgaatgcacacgcatttcgtacgtatgttagataagaaccgaaacacattgacatgtggcagctttccctttctcgcgaccgtgatctcggtagagaaaagatatcattcggaatctattttcgttcttaagcattcgtcactatggcagacagttcgagacatgccactcgtaccaaaatgagacttcgctcttcggcgaaattctattggatgcgtctgcccgcagaactccgtgtcatggtattggaagccatcacgcaacaaacatgttctgactgggcctgtgccgcagcggtctgcaaggaatggcaatacttcatcgagaagcggaagtttcaccagttgaagcttagagtgcctggcctggataatctcgaacgcctcagcattcggcggagaaatctcgtgcactacatatcgctcgacatagaattgcccacatacacatgccgcacttgcaaaaagcccgcgtcagactcctggatggaacgtaatagctccatcattagcaaggcaatttggaaactgttctgtattctaagcacctggaagccaatagatggcttgacgttggagcttaacgccttttctcccagcgactcggaccattggttcaagaactatcatttcgtctctgatcccgaaggtacctctagacaaggaaatgactgcaagtggcatgacgaaagccatggctggattgatggccaacaggttgggaaccctcccccattagcgatactccggctcttcggaatgctccttttacatttcccccaagaactcccaagggtcaatgccgttacctgcttcatcatacgtcgacagttccgtcgttggtttccccctcaaagcctttcagctatattagaaaagctctgttgtttagaacagctggtatacgagccatggagggtacgggacggcaaccggggagacacatgggatcgccatatctcacaattggttcaagaccggcttcccaagaccctaaagcgtatagtagttttcgaagacttcaacaggaatctcgctgcggtactacacaacgctcaaggcctcagcgtgcacatcatgtggctgcgggtgaacttgcaccgcatgtcggatgctaaagtcggtgcagcgtttgcccgcagaagtctcgacctcgaatacctctctgtctcctatatggtcgacgctatgcatttcttccaaggttgcatgccagacgcactaggtcagtactcggatcgagaagcctggacttggcagcatctgcagtctttggcactaacggcgcaatgcctacaacgtacgggtaaccgccgagagattgatactctgctgggtcgagctgcaaatgttgtcctgcggatgcctaaattgcatactttattactctggaatgacacggatgcctgtgcctttatatacacctgggactcggcgagaggttcgcgcatcacttggcgcggcacatgggagctggacctaaacccgtatgtgcaattctggcagacggtggcatcagaagtccattcttgtgaactccagattgtcaatgagggagtggacggcgtgataagatcccatggcgatgctatccatcatctgggcttgccctgccaagtggtaactcctgcgtccctctggcaaatacggcaggaaggaaacacgcatgcaggatgagtggcaacttccatcaaataggtcaatgtaattgctatctatagtatagcgtagggagactcatcaaagataatgttagagataatgttgaagcgccgtgaacatgtgactttcgaaaacttctcttcaacacttcgagttgtacactgttgcggtgttcgagatgattctttccgatggtgacgacctcgagattccg

SEQ ID NO: 12552 - DNA, 1884 bp, Muscodor strobelii
  misc_feature: SGI cDNA ID NO. 564080
  misc_feature: Encodes the peptide sequence at SEQ ID NO 12553
atgaaggtggacgagatcgtcgccatgtcggcgttcctcggcggcgacttcaagtcgatcgagccgcacctgatccggctggagaagcacctgacgctgcgcacgtacctcgccggctacagcctcagcgagatggacgccaagatctgggtggccctcaagagcaacaaggtctcggtcgccttcatcaagaagggcacgctgccgaacctgcagcgctggttccagtacatcgaggcagtccaccccgagatccagaccgaggtcaaggccgccgagaacgcccgcaaagccaaggtgcaggcggccagtcgtgccggcgcgagctataacttggctctgcaggacgtcgacaagggcgtcgtctgccgcttcctgcccgagccctcgggctatctccacatcggccacgccaaagccgccctcctcagcgactacttcgcccaccaggcctacaacggcaccctccgcctgcgcctcgacgacaccaaccccagcaaggagaaggaggagttccaggatgccatcatcgaggacctggccctcatgggcgtccggcccgacgtcgtcacctacacctccgactacttcgaccacctctacagcgtctgcctcggcctcatcaaggacggccatgcctacgccgacgacaccgacgtcgagacgatgcgcgacgagcgaggtaagggcatcgcctccaagcgccgcggccgcaccgtcgacgagaacctcgccatcttcgacgccatgaagagcggcaccgccgagggcctcaagaactgcatccgcgccaagatcagcgtcgacaaccccaacaaggccatgcgcgaccccgtcatctaccgctgcaaccccaacgacccccaccaccgcaccggcaccacctggaagatgtaccccacctacgacctcgcctgccccgtcgtcgactccctcgagggcgtcacccacgccctgcgctccaccgagtacaccgaccgcaacccccagttccagtggttcctcgacaccctcaagctgcgccaggtctacatgtgggacttctcccgcatgaacttcatccgtacctttttgtccaaaaggaaactggccaagctggtggacaacggcaaggtctggggctgggatgatccgcgtatgccaaccatccgcggtgtccgtaggcgcggcatgaccattccggcactgcgggattttatcctcaagcaggggccgtcgcggaatgtcgtcaccatggactggtctagcttctgggccgccaacaagaaggagatcgaccccgtggctccccgacacaccgccgtatcgaagaaggacgccgtcaaagtcaccgtcaagggcgagggcgctcccaccgaggctcgcaccgaggacaagcctctgcaccccaagaatccagccataggcacgaaaaaggtcgccttcagccaagagttgatcctcgaccaggccgacgcccaatccttcaaagacggcgaggagatcactctcatgcagtggggcaacgctttcgtacgagacattccagccggcgagatcaggcccacaatcacagcagaattgaatctcggcggtgatgtcaagtctactgataagaaggtcacctggttatccacacagggacagaccctcatcgatgccgagctatgggacttcgactacctcatcaccaaggacaagttagaggaagacgacgacttggagaagttcttgaaccccactacgagttccgtcgaggaggcctggtgtgatgagggcgtgaagaccctgaggaaggacgatatcatccagctcgagaggagaggctactacagagtggataagccgtacagcgatggcggcaagattgtcttgttttgtatccctactggtaagacgaagtag

SEQ ID NO: 12553 - protein, 627 aa, Muscodor strobelii
  misc_feature: SGI Peptide ID NO. 564080
  misc_feature (120)..(427): Pfam Id: PF00749 Pfam Desc: tRNA synthetases class I (E and Q), catalytic domain
  misc_feature (429)..(607): Pfam Id: PF03950 Pfam Desc: tRNA synthetases class I (E and Q), anti-codon binding domain
  misc_feature (1)..(626): NCBI GI: 116198903 Blast Desc: conserved [Chaetomium globosum CBS 148.51] gi|88178886|gb|EAQ86354.1| conserved [Chaetomium globosum CBS 148.51]
  misc_feature (1)..(626): NCBI GI: 85091295 Blast Desc: glutamyl-tRNA synthetase [Neurospora crassa OR74A] gi|28920219|gb|EAA29596.1| glutamyl-tRNA synthetase [Neurospora crassa OR74A] gi|28950388|emb|CAD71230.1| glutamate--tRNA ligase
  misc_feature (1)..(627): NCBI GI: 39976235 Blast Desc: MGG_05956 [Magnaporthe grisea 70-15] gi|145011774|gb|EDJ96430.1| MGG_05956 [Magnaporthe grisea 70-15]
  misc_feature (1)..(626): NCBI GI: 171693025 Blast Desc: protein product [Podospora anserina] gi|170946461|emb|CAP73262.1| protein product [Podospora anserina]
  misc_feature (1)..(627): NCBI GI: 156059574 Blast Desc: SS1G_03799 [Sclerotinia sclerotiorum 1980] gi|154701586|gb|EDO01325.1| SS1G_03799 [Sclerotinia sclerotiorum 1980]
  misc_feature (1)..(627): NCBI GI: 261357950 Blast Desc: glutamyl-tRNA synthetase [Verticillium albo-atrum VaMs.102]
  misc_feature (9)..(626): NCBI GI: 121718334 Blast Desc: glutamyl-tRNA synthetase [Aspergillus clavatus NRRL 1] gi|119404374|gb|EAW14750.1| glutamyl-tRNA synthetase [Aspergillus clavatus NRRL 1]
  misc_feature (9)..(626): NCBI GI: 119498841 Blast Desc: glutamyl-tRNA synthetase [Neosartorya fischeri NRRL 181] gi|119414342|gb|EAW24281.1| glutamyl-tRNA synthetase [Neosartorya fischeri NRRL 181]
  misc_feature (9)..(626): NCBI GI: 159126088 Blast Desc: glutamyl-tRNA synthetase [Aspergillus fumigatus A1163]
  misc_feature (9)..(626): NCBI GI: 70984964 Blast Desc: glutamyl-tRNA synthetase [Aspergillus fumigatus Af293] gi|66845616|gb|EAL85950.1| glutamyl-tRNA synthetase [Aspergillus fumigatus Af293]
  misc_feature (3)..(626): SWISSPROT Homolog: EC 6.1.1.17 Glutamate--tRNA ligase
MKVDEIVAMSAFLGGDFKSIEPHLIRLEKHLTLRTYLAGYSLSEMDAKIWVALKSNKVSVAFIKKGTLPNLQRWFQYIEAVHPEIQTEVKAAENARKAKVQAASRAGASYNLALQDVDKGVVCRFLPEPSGYLHIGHAKAALLSDYFAHQAYNGTLRLRLDDTNPSKEKEEFQDAIIEDLALMGVRPDVVTYTSDYFDHLYSVCLGLIKDGHAYADDTDVETMRDERGKGIASKRRGRTVDENLAIFDAMKSGTAEGLKNCIRAKISVDNPNKAMRDPVIYRCNPNDPHHRTGTTWKMYPTYDLACPVVDSLEGVTHALRSTEYTDRNPQFQWFLDTLKLRQVYMWDFSRMNFIRTFLSKRKLAKLVDNGKVWGWDDPRMPTIRGVRRRGMTIPALRDFILKQGPSRNVVTMDWSSFWAANKKEIDPVAPRHTAVSKKDAVKVTVKGEGAPTEARTEDKPLHPKNPAIGTKKVAFSQELILDQADAQSFKDGEEITLMQWGNAFVRDIPAGEIRPTITAELNLGGDVKSTDKKVTWLSTQGQTLIDAELWDFDYLITKDKLEEDDDLEKFLNPTTSSVEEAWCDEGVKTLRKDDIIQLERRGYYRVDKPYSDGGKIVLFCIPTGKTK

SEQ ID NO: 12554 - DNA, 2369 bp, Muscodor strobelii
  misc_feature: SGI EST ID NO. CUFF.29767.0
  misc_feature: Variant of the nucleotide sequence at SEQ ID NO 12552
ctggtctttcgctggcgtcactccgcgcgtcaacccctccaacattttcttgaccccgccatgacccaacgctccgtctccctaacaaacttacgtcgggacggttgactcacgagacgggcgtgacaacaaggtgttccatcccattctcaactattaccacacccacactcgcataaaacaaacaaaccaacaaaccaccaaacaccaattgataatctagaagatcatcatcatgaaggtggacgagatcgtcgccatgtcggcgttcctcggcggcgacttcaagtcgatcgagccgcacctgatccggctggagaagcacctgacgctgcgcacgtacctcgccggctacagcctcagcgagatggacgccaagatctgggtggccctcaagagcaacaaggtctcggtcgccttcatcaagaagggcacgctgccgaacctgcagcgctggttccagtacatcgaggcagtccaccccgagatccagaccgaggtcaaggccgccgagaacgcccgcaaagccaaggtgcaggcggccagtcgtgccggcgcgagctataacttggctctgcaggacgtcgacaagggcgtcgtctgccgcttcctgcccgagccctcgggctatctccacatcggccacgccaaagccgccctcctcagcgactacttcgcccaccaggcctacaacggcaccctccgcctgcgcctcgacgacaccaaccccagcaaggagaaggaggagttccaggatgccatcatcgaggacctggccctcatgggcgtccggcccgacgtcgtcacctacacctccgactacttcgaccacctctacagcgtctgcctcggcctcatcaaggacggccatgcctacgccgacgacaccgacgtcgagacgatgcgcgacgagcgaggtaagggcatcgcctccaagcgccgcggccgcaccgtcgacgagaacctcgccatcttcgacgccatgaagagcggcaccgccgagggcctcaagaactgcatccgcgccaagatcagcgtcgacaaccccaacaaggccatgcgcgaccccgtcatctaccgctgcaaccccaacgacccccaccaccgcaccggcaccacctggaagatgtaccccacctacgacctcgcctgccccgtcgtcgactccctcgagggcgtcacccacgccctgcgctccaccgagtacaccgaccgcaacccccagttccagtggttcctcgacaccctcaagctgcgccaggtctacatgtgggacttctcccgcatgaacttcatccgtacctttttgtccaaaaggaaactggccaagctggtggacaacggcaaggtctggggctgggatgatccgcgtatgccaaccatccgcggtgtccgtaggcgcggcatgaccattccggcactgcgggattttatcctcaagcaggggccgtcgcggaatgtcgtcaccatggactggtctagcttctgggccgccaacaagaaggagatcgaccccgtggctccccgacacaccgccgtatcgaagaaggacgccgtcaaagtcaccgtcaagggcgagggcgctcccaccgaggctcgcaccgaggacaagcctctgcaccccaagaatccagccataggcacgaaaaaggtcgccttcagccaagagttgatcctcgaccaggccgacgcccaatccttcaaagacggcgaggagatcactctcatgcagtggggcaacgctttcgtacgagacattccagccggcgagatcaggcccacaatcacagcagaattgaatctcggcggtgatgtcaagtctactgataagaaggtcacctggttatccacacagggacagaccctcatcgatgccgagctatgggacttcgactacctcatcaccaaggacaagttagaggaagacgacgacttggagaagttcttgaaccccactacgagttccgtcgaggaggcctggtgtgatgagggcgtgaagaccctgaggaaggacgatatcatccagctcgagaggagaggctactacagagtggataagccgtacagcgatggcggcaagattgtcttgttttgtatccctactggtaagacgaagtagatgcgatgagatggaatgatcgatgcggacacgcacgctgtggaataaggtaatactagcctgagatgacacgcaccgaactgtagagatagcttaaggacgctgtctagcagtatgaatagcaaaagaaattggtacaagtaaatgctagtgcttgagccacttgaattagtacatgttctcatgtgtacctaggtacagaataaatggcactgtttattgcgaggcttacttacctatgcgaagtggg

SEQ ID NO: 12555 - DNA, 5415 bp, Muscodor strobelii
  misc_feature: SGI cDNA ID NO. 564081
  misc_feature: Encodes the peptide sequence at SEQ ID NO 12556
atgatttccatgaagcgctctctttcccaacccgcttacaaccacccacactcacccgtgtcgccgaccgcgacaaatccatcacgatccccatcgccgacacccgacgtacgtagtgctctcccccgcgcgagtcgcgctcggtcgcggagtcctgttcactccgcgcctcctccggagtccacggtagagcaccggccgcgccagagtgaatcgaagcccacggacgatggcttgagatctgatgtgggcacgagtgtgccgcagaagccgctaattgcccagcctaagccacaaaccaagtcgcaactcaaagccagccccgtgatccgtgacaggacgcccatcatcacgacagacaggccgccaacaccgctccgcgacgatggatctcagcgacagtctccacgccaatctcagcgtcctctcttggctgatgtatcgctgtatactaacaatttcatcacagctgaggaggagggaactacgctggagaagctagctcatgaggttcgcctgtccaagtaccaggagcgcaagcgcgccaacacgcgcatccgtctgcagaggagcctcatctctactgctctgtcctcgcgccttacccgctgcggcgagatcgcacagcgaaacctggccgacctcttccgtaccggtgatacccagatgttcgccaagctatacgatgccatccaggatgtgcgcaacagctgtgatgccacccggcgcttcgcccatttggagccagagatggattccctccactcaccaggcatggcatcatctgacaatttggaacacccttctagtgttgcagggagtattagtggcacctctgtcacgcctttccttgttgacctctcttcccaagcccgagataccatcttgcacttcctcacccagctacgaaccaatcctgatttcctagcctctcgcctctgcgcactcagcgtaggcgagctccaggccatcacaatatttcagcagggtatggaacccatagaatctgttttgccattctacacgccgcccagtgggcgtgggccctccacctcttcgaacaagaccgctggtgctgcgctcaatgctgttgagcgacttctttctttccagcgccatgaccctttatctgcgctcatctacacgtccttcgccaattcagccggacctaatagtgctgaagataagagaagaacgcaggtgtgggctactgcctgttctcgcctcatccagacggctcacgtggaatatgagaacgttctcgtctccattgtcaatgtttgggcggccatgcgtaattggtccggccgctccaatatggagtggttcatcatgaagattttggaagacggtgcttttctcctggatagggccgaggacccgcaaggcacccgcttctcacatgtctcggattggactaccaaggacacaatagccgccgaggaattctatgatagagctgtagacgagctttttgccatcattgacgatgaagacgctactggcattccggaaggcgttttggagttaggacatgagatcttgcggcaactggaaagaaaggccccctccatggtcgaatcgaccaagaactggtttgtatacaagtggcttttttccaactggctactaggagtcattgtccacccggagagctttggcatgatggccgagtataacatcaccgagtacggacgccagaaaatccttaaagaggttgccatgaaggcccaggttcttgtcaatgacaagctcgtcccacctcacttaggccagcccgtctccacccctttgagagtaaaaaaacatattgagaatttagtaaatcgtttcaagccatctaggagccaaaagacaacggcgaggttgctcccggctcggtccatcacttccctgcgggagacggctgaggtacatccctacctcgttgttagtccctccgatatctacacgatggccaatgctctctttccagagcgtcgacctcgctcggcgcattcaggaagtattcggtcgggggcaccgtccgtttctgggttctctgctatttctcagcctatctccatgggcgggtcgaggcgagatatggacacgtcatctgccttcgggatgagtgtctctcctgttcgcagcgaagccacgacttcttacgagcccttattgagtcaagcgggcggtactccccagcgatactcgcctcccttctcagaagcagccacccgaccccccttctcctatgaggatgacgggcgacaactccgcatggccatgcatgagatggtccagacaatgggtgccgatgtggtggctggctcgtgtcacccctgcgctgaacgatgggctgtgttgttcgtttcgcctgatggagacaggctgtcgttgcagatgatgtacgatcctgaggacgaccaagaggaagacacgtcttcagctgttagtgagacagaagacgactcagatggaaagcctgaactcaataccgactatcatggcctgcgcgattcaatcttgaaactagtggaggatttcgaattcgaaattcccgcagatggcaaaactaccttgagcaacaacgctacaagactcaaaaagtatcgctcctccaataagatcatcacttctgagaaaccaatgggtagccgcaatccctataggaaacgggaggaaaagcgcgaggagcctgaacctgttcttgtcacaatgctcactgaagctgcaaaacaatcaaagggtcaattggattttgtgtctgcgcatctctactggagaacactcgagcagctgaatgcgttgacttcaccttcgctacgaaaaaatggattcgcgtctctgttaaacatatttgcgcgtggtccccgggactcacttcgtcgctctgcctctgccatagaggaatatgacgcttggcttatctggctcaagcaaagtcaggagcggcacgaaggctcaattgagtcaatgatgaaacgactcaaatctctgcgtgacaagatgtggtatgtcacagatgttcggaattcagaagtgtacgagcacgctcgacatctctgtagcgcgcttaaaatcatgggcgtgccacgaaagtcggggttcttcaaatccagccgagcgcaactagcccgcaatccaaccttgagcttcattcataaacaagaatcgcaaatgctaggcttgcttgctgcaagtgaagaacaaggaggaccaaataaactcacggacgatcaagttgagaaaaccaacaagtggctgaaccatgctatggtcaaggagattggcaaacccatatgccgcggcgaagaacgtattcaccgcctatgttgtgagatagacaattgcatgggtagactggtaggtgacagtgtaacggccaacccagtactgtggtctagtccactatttttgcgcgatcggaaaacgtacgatggtggtcctcgtcgaggtcgcgagcgcgacacaagtttcggagcggatgacgctgcgagcgtcatcagtggtgattacaaccggcgatttacatcgtcatccaaccgccagagctcagtagtcagagacttgcgcagctcatcatcgtcacacaacaggagtcaaatgtcggtagactctggtggtcgttacggcagtttctctcgcgccagtactgcagcttctgatatcctcgatacgcgggagtattttggcatgtcgtcgccggttcattcaatcgactcggctaccaccttttggtctccttttcaatcagcggcttcagccgccagttcagccacgtctcgcgcacagtctccaactggaagtgtggccaacctcccaggtctattttctcatccttatcagcattcgcttccttctacagtctcttttgctcaacaagagacgccaacatcacctaccgagactattcagcaacaacgcctttctgaagacaagcagcgcttcttgtccgatctccggcagactcttctcagtctgttgctttcggattttggaaattttgtatacgcctatggatcagagactgatgtctggttcaatgaaatgggccaagatttgctagagagaaaggacgacgctcagaagaaggagaagagggaagaagcgcaaaggaaagaacagcaaagggaggagtcacagagaaaagaaaaagaagcacagcggactctggtgcctgaaactcgcgagaatcgcgattcaaacatgaagctcaaacaacgggctcttgagaagaaaagaagttcgatcaatcttcgtgaagctggggatacccgactgggtggctatagcttgaacaggcacgaaagcgcctctactcgaagccacgatagtgcagccacaaatgaaaccatttcagcgcgtgcttcgacctcgaggaaggaatactcttctgcctttccttacaacaaggcttatgaacgtttattaaggatgttttccgttcatccgaatccatacacgaagctcaactctttatatgagctggagagactcatcaccgcctctctctcatctgctggccgtcgtccgcgttggcctcgcagccagactaattcgaacgatgattttggcagctctggtaagaatgaccaacaagacagggaaagacggcccaacacaagccatggcctatcagcattaagcctccaggcgcggagcgccatgcatgccgagacacgctcggttgcacagtctagtaggtctcaacaagaagaggcggttcggaacgttctccgaacacttctccgcgacccaaacatccgtccgaagactctattccgcgaccttcaattcatcagtgtgtttgtaccttcgtctgtacttgacatggaacgcaacaatgcatacttcaacacggtcgttgcagctatatcgttgaaggatgagatcacctcttacatggtcgaagttgcggatgttgtcatagcccaaatacggggccgcagcgacactagcagtgtcgcagatgctgctgcacctacgcaacccgcacaacccctgttcaacggggaacctactatgccgagtcacagcatgcctgatgttgccaaaatgctgactattgcggctaaggacggcaacacaacggcacaaagggaactaggattatttcagatgagcaatcctgaacttgttgaccgtaccacgtttccgctttccaagccaagagatatcttcaaagcggcagtgatggagaggttcggtgcgagatcaagtggcaggtaccagacagataggctcagagccggcctaggtggtgctgtcccagcaatggcagggctgagcattgccgagtcgtccgttgatggcgacgtcaaaaatgaccctgcactcatgtgtgtcgcatggcactggatggagcgagcacagcagggcggcgatgagcttgcaacgagattcatgggccagtttgatgacgggccttaa

SEQ ID NO: 12556 - protein, 1804 aa, Muscodor strobelii
  misc_feature: SGI Peptide ID NO. 564081
  misc_feature (1)..(1803): NCBI GI: 171693017 Blast Desc: protein product [Podospora anserina] gi|170946457|emb|CAP73258.1| protein product [Podospora anserina]
  misc_feature (1)..(1803): NCBI GI: 116198909 Blast Desc: CHGG_07610 [Chaetomium globosum CBS 148.51] gi|88178889|gb|EAQ86357.1| CHGG_07610 [Chaetomium globosum CBS 148.51]
  misc_feature (1)..(1799): NCBI GI: 256731553 Blast Desc: NECHADRAFT_49125 [Nectria haematococca mpVI 77-13-4]
  misc_feature (141)..(1799): NCBI GI: 85091285 Blast Desc: NCU08889 [Neurospora crassa OR74A] gi|28920214|gb|EAA29591.1| conserved [Neurospora crassa OR74A] gi|28950393|emb|CAD71235.1| [Neurospora crassa]
  misc_feature (1)..(1799): NCBI GI: 46123103 Blast Desc: FG05929.1 [Gibberella zeae PH-1]
  misc_feature (525)..(1803): NCBI GI: 261357945 Blast Desc: conserved [Verticillium albo-atrum VaMs.102]
  misc_feature (141)..(1799): NCBI GI: 169615807 Blast Desc: SNOG_11068 [Phaeosphaeria nodorum SN15] gi|160703052|gb|EAT81567.2| SNOG_11068 [Phaeosphaeria nodorum SN15]
  misc_feature (431)..(1799): NCBI GI: 156045719 Blast Desc: SS1G_10054 [Sclerotinia sclerotiorum 1980] gi|154694443|gb|EDN94181.1| SS1G_10054 [Sclerotinia sclerotiorum 1980]
  misc_feature (440)..(1799): NCBI GI: 154309441 Blast Desc: BC1G_07191 [Botryotinia fuckeliana B05.10] gi|150852214|gb|EDN27406.1| BC1G_07191 [Botryotinia fuckeliana B05.10]
  misc_feature (141)..(1799): NCBI GI: 189210154 Blast Desc: conserved [Pyrenophora tritici-repentis Pt-1C-BFP] gi|187977502|gb|EDU44128.1| conserved [Pyrenophora tritici-repentis Pt-1C-BFP]
MISMKRSLSQPAYNHPHSPVSPTATNPSRSPSPTPDVRSALPRASRARSRSPVHSAPPPESTVEHRPRQSESKPTDDGLRSDVGTSVPQKPLIAQPKPQTKSQLKASPVIRDRTPIITTDRPPTPLRDDGSQRQSPRQSQRPLLADVSLYTNNFITAEEEGTTLEKLAHEVRLSKYQERKRANTRIRLQRSLISTALSSRLTRCGEIAQRNLADLFRTGDTQMFAKLYDAIQDVRNSCDATRRFAHLEPEMDSLHSPGMASSDNLEHPSSVAGSISGTSVTPFLVDLSSQARDTILHFLTQLRTNPDFLASRLCALSVGELQAITIFQQGMEPIESVLPFYTPPSGRGPSTSSNKTAGAALNAVERLLSFQRHDPLSALIYTSFANSAGPNSAEDKRRTQVWATACSRLIQTAHVEYENVLVSIVNVWAAMRNWSGRSNMEWFIMKILEDGAFLLDRAEDPQGTRFSHVSDWTTKDTIAAEEFYDRAVDELFAIIDDEDATGIPEGVLELGHEILRQLERKAPSMVESTKNWFVYKWLFSNWLLGVIVHPESFGMMAEYNITEYGRQKILKEVAMKAQVLVNDKLVPPHLGQPVSTPLRVKKHIENLVNRFKPSRSQKTTARLLPARSITSLRETAEVHPYLVVSPSDIYTMANALFPERRPRSAHSGSIRSGAPSVSGFSAISQPISMGGSRRDMDTSSAFGMSVSPVRSEATTSYEPLLSQAGGTPQRYSPPFSEAATRPPFSYEDDGRQLRMAMHEMVQTMGADVVAGSCHPCAERWAVLFVSPDGDRLSLQMMYDPEDDQEEDTSSAVSETEDDSDGKPELNTDYHGLRDSILKLVEDFEFEIPADGKTTLSNNATRLKKYRSSNKIITSEKPMGSRNPYRKREEKREEPEPVLVTMLTEAAKQSKGQLDFVSAHLYWRTLEQLNALTSPSLRKNGFASLLNIFARGPRDSLRRSASAIEEYDAWLIWLKQSQERHEGSIESMMKRLKSLRDKMWYVTDVRNSEVYEHARHLCSALKIMGVPRKSGFFKSSRAQLARNPTLSFIHKQESQMLGLLAASEEQGGPNKLTDDQVEKTNKWLNHAMVKEIGKPICRGEERIHRLCCEIDNCMGRLVGDSVTANPVLWSSPLFLRDRKTYDGGPRRGRERDTSFGADDAASVISGDYNRRFTSSSNRQSSVVRDLRSSSSSHNRSQMSVDSGGRYGSFSRASTAASDILDTREYFGMSSPVHSIDSATTFWSPFQSAASAASSATSRAQSPTGSVANLPGLFSHPYQHSLPSTVSFAQQETPTSPTETIQQQRLSEDKQRFLSDLRQTLLSLLLSDFGNFVYAYGSETDVWFNEMGQDLLERKDDAQKKEKREEAQRKEQQREESQRKEKEAQRTLVPETRENRDSNMKLKQRALEKKRSSINLREAGDTRLGGYSLNRHESASTRSHDSAATNETISARASTSRKEYSSAFPYNKAYERLLRMFSVHPNPYTKLNSLYELERLITASLSSAGRRPRWPRSQTNSNDDFGSSGKNDQQDRERRPNTSHGLSALSLQARSAMHAETRSVAQSSRSQQEEAVRNVLRTLLRDPNIRPKTLFRDLQFISVFVPSSVLDMERNNAYFNTVVAAISLKDEITSYMVEVADVVIAQIRGRSDTSSVADAAAPTQPAQPLFNGEPTMPSHSMPDVAKMLTIAAKDGNTTAQRELGLFQMSNPELVDRTTFPLSKPRDIFKAAVMERFGARSSGRYQTDRLRAGLGGAVPAMAGLSIAESSVDGDVKNDPALMCVAWHWMERAQQGGDELATRFMGQFDDGP

SEQ ID NO: 12557 - DNA, 6747 bp, Muscodor strobelii
  misc_feature: SGI EST ID NO. CUFF.29770.0
  misc_feature: Variant of the nucleotide sequence at SEQ ID NO 12555
ggccagttggtcatctgctggcctcgacaagggtcatggacagcaataagaagatacatggccgcatcgcacgccagagacatcaaggccgagcgaccagcgcatcttcccgtggactggactggaaaagacactgaagagggcaagaaaggagagactcacagaatcgacatttcttcttctcttccagttcaaattctcaacactacctacaacctattctgcttgagattcttcctgttgctcttctctttctcctctctgtccttgctgcccggccgtctgggttctcttatagcaaataatagaaatatattttaccaccaccagaggatatacattgtaccttaatagtttggcacatcgcatgtgggatattgacggaatactggtaattccgatccacgagagaccaacggcacaacaacgccgtctcccaaccttaccgcctcgttcttctcactctctccaatcaaggtctaagatctacgccgccagttcatgagagagtgtcgcaataccgctaccatgaactaggctctgaaggatcatcccgcccgaccggctctgccaaaaccaccccagtccgccctgccagccccaacttttgtcgtctctggtcctagagactggacgaccggtacatcgttaaccgtctccatcacgtctctccgcagggtagcttttgaacgcacccaccaaccaccgaaaccccaccacgctgggcatcgacgacgtctgctttacttgtagtgcacaccacccaacgacaccctgcttgtctctcttgccagtcaccgattttgacagcagaggaaaggtggctcgtctgtaatttttctgccttttcgcttcgtcgtacacgtcggagcgaccacgaccttcatttcaggtaccattaggacacaagcaagcaagtagccggtagctctcctgctgtgcgggtgtggctgctagtgtgctggcctcgctgtcgtctcatatggacttacaatgatttccatgaagcgctctctttcccaacccgcttacaaccacccacactcacccgtgtcgccgaccgcgacaaatccatcacgatccccatcgccgacacccgacgtacgtagtgctctcccccgcgcgagtcgcgctcggtcgcggagtcctgttcactccgcgcctcctccggagtccacggtagagcaccggccgcgccagagtgaatcgaagcccacggacgatggcttgagatctgatgtgggcacgagtgtgccgcagaagccgctaattgcccagcctaagccacaaaccaagtcgcaactcaaagccagccccgtgatccgtgacaggacgcccatcatcacgacagacaggccgccaacaccgctccgcgacgatggatctcagcgacagtctccacgccaatctcagcgtcctctcttggctgatgtatcgctgtatactaacaatttcatcacagctgaggaggagggaactacgctggagaagctagctcatgaggttcgcctgtccaagtaccaggagcgcaagcgcgccaacacgcgcatccgtctgcagaggagcctcatctctactgctctgtcctcgcgccttacccgctgcggcgagatcgcacagcgaaacctggccgacctcttccgtaccggtgatacccagatgttcgccaagctatacgatgccatccaggatgtgcgcaacagctgtgatgccacccggcgcttcgcccatttggagccagagatggattccctccactcaccaggcatggcatcatctgacaatttggaacacccttctagtgttgcagggagtattagtggcacctctgtcacgcctttccttgttgacctctcttcccaagcccgagataccatcttgcacttcctcacccagctacgaaccaatcctgatttcctagcctctcgcctctgcgcactcagcgtaggcgagctccaggccatcacaatatttcagcagggtatggaacccatagaatctgttttgccattctacacgccgcccagtgggcgtgggccctccacctcttcgaacaagaccgctggtgctgcgctcaatgctgttgagcgacttctttctttccagcgccatgaccctttatctgcgctcatctacacgtccttcgccaattcagccggacctaatagtgctgaagataagagaagaacgcaggtgtgggctactgcctgttctcgcctcatccagacggctcacgtggaatatgagaacgttctcgtctccattgtcaatgtttgggcggccatgcgtaattggtccggccgctccaatatggagtggttcatcatgaagattttggaagacggtgcttttctcctggatagggccgaggacccgcaaggcacccgcttctcacatgtctcggattggactaccaaggacacaatagccgccgaggaattctatgatagagctgtagacgagctttttgccatcattgacgatgaagacgctactggcattccggaaggcgttttggagttaggacatgagatcttgcggcaactggaaagaaaggccccctccatggtcgaatcgaccaagaactggtttgtatacaagtggcttttttccaactggctactaggagtcattgtccacccggagagctttggcatgatggccgagtataacatcaccgagtacggacgccagaaaatccttaaagaggttgccatgaaggcccaggttcttgtcaatgacaagctcgtcccacctcacttaggccagcccgtctccacccctttgagagtaaaaaaacatattgagaatttagtaaatcgtttcaagccatctaggagccaaaagacaacggcgaggttgctcccggctcggtccatcacttccctgcgggagacggctgaggtacatccctacctcgttgttagtccctccgatatctacacgatggccaatgctctctttccagagcgtcgacctcgctcggcgcattcaggaagtattcggtcgggggcaccgtccgtttctgggttctctgctatttctcagcctatctccatgggcgggtcgaggcgagatatggacacgtcatctgccttcgggatgagtgtctctcctgttcgcagcgaagccacgacttcttacgagcccttattgagtcaagcgggcggtactccccagcgatactcgcctcccttctcagaagcagccacccgaccccccttctcctatgaggatgacgggcgacaactccgcatggccatgcatgagatggtccagacaatgggtgccgatgtggtggctggctcgtgtcacccctgcgctgaacgatgggctgtgttgttcgtttcgcctgatggagacaggctgtcgttgcagatgatgtacgatcctgaggacgaccaagaggaagacacgtcttcagctgttagtgagacagaagacgactcagatggaaagcctgaactcaataccgactatcatggcctgcgcgattcaatcttgaaactagtggaggatttcgaattcgaaattcccgcagatggcaaaactaccttgagcaacaacgctacaagactcaaaaagtatcgctcctccaataagatcatcacttctgagaaaccaatgggtagccgcaatccctataggaaacgggaggaaaagcgcgaggagcctgaacctgttcttgtcacaatgctcactgaagctgcaaaacaatcaaagggtcaattggattttgtgtctgcgcatctctactggagaacactcgagcagctgaatgcgttgacttcaccttcgctacgaaaaaatggattcgcgtctctgttaaacatatttgcgcgtggtccccgggactcacttcgtcgctctgcctctgccatagaggaatatgacgcttggcttatctggctcaagcaaagtcaggagcggcacgaaggctcaattgagtcaatgatgaaacgactcaaatctctgcgtgacaagatgtggtatgtcacagatgttcggaattcagaagtgtacgagcacgctcgacatctctgtagcgcgcttaaaatcatgggcgtgccacgaaagtcggggttcttcaaatccagccgagcgcaactagcccgcaatccaaccttgagcttcattcataaacaagaatcgcaaatgctaggcttgcttgctgcaagtgaagaacaaggaggaccaaataaactcacggacgatcaagttgagaaaaccaacaagtggctgaaccatgctatggtcaaggagattggcaaacccatatgccgcggcgaagaacgtattcaccgcctatgttgtgagatagacaattgcatgggtagactggtaggtgacagtgtaacggccaacccagtactgtggtctagtccactatttttgcgcgatcggaaaacgtacgatggtggtcctcgtcgaggtcgcgagcgcgacacaagtttcggagcggatgacgctgcgagcgtcatcagtggtgattacaaccggcgatttacatcgtcatccaaccgccagagctcagtagtcagagacttgcgcagctcatcatcgtcacacaacaggagtcaaatgtcggtagactctggtggtcgttacggcagtttctctcgcgccagtactgcagcttctgatatcctcgatacgcgggagtattttggcatgtcgtcgccggttcattcaatcgactcggctaccaccttttggtctccttttcaatcagcggcttcagccgccagttcagccacgtctcgcgcacagtctccaactggaagtgtggccaacctcccaggtctattttctcatccttatcagcattcgcttccttctacagtctcttttgctcaacaagagacgccaacatcacctaccgagactattcagcaacaacgcctttctgaagacaagcagcgcttcttgtccgatctccggcagactcttctcagtctgttgctttcggattttggaaattttgtatacgcctatggatcagagactgatgtctggttcaatgaaatgggccaagatttgctagagagaaaggacgacgctcagaagaaggagaagagggaagaagcgcaaaggaaagaacagcaaagggaggagtcacagagaaaagaaaaagaagcacagcggactctggtgcctgaaactcgcgagaatcgcgattcaaacatgaagctcaaacaacgggctcttgagaagaaaagaagttcgatcaatcttcgtgaagctggggatacccgactgggtggctatagcttgaacaggcacgaaagcgcctctactcgaagccacgatagtgcagccacaaatgaaaccatttcagcgcgtgcttcgacctcgaggaaggaatactcttctgcctttccttacaacaaggcttatgaacgtttattaaggatgttttccgttcatccgaatccatacacgaagctcaactctttatatgagctggagagactcatcaccgcctctctctcatctgctggccgtcgtccgcgttggcctcgcagccagactaattcgaacgatgattttggcagctctggtaagaatgaccaacaagacagggaaagacggcccaacacaagccatggcctatcagcattaagcctccaggcgcggagcgccatgcatgccgagacacgctcggttgcacagtctagtaggtctcaacaagaagaggcggttcggaacgttctccgaacacttctccgcgacccaaacatccgtccgaagactctattccgcgaccttcaattcatcagtgtgtttgtaccttcgtctgtacttgacatggaacgcaacaatgcatacttcaacacggtcgttgcagctatatcgttgaaggatgagatcacctcttacatggtcgaagttgcggatgttgtcatagcccaaatacggggccgcagcgacactagcagtgtcgcagatgctgctgcacctacgcaacccgcacaacccctgttcaacggggaacctactatgccgagtcacagcatgcctgatgttgccaaaatgctgactattgcggctaaggacggcaacacaacggcacaaagggaactaggattatttcagatgagcaatcctgaacttgttgaccgtaccacgtttccgctttccaagccaagagatatcttcaaagcggcagtgatggagaggttcggtgcgagatcaagtggcaggtaccagacagataggctcagagccggcctaggtggtgctgtcccagcaatggcagggctgagcattgccgagtcgtccgttgatggcgacgtcaaaaatgaccctgcactcatgtgtgtcgcatggcactggatggagcgagcacagcagggcggcgatgagcttgcaacgagattcatgggccagtttgatgacgggccttaaactttgctacgtttgatatatgcccgatgcaagggctttattgttggagatccttcgcgagcagcgccgtttagttttatccctatcacttaacttaggcatacttacctacatactcgtacatgggatatatgtcacacattcgctgcattggcggagaggcatgcataaggatgggtacatggattgatatatgttttgttatatgatttagcgattttatactctcgcattagttgcttttggataccctatacagtttgcttcagcgtctctatatgcttctatctatgcttgaaaatatcaaatagctacagtgactgcagtgttacaaactgg

SEQ ID NO: 12558 - DNA, 1635 bp, Muscodor strobelii
  misc_feature: SGI cDNA ID NO. 564082
  misc_feature: Encodes the peptide sequence at SEQ ID NO 12559
atgaccgtcctaaccgatccaactttctccgacaacgacatctctcagcaagccaaaccgtctatgggagctatggctcggattcgatccctcttttcatttcagcacctatccgataatattctgagcaaaccttatcccggcagcggtacaggtgccaacccctacattgtcgattacctacttgacgatgatgaagatgcgatgaacttttctaaaactcgaaaatgggcgattgccattctgcagtccctgtcctcatttgctttgacctttgctagctcggtgtatgccaacggcatcggaggtgtcatgcgggattttacagtatctgaggaggtggctaccctgggcctgtcgctcttcgtgttgggctttgcgctggggccgctgatctgggcgcctctttctgaggtgtacgggcggaaacacgtctttgtagtctcttccacatcttacgtggcgctcagcgtggcggccgcgtattcgcctaatatcacggcattgctggttcttcgattctttgcgagtgcgtttgggtcgtcatctgggggcatcattgccgacacgttcagtaaggccgagagaggactggctaccgccttatttattacggctccttttctaggacctgcatttgggcccatcgttggtggtttcttggacgagtcgtccggctggcgctggattctacgtttgatctttattctgggcggctcagtatgggtcgcggctatgttagctatgcgcgagacatacgcgccgtgtatcctacgacgtcgagcgaaagctctttcgcagttgacaggctttgtctatgtgtctcggattgatgcgggacaaccgatcaagacactatcgcaagagctctcgatttcactaattcgtccctgggttcttctgtttcgcgaacctatcgtcttattgtcatctttatatgtatctgtcatctacggtacattgtacatgttctttgctgggtttcccatcatcttccaagtttcccgaggctggagtcaaggaaacgctggtcttccattcattggcgtggctattggcgtcatactcgccacgctagcggcaggagtggacaataagcgttatgtgagattgtacgcggcggcggcggcgaatggtcgcatggtagagcctgaagcaagattgagtacggccatggttggatccattgtacttcccgtaggactattcctgtttgcgtggacgacgtacccatgggtgcactggattgcacctgttatcggcgctacacttttctcgtgtggacttgttatggtcttcatctcactattgagctatctcgtagacacatatgtcgtatacgctgcatctgtattagctgccaacacagtacttcggtccttatttggcactgcttttcctctgttcaccactcagatttacaaaagtcttggaaatcaatgggcgagttccattcctgccttcttggtgctggtgtgcgttcccttcccttttctattctataagtacggtccgaagatacgttcgaaaggcaaatatgcctctgaagcggcaaagatacttgagatgatgcgacatcggcatgttgccttggtcgcaagtgaatcgcgttcggccgacaaggggactacataa

SEQ ID NO: 12559 - protein, 544 aa, Muscodor strobelii
  misc_feature: SGI Peptide ID NO. 564082
  misc_feature (79)..(467): Pfam Id: PF07690 Pfam Desc: Major Facilitator Superfamily
  misc_feature (19)..(543): NCBI GI: 256722921 Blast Desc: NECHADRAFT_52652 [Nectria haematococca mpVI 77-13-4]
  misc_feature (40)..(529): NCBI GI: 115391841 Blast Desc: conserved [Aspergillus terreus NIH2624] gi|114194349|gb|EAU36049.1| conserved [Aspergillus terreus NIH2624]
  misc_feature (31)..(518): NCBI GI: 256733183 Blast Desc: NECHADRAFT_92827 [Nectria haematococca mpVI 77-13-4]
  misc_feature (37)..(513): NCBI GI: 85086887 Blast Desc: NCU00306 [Neurospora crassa OR74A] gi|28918872|gb|EAA28541.1| NCU00306 [Neurospora crassa OR74A]
  misc_feature (13)..(526): NCBI GI: 115492843 Blast Desc: conserved [Aspergillus terreus NIH2624] gi|114197909|gb|EAU39609.1| conserved [Aspergillus terreus NIH2624]
  misc_feature (15)..(541): NCBI GI: 169763206 Blast Desc: [Aspergillus oryzae RIB40] gi|83770531|dbj|BAE60664.1| protein product [Aspergillus oryzae]
  misc_feature (29)..(541): NCBI GI: 242774411 Blast Desc: MFS multidrug transporter, [Talaromyces stipitatus ATCC 10500] gi|218722054|gb|EED21472.1| MFS multidrug transporter, [Talaromyces stipitatus ATCC 10500]
  misc_feature (10)..(540): NCBI GI: 115492087 Blast Desc: ATEG_00585 [Aspergillus terreus NIH2624] gi|114197531|gb|EAU39231.1| ATEG_00585 [Aspergillus terreus NIH2624]
  misc_feature (29)..(527): NCBI GI: 238489281 Blast Desc: conserved [Aspergillus flavus NRRL3357] gi|220698266|gb|EED54606.1| conserved [Aspergillus flavus NRRL3357]
  misc_feature (10)..(538): NCBI GI: 46115766 Blast Desc: FG03725.1 [Gibberella zeae PH-1]
MTVLTDPTFSDNDISQQAKPSMGAMARIRSLFSFQHLSDNILSKPYPGSGTGANPYIVDYLLDDDEDAMNFSKTRKWAIAILQSLSSFALTFASSVYANGIGGVMRDFTVSEEVATLGLSLFVLGFALGPLIWAPLSEVYGRKHVFVVSSTSYVALSVAAAYSPNITALLVLRFFASAFGSSSGGIIADTFSKAERGLATALFITAPFLGPAFGPIVGGFLDESSGWRWILRLIFILGGSVWVAAMLAMRETYAPCILRRRAKALSQLTGFVYVSRIDAGQPIKTLSQELSISLIRPWVLLFREPIVLLSSLYVSVIYGTLYMFFAGFPIIFQVSRGWSQGNAGLPFIGVAIGVILATLAAGVDNKRYVRLYAAAAANGRMVEPEARLSTAMVGSIVLPVGLFLFAWTTYPWVHWIAPVIGATLFSCGLVMVFISLLSYLVDTYVVYAASVLAANTVLRSLFGTAFPLFTTQIYKSLGNQWASSIPAFLVLVCVPFPFLFYKYGPKIRSKGKYASEAAKILEMMRHRHVALVASESRSADKGTT

SEQ ID NO: 12560 - DNA, 436 bp, Muscodor strobelii
  misc_feature: SGI EST ID NO. CUFF.29773.0
  misc_feature: Variant of the nucleotide sequence at SEQ ID NO 12558
caaggaaacgctggtcttccattcattggcgtggctattggcgtcatactcgccacgctagcggcaggagtggacaataagcgttatgtgagattgtacgcggcggcggcggcgaatggtcgcatggtagagcctgaagcaagattgagtacggccatggttggatccattgtacttcccgtaggactattcctgtttgcgtggacgacgtacccatgggtgcactggattgcacctgttatcggcgctacacttttctcgtgtggacttgttatggtcttcatctcactattgagctatctcgtagacacatatgtcgtatacgctgcatctgtattagctgccaacacagtacttcggtccttatttggcactgcttttcctctgttcaccactcagatttacaaaagtcttggaaatcaatgggcgagttcca

SEQ ID NO: 12561 - DNA, 1725 bp, Muscodor strobelii
  misc_feature: SGI cDNA ID NO. 564083
  misc_feature: Encodes the peptide sequence at SEQ ID NO 12562
atgtcgcagacgataggcacatttgatacacccaccagttgccagcccgaggatcttaaccggccaggccaatcttccattgccgaggacttggaatgccaaagtcctcaccaggccaactcggatctattgtatctcagtatcctgaacgatgccgtgccagacactgcaggctccagtcgggcttctctctcatctcatagccggaagggcgaagggagtctcactcctctaaactgtcgatgggctaaactgcgccatttggacgatactgactatagctatcttgtcaaaaagggcgtctttgatttgccatccacacgtcttgtagacactctagttaaggcatattttcaccatgttttcccttttgtgcctgtgatcaacagagcagagtttatcagcggatacagatccggcaactgctcgttattattgctgcgcgccatgttgacagtagcctgcctatatgtaccagaaaatgtgctgtcggcctgtggctttgccagtcgctccgctgcgcaagaatcattcttctccaaggctaggcttcttcatgattttgcagcagaagatgatccggtggtgactttgcaggcctctgtcatcttatgtatggtaatactcgaccatcctaccgaccgagattttagctattggctccataatgcagtccgtcttagcaccaagattgacctacgtaacacgtacgggttttctcctagatgcgttcgagaagacaaaccacctaaagtcttgaagctatacagagggatatggtgggcgctctatttcctagatatttttcacacatttgtcaataccagacggtcgcggctactcgacgacacatcctcaatcaagccttggacggaagcagactgtgaagcagtgaacatctccggagagaattccgatttgcttccggagctcacgcctctgcataagaccctgcctgtcattgactgcgaactgtctcgaatagttggcggttgtttgtccattgtcacaaacaagccgcagcaagatccacgccaactgatgcatacactcgatgcgtggcgcaagactctgtctacgaggttgcatttggatgatagtaacaagacagacatatactacttgaatgtactggccatgagctatagatttgagtgcattttatgtcggctggtgcagcgcaacagcaagcaattcggacacctggattggggcgaatgggccaaacaacgacttcggtctgcaactttagaattggatacaattgcaaggagagtgctggagagcgatacattacaagatttccccattgctttcattaccacagtgacggcactactcgctctacatatcgagactgcacttgacccagcagagacacatcttgttcgttctatggctcgcatatccataagccaagcaatgcttgttctggaccagggcaaagagattccggcattgagaagagctattccaatattcgaagagattctcgccaagaaaaacctacacataatctcgtctaacaccattgaaccaacatctgcacagtcgtatccacatcactccagcacagcagatcgtcgcacttcgctctccactcaaatggttcaagtttcatctcatgacgagcattatgagcctagcgcatggtttgatctcgatttatcagctttcgatttcctagacgagtcgcagattggacaaataggatttcttagttga

SEQ ID NO: 12562 - protein, 574 aa, Muscodor strobelii
  misc_feature: SGI Peptide ID NO. 564083
  misc_feature (42)..(572): NCBI GI: 256722983 Blast Desc: NECHADRAFT_52568 [Nectria haematococca mpVI 77-13-4]
  misc_feature (29)..(570): NCBI GI: 115391839 Blast Desc: [Aspergillus terreus NIH2624] gi|114194348|gb|EAU36048.1| [Aspergillus terreus NIH2624]
  misc_feature (31)..(572): NCBI GI: 46114730 Blast Desc: FG03207.1 [Gibberella zeae PH-1]
  misc_feature (86)..(520): NCBI GI: 256728281 Blast Desc: NECHADRAFT_54125 [Nectria haematococca mpVI 77-13-4]
  misc_feature (92)..(310): NCBI GI: 171693643 Blast Desc: protein product [Podospora anserina] gi|170946770|emb|CAP73574.1| protein product [Podospora anserina]
  misc_feature (96)..(498): NCBI GI: 119172961 Blast Desc: CIMG_10030 [Coccidioides immitis RS]
  misc_feature (92)..(312): NCBI GI: 261355556 Blast Desc: cutinase transcription factor 1 beta [Verticillium albo-atrum VaMs.102]
  misc_feature (96)..(498): NCBI GI: 240111716 Blast Desc: Fungal specific transcription factor, [Coccidioides posadasii C735 delta SOWgp]
  misc_feature (92)..(451): NCBI GI: 119184542 Blast Desc: CIMG_07059 [Coccidioides immitis RS]
  misc_feature (88)..(289): NCBI GI: 238496587 Blast Desc: AFLA_135160 [Aspergillus flavus NRRL3357] gi|220694409|gb|EED50753.1| AFLA_135160 [Aspergillus flavus NRRL3357]
MSQTIGTFDTPTSCQPEDLNRPGQSSIAEDLECQSPHQANSDLLYLSILNDAVPDTAGSSRASLSSHSRKGEGSLTPLNCRWAKLRHLDDTDYSYLVKKGVFDLPSTRLVDTLVKAYFHHVFPFVPVINRAEFISGYRSGNCSLLLLRAMLTVACLYVPENVLSACGFASRSAAQESFFSKARLLHDFAAEDDPVVTLQASVILCMVILDHPTDRDFSYWLHNAVRLSTKIDLRNTYGFSPRCVREDKPPKVLKLYRGIWWALYFLDIFHTFVNTRRSRLLDDTSSIKPWTEADCEAVNISGENSDLLPELTPLHKTLPVIDCELSRIVGGCLSIVTNKPQQDPRQLMHTLDAWRKTLSTRLHLDDSNKTDIYYLNVLAMSYRFECILCRLVQRNSKQFGHLDWGEWAKQRLRSATLELDTIARRVLESDTLQDFPIAFITTVTALLALHIETALDPAETHLVRSMARISISQAMLVLDQGKEIPALRRAIPIFEEILAKKNLHIISSNTIEPTSAQSYPHHSSTADRRTSLSTQMVQVSSHDEHYEPSAWFDLDLSAFDFLDESQIGQIGFLS

SEQ ID NO: 12563 - DNA, 2787 bp, Muscodor strobelii
  misc_feature: SGI EST ID NO. CUFF.29852.0
  misc_feature: Variant of the nucleotide sequence at SEQ ID NO 12561
attgcgacttacagatgaatcttggtcttctaacatctatgctgctttacatggtggctagcgatgtttacgtcgcacagctcgagtccacattattgcgccgaacaaactttcgaatacgccttgaggccgaagtcagcactccagccggccacattctaaaaaggatctaggacattactatgaaataaattatgatcgatttattcaatcttgtcaaatgtcttttcagttaggccatgaaacggtggcgcatcaggcagacgaagttgactccacggcaggattcggcatttcaggccctaggctcggaattatacatttgaaatttccgaactgtcctggaacttaaatggctgacatctcggtgcatcggccttttcgtaacacgatatttgctgcctctcgctatcggcagcgaatctgcgttgaacaacaagactcaaaggatggtagaaactggaaagcgtgcttccacggccaacaagtcctgcttaccctgccgcacgcataaggtcaaatgtgatgcggttacaaatggcctgccttgcagccgatgtaccaacaagcagtgcgtgagcgactgcctactaccagttcgcaagcgtcgaacgaagtgagttgccgactgaaacacgattcagactttatgattttgttgctcacatagctggagttttacaagaagagttctctcccgcgatgtcgcagacgatgtatgagcacaagcgacatagtcgggattgactcgaattactaattgctagtagactagaggcacatttgatacacccaccagttgccagcccgaggatcttaaccggccaggccaatcttccattgccgaggacttggaatgccaaagtcctcaccaggccaactcggatctattgtatctcagtatcctgaacgatgccgtgccagacactgcaggctccagtcgggcttctctctcatctcatagccggaagggcgaagggagtctcactcctctaaactgtcgatgggctaaactgcgccatttggacgatactgactatagctatcttgtcaaaaagggcgtctttgatttgccatccacacgtcttgtagacactctagttaaggcatattttcaccatgttttcccttttgtgcctgtgatcaacagagcagagtttatcagcggatacagatccggcaactgctcgttattattgctgcgcgccatgttgacagtagcctgcctatatgtaccagaaaatgtgctgtcggcctgtggctttgccagtcgctccgctgcgcaagaatcattcttctccaaggctaggcttcttcatgattttgcagcagaagatgatccggtggtgactttgcaggcctctgtcatcttatgtatggtaatactcgaccatcctaccgaccgagattttagctattggctccataatgcagtccgtcttagcaccaagattgacctacgtaacacatgcgttcgagaagacaaaccacctaaagtcttgaagctatacagagggatatggtgggcgctctatttcctagatatttttcacacatttgtcaataccagacggtcgcggctactcgacgacacatcctcaatcaagccttggacggaagcagactgtgaagcagtgaacatctccggagagaattccgatttgcttccggagctcacgcctctgcataagaccctgcctgtcattgactgcgaactgtctcgaatagttggcggttgtttgtccattgtcacaaacaagccgcagcaagatccacgccaactgatgcatacactcgatgcgtggcgcaagactctgtctacgaggttgcatttggatgatagtaacaagacagacatatactacttgaatgtactggccatgagctatagatttgagtgcattttatgtcggctggtgcagcgcaacagcaagcaattcggacacctggattggggcgaatgggccaaacaacgacttcggtctgcaactttagaattggatacaattgcaaggagagtgctggagagcgatacattacaagatttccccattgctttcattaccacagtgacggcactactcgctctacatatcgagactgcacttgacccagcagagacacatcttgttcgttctatggctcgcatatccataagccaagcaatgcttgttctggaccagggcaaagagattccggcattgagaagagctattccaatattcgaagagattctcgccaagaaaaacctacacataatctcgtctaacaccattgaaccaacatctgcacagtcgtatccacatcactccagcacagcagatcgtcgcacttcgctctccactcaaatggttcaagtttcatctcatgacgagcattatgagcctagcgcatggtttgatctcgatttatcagctttcgatttcctagacgagtcgcagattggacaaataggatttcttagttgaaagcatcgtagtattatggaacctcagattgtccactaagcagcgtggagaatacaggcctcaactacgggtacgcaaaatctatcatttgagtctaatatgctctgtcaatctccgcagtgaccccatatatcactttgtaacactacaagaattgcgcgcatagtattgtgtagatctgatcgagatgaaatagtgatagcagcaaagcttctgatgagcatacagattgtagcaatcgaagagctgtggtgaagcatatgtatgtatttcttatatagcttggaatctacaatttgaaaagacacatcgacaaaat

SEQ ID NO: 12564 - DNA, 1596 bp, Muscodor strobelii
  misc_feature: SGI cDNA ID NO. 564084
  misc_feature: Encodes the peptide sequence at SEQ ID NO 12565
atgcacacgataatcctgttgctggcctgtcttggcctgttctggggatgtctcgtcattgtggtgcagggcctgggcacctataagcttttccgatactattcagccgtgcccaagaaacccgtctctatcacgctgcccgcgcacgaaatcccccacgtcaccatcttgcggccggccaaaggcttggagcccggcctctacgactgcctcgcctccgtcttccaccagtcgtaccccagggacaagctcaccatctacttctgcgtcgagtccaagagcgatcctgcctaccccgtcctctgccagctgctggccgacttccccggcttcgatgccaaggtctacgtcgaggccgacgatcccttcctgtacggcgagggcagccatggcaacaatgttgggcccaaccccaagattcgaaacctgagcagggcctaccgggaggccaagggcgacatcgtgtggccgctcgactgcaatgtctgggttgcgcgccatgtcgccggccgtatggtcgacaagctgtacggtctccagcccgacggcaagcgatcgaagccgtacaagtttgtgcacatgctgcccctggtcgtcgacacggtcacgtccatgagccggcgcgactcggagggaaaggcgctgctgtcgagctcggcgataacagggggctcgggcaagggcgacgtcggagtgccctcgtcgattgcgtcgcgctcgtgggcgcacggcggcggccggctggaggagatgttcatggccaccacccatgccaagttctactgcgccatcaacaccgtcggcgttgcgccctgcatcgtcggcaagagcaacatgttccgcaagtctcacctcgaccatgccaccgacccttcccgcaaccccatcctgacggggacgtctgccacgctgcccagaggtctcgatcatttctctgcctacatgtgcgaagaccatgtcatcggtgacctgctgtggcgtacagacatccctggcttcttgaaccatggtcttgtgtatggagatctcgccatccagcctatggcggggatgtcgattcgcgcatatgccgctcggagagtccgctggctccgcgccaggaaatggaccgttctctccgccaccctggtcgaacacggcgtggagagcctagtgtgctgcttctacctgtccttcggcttgactactccctcgtggataaacgaaatgtttggcatgccgcaaacgtggagcgctctcggctggagctggatcgcactcgtcacgctgtggatgcttgtggaccgagccctcttcaagaggctacatgccggactgagcatccaaggggatgacaatacgcctgcgtttgcccgcggctctagcaaaggcggggctgagaagcgtcaattcggcgaatggttcctggcatggctgggtcgtgaggtctttgcgctccccatctggacttgggccgtgtttcttggcacgggcgtgaactggcgtgggaaacggtttcgagtccgatctgatatgacggtcacggccatggatggcgagaccaagtcaaacatgactcggatacctaatggccgagtaaataataaaaaggattaa

SEQ ID NO: 12565 - protein, 531 aa, Muscodor strobelii
  misc_feature: SGI Peptide ID NO. 564084
  misc_feature (1)..(511): NCBI GI: 171693229 Blast Desc: protein product [Podospora anserina] gi|170946563|emb|CAP73364.1| protein product [Podospora anserina]
  misc_feature (8)..(511): NCBI GI: 85100776 Blast Desc: NCU01116 [Neurospora crassa OR74A] gi|7635885|emb|CAB88601.1| [Neurospora crassa] gi|28922560|gb|EAA31787.1| NCU01116 [Neurospora crassa OR74A]
  misc_feature (2)..(529): NCBI GI: 154313135 Blast Desc: BC1G_05569 [Botryotinia fuckeliana B05.10] gi|150849654|gb|EDN24847.1| BC1G_05569 [Botryotinia fuckeliana B05.10]
  misc_feature (9)..(531): NCBI GI: 116198813 Blast Desc: CHGG_07562 [Chaetomium globosum CBS 148.51] gi|88178841|gb|EAQ86309.1| CHGG_07562 [Chaetomium globosum CBS 148.51]
  misc_feature (2)..(529): NCBI GI: 156062818 Blast Desc: SS1G_01525 [Sclerotinia sclerotiorum 1980] gi|154696861|gb|EDN96599.1| SS1G_01525 [Sclerotinia sclerotiorum 1980]
  misc_feature (9)..(458): NCBI GI: 261359106 Blast Desc: ceramide glucosyltransferase [Verticillium albo-atrum VaMs.102]
  misc_feature (18)..(523): NCBI GI: 256731077 Blast Desc: NECHADRAFT_123410 [Nectria haematococca mpVI 77-13-4]
  misc_feature (8)..(517): NCBI GI: 39970119 Blast Desc: MGG_10668 [Magnaporthe grisea 70-15] gi|14718991|gb|AAK73019.1|AF364402_1 ceramide glucosyltransferase [Magnaporthe grisea] gi|145013096|gb|EDJ97737.1| MGG_10668 grisea
  misc_feature (1)..(523): NCBI GI: 46123155 Blast Desc: FG05955.1 [Gibberella zeae PH-1]
  misc_feature (10)..(527): NCBI GI: 238504976 Blast Desc: ceramide glucosyltransferase, [Aspergillus flavus NRRL3357] gi|220689831|gb|EED46181.1| ceramide glucosyltransferase, [Aspergillus flavus NRRL3357]
  misc_feature (5)..(392): SWISSPROT Homolog: EC 2.4.1.80 Ceramide glucosyltransferase
MHTIILLLACLGLFWGCLVIVVQGLGTYKLFRYYSAVPKKPVSITLPAHEIPHVTILRPAKGLEPGLYDCLASVFHQSYPRDKLTIYFCVESKSDPAYPVLCQLLADFPGFDAKVYVEADDPFLYGEGSHGNNVGPNPKIRNLSRAYREAKGDIVWPLDCNVWVARHVAGRMVDKLYGLQPDGKRSKPYKFVHMLPLVVDTVTSMSRRDSEGKALLSSSAITGGSGKGDVGVPSSIASRSWAHGGGRLEEMFMATTHAKFYCAINTVGVAPCIVGKSNMFRKSHLDHATDPSRNPILTGTSATLPRGLDHFSAYMCEDHVIGDLLWRTDIPGFLNHGLVYGDLAIQPMAGMSIRAYAARRVRWLRARKWTVLSATLVEHGVESLVCCFYLSFGLTTPSWINEMFGMPQTWSALGWSWIALVTLWMLVDRALFKRLHAGLSIQGDDNTPAFARGSSKGGAEKRQFGEWFLAWLGREVFALPIWTWAVFLGTGVNWRGKRFRVRSDMTVTAMDGETKSNMTRIPNGRVNNKKD

SEQ ID NO: 12566 - DNA, 2494 bp, Muscodor strobelii
  misc_feature: SGI EST ID NO. CUFF.29864.1
  misc_feature: Variant of the nucleotide sequence at SEQ ID NO 12564
cccgtcgctgctgccgtcgtgtaaacagcaaacacaaacttcaggtcctgaaagtacatcagtgttccaaacatgttgttatgatacccggctgccaatctcaacttgtcaagactcatttcattccttgaagcacttccgcccctgcacccaaatcagactggttcctggaacctagcatgacggtgcgttgtggagtcgtcagcccgactagcagcggtttccgagattgaaatttattgggcattgctatttctgaacatgaaggccgtcgtccaggcctgctgcaaaaaaaagatgacgatgtgtttccaatgactgtgctgtatatctcgtcctctccggcgtcccatcgatcccattctcccccttttttttgagccaaaggtactcgtgacgtgcacatcttgatcagtgctttttccccattagtgttatccgtctttactttccttccctcgcctctgtctcatcccaccctaccgaggtgcctttcttcattcatatccctacaaggttctctctgccagaactgtactctctgcccagccgatatgctccaatgcacacgataatcctgttgctggcctgtcttggcctgttctggggatgtctcgtcattgtggtgcagggcctgggcacctataagcttttccgatactattcagccgtgcccaagaaacccgtctctatcacgctgcccgcgcacgaaatcccccacgtcaccatcttgcggccggccaaaggcttggagcccggcctctacgactgcctcgcctccgtcttccaccagtcgtaccccagggacaagctcaccatctacttctgcgtcgagtccaagagcgatcctgcctaccccgtcctctgccagctgctggccgacttccccggcttcgatgccaaggtctacgtcgaggccgacgatcccttcctgtacggcgagggcagccatggcaacaatgttgggcccaaccccaagattcgaaacctgagcagggcctaccgggaggccaagggcgacatcgtgtggccgctcgactgcaatgtctgggttgcgcgccatgtcgccggccgtatggtcgacaagctgtacggtctccagcccgacggcaagcgatcgaagccgtacaagtttgtgcacatgctgcccctggtcgtcgacacggtcacgtccatgagccggcgcgactcggagggaaaggcgctgctgtcgagctcggcgataacagggggctcgggcaagggcgacgtcggagtgccctcgtcgattgcgtcgcgctcgtgggcgcacggcggcggccggctggaggagatgttcatggccaccacccatgccaagttctactgcgccatcaacaccgtcggcgttgcgccctgcatcgtcggcaagagcaacatgttccgcaagtctcacctcgaccatgccaccgacccttcccgcaaccccatcctgacggggacgtctgccacgctgcccagaggtctcgatcatttctctgcctacatgtgcgaagaccatgtcatcggtgacctgctgtggcgtacagacatccctggcttcttgaaccatggtcttgtgtatggagatctcgccatccagcctatggcggggatgtcgattcgcgcatatgccgctcggagagtccgctggctccgcgccaggaaatggaccgttctctccgccaccctggtcgaacacggcgtggagagcctagtgtgctgcttctacctgtccttcggcttgactactccctcgtggataaacgaaatgtttggcatgccgcaaacgtggagcgctctcggctggagctggatcgcactcgtcacgctgtggatgcttgtggaccgagccctcttcaagaggctacatgccggactgagcatccaaggggatgacaatacgcctgcgtttgcccgcggctctagcaaaggcggggctgagaagcgtcaattcggcgaatggttcctggcatggctgggtcgtgaggtctttgcgctccccatctggacttgggccgtgtttcttggcacgggcgtgaactggcgtgggaaacggtttcgagtccgatctgatatgacggtcacggccatggatggcgagaccaagtcaaacatgactcggatacctaatggccgagtaaataataaaaaggattaaacatatgcctagaataacgatacccaggacttgcacatagatgagagaagaaaagtaaatacctgctacctataatcattacgtctcttcacttaaaatattcgagatgagattgatgcacgtcattccaaactgaagaatatatgctggctagagagcatccggctgtgtcgcacgtggatgaggcccccttgcgtagagcatacaaacctcacggcaggtttccaatgtggcacacaatgcctgctgactgagacgtctgctccagatgctagaaatgtaaagaaagaacttaggcgaacatcacgatccagacacaagttaagtcacgacccc

SEQ ID NO: 12567 - DNA, 1581 bp, Muscodor strobelii
  misc_feature: SGI cDNA ID NO. 564085
  misc_feature: Encodes the peptide sequence at SEQ ID NO 12568
atggcggacgtagtagatcccactgtcagctcgcgccaacctgaacaacagcccggcaaggtcgcgtctgccgggaagcctgcaggcggaccgaagccgaagcacgtcactcctcgccagctatacgcactgcccgcgcccgtccggactttcccactgccgacgttctaccccaacaacccactgtcgcttttccatgtgctctgggtctgggcgaagcaggcgttgcactcccgaccgagccctcagttattcatcaaggcttctgccctttgggaacagggtttcttcggcaaaggtctctactctcggagtgaaccaaactggctcaagcgggaacaaaatcgccagagtggtatgaacctctttgtagcagaagagcgcactttgtcgctacgtgaagagcgcaaacgcgtgaaatgggctcgagcaaagaaggagcaagaagctatcacgaggactcgaatagcagaggcctttgtcgccccggtcggacccaaggaacttcttgccttgcccaactcgatcaaggacattgcattgccattcctgcccgggccgcccaatggaaccataaccccagatgattcggacagtggcggcgtcgtggaagacgcccaggcttcgatatccaccacgtatgcgcgctctagtgtcgagagagccctgcctgtgaaatcggagagtgaaacggagtcaagtcaattccaggcgctgaatggcgtacatcctctcactcccccaaaatcaccatttcgtactccgtcacctccttcccccaacagcgcaccagcactccccaaacgcaggaagagcgtgcgcttctcgcccaaggttgagtccacgactttccagttctcggatcctccgagcccacatttgggttctttagcaaatggcaaggcatcgcatagttcttcctctgatgctactgtggatcttccttgttccactgccacaatcactgcggaacccataacaccaccagctacagacgaaatttccgacgggagccctcctgaaatcgaggatagggagcatctacaactcagtctcgaagaagctttctatcttgcctactccctcggcgtcctgaccgttttggatcctgctacaggtttggccatgaccacccaagcacttttcgatcaatgccgtcagctatcatattatcctcggcgtactgttgacctacaacccgatgacccgttccttgtgcaatatgctgtatatcaccactttcgatcgctaggatgggtagccagatctggaatcaaattcggagctgattggctcgtatatctcggcggtcctgttttcagccatgctgagttcgccgttatagtcattcctacatactcagatccatattggaagacacaagctcatcgtaagccagaacgatcatggcattggctccactctattggtcgagtacagtcgcatgctctcaagacactggtgtttgtgtatgtggatattcctccgcccacagatgcattggatcctacagccttgatcaagcggtataagatccgcgaattttttatgaagaggtttttaagcaaccgaaacagatag

SEQ ID NO: 12568 - protein, 526 aa, Muscodor strobelii
  misc_feature: SGI Peptide ID NO. 564085
  misc_feature (40)..(526): NCBI GI: 256731472 Blast Desc: NECHADRAFT_63731 [Nectria haematococca mpVI 77-13-4]
  misc_feature (13)..(526): NCBI GI: 261359105 Blast Desc: tRNA-splicing endonuclease subunit Sen2 [Verticillium albo-atrum VaMs.102]
  misc_feature (10)..(518): NCBI GI: 145605261 Blast Desc: MGG_10667 [Magnaporthe grisea 70-15] gi|145013097|gb|EDJ97738.1| MGG_10667 [Magnaporthe grisea 70-15]
  misc_feature (40)..(526): NCBI GI: 46123153 Blast Desc: FG05954.1 [Gibberella zeae PH-1]
  misc_feature (27)..(520): NCBI GI: 115432988 Blast Desc: conserved [Aspergillus terreus NIH2624] gi|114189483|gb|EAU31183.1| conserved [Aspergillus terreus NIH2624]
  misc_feature (31)..(526): NCBI GI: 225683508 Blast Desc: tRNA-splicing endonuclease subunit Sen2 [Paracoccidioides brasiliensis Pb03]
  misc_feature (39)..(526): NCBI GI: 255949114 Blast Desc: Pc22g14000 [Penicillium chrysogenum Wisconsin 54-1255] gi|211592341|emb|CAP98688.1| Pc22g14000 [Penicillium chrysogenum Wisconsin 54-1255]
  misc_feature (22)..(526): NCBI GI: 238503287 Blast Desc: tRNA-splicing endonuclease subunit Sen2, [Aspergillus flavus NRRL3357] gi|220691687|gb|EED48035.1| tRNA-splicing endonuclease subunit Sen2, [Aspergillus flavus NRRL3357]
  misc_feature (162)..(526): NCBI GI: 116198811 Blast Desc: CHGG_07561 [Chaetomium globosum CBS 148.51] gi|88178840|gb|EAQ86308.1| CHGG_07561 [Chaetomium globosum CBS 148.51]
  misc_feature (39)..(526): NCBI GI: 145242710 Blast Desc: An09g06160 [Aspergillus niger] gi|134078483|emb|CAL00346.1| protein product [Aspergillus niger]
  misc_feature (150)..(526): SWISSPROT Homolog: EC 3.1.27.9 tRNA-intron endonuclease
MADVVDPTVSSRQPEQQPGKVASAGKPAGGPKPKHVTPRQLYALPAPVRTFPLPTFYPNNPLSLFHVLWVWAKQALHSRPSPQLFIKASALWEQGFFGKGLYSRSEPNWLKREQNRQSGMNLFVAEERTLSLREERKRVKWARAKKEQEAITRTRIAEAFVAPVGPKELLALPNSIKDIALPFLPGPPNGTITPDDSDSGGVVEDAQASISTTYARSSVERALPVKSESETESSQFQALNGVHPLTPPKSPFRTPSPPSPNSAPALPKRRKSVRFSPKVESTTFQFSDPPSPHLGSLANGKASHSSSSDATVDLPCSTATITAEPITPPATDEISDGSPPEIEDREHLQLSLEEAFYLAYSLGVLTVLDPATGLAMTTQALFDQCRQLSYYPRRTVDLQPDDPFLVQYAVYHHFRSLGWVARSGIKFGADWLVYLGGPVFSHAEFAVIVIPTYSDPYWKTQAHRKPERSWHWLHSIGRVQSHALKTLVFVYVDIPPPTDALDPTALIKRYKIREFFMKRFLSNRNR

SEQ ID NO: 12569 - DNA, 1521 bp, Muscodor strobelii
  misc_feature: SGI cDNA ID NO. 564086
  misc_feature: Encodes the peptide sequence at SEQ ID NO 12570
atgccgcctaacggtcgtagtaatggccgtctacctcgcgacgaagatgacattgcgcacgagacaacgcctctcctcggcgccgcatcttcaccagttgtgccggagcaagcaaaggatatcgtacacacatcagaccccattcccaatccagaagacaagccccttcctaagcttcaaatctttttgctctgctacgcgcgcatcatcgagcctatcgctttcttctctatctttccttatatcaatcagatggtgatgcacaatggcgacataccggaatcagacatgggtttttactctggcctcatcgagtccctcttttcacttacgcagatgtgcgtaatggtcgcatggggccgagccgccgaccgtgtgggccggaaacccgtgctggtcttctcactactcggtgtcgcgatcgcgacgagcatatttggattgtcgacgagtatatggcaaatgattctatttcgctgtgcaaacggcgtcttcggcgggaccattgtgaccatccgcaccatgatctcagagcacagcacgaaagctacacaagcccgcgctttctcctggttcgcattatcaggaaacctagggatatttcttgggcccctgataggcggcgtactcgcggacccaaataaactgtacccgggactattcaagaactcgccattcttcgaaaaatatccatatgcactatcgtccttcgtagcgggctttataggtctcactgccgtcttcgcaaccgcattcttcgtagacgagaccctgcaccgtcacccacccaagaccattgacggcgcagaaggcgcagaggcaccccgtccgtcccactccacccgggatctcgtgaaatcccccggtgtcggcatcgtgctctacaattacggtcacgtcatgctgctcgcctacgcgtatacagccgtcatgcccctgttctggtcgacatctgtcgagcttggaggatttgggtggtcatccctccgtaattccctattcatggggctcggcggcttggcccaatccctctggtttctcgtggtatttccccctcttcaacaccgtatcggcaccaacggcgtccttcgcgcctgtggtaccgcatacccctttttcatcggcttcatgccgatcatgaacttactcctccgaatcggtacgccagcctcggaaacggcattctggatcataacgcctatcctgcttaccttcggctcgggcgttgccatggcgttcaccggcgttcagctcgcgctcaacgatgtgtcacccagttacgaaactctgggcatgctgaatgccctggcgctgacgctgacgagcggactgcgcgctttctctcctgcagggttctctagtctattcgctgttggggttggaaaccagttgttctttggctacgcattctgggtattcctgacgattctggccgctgggttcacggtctcgacgagattcctaccagcggccagcgaaaagcagactgaagatggcgcggatcatgccgaggatgattaa

SEQ ID NO: 12570 - protein, 506 aa, Muscodor strobelii
  misc_feature: SGI Peptide ID NO. 564086
  misc_feature (64)..(449): Pfam Id: PF07690 Pfam Desc: Major Facilitator Superfamily
  misc_feature (64)..(212): Pfam Id: PF07690 Pfam Desc: Major Facilitator Superfamily
  misc_feature (237)..(449): Pfam Id: PF07690 Pfam Desc: Major Facilitator Superfamily
  misc_feature (17)..(505): NCBI GI: 116180960 Blast Desc: CHGG_01108 [Chaetomium globosum CBS 148.51] gi|88185405|gb|EAQ92873.1| CHGG_01108 [Chaetomium globosum CBS 148.51]
  misc_feature (1)..(489): NCBI GI: 85119527 Blast Desc: NCU02522 [Neurospora crassa OR74A] gi|28927465|gb|EAA36417.1| conserved [Neurospora crassa OR74A]
  misc_feature (52)..(498): NCBI GI: 255939740 Blast Desc: Pc16g02670 [Penicillium chrysogenum Wisconsin 54-1255] gi|211585262|emb|CAP92937.1| Pc16g02670 [Penicillium chrysogenum Wisconsin 54-1255]
  misc_feature (15)..(498): NCBI GI: 169782730 Blast Desc: [Aspergillus oryzae RIB40] gi|83774571|dbj|BAE64694.1| protein product [Aspergillus oryzae]
  misc_feature (15)..(498): NCBI GI: 238492375 Blast Desc: tetracycline-efflux transporter, [Aspergillus flavus NRRL3357] gi|220695918|gb|EED52260.1| tetracycline-efflux transporter, [Aspergillus flavus NRRL3357]
  misc_feature (19)..(506): NCBI GI: 256726388 Blast Desc: NECHADRAFT_60536 [Nectria haematococca mpVI 77-13-4]
  misc_feature (15)..(506): NCBI GI: 212530096 Blast Desc: conserved [Penicillium marneffei ATCC 18224] gi|210074603|gb|EEA28690.1| conserved [Penicillium marneffei ATCC 18224]
  misc_feature (12)..(489): NCBI GI: 39972829 Blast Desc: MGG_07709 [Magnaporthe grisea 70-15] gi|145012476|gb|EDJ97130.1| MGG_07709 [Magnaporthe grisea 70-15]
  misc_feature (50)..(498): NCBI GI: 46124383 Blast Desc: FG06569.1 [Gibberella zeae PH-1]
  misc_feature (12)..(490): NCBI GI: 189195996 Blast Desc: conserved [Pyrenophora tritici-repentis Pt-1C-BFP] gi|187980215|gb|EDU46841.1| conserved [Pyrenophora tritici-repentis Pt-1C-BFP]
MPPNGRSNGRLPRDEDDIAHETTPLLGAASSPVVPEQAKDIVHTSDPIPNPEDKPLPKLQIFLLCYARIIEPIAFFSIFPYINQMVMHNGDIPESDMGFYSGLIESLFSLTQMCVMVAWGRAADRVGRKPVLVFSLLGVAIATSIFGLSTSIWQMILFRCANGVFGGTIVTIRTMISEHSTKATQARAFSWFALSGNLGIFLGPLIGGVLADPNKLYPGLFKNSPFFEKYPYALSSFVAGFIGLTAVFATAFFVDETLHRHPPKTIDGAEGAEAPRPSHSTRDLVKSPGVGIVLYNYGHVMLLAYAYTAVMPLFWSTSVELGGFGWSSLRNSLFMGLGGLAQSLWFLVVFPPLQHRIGTNGVLRACGTAYPFFIGFMPIMNLLLRIGTPASETAFWIITPILLTFGSGVAMAFTGVQLALNDVSPSYETLGMLNALALTLTSGLRAFSPAGFSSLFAVGVGNQLFFGYAFWVFLTILAAGFTVSTRFLPAASEKQTEDGADHAEDD

SEQ ID NO: 12571 - DNA, 4962 bp, Muscodor strobelii
  misc_feature: SGI EST ID NO. CUFF.30189.1
  misc_feature: Variant of the nucleotide sequence at SEQ ID NO 12569
atctattcttttttgaacttgctagtcgcagttacttgtcttagcccgtaggcattgtgctagttacatgtgtagatcaagcaagatgaacgtgaataccggctgagtttcaggtagtcaaagccatgcatgacttcatgacgatattcgcatcttcgccatgtggcaactgtaattcatgtgaacttagcttcgcttgtaatagtagtgcatcgattgattccgtaagaattcattaggtacgtagtcatcgtaccgtgagttgaagggtatgcgtcgctaagtgctgcttcgaattcgagggtatgctggcggaattaggggtctcattcgcttcattcccgccgttgccggaggcagctcgaacccctgcgtactgtggtactacgcgtaatgtagtttgggaaggcaaacagtcctgagatatgcgctgccgcgaaaagaaaatgctccatagtgttgagattcaggtataaaagatttggtatggcggcatcggcttatgtctagctatagtcaagcaattatttcaacccatcccaaatcggctcgccgacaggtatacgcaagccagaggtcttgctactgtagccacacaccctcgacaccaacgatatactctacatcacagcgaatcaggggactcgcaataggcatcctggttcactaaaggcaacaacccatgaattccgccgctccatagactccataaaaacccgtcttttccatgcacgagacaggcattaggagcaagcctattatgtcagatccgcggacctcaaatttcatgagaagcgcgacttcatttcaatttttcaaaagatctcactcagatagtagtgagctggtgaatgggtcgaaggctcaagacctgcaactctcatcatctcccacaatgccgcctaacggtcgtagtaatggccgtctacctcgcgacgaagatgacattgcgcacgagacaacgcctctcctcggcgccgcatcttcaccagttgtgccggagcaagcaaaggatatcgtacacacatcagaccccattcccaatccagaagacaagccccttcctaagcttcaaatctttttgctctgctacgcgcgcatcatcgagcctatcgctttcttctctatctttccttatatcaatcagatggtgatgcacaatggcgacataccggaatcagacatgggtttttactctggcctcatcgagtccctcttttcacttacgcagatgtgcgtaatggtcgcatggggccgagccgccgaccgtgtgggccggaaacccgtgctggtcttctcactactcggtgtcgcgatcgcgacgagcatatttggattgtcgacgagtatatggcaaatgattctatttcgctgtgcaaacggcgtcttcggcgggaccattgtgaccatccgcaccatgatctcagagcacagcacgaaagctacacaagcccgcgctttctcctggttcgcattatcaggaaacctagggatatttcttgggcccctgataggcggcgtactcgcggacccaaataaactgtacccgggactattcaagaactcgccattcttcgaaaaatatccatatgcactatcgtccttcgtagcgggctttataggtctcactgccgtcttcgcaaccgcattcttcgtagacgagaccctgcaccgtcacccacccaagaccattgacggcgcagaaggcgcagaggcaccccgtccgtcccactccacccgggatctcgtgaaatcccccggtgtcggcatcgtgctctacaattacggtcacgtcatgctgctcgcctacgcgtatacagccgtcatgcccctgttctggtcgacatctgtcgagcttggaggatttgggtggtcatccctccgtaattccctattcatggggctcggcggcttggcccaatccctctggtttctcgtggtatttccccctcttcaacaccgtatcggcaccaacggcgtccttcgcgcctgtggtaccgcatacccctttttcatcggcttcatgccgatcatgaacttactcctccgaatcggtacgccagcctcggaaacggcattctggatcataacgcctatcctgcttaccttcggctcgggcgttgccatggcgttcaccggcgttcagctcgcgctcaacgatgtgtcacccagttacgaaactctgggcatgctgaatgccctggcgctgacgctgacgagcggactgcgcgctttctctcctgcagggttctctagtctattcgctgttggggttggaaaccagttgttctttggctacgcattctgggtattcctgacgattctggccgctgggttcacggtctcgacgagattcctaccagcggccagcgaaaagcagactgaagatggcgcggatcatgccgaggatgattaatctgtcagtgaatttgggtgtattagggcatttagagaacatattctagaagcattagatcagaaagcgtcatgtcatttcaaccttaggcgcattgcatcggtagaataggttgtttagtgctatcctaggtcgggctcgatcgtacaaggtcaacatgcttctttgttacaggtttccatcagtgccactcgtagtatcgccctccagcgagagagccttcgacttggtatcatacatgtcccaaatgcaaaacgccatgccgtgctgtaaaatcaatcgtgcctcatttacaccgctctatctgtttcggttgcttaaaaacctcttcataaaaaattcgcggatcttataccgcttgatcaaggctgtaggatccaatgcatctgtgggcggaggaatatccacatacacaaacaccagtgtcttgagagcatgcgactgtactcgaccaatagagtggagccaatgccatgatcgttctggcttacgatgagcttgtgtcttccaatatggatctgagtatgtaggaatgactataacggcgaactcagcatggctgaaaacaggaccgccgagatatacgagccaatcagctccgaatttgattccagatctggctacccatcctagcgatcgaaagtggtgatatacagcatattgcacaaggaacgggtcatcgggttgtaggtcaacagtacgccgaggataatatgatagctgacggcattgatcgaaaagtgcttgggtggtcatggccaaacctgtagcaggatccaaaacggtcaggacgccgagggagtaggcaagatagaaagcttcttcgagactgagttgtagatgctccctatcctcgatttcaggagggctcccgtcggaaatttcgtctgtagctggtggtgttatgggttccgcagtgattgtggcagtggaacaaggaagatccacagtagcatcagaggaagaactatgcgatgccttgccatttgctaaagaacccaaatgtgggctcggaggatccgagaactggaaagtcgtggactcaaccttgggcgagaagcgcacgctcttcctgcgtttggggagtgctggtgcgctgttgggggaaggaggtgacggagtacgaaatggtgattttgggggagtgagaggatgtacgccattcagcgcctggaattgacttgactccgtttcactctccgatttcacaggcagggctctctcgacactagagcgcgcatacgtggtggatatcgaagcctgggcgtcttccacgacgccgccactgtccgaatcatctggggttatggttccattgggcggcccgggcaggaatggcaatgcaatgtccttgatcgagttgggcaaggcaagaagttccttgggtccgaccggggcgacaaaggcctctgctattcgagtcctcgtgatagcttcttgctccttctttgctcgagcccatttcacgcgtttgcgctcttcacgtagcgacaaagtgcgctcttctgctacaaagaggttcataccactctggcgattttgttcccgcttgagccagtttggttcactccgagagtagagacctttgccgaagaaaccctgttcccaaagggctcggatcgacttggcgtctcggacatgcacagagcgggtctccggtgaccagaagccttgatgaataactgagggctcggtcgggagtgcaacgcctgcttcgcccagacccagagcacatggaaaagcgacagtgggttgttggggtagaacgtcggcagtgggaaagtccggacgggcgcgggcagtgcgtatagctggcgaggagtgacgtgcttcggcttcggtccgcctgcaggcttcccggcagacgcgaccttgccgggctgttgttcaggttggcgcgagctgacagtgggatctactacgtccgccatggccacgatgcttcatttcgatacctttggtaaaccgtcagcacagagtggaaagcgggtccaatgatcccgtgcgtattattcggaacggaagagaaacgaaatagagtaagtagcaatcgctcagataccgttgtagtctatatttggataactcatcgaggcgtctactgaaagactatgctctagtccaaatgtaaggtgtcatcaccgtgattataatgctagcaccaccgcacatgcgtgaggtcccagccaagggaaaccagagtgctgagagaagccaagacttcctggatagtgaagaggggcagaggttgatgggatgtagactgaccgtttccaggtacgcaaaatggcttgtgcagagatgtcaagctgaatcaacacaacttgttgagtcgaatgatggcagcatcagtgtcacgcaaaaagcggcaattatggactgcccaagtgcgtgcttgccaatcaagattgtacggcgaagtgagtttagagcctatcgacacgaggcttaccggcgcaagcttcacatggtactgattcgaccggacgcctttgtcttgaatggtgtttcggttgaggttgaaaagtcgaagaaaaggaaatgtg

SEQ ID NO: 12572 - DNA, 618 bp, Muscodor strobelii
  misc_feature: SGI cDNA ID NO. 564087
  misc_feature: Encodes the peptide sequence at SEQ ID NO 12573
atgagtcggccacatactagtgcgcagccattctttgaccaccttgatgaactccgcgtcttcatccaccgccagttcgaagaggagctcttcatcctggcttcgactgagcgacacgtccagagcctgagcaaagatactcgtttcacattctattccgacgacgaacttctggcaagtaggcaccggacggggagtcaaaaaggcatttatgaaaactgggaccacgttcgaagctggaaacagcatatgtcaacctggaatatcgagtttcttcgagattatcatactaagagaatgggtaatttcaaagatatgttggagatgcatatcgatgatatggcggatcgccccgagaaatgggtttgcgatcgatcaacgagggtctcgcacgacatgcgtccagagcttacgtccatttccctgaaagcattcaggcgcgaagccagaatgctaagggattatatgctagagacgatgctagtgatccaagagcggattgatggcatcttggaggctatttctgactcacgggatcgttatcctaaagatacgccgctatccgatgcggatggaatcttcttagaaggcttagatcgtgcctttgggcttgattga

SEQ ID NO: 12573 - protein, 205 aa, Muscodor strobelii
  misc_feature: SGI Peptide ID NO. 564087
MSRPHTSAQPFFDHLDELRVFIHRQFEEELFILASTERHVQSLSKDTRFTFYSDDELLASRHRTGSQKGIYENWDHVRSWKQHMSTWNIEFLRDYHTKRMGNFKDMLEMHIDDMADRPEKWVCDRSTRVSHDMRPELTSISLKAFRREARMLRDYMLETMLVIQERIDGILEAISDSRDRYPKDTPLSDADGIFLEGLDRAFGLD

SEQ ID NO: 12574 - DNA, 348 bp, Muscodor strobelii
  misc_feature: SGI EST ID NO. CUFF.29791.0
  misc_feature: Variant of the nucleotide sequence at SEQ ID NO 12572
cggagagtgactgcacacgtgcttgaatcattcgcaattagcatacagctcattatcctaattttgctactgaactaattgagactgaaatacacttttgataaaagtcaacatgagtcggccacatactagtgcgcagccattctttgaccaccttgatgaactccgcgtcttcatccaccgccagttcgaagaggagctcttcatcctggcttcgactgagcgacacgtccagagcctgagcaaagatactcgtttcacattctattccgacgacgaacttctggcaagtaggcaccggacggggagtcaaaaaggcatttatgaaaactgggaccacgttcgaag

SEQ ID NO: 12575 - DNA, 963 bp, Muscodor strobelii
  misc_feature: SGI cDNA ID NO. 564088
  misc_feature: Encodes the peptide sequence at SEQ ID NO 12576
atgtcgacagcccatatctataatcttcaggaaaacgcagtctggttcatcaccggctgctcatcgggcatcggtcaggcactggcaacgcaaattgctgagcaccctacacacagacttgtcgccacggcccgaagctcatccagattgactgaatctctcagtccatcggaaaaggtactcattgttgatctcgacgtcacgaaagatgatgcgattgatgcagcaatcgatgcggcactggttcgatttggtcgcatcgacgtcctggtaaacaacgccggttacggcttgatgggagacgctgagtccgccttgcagtccgagggccaggttaaagctcgtaagcagatcgaaactaatctatggggaacaatgagactgtctctccatgctgtacgtgtttttcgcgatgagaatcccaagaccgggcaacaaggaggtgtcgtcctcaacgtcacatcgctcggtggctttgcaggcttccccagcactgcgttctaccatgcagctaaatttggtgttgaaggatttacagaaggcgtcagtaaagaagttcggcctgaatggaacatccacttttgcatcattgagccaggtggagtaaagaccagcttttcgagctcgagtaacatggactcgtttgcgcctcatccggcctatacggcggccgatagtccatcaaggattatggaaggctacgtgaatgaccccgctatgcaaaacacttggacaccagcagagagagtagctggagctatgtatgaggtcgttgcacttgccaagcataaatcccttcctatcagactgccgttgaccgagggagcttggactgtggtcaagaacgagattacagccgtggaaagggaactggaggaattcaaggcactcagtctatctgttgaagtcaacgatgcaaacaaagcagggcaattcttggtgaacaactacttttcaaactaa

SEQ ID NO: 12576 - protein, 320 aa, Muscodor strobelii
  misc_feature: SGI Peptide ID NO. 564088
  misc_feature (13)..(187): Pfam Id: PF00106 Pfam Desc: short chain dehydrogenase
  misc_feature (13)..(200): Pfam Id: PF08659 Pfam Desc: KR domain
  misc_feature (13)..(88): Pfam Id: PF08659 Pfam Desc: KR domain
  misc_feature (7)..(303): NCBI GI: 39944586 Blast Desc: MGG_04304 [Magnaporthe grisea 70-15] gi|145015044|gb|EDJ99612.1| MGG_04304 [Magnaporthe grisea 70-15]
  misc_feature (99)..(317): NCBI GI: 154288804 Blast Desc: short chain dehydrogenase [Botryotinia fuckeliana B05.10] gi|150853015|gb|EDN28207.1| short chain dehydrogenase [Botryotinia fuckeliana B05.10]
  misc_feature (7)..(299): NCBI GI: 39968489 Blast Desc: MGG_02337 [Magnaporthe grisea 70-15] gi|145014085|gb|EDJ98726.1| MGG_02337 [Magnaporthe grisea 70-15]
  misc_feature (9)..(296): NCBI GI: 115402205 Blast Desc: [Aspergillus terreus NIH2624] gi|114189025|gb|EAU30725.1| [Aspergillus terreus NIH2624]
  misc_feature (8)..(304): NCBI GI: 212528146 Blast Desc: 3-oxoacyl-[acyl-carrier-protein] reductase, [Penicillium marneffei ATCC 18224] gi|210073628|gb|EEA27715.1| 3-oxoacyl-[acyl-carrier-protein] reductase, [Penicillium ATCC
  misc_feature (9)..(307): NCBI GI: 242767199 Blast Desc: 3-oxoacyl-[acyl-carrier-protein] reductase, [Talaromyces stipitatus ATCC 10500] gi|218724519|gb|EED23936.1| 3-oxoacyl-[acyl-carrier-protein] reductase, [Talaromyces ATCC
  misc_feature (7)..(298): NCBI GI: 156051630 Blast Desc: SS1G_07222 [Sclerotinia sclerotiorum 1980] gi|154705000|gb|EDO04739.1| SS1G_07222 [Sclerotinia sclerotiorum 1980]
  misc_feature (8)..(298): NCBI GI: 156046230 Blast Desc: SS1G_09374 [Sclerotinia sclerotiorum 1980] gi|154693769|gb|EDN93507.1| SS1G_09374 [Sclerotinia sclerotiorum 1980]
  misc_feature (6)..(298): NCBI GI: 154312790 Blast Desc: BC1G_05096 [Botryotinia fuckeliana B05.10] gi|150849798|gb|EDN24991.1| BC1G_05096 [Botryotinia fuckeliana B05.10]
  misc_feature (7)..(298): NCBI GI: 116182590 Blast Desc: CHGG_01923 [Chaetomium globosum CBS 148.51] gi|88186220|gb|EAQ93688.1| CHGG_01923 [Chaetomium globosum CBS 148.51]
  misc_feature (14)..(204): SWISSPROT Homolog: EC 1.1.1.62 Estradiol 17-beta-dehydrogenase
MSTAHIYNLQENAVWFITGCSSGIGQALATQIAEHPTHRLVATARSSSRLTESLSPSEKVLIVDLDVTKDDAIDAAIDAALVRFGRIDVLVNNAGYGLMGDAESALQSEGQVKARKQIETNLWGTMRLSLHAVRVFRDENPKTGQQGGVVLNVTSLGGFAGFPSTAFYHAAKFGVEGFTEGVSKEVRPEWNIHFCIIEPGGVKTSFSSSSNMDSFAPHPAYTAADSPSRIMEGYVNDPAMQNTWTPAERVAGAMYEVVALAKHKSLPIRLPLTEGAWTVVKNEITAVERELEEFKALSLSVEVNDANKAGQFLVNNYFSN

SEQ ID NO: 12577 - DNA, 2898 bp, Muscodor strobelii
  misc_feature: SGI cDNA ID NO. 564089
  misc_feature: Encodes the peptide sequence at SEQ ID NO 12578
atgaagtctttgttactactgttagtggcggccacaattatcgggccgggatcagggcagaatacgaatgatcagatcggtgcagatatcaactatggtactttccacaatccttcctcgagagttagaccccgtttcagatactgggctaatgatgcgtcccttaatctcacccgcgtcgctcaagacatcaaagatgtagcacaggctggcgcaggaggcatcgaactacttgggttctataactatggcaataatcctggcactggtcaagacgtatctctggagtacgactgggtcaagtatggatatgggagcgaagcctggaaggagctcgtcaataccattttgacatcggcacagcaagaaggccttgttattgatctcacactaggccctaaccaaggtgctggcgtgccagcggaatatgattcaaatgggctcctctggaatcttgactaccacacaacgacagtagcagtgcgtacaaactacacaggccaggttcccggatggggttccaacaataactcccttgtagcggccacaatcggaactatactgtccggagacgaaacaacatatgttctctcaactgagtccttagacgatattaccagtctagtgaatattgatggctcgctgtctgttcaatgtccaagtggtcctgcttcagctcttgcctgtattgtattcgccttctacaaccagcgcaccggagagcaagaggtgtacagcacacaagatgcaccgacaaatgtaccacaatcaccaatcaccaacttcaaagaaaatggctcctgggttgtcgaccattggtctgaggcgggagcccaggtcttcgttgacttctgggagagcaccttgttagacgggccaacacctgacttactgaaggaagtcggcaactatctttgggaggacagccaggagttcgagtttggggtccgtccgtggacgccgttgttgccaatgacgttctcagccaaccgtggttacgacatccaaaagtatcttccgcttgttctgaaccctttgcaatctcgagagccaagtaaatttgtgacggacgaagccgattcaggcgccagctacattcatgactatcggcaaacgctcgctgagctcaatcaaatttacttgaacaagctggcaacttgggctcagagtttgggcgttcaattttctgcgcaagtggtttacaatcttcaaatggacatgctcgctaacgtgccccatgtcaatgcccctgaatgcgagacgcttgcatttggtgacaatattgatggctatcgacaatatgcaggacctgcaaatctcgcaggaaagcgcgttgtttctagcgaggccggggcggaatacatggtgacataccaacaaacaataccggacatgatgtatcgacagaaacgatcattagctgctgcggtgaatcagttcgtattgcacggtatgccgttttctggcaattacggcaatactacttggccgggctggacaccctttgattacaagtattctgagcctcagggccggcggcaacctagctgggacttttacccagattggctcgattggttgtctcgtactcagttcatcatgcaaagtggacggcctcagatagatctcgcattttggttgaagaaggacgactatgtatctattcagacagcatacgcccccgatgatctacgtgcggcgggatatacctacgagtatttaagccccgacaatttcgctattccagatgcttctgtttcagacgcagtgtttgctccccgacgccaggctttcaaagcactcattgtccgtggtaatgatacactaacggtgttcggtgcatcgaaactggtcgagtacgcaaacgcaggcctacctctgatcttctcaggagggattccgtctgctgtaaatagccacacaaacgcgtctgattgtgtgtcatgcccactggaagaactagtgacgctaccgaacgttcataacgtcacttatgagaatctagcctctacattacagacactaggtatttcaccgagaagttctgttgatactaatggaacttggtacacttattggagaacagacgatgtaacctccactgattacgttttcatatatgatgacgcagatgaaccctcgatgggagttggtttcactactgggaatatcacattcgaaaccactggcaagccctatctatacgatgcctggaccggagagattgaagagctcctaaaattcgaccagtctacgacatcgacgactgtggcactagaactcgccgctcgccagtccatcatactggcttttcatagagactcaagttcgcttccagagtctacgccaatcaagtacctggatttctctgagggcgtggtactcagcaactggactttggttgtggaatcatggactgctccagaaggagttttcgatgtggacgccgtgcccgaaaatcggactaatctcactgccatgtccgtgccgacgctaaaaccgtggaacgagctttccgacacactgaaatacatttcaggacgaggatactactctaccaatttcatatggccaccgtccggtgcagatcagacagcctatgacggtgcctatatcgatcttggtcgaatctttcacactgtgcgtggtcgagtcaacggcaaccaattaccacccttggatctcaactgggcgacgaccgacatatcaaaattccttcaaactggtgacaacattctagaagttgtggtcagcacaccattaggaaatgcgctcattccgatatgggatgaactcctgacagccggtaaacccgcgatgcaagacgtgcctactgcgccaacagtcgcagcgtatggattagtagattccgtccagatcatgccttacaccggctag

SEQ ID NO: 12578 - protein, 965 aa, Muscodor strobelii
  misc_feature: SGI Peptide ID NO. 564089
  misc_feature (7)..(963): NCBI GI: 145243434 Blast Desc: An11g02440 [Aspergillus niger] gi|134078919|emb|CAK48310.1| protein product [Aspergillus niger]
  misc_feature (16)..(936): NCBI GI: 238500359 Blast Desc: conserved [Aspergillus flavus NRRL3357] gi|220693167|gb|EED49513.1| conserved [Aspergillus flavus NRRL3357]
  misc_feature (1)..(964): NCBI GI: 238505398 Blast Desc: conserved [Aspergillus flavus NRRL3357] gi|220690042|gb|EED46392.1| conserved [Aspergillus flavus NRRL3357]
  misc_feature (32)..(947): NCBI GI: 255931153 Blast Desc: Pc12g02440 [Penicillium chrysogenum Wisconsin 54-1255] gi|211581752|emb|CAP79871.1| Pc12g02440 [Penicillium chrysogenum Wisconsin 54-1255]
  misc_feature (35)..(963): NCBI GI: 145609097 Blast Desc: MGG_09149 [Magnaporthe grisea 70-15] gi|145016532|gb|EDK00962.1| MGG_09149 [Magnaporthe grisea 70-15]
  misc_feature (35)..(961): NCBI GI: 119474141 Blast Desc: NFIA_004050 [Neosartorya fischeri NRRL 181] gi|119407099|gb|EAW17049.1| conserved [Neosartorya fischeri NRRL 181]
  misc_feature (35)..(960): NCBI GI: 159128277 Blast Desc: conserved [Aspergillus fumigatus A1163]
  misc_feature (7)..(925): NCBI GI: 46139121 Blast Desc: FG11075.1 [Gibberella zeae PH-1]
  misc_feature (46)..(774): NCBI GI: 145240619 Blast Desc: An08g08430 [Aspergillus niger] gi|134077479|emb|CAK40044.1| protein product [Aspergillus niger]
  misc_feature (52)..(963): NCBI GI: 149210975 Blast Desc: MGCH7_ch7g953 [Magnaporthe grisea 70-15] gi|86196908|gb|EAQ71546.1| MGCH7_ch7g953 [Magnaporthe grisea 70-15]
MKSLLLLLVAATIIGPGSGQNTNDQIGADINYGTFHNPSSRVRPRFRYWANDASLNLTRVAQDIKDVAQAGAGGIELLGFYNYGNNPGTGQDVSLEYDWVKYGYGSEAWKELVNTILTSAQQEGLVIDLTLGPNQGAGVPAEYDSNGLLWNLDYHTTTVAVRTNYTGQVPGWGSNNNSLVAATIGTILSGDETTYVLSTESLDDITSLVNIDGSLSVQCPSGPASALACIVFAFYNQRTGEQEVYSTQDAPTNVPQSPITNFKENGSWVVDHWSEAGAQVFVDFWESTLLDGPTPDLLKEVGNYLWEDSQEFEFGVRPWTPLLPMTFSANRGYDIQKYLPLVLNPLQSREPSKFVTDEADSGASYIHDYRQTLAELNQIYLNKLATWAQSLGVQFSAQVVYNLQMDMLANVPHVNAPECETLAFGDNIDGYRQYAGPANLAGKRVVSSEAGAEYMVTYQQTIPDMMYRQKRSLAAAVNQFVLHGMPFSGNYGNTTWPGWTPFDYKYSEPQGRRQPSWDFYPDWLDWLSRTQFIMQSGRPQIDLAFWLKKDDYVSIQTAYAPDDLRAAGYTYEYLSPDNFAIPDASVSDAVFAPRRQAFKALIVRGNDTLTVFGASKLVEYANAGLPLIFSGGIPSAVNSHTNASDCVSCPLEELVTLPNVHNVTYENLASTLQTLGISPRSSVDTNGTWYTYWRTDDVTSTDYVFIYDDADEPSMGVGFTTGNITFETTGKPYLYDAWTGEIEELLKFDQSTTSTTVALELAARQSIILAFHRDSSSLPESTPIKYLDFSEGVVLSNWTLVVESWTAPEGVFDVDAVPENRTNLTAMSVPTLKPWNELSDTLKYISGRGYYSTNFIWPPSGADQTAYDGAYIDLGRIFHTVRGRVNGNQLPPLDLNWATTDISKFLQTGDNILEVVVSTPLGNALIPIWDELLTAGKPAMQDVPTAPTVAAYGLVDSVQIMPYTG

SEQ ID NO: 12579 - DNA, 1307 bp, Muscodor strobelii
  misc_feature: SGI EST ID NO. CUFF.29810.0
  misc_feature: Variant of the nucleotide sequence at SEQ ID NO 12577
tatgattcaaatgggctcctctggaatcttgactaccacacaacgacagtagcagtgcgtacaaactacacaggccaggttcccggatggggttccaacaataactcccttgtagcggccacaatcggaactatactgtccggagacgaaacaacatatgttctctcaactgagtccttagacgatattaccagtctagtgaatattgatggctcgctgtctgttcaatgtccaagtggtcctgcttcagctcttgcctgtattgtattcgccttctacaaccagcgcaccggagagcaagaggtgtacagcacacaagatgcaccgacaaatgtaccacaatcaccaatcaccaacttcaaagaaaatggctcctgggttgtcgaccattggtctgaggcgggagcccaggtcttcgttgacttctgggagagcaccttgttagacgggccaacacctgacttactgaaggaagtcggcaactatctttgggaggacagccaggagttcgagtttggggtccgtccgtggacgccgttgttgccaatgacgttctcagccaaccgtggttacgacatccaaaagtatcttccgcttgttctgaaccctttgcaatctcgagagccaagtaaatttgtgacggacgaagccgattcaggcgccagctacattcatgactatcggcaaacgctcgctgagctcaatcaaatttacttgaacaagctggcaacttgggctcagagtttgggcgttcaattttctgcgcaagtggtttacaatcttcaaatggacatgctcgctaacgtgccccatgtcaatgcccctgaatgcgagacgcttgcatttggtgacaatattgatggctatcgacaatatgcaggacctgcaaatctcgcaggaaagcgcgttgtttctagcgaggccggggcggaatacatggtgacataccaacaaacaataccggacatgatgtatcgacagaaacgatcattagctgctgcggtgaatcagttcgtattgcacggtatgccgttttctggcaattacggcaatactacttggccgggctggacaccctttgattacaagtattctgagcctcagggccggcggcaacctagctgggacttttacccagattggctcgattggttgtctcgtactcagttcatcatgcaaagtggacggcctcagatagatctcgcattttggttgaagaaggacgactatgtatctattcagacagcatacgcccccgatgatctacgtgcggcgggtacgttactgatagaattattcatcactcg

SEQ ID NO: 12580 - DNA, 1068 bp, Muscodor strobelii
  misc_feature: SGI cDNA ID NO. 564090
  misc_feature: Encodes the peptide sequence at SEQ ID NO 12581
atgctcaagcccagctttgataagaaacacatatgcgacctgagcgtattgtcacgagaggtagacaaactactgcaacgactgccttcaaacggactcacggttgatattcaaccattactatttgacgtgtttctcaacgcttcgctctatttcttactcggcatttcattagatgatactgttattaggaatcgaccgccctgcacgaccagcgagtttttgaagtctttccacgatggattgttccagactgggctcagattagccctcgggcgaacctcgtggcttctgccacaaagcaagctccactatgaccgcgagacaacccacaagttcatcgagtactatattgacttgtcaagaaatcaatccagagacgatagtaagaaccaaaggcacaacctcatacagagtttatcctcctcgacaatggacatgaagttcatttcaagccaaatcttacagggaatgattgcgtcacaagaaacaatctcagcactgctggggaatactttctttctactagcccggcatccagggtactgggaacaaatccggcacgaggtactgaataagggcgaacaaagcctcactttcgacacgcttcaagaatccaagcttctggtcaatatactttccgaatcactacgtctatacccagtgatccctgttcaaggccgtgtcgctctttgtgacacttatcttcctgtaggtgataatcaaacacagaaccaatctgtctttatatcaaaaggaacgatcgttcgctcgtccttctacgcattgcatcatgacgttcaaattttcggtgaagatgtaaacacatttcgtccggagcgttggaacaacatttgtccaggttcgtggaacttcatggctttcggcggaggcgaaagagcatgtcttgggcgccagaagagcttaattgaggcatcatttgtactcgcaaaaatggcactaaagtttccaactttagagagcagggacggcaaagaatggaagggcaagatgaagctcacatgccagaatgtaaatggatgtaaagtcacctttagtggtacttaa

SEQ ID NO: 12581 - protein, 355 aa, Muscodor strobelii
  misc_feature: SGI Peptide ID NO. 564090
  misc_feature (2)..(352): Pfam Id: PF00067 Pfam Desc: Cytochrome P450
  misc_feature (109)..(306): Pfam Id: PF00067 Pfam Desc: Cytochrome P450
  misc_feature (1)..(351): NCBI GI: 156054506 Blast Desc: SS1G_06101 [Sclerotinia sclerotiorum 1980] gi|154703881|gb|EDO03620.1| SS1G_06101 [Sclerotinia sclerotiorum 1980]
  misc_feature (1)..(352): NCBI GI: 154309945 Blast Desc: BC1G_06893 [Botryotinia fuckeliana B05.10] gi|150851681|gb|EDN26874.1| BC1G_06893 [Botryotinia fuckeliana B05.10]
  misc_feature (1)..(352): NCBI GI: 212539338 Blast Desc: N-alkane-inducible cytochrome P450, [Penicillium marneffei ATCC 18224] gi|210067123|gb|EEA21215.1| N-alkane-inducible cytochrome P450, [Penicillium marneffei ATCC
  misc_feature (1)..(352): NCBI GI: 156039263 Blast Desc: SS1G_11768 [Sclerotinia sclerotiorum 1980] gi|154697505|gb|EDN97243.1| SS1G_11768 [Sclerotinia sclerotiorum 1980]
  misc_feature (1)..(352): NCBI GI: 119497443 Blast Desc: cytochrome P450 alkane hydroxylase, [Neosartorya fischeri NRRL 181] gi|119413642|gb|EAW23583.1| cytochrome P450 alkane hydroxylase, [Neosartorya fischeri NRRL 181]
  misc_feature (1)..(352): NCBI GI: 159130401 Blast Desc: cytochrome P450 alkane hydroxylase, [Aspergillus fumigatus A1163]
  misc_feature (1)..(352): NCBI GI: 70990140 Blast Desc: cytochrome P450 alkane hydroxylase [Aspergillus fumigatus Af293] gi|66847551|gb|EAL87881.1| cytochrome P450 alkane hydroxylase, [Aspergillus fumigatus Af293]
  misc_feature (1)..(352): NCBI GI: 225556140 Blast Desc: N-alkane-inducible cytochrome P450 [Ajellomyces capsulatus G186AR]
  misc_feature (1)..(352): NCBI GI: 238499147 Blast Desc: cytochrome P450 alkane hydroxylase, [Aspergillus flavus NRRL3357] gi|220692561|gb|EED48907.1| cytochrome P450 alkane hydroxylase, [Aspergillus flavus NRRL3357]
  misc_feature (1)..(352): NCBI GI: 169778468 Blast Desc: [Aspergillus oryzae RIB40] gi|83772437|dbj|BAE62566.1| protein product [Aspergillus oryzae]
  misc_feature (140)..(343): SWISSPROT Homolog: EC 1.6.2.4 NADPH--hemoprotein reductase
  misc_feature (140)..(343): SWISSPROT Homolog: EC 1.14.14.1 Unspecific monooxygenase
MLKPSFDKKHICDLSVLSREVDKLLQRLPSNGLTVDIQPLLFDVFLNASLYFLLGISLDDTVIRNRPPCTTSEFLKSFHDGLFQTGLRLALGRTSWLLPQSKLHYDRETTHKFIEYYIDLSRNQSRDDSKNQRHNLIQSLSSSTMDMKFISSQILQGMIASQETISALLGNTFFLLARHPGYWEQIRHEVLNKGEQSLTFDTLQESKLLVNILSESLRLYPVIPVQGRVALCDTYLPVGDNQTQNQSVFISKGTIVRSSFYALHHDVQIFGEDVNTFRPERWNNICPGSWNFMAFGGGERACLGRQKSLIEASFVLAKMALKFPTLESRDGKEWKGKMKLTCQNVNGCKVTFSGT

SEQ ID NO: 12582 - DNA, 936 bp, Muscodor strobelii
  misc_feature: SGI cDNA ID NO. 564091
  misc_feature: Encodes the peptide sequence at SEQ ID NO 12583
atgaagctccacaagacttgctcagatcaactcaaagagaacgacgtgcgcatgttgaagtcgaagatacagaagttacgattcggcgcctcgtatgcggcatctacgatatcgtcttcactgaaagcgaagatcaaaccttcagagttgttggctaccggaactccgatcaagtcctccaatgccatcactagtaatggccgactcgattcagctagcagctggctacctacacatcctacctacagcgatctagatcagggagctcaattccagcaggataaaccaatgaagagtactggtgcggcaaaatacaccctcgagcgggaatcgcgcctgaacgacgacgtcttcttttgggaggcgtctataaatgggcagatcgttcttgaaaaacttcgtcaagcgatgacactggtgcaagaagcattactgccattcatgcgagacgtgggactatacgaagttgaagatggccctcagtttatctgccttggctgggcagaattgaagcagactattggtaccctgccgccgatccagtgccataatatcaatggatatcctgcccacgatgtctggtacgcaatcttctgcatgccagatcttcgtaacatggtctgccaccctggtactgagttaaggtcgccgtccacaatagaacgcagactcaaggacgcccaaagggtcacagtgatgttgggcgatgagaatcgtgcctaccgaattagagccatgagggacgatttgaggcgcaacaccgccgaaagccacatgattttggaaaacctgacacatttcgcaccgatgcctttcttcgaggcattcgacgttgccccacatgacaaaggtgcaattttggcccactggcatgtcagcggaggcagtctggtagatgttggacgcaagttttttgactacggatactttcaatga

SEQ ID NO: 12583 - protein, 311 aa, Muscodor strobelii
  misc_feature: SGI Peptide ID NO. 564091
MKLHKTCSDQLKENDVRMLKSKIQKLRFGASYAASTISSSLKAKIKPSELLATGTPIKSSNAITSNGRLDSASSWLPTHPTYSDLDQGAQFQQDKPMKSTGAAKYTLERESRLNDDVFFWEASINGQIVLEKLRQAMTLVQEALLPFMRDVGLYEVEDGPQFICLGWAELKQTIGTLPPIQCHNINGYPAHDVWYAIFCMPDLRNMVCHPGTELRSPSTIERRLKDAQRVTVMLGDENRAYRIRAMRDDLRRNTAESHMILENLTHFAPMPFFEAFDVAPHDKGAILAHWHVSGGSLVDVGRKFFDYGYFQ

SEQ ID NO: 12584 - DNA, 3675 bp, Muscodor strobelii
  misc_feature: SGI cDNA ID NO. 564092
  misc_feature: Encodes the peptide sequence at SEQ ID NO 12585
atggatgttactgcgaatgtcatcgccattgtcgatctcgcgtttaaagtcattaagtatatgaacgatgtgaacgagggcgggaaagaacgatcgtcgctacatcaacaggttgtcacggtctatgagctgttgttgagcttgaggtatgactttgagtctcacagcttgtctgaggacagcagttggtcgggcccaatcaagccgttattcaagcccggtggaactattgatcaattgaagagagtgctagaagagattactacaaaaatcgtcattgctccccgtagtattagaggaactgtcaagaaattgaaatggcctttcgacaaggacgaggtgcagaacatactgacccgccttcggctgtcgacagattcgatttcaattgctcttggccgggcaaatctgcaagtgggcatcgacacaaatcaggatgttaaaaccgttcgacacgcgattgaatccgccgaactggaaacagcgataaaatggatttcgcctctggatttcagggagatgcaaaaagcggctcagagaaggcccctcgacggaactttgctggcaaccgcgttattccagagattattggggactcacgctaatgagaatgttgctatcctcattgcgtactgctcatttgacgacgcaaatacccactcagtaccaaatatcatttcaagcttgcttagacaggtggtcgaaaaacgaggtcacatgtcagagagtgtccgtaaactatacaaagagcatacatcgggagatcacggtcgaccaacgcaagaaaggctgagttcaacactgtccgaggaactggcgacttttgacacggcattcgtcatcttggacgggctcgatgaacttcgcgacaacaaggcaaaaatcgaactgcttcgagctatcgagagtcttcagccattacctcaactactcgtgacctctcggcccgtagaggctatttcaaaatggttcaaggagtcagctagcgaagaccgatatcgagttcggtcgatattcggtgaggaagaatactctcgttattattgcgacaattgtgacgagcgagaggaaagcagtgagtcggagaatgagaaaattgcggcagacttcgaaattattgaagccgacgagggggatgtcgattggaatggaggccacgcaaagccaacatcacctgcttcatatcattgcgtcaattgtgagcgagacgtttgcatcgactgtcacgaccgtttcgatagatgttttggctgtaatggcttgaagaatgagtgctttcaatgggcgtggcctggcaccgtcaccatcgccgccgatcttgaggatctcgagcggtatatactctggcgtatcgacaataatgataatcttagagctttgctggagaatgcccgagcccaagcgttcggattggcagacaccatcgtgcagcgtgtccaggaagagtcacacaagatgttcttactggcaaagtttcacatgaacgcgctcgaagagcaggtcacagcgcgagacttaatcaatgcactcgacaccctgccttcgaacatcaatgacatctatagcagtgtattcagccgaattagcagccagagactggcagcaacactcgagaaactgttgattatcgtcgcgacggcacagatgttgctcccggctgaggcccttgctcatgcgatcactgtagaggctggcgatagcgacattgatgagcttgcactcccggacgtgcgacatctagcttccatgtgcgcagggttaatcgagatagatagcacaggctcagtaagacttgcgcacgaaacgataggtggctatatcgcccaaactggccttaaaagctcgaagagcgggcacggaattcttgctgaaatttgtcttgcgtatctgcagttctcagctttctcgaccggcgcttgtgacggtcctgtgcgtgagacgctgcttgaagagcggcaacaacggtaccctctcgtgagatatgccgcaatatactggggaacgcacgttcgacacgcgcatacacatctgccagaatttctcaagacagatgttttgagccagctgacgcaggatttcctatccaagaaggggcacgtcgcagccgccactcagcttatgtggctagatgaactcgaagcatcctccggctgggatgcggaagagggtgtcgacggtccgcacttgagcgctcatttcggtctcacagcagcgacatcggctttccttgctacaggttccgatgtcgacgtagaagattgcctctcaactacgccgttgatgtacgcagcgcaagctggccatgcagagattgcacacatactcctgcattctggagctgaccctagtcgcatttgtcgcagaggccgcactgcactgcacagggctgttggaatgaatgacctggccgttgtcaaggaaatcatcgcttctcccaaagacattgcagtaaacgcttttgatagaggctcatatgcttctacagctctcatgtgggcaacggcggaggggaatgatgagattgtaaagctcttattgacgcgagacgatatcaacgtcaatctgaggataccgaacactcaccagtcaaatgcattgcattgggcagtaatcgacggccagcttggcgttgcagagcttctccttgctgataaccgtatcgaaattgaaactgcggattcttctcgcaaaacagcccttatgtttaaggacttcctaggacgtggaattcttcacggctgtgcgatcaatgcccgcagcacaatcatgcgctatctcttgaagactctcccagatcttgatgcgaatatgcaaggcgacagtggcgagacacctcttcatgatgccgtgacgcgcgattccgaagctactgttcgcgttttacttgaacatggggcacgaacagatatcgaaaacaagcatggaaagacaccattgcgaatggctcgtgatggggatcgagaaaggctgtttgacttgttgagaaatgctagaatgaaagaaatggatcataatgattcgcaatctcagcttgtttcaggcgacggcgacggcgatactgttgcacacccaaagcgcgccgacactttggctgtcgactacaaattgtcaattgaaagtgctgtgcgaaaacttagcactaaagacttaaagtctcatctggccgagatggatccgagaacggcctctgaagccattaaggacacaacaggggcgcttccacacctagctgtgcgatacggacgtgcggataacttggaactactgctggatatgggcgctgatattcatggaagggacgagtggggattcacacccctccatgccgccatagacttcgaaaaatacgcagtagccgagctactattagaccgaggctgcgatataaacgctcgagatttgttgagccggacaccgctgacattttgcacatcccaagaactcaagcctgcattcgccttcttgctattgaagcgaggagccacctttgatgtttctgaacgagacggcttggtaccaacgctgagatatgccgtggaatgcgatgagccaaacgagcaggctatgaacagattgctcaatatttatatgaacaagctcgtcaagaaaaatcaagaccgaaagacgtctcaaccaaccaaacagaagatcacgtacgtcctcagactactgtaa

SEQ ID NO: 12585 - protein, 1224 aa, Muscodor strobelii
  misc_feature: SGI Peptide ID NO. 564092
  misc_feature (1102)..(1134): Pfam Id: PF00023 Pfam Desc: Ankyrin repeat
  misc_feature (941)..(973): Pfam Id: PF00023 Pfam Desc: Ankyrin repeat
  misc_feature (755)..(787): Pfam Id: PF00023 Pfam Desc: Ankyrin repeat
  misc_feature (758)..(787): Pfam Id: PF00023 Pfam Desc: Ankyrin repeat
  misc_feature (788)..(822): Pfam Id: PF00023 Pfam Desc: Ankyrin repeat
  misc_feature (1075)..(1101): Pfam Id: PF00023 Pfam Desc: Ankyrin repeat
  misc_feature (18)..(1168): NCBI GI: 169623267 Blast Desc: SNOG_14870 [Phaeosphaeria nodorum SN15] gi|111056602|gb|EAT77722.1| SNOG_14870 [Phaeosphaeria nodorum SN15]
  misc_feature (1)..(1163): NCBI GI: 242812881 Blast Desc: ankyrin, [Talaromyces stipitatus ATCC 10500] gi|218714390|gb|EED13813.1| ankyrin, [Talaromyces stipitatus ATCC 10500]
  misc_feature (1)..(1163): NCBI GI: 67904032 Blast Desc: AN9003.2 [Aspergillus nidulans FGSC A4] gi|40745179|gb|EAA64335.1| AN9003.2 [Aspergillus nidulans FGSC A4] gi|259486546|tpe|CBF84480.1| TPA: conserved [Aspergillus FGSC
  misc_feature (15)..(1161): NCBI GI: 212544586 Blast Desc: ankyrin repeat-containing protein, [Penicillium marneffei ATCC 18224] gi|210065416|gb|EEA19510.1| ankyrin repeat-containing protein, [Penicillium marneffei ATCC 18224]
  misc_feature (486)..(1184): NCBI GI: 238508580 Blast Desc: Pfs, NACHT and Ankyrin domain protein [Aspergillus flavus NRRL3357] gi|220688371|gb|EED44724.1| Pfs, NACHT and Ankyrin domain protein [Aspergillus flavus NRRL3357]
  misc_feature (462)..(1178): NCBI GI: 258572672 Blast Desc: conserved [Uncinocarpus reesii 1704] gi|237905368|gb|EEP79769.1| conserved [Uncinocarpus reesii 1704]
  misc_feature (434)..(1206): NCBI GI: 242804770 Blast Desc: tankyrase, [Talaromyces stipitatus ATCC 10500] gi|218717788|gb|EED17209.1| tankyrase, [Talaromyces stipitatus ATCC 10500]
  misc_feature (469)..(1173): NCBI GI: 212528994 Blast Desc: Pfs, NACHT and Ankyrin domain protein [Penicillium marneffei ATCC 18224] gi|210074052|gb|EEA28139.1| Pfs, NACHT and Ankyrin domain protein [Penicillium marneffei ATCC 18224]
  misc_feature (424)..(1189): NCBI GI: 169782465 Blast Desc: [Aspergillus oryzae RIB40] gi|83774438|dbj|BAE64562.1| protein product [Aspergillus oryzae]
  misc_feature (424)..(1189): NCBI GI: 238500846 Blast Desc: Pfs, NACHT and Ankyrin domain protein [Aspergillus flavus NRRL3357] gi|220691894|gb|EED48241.1| Pfs, NACHT and Ankyrin domain protein [Aspergillus flavus NRRL3357]
MDVTANVIAIVDLAFKVIKYMNDVNEGGKERSSLHQQVVTVYELLLSLRYDFESHSLSEDSSWSGPIKPLFKPGGTIDQLKRVLEEITTKIVIAPRSIRGTVKKLKWPFDKDEVQNILTRLRLSTDSISIALGRANLQVGIDTNQDVKTVRHAIESAELETAIKWISPLDFREMQKAAQRRPLDGTLLATALFQRLLGTHANENVAILIAYCSFDDANTHSVPNIISSLLRQVVEKRGHMSESVRKLYKEHTSGDHGRPTQERLSSTLSEELATFDTAFVILDGLDELRDNKAKIELLRAIESLQPLPQLLVTSRPVEAISKWFKESASEDRYRVRSIFGEEEYSRYYCDNCDEREESSESENEKIAADFEIIEADEGDVDWNGGHAKPTSPASYHCVNCERDVCIDCHDRFDRCFGCNGLKNECFQWAWPGTVTIAADLEDLERYILWRIDNNDNLRALLENARAQAFGLADTIVQRVQEESHKMFLLAKFHMNALEEQVTARDLINALDTLPSNINDIYSSVFSRISSQRLAATLEKLLIIVATAQMLLPAEALAHAITVEAGDSDIDELALPDVRHLASMCAGLIEIDSTGSVRLAHETIGGYIAQTGLKSSKSGHGILAEICLAYLQFSAFSTGACDGPVRETLLEERQQRYPLVRYAAIYWGTHVRHAHTHLPEFLKTDVLSQLTQDFLSKKGHVAAATQLMWLDELEASSGWDAEEGVDGPHLSAHFGLTAATSAFLATGSDVDVEDCLSTTPLMYAAQAGHAEIAHILLHSGADPSRICRRGRTALHRAVGMNDLAVVKEIIASPKDIAVNAFDRGSYASTALMWATAEGNDEIVKLLLTRDDINVNLRIPNTHQSNALHWAVIDGQLGVAELLLADNRIEIETADSSRKTALMFKDFLGRGILHGCAINARSTIMRYLLKTLPDLDANMQGDSGETPLHDAVTRDSEATVRVLLEHGARTDIENKHGKTPLRMARDGDRERLFDLLRNARMKEMDHNDSQSQLVSGDGDGDTVAHPKRADTLAVDYKLSIESAVRKLSTKDLKSHLAEMDPRTASEAIKDTTGALPHLAVRYGRADNLELLLDMGADIHGRDEWGFTPLHAAIDFEKYAVAELLLDRGCDINARDLLSRTPLTFCTSQELKPAFAFLLLKRGATFDVSERDGLVPTLRYAVECDEPNEQAMNRLLNIYMNKLVKKNQDRKTSQPTKQKITYVLRLL

SEQ ID NO: 12586 - DNA, 381 bp, Muscodor strobelii
  misc_feature: SGI cDNA ID NO. 564093
  misc_feature: Encodes the peptide sequence at SEQ ID NO 12587
atgcacgtaggtctcaagtccagcgccgcaggaccagactcagttcaaaagatattcggcacaccagaagccatccacgccaagacggaatccgatatcgcacgcgcgaacgcaaacggatatcaagttgaccacacatcccttgacccaggagccattgaagagagtatggctgtcttgaagaaggacttgcgatcgcagagttacgacggcgtggtagttggtgccggtttgcggatgttgccggagtatctccctctgttggagagcgttgtcaacactacaagaagggcatcgccggatgcttatatcatgttcgctccgggtgttggaaccacttacgaatgcattgaaagggtatttggtgtcaagattccctga

SEQ ID NO: 12587 - protein, 126 aa, Muscodor strobelii
  misc_feature: SGI Peptide ID NO. 564093
  misc_feature (23)..(106): NCBI GI: 220920584 Blast Desc: Mnod_0544 [Methylobacterium nodulans ORS 2060] gi|219945190|gb|ACL55582.1| conserved [Methylobacterium nodulans ORS 2060]
  misc_feature (23)..(106): NCBI GI: 13470515 Blast Desc: mlr0242 [Mesorhizobium loti MAFF303099] gi|14021257|dbj|BAB47870.1| mlr0242 [Mesorhizobium loti MAFF303099]
  misc_feature (21)..(119): NCBI GI: 27375194 Blast Desc: bll0083 [Bradyrhizobium japonicum USDA 110] gi|27348330|dbj|BAC45348.1| bll0083 [Bradyrhizobium japonicum USDA 110]
  misc_feature (10)..(121): NCBI GI: 108798515 Blast Desc: Mmcs_1545 [Mycobacterium sp. MCS] gi|119867615|ref|YP_937567.1| Mkms_1568 [Mycobacterium sp. KMS] gi|108768934|gb|ABG07656.1| conserved [Mycobacterium sp. MCS] sp.
  misc_feature (10)..(121): NCBI GI: 126434115 Blast Desc: Mjls_1516 [Mycobacterium sp. JLS] gi|126233915|gb|ABN97315.1| conserved [Mycobacterium sp. JLS]
  misc_feature (24)..(119): NCBI GI: 256677452 Blast Desc: SSPB78_14053 [Streptomyces sp. SPB78]
  misc_feature (21)..(119): NCBI GI: 255531669 Blast Desc: Phep_1770 [Pedobacter heparinus DSM 2366] gi|255344653|gb|ACU03979.1| conserved [Pedobacter heparinus DSM 2366]
  misc_feature (23)..(121): NCBI GI: 86211722 Blast Desc: [Streptomyces sp. NRRL 30748]
  misc_feature (23)..(121): NCBI GI: 111220337 Blast Desc: FRAAL0866 [Frankia alni ACN14a] gi|111147869|emb|CAJ59534.1| [Frankia alni ACN14a]
MHVGLKSSAAGPDSVQKIFGTPEAIHAKTESDIARANANGYQVDHTSLDPGAIEESMAVLKKDLRSQSYDGVVVGAGLRMLPEYLPLLESVVNTTRRASPDAYIMFAPGVGTTYECIERVFGVKIP

SEQ ID NO: 12588 - DNA, 1611 bp, Muscodor strobelii
  misc_feature: SGI cDNA ID NO. 564094
  misc_feature: Encodes the peptide sequence at SEQ ID NO 12589
atggggatcttttcgcgcaaagcaaaaactccccggccgagcaccaaagctggacttgattctgcaagctttgactcggaacattccaacctcaagagcccgtcggcgcactcgcacgtattcaatctcaaccgcacgagctctggcaatcctcagagtcccttgaccccaatgacgccacacttgcccaaagtcaacctccccaagccccccgacccatcgctcgatgctgccggctacctgaggagcttgggttcggtgcgcgaaaggtccaaaatcgtcaccgaaaaggccctcaagaatcgcctgaaccattttgacgtcgatctcgaaagatttcccgaagttgtttctttcgtttgccgcattatcaagcgcgactacgatgccccattccaatcgattcccggccatggccgatatcagcactttagcgtcgggggccgcgatcggattgcgcatttgctctcgacattctccgacgttgacgaaaccgagaaatgccgccgactgattgatctgtttctggtttccgtacttctcgatgccggcgctggtatgtcatggagcttcaagagcgcggagaatggcagagtctatagacggtctgagggcttggctattgccagtcttgagatgttcaaatctggcattttctccggtaacccaagcaataaataccaagtcgacaaagacggcctccaaaaattgaccgttgagcatttggccaagggattgcaatcacggccaggcaatgaagttgcaggattggacggtcgcgcacagctcctgatacgccttgggcatgcattggctgagaagtcagatttcttcggcgagactggccggccaggaaacatgatagactatcttcttgcccacccgacaacccaagcctcctctacccccgttgtcgtgcttccagtgctatggaacgtgctcatgtcgggtctagcaacggtctggcctgcgtcaaggactgcgattgacggtgtttcgctcggtgatgcttggccttgctcctctatgcctcagatacaacagaatccatcatcacgaaactcgacctcaccgactttttctcctttccccaataattcaacgcctgccacagcggcatgggaatcgattctacccttccacaagcttacgcaatggcttacgtattcgcttatgcaaccgatgcagagcatcctgaaagtccagttcgcgggtaccgagcttctgacaggactgccggaataccgcaatggtgggctgttcgtcgacatgggtgtcttgacgttaaagccacaagacaatgagcgtggcttgcagaactatagtgactggtgccgacggaccggcacaaagggccacgaggttgcgcctatgtttgagcctagcgacgatgtcatcgttgaatggcgcggcgttactgtcggcttcttagataagctgtgtgcggacgttaatgttgcactgagggcagatctgaacgggaatgagttgacattagcccagcttctcgaagcaggcagctggaagggtggtcgtgagatcgcggaggtcagccgacctaatacgaaggaaccgccgatcctcatcgactcggatggtaccgtgttctaa

SEQ ID NO: 12589 - protein, 536 aa, Muscodor strobelii
  misc_feature: SGI Peptide ID NO. 564094
  misc_feature (79)..(536): Pfam Id: PF07958 Pfam Desc: Domain of function (DUF1688)
  misc_feature (1)..(536): NCBI GI: 171693091 Blast Desc: protein product [Podospora anserina] gi|170946494|emb|CAP73295.1| protein product [Podospora anserina]
  misc_feature (48)..(536): NCBI GI: 85103804 Blast Desc: NCU01240 [Neurospora crassa OR74A] gi|16944478|emb|CAC28651.2| conserved [Neurospora crassa] gi|28923153|gb|EAA32370.1| NCU01240 [Neurospora crassa OR74A]
  misc_feature (46)..(536): NCBI GI: 145602470 Blast Desc: MGG_12973 [Magnaporthe grisea 70-15] gi|145010888|gb|EDJ95544.1| MGG_12973 [Magnaporthe grisea 70-15]
  misc_feature (1)..(536): NCBI GI: 46122967 Blast Desc: FG05861.1 [Gibberella zeae PH-1]
  misc_feature (55)..(536): NCBI GI: 116198995 Blast Desc: CHGG_07653 [Chaetomium globosum CBS 148.51] gi|88178932|gb|EAQ86400.1| CHGG_07653 [Chaetomium globosum CBS 148.51]
  misc_feature (1)..(536): NCBI GI: 189209938 Blast Desc: PTRG_10970 [Pyrenophora tritici-repentis Pt-1C-BFP] gi|187977394|gb|EDU44020.1| PTRG_10970 [Pyrenophora tritici-repentis Pt-1C-BFP]
  misc_feature (1)..(536): NCBI GI: 225683478 Blast Desc: urg3 [Paracoccidioides brasiliensis Pb03]
  misc_feature (1)..(536): NCBI GI: 212535368 Blast Desc: conserved fungal protein [Penicillium marneffei ATCC 18224] gi|210070239|gb|EEA24329.1| conserved fungal protein [Penicillium marneffei ATCC 18224]
  misc_feature (1)..(536): NCBI GI: 226277571 Blast Desc: conserved [Paracoccidioides brasiliensis Pb01]
  misc_feature (62)..(536): NCBI GI: 169615903 Blast Desc: SNOG_11118 [Phaeosphaeria nodorum SN15] gi|160703070|gb|EAT81617.2| SNOG_11118 [Phaeosphaeria nodorum SN15]
MGIFSRKAKTPRPSTKAGLDSASFDSEHSNLKSPSAHSHVFNLNRTSSGNPQSPLTPMTPHLPKVNLPKPPDPSLDAAGYLRSLGSVRERSKIVTEKALKNRLNHFDVDLERFPEVVSFVCRIIKRDYDAPFQSIPGHGRYQHFSVGGRDRIAHLLSTFSDVDETEKCRRLIDLFLVSVLLDAGAGMSWSFKSAENGRVYRRSEGLAIASLEMFKSGIFSGNPSNKYQVDKDGLQKLTVEHLAKGLQSRPGNEVAGLDGRAQLLIRLGHALAEKSDFFGETGRPGNMIDYLLAHPTTQASSTPVVVLPVLWNVLMSGLATVWPASRTAIDGVSLGDAWPCSSMPQIQQNPSSRNSTSPTFSPFPNNSTPATAAWESILPFHKLTQWLTYSLMQPMQSILKVQFAGTELLTGLPEYRNGGLFVDMGVLTLKPQDNERGLQNYSDWCRRTGTKGHEVAPMFEPSDDVIVEWRGVTVGFLDKLCADVNVALRADLNGNELTLAQLLEAGSWKGGREIAEVSRPNTKEPPILIDSDGTVF

SEQ ID NO: 12590 - DNA, 4694 bp, Muscodor strobelii
  misc_feature: SGI EST ID NO. CUFF.30045.0
  misc_feature: Variant of the nucleotide sequence at SEQ ID NO 12588
gcaaaaaaaaaggatacttcgtaagccgtgatggcgatcgcagactgacatgatcaatgaagaggaagagattgcctgattcgaccaattcgaaagaggtgagatgttcctgattcgtgggatggcgcaatacgggtagatgtgtttaattacccattgcgggggagcgacgatgcgaagcaattggaagcagagttcgtcgtgctgcgccggtcgaatacattatcaagtagtaaccctgctcgactcgctcaagtctccagtgtacctcggtcaacgaagacctcacatctgatgattcttcgtcatgtcagctaacaagcatggattatcatttactattgcccgtagttgcaaggttgacaagcgggtacttgtttctaggacgcaagtagacagcatcgggagttgtaaaagtgaagcgggcgaggcttcaagacgacttcttttcaataactccgacagattggattctgacaagtctggaaccccgctaagcagcaggaccccctggaatcaagacgacgacgactccacaatctatcgaattctcgccaaagtgcattgtcaccttggaccttgccccatatccagttcaccctggttcgagctcgcttttgggtttttatctctcatctcactccaacaaactgcaaccttggggatttctgtattactctttacacaattgatctttcgtggatcagttctgattatagccaacagcctaagattcctgcggaaggactcttcgatacgactggttttgtcacgggttcgtgggtgagctctacatataccagtgaatccagcccacagtgggtttgagtcggataaggatcaaaaaatcccttgttccttgcatacttgctataccgcattctctcacctgtcctttgctaccgcgaagaacgattcgtctcagtctgcccgccgagcccgccttattaggtgcatactggtgcttgtcaatagccgcaaaaattactacgaggggacgactacggaggggagtcgcgcaggaatcgaccacagctatccctagcccgctctagtagatccgagcgagtctgtgtgtagtctcggtccggtctggttccttgcgggttcgaagactgggcgaggagtgcttcgactagtgcagcatctctgccaactggtgtctggccattcgaccattcaacgacacgaccgtccatacatacgttgtctcctccacccggcatcaattccaagacattccactcgtggtcttctccttcctgcattccagtcgctcgttgtttgtcgctgcttattgctgggtcctccgtttgtcggtcgtccagtcaagaaccagagtacagatcccttaaatcggtcggtcgcggccgtgataccacaaaaaccataaaagccatggggatcttttcgcgcaaagcaaaaactccccggccgagcaccaaagctggacttgattctgcaagctttgactcggaacattccaacctcaagagcccgtcggcgcactcgcacgtattcaatctcaaccgcacgagctctggcaatcctcagagtcccttgaccccaatgacgccacacttgcccaaagtcaacctccccaagccccccgacccatcgctcgatgctgccggctacctgaggagcttgggttcggtgcgcgaaaggtccaaaatcgtcaccgaaaaggccctcaagaatcgcctgaaccattttgacgtcgatctcgaaagatttcccgaagttgtttctttcgtttgccgcattatcaagcgcgactacgatgccccattccaatcgattcccggccatggccgatatcagcactttagcgtcgggggccgcgatcggattgcgcatttgctctcgacattctccgacgttgacgaaaccgagaaatgccgccgactgattgatctgtttctggtttccgtacttctcgatgccggcgctggtatgtcatggagcttcaagagcgcggagaatggcagagtctatagacggtctgagggcttggctattgccagtcttgagatgttcaaatctggcattttctccggtaacccaagcaataaataccaagtcgacaaagacggcctccaaaaattgaccgttgagcatttggccaagggattgcaatcacggccaggcaatgaagttgcaggattggacggtcgcgcacagctcctgatacgccttgggcatgcattggctgagaagtcagatttcttcggcgagactggccggccaggaaacatgataggtataccatccatctatgacatgactatgctgcgaaaactgcacgtgaatgctaagaatgccatacttgcagactatcttcttgcccacccgacaacccaagcctcctctacccccgttgtcgtgcttccagtgctatggaacgtgctcatgtcgggtctagcaacggtctggcctgcgtcaaggactgcgattgacggtgtttcgctcggtgatgcttggccttgctcctctatgcctcagatacaacagaatccatcatcacgaaactcgacctcaccgactttttctcctttccccaataattcaacgcctgccacagcggcatgggaatcgattctacccttccacaagcttacgcaatggcttacgtattcgcttatgcaaccgatgcagagcatcctgaaagtccagttcgcgggtaccgagcttctgacaggactgccggaataccgcaatggtgggctgttcgtcgacatgggtgtcttgacgttaaagccacaagacaatgagcgtggcttgcagaactatagtgactggtgccgacggaccggcacaaagggccacgaggttgcgcctatgtttgagcctagcgacgatgtcatcgttgaatggcgcggcgttactgtcggcttcttagataagctgtgtgcggacgttaatgttgcactgagggcagatctgaacgggaatgagttgacattagcccagcttctcgaagcaggcagctggaagggtggtcgtgagatcgcggaggtcagccgacctaatacgaaggaaccgccgatcctcatcgactcggatggtaccgtgttctaaagtcgccgaaaatagcattaaggagataatagagcgcgagacctcgatcttggagcgatgaggttgcccgatgacaagcggaagcacacatctgtctccctgatgacgcaatgcgcacagtggtgaggcgatagaagctcaagtgaaaaccatcacttcaccaataaatataatgacgtttggaaattgtaaaagtttgtgtgagagatggaaaattgtggctacgtgcatgctgcttgtaatggtgtctctacatcggagaatgcgattgtgtgggcactgctggtattgtgcttgacttaatctctgtctagatgttacagtctgtaagttttgagagtcacttggtctgacgaatgtgtggtgataggtttagcttgctgtactttgcaaaagtcttggaatgagtcaccagcgtgcttgagggttggttatatgagttgaagatgtgcattcacgatgttgtctggactgtcatttagtctcttatgcgatttgaatacggcttttccgataccgcatcccgtggtcatggggctgaaaacggagatatgtcgagttgatctgggggtttttttattgctacgatgttcagggaatcttgacaccaaataccctttcaatgcattcgtaagtggttccaacacccggagcgaacatgatataagcatccggcgatgcccttcttgtagtgttgacaacgctctccaacagagggagatactccggcaacatccgcaaaccggcaccaactaccacgccgtcgtaactctgcgatcgcaagtccttcttcaagacagccatactctcttcaatggctcctgggtcaagggatgtgtggtcaacttgatatccgtttgcgttcgcgcgtgcgatatcggattccgtcttggcgtggatggcttctggtgtgccgaatatcttttgaactgagtctggtcctgcggcgctggacttgagacctacgtgcatgattcttttggggggttgagacatgtttacaagaggctcgaggtcttgaccattcttatgagggaaaacaaatataatacttggtttagaattccgagggaagcgaaacggagatgttgtggttgactgaaggggttgatgttaatatgcttcgataacgtaagctgatgcagttctttcaagttgcatcgaatctatgtgttcaaagcgggcagcaaagccaatttatcgtcgatacgggtattgctctacattggacgagacgaaagaccattggcttgaatataaactgactttgcgctattgtaatcattagaaatcagaatgtggtggacaacgtgcttacagacgtgactctatggagcactacctatatcgggatggcgatgatgatccatttgagagtactcaaaagaatgattgtggactcaagaggggaggtgtgtatagcactcttgacggaaatattgaggcataagtaacctcatcaccgaatcattagttttgaactgtttcattttggctgggattgtgatgaatgaagcttgggggccgtttcggtcgttagcgaaaatgtgccaaaaatacgatcacccctgtccttcagcttgattggtgacctccacttcagtcttctcagc

SEQ ID NO: 12591 - DNA, 1929 bp, Muscodor strobelii
  misc_feature: SGI cDNA ID NO. 564095
  misc_feature: Encodes the peptide sequence at SEQ ID NO 12592
atgccacactcgaggcagagcctcaccctgaacccgcagcacgagaagagcagcccgcaggcgtcgtcggagtcgcgcaagcacccactcccgtctcccgacctggatgacggatgcagaggagacaggctcgagggcccttttaaacttccgctgtatcccccgccgcccgcctatgcgcaaacccacgatacttcctccaagtcattagcctttgccaatccccaggccagcaccgaacttgcgcccatccagtccgcagctacgagaaatgacgacaggcgccatcatcaccaacatcaccaccagcacaaccacaatcacaatcacaaccaaaacttccaccacaggctaccgtcactatcctccatcactgcagccacaccgtcgcccgcctcgtctgcgtcgccggcgtccacctcgactttcaagtcgcccaattccgcctcagaaccggtctttccaccgcccgctccgccgcccgtgacgcattggccgagtctcaaccccttgactgcatactacgccccgagccatgtgaaagacgcggagccgctacgaatggactacgacacgagtagcaacagtggcgccagcgtcagcagtgtcgcatcccccgagcgctatcatgatgggaccgtcagcagcgtcagtctcgatgatccggacgtgcgcatggccgccgaggccttgggcgatctcagagcagactttgtctattctcccaagagcgacctgagtccgcccccaggatcgccacattccctggccatgagacaacaaccggaaccccttctttccctcatcaccacatcgcatccattcttggcaacgactatcgaaggcgcaacttcggcctacaacaactcgaagaactactctccacgcttcaagtccggtgccgaatatgtcgaaggctacgtcattcccatcgcgaacacggttggttcggtagggcggaggacaggtgtcgagggcagcgtgcgatggctgctcgagcggcgtcgatctcatggcgctggccatgagcccggatcacatttctccaacaagcggaggaaagtccggggtagcgacgagagcttcagggattcatcacctgaacccggttccggcgcgcaaacacccagggcttccgtcgaaaactcacgcgaacgacgactatcttccgctagcaccatcgatacgctgcccgcatatgatgagcttcgcgcgccaccatacgccgagcaacccggtgatgcgggaaacccagcacggaacggtcagacctggccatcgcgcttcattattagtacgtccgggctgagcatcgccatgagcgaagagagtctgcgaagcctcaagttctgccttcgatgtctccggtgggcaaacacacacgtgaatacggtgctcgtcaagatcaaaactacgatggacgagtacgagcagaaacgcagggaggcagcagaaagtggcgaccaccctatggatggggacaccgatcgacagcattttaccaccaagatcggagcacttaaggcagatctcctcaaaacactggagagcgctattttcaccgttggcagatacgctggtggtgcgttgccggagaatgctagggaacttgtcaggtcgcatctcacgagtctgccgcgacgcttccacctcgcgaaccagaagagcgaggcgagcaatatggaagagggcagaggggacggggagcgagagatcaaggagaatgcgcagcttatggtcacattggcaaaagagggcctggacatgatggcacaggtctcggatgtgctcgatggaacgattacgagtgccgaggagtggtgcgagaaactggggaggaggaagagagaagagaagagcgagctgatgagcaattaccagccggccacgaataatccaaccgaagagatgaagacagaatcttcatag

SEQ ID NO: 12592 - protein, 642 aa, Muscodor strobelii
  misc_feature: SGI Peptide ID NO. 564095
  misc_feature (221)..(609): Pfam Id: PF08618 Pfam Desc: Transcription factor Opi1
  misc_feature (221)..(553): Pfam Id: PF08618 Pfam Desc: Transcription factor Opi1
  misc_feature (567)..(609): Pfam Id: PF08618 Pfam Desc: Transcription factor Opi1
  misc_feature (160)..(621): NCBI GI: 256728032 Blast Desc: NECHADRAFT_70841 [Nectria haematococca mpVI 77-13-4]
  misc_feature (185)..(616): NCBI GI: 46130852 Blast Desc: FG08981.1 [Gibberella zeae PH-1]
  misc_feature (216)..(628): NCBI GI: 145616512 Blast Desc: MGG_10632 [Magnaporthe grisea 70-15] gi|145010068|gb|EDJ94724.1| MGG_10632 [Magnaporthe grisea 70-15]
  misc_feature (146)..(619): NCBI GI: 156059538 Blast Desc: SS1G_03781 [Sclerotinia sclerotiorum 1980] gi|154701568|gb|EDO01307.1| SS1G_03781 [Sclerotinia sclerotiorum 1980]
  misc_feature (157)..(618): NCBI GI: 261357907 Blast Desc: conserved [Verticillium albo-atrum VaMs.102]
  misc_feature (116)..(618): NCBI GI: 116200436 Blast Desc: CHGG_10763 [Chaetomium globosum CBS 148.51] gi|88175477|gb|EAQ82945.1| CHGG_10763 [Chaetomium globosum CBS 148.51]
  misc_feature (200)..(620): NCBI GI: 115400195 Blast Desc: conserved [Aspergillus terreus NIH2624] gi|114191352|gb|EAU33052.1| conserved [Aspergillus terreus NIH2624]
  misc_feature (215)..(615): NCBI GI: 261202282 Blast Desc: clock controlled protein [Ajellomyces dermatitidis SLH14081] gi|239590452|gb|EEQ73033.1| clock controlled protein [Ajellomyces dermatitidis SLH14081]
  misc_feature (215)..(615): NCBI GI: 239612168 Blast Desc: clock controlled protein [Ajellomyces dermatitidis ER-3]
  misc_feature (215)..(619): NCBI GI: 121713004 Blast Desc: clock controled protein (Ccg-8), [Aspergillus clavatus NRRL 1] gi|119402266|gb|EAW12687.1| clock controled protein (Ccg-8), [Aspergillus clavatus NRRL 1]
MPHSRQSLTLNPQHEKSSPQASSESRKHPLPSPDLDDGCRGDRLEGPFKLPLYPPPPAYAQTHDTSSKSLAFANPQASTELAPIQSAATRNDDRRHHHQHHHQHNHNHNHNQNFHHRLPSLSSITAATPSPASSASPASTSTFKSPNSASEPVFPPPAPPPVTHWPSLNPLTAYYAPSHVKDAEPLRMDYDTSSNSGASVSSVASPERYHDGTVSSVSLDDPDVRMAAEALGDLRADFVYSPKSDLSPPPGSPHSLAMRQQPEPLLSLITTSHPFLATTIEGATSAYNNSKNYSPRFKSGAEYVEGYVIPIANTVGSVGRRTGVEGSVRWLLERRRSHGAGHEPGSHFSNKRRKVRGSDESFRDSSPEPGSGAQTPRASVENSRERRLSSASTIDTLPAYDELRAPPYAEQPGDAGNPARNGQTWPSRFIISTSGLSIAMSEESLRSLKFCLRCLRWANTHVNTVLVKIKTTMDEYEQKRREAAESGDHPMDGDTDRQHFTTKIGALKADLLKTLESAIFTVGRYAGGALPENARELVRSHLTSLPRRFHLANQKSEASNMEEGRGDGEREIKENAQLMVTLAKEGLDMMAQVSDVLDGTITSAEEWCEKLGRRKREEKSELMSNYQPATNNPTEEMKTESS

SEQ ID NO: 12593 - DNA, 4361 bp, Muscodor strobelii
  misc_feature: SGI EST ID NO. CUFF.29868.0
  misc_feature: Variant of the nucleotide sequence at SEQ ID NO 12591
cgagccggcaagtcaccaaaacaattccgcacttgcgaggcgcttgcccttccgatacccacagcgtcgcaggtcttttccagtcgggaggtttacactgtaccccatcgaggttgaggaggctagggaccctgcagcctctggtgtacagcaatcaacaccatgctctgacaatggtcaaatccagactgttcgccttgtcgcctagtgttgagagcccctggggactgttgcattgagagatgggaataggaaacactgcgtgctgctctcgtccgtgtcctccctccacctcgcaatgagaggcgaagattggagagaagtgaacgcttgcttggatacgacttggttcttttagataaacatatgaaaatgagacatccaaacggcacttgccgctgtgtttttgcttgttagtgaagatgctgcgcaacggaggcgtagcaggcatacacactcattcttgcttcgcatctcatcccctctgattacatgtgatgctgatcgcgctttatccactccgttcatgcttgcttcaacaagttggtccttctcaaactgggactaaggctccagcaccaactcatgctgtcgagactgtagcgtagtccaagcgacagaacccactgtcacgatctatgacaagtctactctgtacagctcaacgggcgattataagatatccacaccttacctcatcacagtcacctgctcgcctccatccacagaaatatccacctcgctatcaattccgaacgaagtagcgatactgaagctcggcagccattagacagcacgagtcaagaggaaacagttgatcggcaccgctaacattgaccggcgcaaaaaagacaattaaccaacggccgttgcactaggtttctcgtaccagccggaaggatagttgagagggtgcatatagcgagcaagagaaaagggcgaatagaattcgactccttgcagccgacattccgtggcgctagacgggtcatcatcgtccaattcgcccaccgcactactcactcatcgcctgggatcaagcagagcggcccagcagaacgccggcgctgtgagagcctgagactcggcgtcacaggtacaacgtcaaggtatccgctcctctgcctgcccccgggtctctctgacatccatcctcgtccccatcgtttcttcttttctattcatatcattgcacacataccggtagacatgcacacgcatccatttacatcagcatctcaattccgccctttcgtttcataacctccccatctcgcattgcattgcgtcggctcatgttttgtttttgttttccaggaatgcaccagtagttcaccagtttatttcgccttattcatcgccgtctgtctgtctgtaccatagcccggcatcttatcaggtcaccagcaaatacatcgtctcgcactctgccgccaaggatgtctctccggatttagagtttgcgacttgtcgcgactacagactggcccagcctctctgtctctctttcgtcagaggaggcgtttctcggcttctcatcgtctgctttattgcattagtgtctgatacgtactggaagtgagaagatataggagcagcgcaatggagcatcatcatcaaccggctcacaatcacatgccacactcgaggcagagcctcaccctgaacccgcagcacgagaagagcagcccgcaggcgtcgtcggagtcgcgcaagcacccactcccgtctcccgacctggatgacggatgcagaggagacaggctcgagggcccttttaaacttccgctgtatcccccgccgcccgcctatgcgcaaacccacgatacttcctccaagtcattagcctttgccaatccccaggccagcaccgaacttgcgcccatccagtccgcagctacgagaaatgacgacaggcgccatcatcaccaacatcaccaccagcacaaccacaatcacaatcacaaccaaaacttccaccacaggctaccgtcactatcctccatcactgcagccacaccgtcgcccgcctcgtctgcgtcgccggcgtccacctcgactttcaagtcgcccaattccgcctcagaaccggtctttccaccgcccgctccgccgcccgtgacgcattggccgagtctcaaccccttgactgcatactacgccccgagccatgtgaaagacgcggagccgctacgaatggactacgacacgagtagcaacagtggcgccagcgtcagcagtgtcgcatcccccgagcgctatcatgatgggaccgtcagcagcgtcagtctcgatgatccggacgtgcgcatggccgccgaggccttgggcgatctcagagcagactttgtctattctcccaagagcgacctgagtccgcccccaggatcgccacattccctggccatgagacaacaaccggaaccccttctttccctcatcaccacatcgcatccattcttggcaacgactatcgaaggcgcaacttcggcctacaacaactcgaagaactactctccacgcttcaagtccggtgccgaatatgtcgaaggctacgtcattcccatcgcgaacacggttggttcggtagggcggaggacaggtgtcgagggcagcgtgcgatggctgctcgagcggcgtcgatctcatggcgctggccatgagcccggatcacatttctccaacaagcggaggaaagtccggggtagcgacgagagcttcagggattcatcacctgaacccggttccggcgcgcaaacacccagggcttccgtcgaaaactcacgcgaacgacgactatcttccgctagcaccatcgatacgctgcccgcatatgatgagcttcgcgcgccaccatacgccgagcaacccggtgatgcgggaaacccagcacggaacggtcagacctggccatcgcgcttcattattagtacgtccgggctgagcatcgccatgagcgaagagagtctgcgaagcctcaagttctgccttcgatgtctccggtgggcaaacacacacgtgaatacggtgctcgtcaagatcaaaactacgatggacgagtacgagcagaaacgcagggaggcagcagaaagtggcgaccaccctatggatggggacaccgatcgacagcattttaccaccaagatcggagcacttaaggcagatctcctcaaaacactggagagcgctattttcaccgttggcagatacgctggtggtgcgttgccggagaatgctagggaacttgtcaggtcgcatctcacgagtctgccgcgacgcttccacctcgcgaaccagaagagcgaggcgagcaatatggaagagggcagaggggacggggagcgagagatcaaggagaatgcgcagcttatggtcacattggcaaaagagggcctggacatgatggcacaggtctcggatgtgctcgatggaacgattacgagtgccgaggagtggtgcgagaaactggggaggaggaagagagaagagaagagcgagctgatgagcaattaccagccggccacgaataatccaaccgaagagatgaagacagaatcttcatagtaggaggaggagcgatccaatttgacggagatggtgaagtatgaagtatgaacctcgatgtggcagaatgcgaaaggctgttcaatttagtcgacgggatccacattcactgcgatggccgtcgaaaccccaatcgaactatcgacctcatcaggacccccgtcacggccgtcgctctgtcgttcctcacactaccaacaacaatgtgtcaacgatccatcgaatctatactctatggacgggcacaatttttttatgttttgtcgcatattgatcgcaactcgctcttcgaacacagtctggcgtgggtgtatatcttcaaggatggtaacggaacggatcaaaatcacactgcgctgcgcggctctgactgcggcataggccggtgtatggcgttatttcgatttgtttgttttatatgtgttgcttaactgcgcagttccgagagggatggggtgagagagaagcgtggggaacgtgagagaaggaggagaggaggagcattgtggatgatgtggttgtagacggcgaaatgtgggagagaaacgtgttctactttgctagctagcttgctggaatggaagagatgggattaagagctctgaatagaagtatgatacttcgtgcaatggactttgatgagtgatatggcgtctgtcgaggtgttcgtcgactccaagcagcatcgatgtcgatttaggtacaatgggaggctttgctgccttggtctcagaaacgttctatgatagcggttaatactgatcaatgaaatgaaatactagttatgtcactgacca

SEQ ID NO: 12594 - DNA, 1341 bp, Muscodor strobelii
  misc_feature: SGI cDNA ID NO. 564096
  misc_feature: Reduced expression when VOC is produced
  misc_feature: Encodes the peptide sequence at SEQ ID NO 12595
atggcttccgccctgttcttcctcgacttgaagggcaagacccttctcgcgagaaactaccgtggcgacatccccatgtccgccgtcgaaaagttccccatcctcctcagcgaagccgaagaggagtcctccgccgtgccgccgtgcttctcccacgaaggcatcaactatctctacatccgacacaacaacctctacctcctcgccctcacgaaacgcaacaccaacgccgccgagatcctgctgtttctgcaccgcgtcgtcgaggtcttcaccgagtacttcaaggccctcgaggaggaatctatccgcgacaactttgtcatcatctacgagctgctcgacgagatgatggacttcggctacccccagaccaccgagtccaagatcctccaggagtacatcacccaggagtcccacaagctcgagatcgcccggccccccatcgccgttaccaacgccgtctcctggcgctccgagggcatccgctaccgcaagaacgaggtctttcttgatgttgtcgagagcctcaacctcctcgtctccgccaacggcagcgtcctgcgctcagagatcctcggtgctatcaagatgaagtgctatttgtccggcatgcctgagctgcggctggggctgaacgacaaggtcatgttcgagacgacggggcggacgacgcgcggcaaggccatcgagatggaggacgtcaagttccaccagtgcgtgcgcctgtcgcgcttcgagaacgacaggaccatctccttcatcccgcccgacggcgagttcgagctcatgtcctaccgcctcaacacccaggtcaagcccctgatctgggtcgagtgcgtcgtcgagagccactcgggctcccgcatcgagtacatgctcaaggcccgcgcccagttcaagcggaggagcaccgccaacaacgtcgagatcgtcgtccccgtccccgacgacgccgactccccccgcttccgcaccaacatcggcagcgtccactacgcccccgagcagagcgccatcgtctggaagatcaagcagtttggcggcggcaaggagttcctcatgcgcgccgagctgggcttgccgagcgtgaggggcgacgacgagcatggaggcggcatgacgggtgggtttggtggcagcatgggcggtgtcagcgcgggcaagggcgccaagaggccgatccaggtcaagtttgagatcccctatttcacaacgagcggtatccaggtgcggtacctcaagatcacagaacccaagctgcaatatccatcacttccctgggttcgatatatcacacagtcgggtgacatcgccgtccggctgccggatgctgtttag

SEQ ID NO: 12595 - protein, 446 aa, Muscodor strobelii
  misc_feature: SGI Peptide ID NO. 564096
  misc_feature (155)..(442): Pfam Id: PF00928 Pfam Desc: Adaptor complexes medium subunit family
  misc_feature (1)..(143): Pfam Id: PF01217 Pfam Desc: Clathrin adaptor complex small chain
  misc_feature (1)..(446): NCBI GI: 171676426 Blast Desc: protein product [Podospora anserina] gi|170936279|emb|CAP60938.1| protein product [Podospora anserina]
  misc_feature (1)..(446): NCBI GI: 164422848 Blast Desc: AP-1 complex subunit mu [Neurospora crassa OR74A] gi|157069847|gb|EAA31384.2| AP-1 complex subunit mu [Neurospora crassa OR74A]
  misc_feature (1)..(446): NCBI GI: 145616510 Blast Desc: conserved [Magnaporthe grisea 70-15] gi|145010067|gb|EDJ94723.1| conserved [Magnaporthe grisea 70-15]
  misc_feature (1)..(446): NCBI GI: 46130854 Blast Desc: FG08982.1 [Gibberella zeae PH-1]
  misc_feature (1)..(446): NCBI GI: 28949965 Blast Desc: clathrin assembly protein AP47 [Neurospora crassa]
  misc_feature (1)..(446): NCBI GI: 78191071 Blast Desc: AP-1 mu subunit [Cryphonectria parasitica]
  misc_feature (1)..(444): NCBI GI: 242792836 Blast Desc: AP-1 adaptor complex subunit mu, [Talaromyces stipitatus ATCC 10500] gi|218718626|gb|EED18046.1| AP-1 adaptor complex subunit mu, [Talaromyces stipitatus ATCC 10500]
  misc_feature (1)..(445): NCBI GI: 70997882 Blast Desc: AP-1 adaptor complex subunit mu [Aspergillus fumigatus Af293] gi|66851309|gb|EAL91635.1| AP-1 adaptor complex subunit mu, [Aspergillus fumigatus Af293] gi|159126594|gb|EDP51710.1| mu,
  misc_feature (1)..(444): NCBI GI: 212535348 Blast Desc: AP-1 adaptor complex subunit mu, [Penicillium marneffei ATCC 18224] gi|210070229|gb|EEA24319.1| AP-1 adaptor complex subunit mu, [Penicillium marneffei ATCC 18224]
  misc_feature (1)..(444): NCBI GI: 240109576 Blast Desc: Adaptor complexes medium subunit family protein [Coccidioides posadasii C735 delta SOWgp]
  misc_feature: Useful for introducing or modulating the production of volatile compounds
MASALFFLDLKGKTLLARNYRGDIPMSAVEKFPILLSEAEEESSAVPPCFSHEGINYLYIRHNNLYLLALTKRNTNAAEILLFLHRVVEVFTEYFKALEEESIRDNFVIIYELLDEMMDFGYPQTTESKILQEYITQESHKLEIARPPIAVTNAVSWRSEGIRYRKNEVFLDVVESLNLLVSANGSVLRSEILGAIKMKCYLSGMPELRLGLNDKVMFETTGRTTRGKAIEMEDVKFHQCVRLSRFENDRTISFIPPDGEFELMSYRLNTQVKPLIWVECVVESHSGSRIEYMLKARAQFKRRSTANNVEIVVPVPDDADSPRFRTNIGSVHYAPEQSAIVWKIKQFGGGKEFLMRAELGLPSVRGDDEHGGGMTGGFGGSMGGVSAGKGAKRPIQVKFEIPYFTTSGIQVRYLKITEPKLQYPSLPWVRYITQSGDIAVRLPDAV

SEQ ID NO: 12596 - DNA, 2265 bp, Muscodor strobelii
  misc_feature: SGI EST ID NO. CUFF.30026.0
  misc_feature: Variant of the nucleotide sequence at SEQ ID NO 12594
cttcggtctatctgcctgtggctttgtcctgtatcctccttaccttccactggcccaatccctgacatgacgtggcttggcaggcccaaggccaaccttccaatcggtccaaggagacagtacagtagcagacaacgtggggtttgggtctaaggattgaaggcaacagaattacatacatagctcgtgcgatatcagctctcaccacgctgccgacatcttttcccgatgactctacacagcaaacgatagacggcagcttctcccatcgcatgcgtacatagacatcgagttcacgagcgggcctcagcgccaattgaccgaccgacattccatcattcccttttggttctccctcctgtctgcagcccgactttacacattcaacatggcttccgccctgttcttcctcgacttgaagggcaagacccttctcgcgagaaactaccgtggcgacatccccatgtccgccgtcgaaaagttccccatcctcctcagcgaagccgaagaggagtcctccgccgtgccgccgtgcttctcccacgaaggcatcaactatctctacatccgacacaacaacctctacctcctcgccctcacgaaacgcaacaccaacgccgccgagatcctgctgtttctgcaccgcgtcgtcgaggtcttcaccgagtacttcaaggccctcgaggaggaatctatccgcgacaactttgtcatcatctacgagctgctcgacgagatgatggacttcggctacccccagaccaccgagtccaagatcctccaggagtacatcacccaggagtcccacaagctcgagatcgcccggccccccatcgccgttaccaacgccgtctcctggcgctccgagggcatccgctaccgcaagaacgaggtctttcttgatgttgtcgagagcctcaacctcctcgtctccgccaacggcagcgtcctgcgctcagagatcctcggtgctatcaagatgaagtgctatttgtccggcatgcctgagctgcggctggggctgaacgacaaggtcatgttcgagacgacggggcggacgacgcgcggcaaggccatcgagatggaggacgtcaagttccaccagtgcgtgcgcctgtcgcgcttcgagaacgacaggaccatctccttcatcccgcccgacggcgagttcgagctcatgtcctaccgcctcaacacccaggtcaagcccctgatctgggtcgagtgcgtcgtcgagagccactcgggctcccgcatcgagtacatgctcaaggcccgcgcccagttcaagcggaggagcaccgccaacaacgtcgagatcgtcgtccccgtccccgacgacgccgactccccccgcttccgcaccaacatcggcagcgtccactacgcccccgagcagagcgccatcgtctggaagatcaagcagtttggcggcggcaaggagttcctcatgcgcgccgagctgggcttgccgagcgtgaggggcgacgacgagcatggaggcggcatgacgggtgggtttggtggcagcatgggcggtgtcagcgcgggcaagggcgccaagaggccgatccaggtcaagtttgagatcccctatttcacaacgagcggtatccaggtgcggtacctcaagatcacagaacccaagctgcaatatccatcacttccctgggttcgatatatcacacagtcgggtgacatcgccgtccggctgccggatgctgtttagggcgggccaccaaaatagatctatagttaataatacgggaggcgtcttcgtcgccgacttggaatatgagagattctcaacagctgcgtgtgatgtatcatccgaccgtcgtgtagcgtggatgagaacaaagaggtgatgggatctagcgtttcatgctactcggccccttttcggggtggatgtcgtcttatgggccttgcttcgaacttatgacagtattacaaaccgcgaaatgtgatggatcgggtaattcgggcgaagcgacgttgatctcgaaagcaggtatgtgttcatttccaagaatattgtattttactgttgcggatgtgactctggcactatcacatttacgtctagttctagatcatgatgtggattctatccgtgtaagtcgtatctcgacatgccatgtatctcctattacttgtcgtcatgccttttcccgcttagatctgcatggttgccgcagctcccaattgctcattatctatcacgatcttggtcatatttccaatcgtcgatccgcctttgcc

SEQ ID NO: 12597 - DNA, 1050 bp, Muscodor strobelii
  misc_feature: SGI cDNA ID NO. 564097
  misc_feature: Encodes the peptide sequence at SEQ ID NO 12598
atgcgtctcatcaacgtcaagaccctcgagctcaaagaattccacgacaaccccccaccctacgccatcctctcccacacctgggaaaaagaagaagtgacgctgcaagaatacgaaaatgccatcagcagagccgctcaggtgcacgggaagctattcgagcgcgcccaactcatcaaagccaaatcaggcttccgcaagatcgtaggggcttgtaaacaagcgactcgtttgcaactggagtggttgtggtgcgatacgaattgtatcgataagacgaatcctactgagctgagcgaggcgataaatagtatgtatgcttggtattataattccaaggtttgcatcgtgtttcttgcggatgttgaggggttggttgatgagagttttcaggagagtcgttggtggacgagaggctggaccctgcaggagttgattgctcccactgaagtccgcttctataactctgggtggaacttcattggggaccggaagagcagggctgatgatatttcgaggattacgaggatccatattgaggccctccatgatcggaatactgttccacgcttctcggtagcccagaggatgtcctgggctgctgacagggttaccagtaggcaagaggacattgcatattgcttgttgggcatattcgacatcaacatgccgctactttatggcgagaaagagaaggctttcctgaggttgcagcatgaaataattaagggatccaacgatcaaagtatcctggcacgggacgaagaggaacccgatggccgacgatgcacgagtgcatttgcatcgaagcctgctaattttcgtggatgtggctcgattatttgcgatgagcgcatcagatctaccgcattttcgttaacaaatactggcttctcgataagccttcctctcatacaaacgcacgtatcgagagctgtctttgcggggcttaattgtgcaagggggctccgagggagcaattcttcatcaaatgaaccactaagcccagagaataggctgcgcatttggatcccctttggaccacaataa

SEQ ID NO: 12598 - protein, 349 aa, Muscodor strobelii
  misc_feature: SGI Peptide ID NO. 564097
  misc_feature (21)..(144): Pfam Id: PF06985 Pfam Desc: Heterokaryon incompatibility protein (HET)
  misc_feature (71)..(120): Pfam Id: PF06985 Pfam Desc: Heterokaryon incompatibility protein (HET)
  misc_feature (128)..(144): Pfam Id: PF06985 Pfam Desc: Heterokaryon incompatibility protein (HET)
  misc_feature (1)..(322): NCBI GI: 121715886 Blast Desc: HET domain protein [Aspergillus clavatus NRRL 1] gi|119403709|gb|EAW14126.1| HET domain protein [Aspergillus clavatus NRRL 1]
  misc_feature (1)..(304): NCBI GI: 256723740 Blast Desc: NECHADRAFT_52245 [Nectria haematococca mpVI 77-13-4]
  misc_feature (1)..(320): NCBI GI: 85092369 Blast Desc: NCU04912 [Neurospora crassa OR74A] gi|28920765|gb|EAA30124.1| [Neurospora crassa OR74A]
  misc_feature (1)..(314): NCBI GI: 46114894 Blast Desc: FG03289.1 [Gibberella zeae PH-1]
  misc_feature (1)..(320): NCBI GI: 171688186 Blast Desc: protein product [Podospora anserina] gi|170944055|emb|CAP70165.1| protein product [Podospora anserina]
  misc_feature (1)..(302): NCBI GI: 256722255 Blast Desc: NECHADRAFT_52327 [Nectria haematococca mpVI 77-13-4]
  misc_feature (1)..(315): NCBI GI: 169623337 Blast Desc: SNOG_14906 [Phaeosphaeria nodorum SN15] gi|160704965|gb|EAT77758.2| SNOG_14906 [Phaeosphaeria nodorum SN15]
  misc_feature (1)..(305): NCBI GI: 261201308 Blast Desc: HET domain-containing protein [Ajellomyces dermatitidis SLH14081] gi|239592113|gb|EEQ74694.1| HET domain-containing protein [Ajellomyces dermatitidis SLH14081]
  misc_feature (1)..(305): NCBI GI: 239611724 Blast Desc: HET domain-containing protein [Ajellomyces dermatitidis ER-3]
  misc_feature (1)..(304): NCBI GI: 169770123 Blast Desc: [Aspergillus oryzae RIB40] gi|83767390|dbj|BAE57529.1| protein product [Aspergillus oryzae]
MRLINVKTLELKEFHDNPPPYAILSHTWEKEEVTLQEYENAISRAAQVHGKLFERAQLIKAKSGFRKIVGACKQATRLQLEWLWCDTNCIDKTNPTELSEAINSMYAWYYNSKVCIVFLADVEGLVDESFQESRWWTRGWTLQELIAPTEVRFYNSGWNFIGDRKSRADDISRITRIHIEALHDRNTVPRFSVAQRMSWAADRVTSRQEDIAYCLLGIFDINMPLLYGEKEKAFLRLQHEIIKGSNDQSILARDEEEPDGRRCTSAFASKPANFRGCGSIICDERIRSTAFSLTNTGFSISLPLIQTHVSRAVFAGLNCARGLRGSNSSSNEPLSPENRLRIWIPFGPQ

SEQ ID NO: 12599 - DNA, 1932 bp, Muscodor strobelii
  misc_feature: SGI cDNA ID NO. 564098
  misc_feature: Encodes the peptide sequence at SEQ ID NO 12600
atggcgtctcaaaaccaggcctcgtcaacgtcttctggcgctgctgctggttataaacgcgccagccggaagggcgcaccgaggaagttcgcttgtgaatggccctcatgcgacaagatctattcgcgtgctgagcatctccagagacatcaactcaaccgtggacatcagactccttcatggggtcaaccaatggatggtgtgaccatgctgcctccgaagtccaacaactactttgcacaagaccagacttcgttacatgaccactcatcgttcatgcctttcgctaatgttcctatgacacatgaccctgatcttgcatcttcttcaaactttgcactatggttgtttgataatcagcgcggttatggagatttcaatgttgccaatatgccattcttagagggcgggctcgagtcatcttttaataataacatccactatgaccacgagtctttgactagcagatcccagattgaccacacgccaccgcaccattctgatctgtcggacgacgttatatccgaaactcggcggcacgagcttgtaagctggatcagcatgttccgccagaagcaaaataagtataactccaagctggagcatcttttgcatgagtccggagttgagttctacgaaaagatgtattctactcgcaagctacacgagagaggtcacatataccactcagtcacgctcaacctgttgcgacgaggcagtccattgattggtaaggctggtatcgaatcaccacttgacgaacatactggcgccgaaccaagtacggacgataggacgtggtggatacgatgggccgaaaccgaagctatgcatagagttgtgtttgctgccttcatgatggatgttgtccatgcggctatgtttggtcatgcagctgatatggctccgcatgagattcgactgccactgccctgcgatgaagccctctggctggctcctagtcatgaaagtgttcgccaacaagaagctaaccttcgtatgtatggagttaagccagtattcttcctcgatgggttgaaacgcgctcttcatggccgagaggtgcagactcattcttttggacgcatgattatcatgtgcggcttgcttagtgtcggctggcacctgcgacatcgcgaaacacacctgaagtggcttgagatgacgcctaattcatcagatatgcgagataaatggtttcagatgctcttgaaggcattttacgactggaaaacgagcttcgatgctgccattggctctaatgactccgagaccagcgggtctggccaacaaccaggcctgattcagagcgctgccgtgttgtaccacttggcgcacattagtatgtacgttgatattatcgactgccaagtgtatgcaggcgcgaagcgtctgcttggtcgcaaggtatcatctcgcgatctgatcaacgtcaaccagcgcatggcagcatgggcaagtcagccaaccacgcgacacgctatgctacacgcgttcaaacttctcgatcgcattctactagattcacgccagaagaaaacgccgcatgctcaacaagtcgtgtacaattcgatgaatatccagtactcagtccgggcagataccgaccctcatcgcccctggatcatgtattacgcgacgttgagcatctggtcttttgcgcatgcagtcaagggccaaggtcgcgccaacccgccttattctccaaataagatgcgacgaaacctcaatgcagtgcctgagttcctatcgaagatcgcagcattgtccgaattggacactgcaacatcaactaccttatacgatgggttgtcagagctgcttgatatagtatattcgctttcttcccagtcgcattcagagcttctgattgaggcatgcaatcgacttcttaattgcaaagagatcatgcatggtgcggctgtatcctga

SEQ ID NO: 12600 - protein, 643 aa, Muscodor strobelii
  misc_feature: SGI Peptide ID NO. 564098
  misc_feature (30)..(56): Pfam Id: PF00096 Pfam Desc: Zinc finger, C2H2 type
  misc_feature (209)..(643): NCBI GI: 171693241 Blast Desc: protein product [Podospora anserina] gi|170946569|emb|CAP73370.1| protein product [Podospora anserina]
  misc_feature (209)..(637): NCBI GI: 116198785 Blast Desc: CHGG_07548 [Chaetomium globosum CBS 148.51] gi|88178827|gb|EAQ86295.1| CHGG_07548 [Chaetomium globosum CBS 148.51]
  misc_feature (209)..(637): NCBI GI: 85100799 Blast Desc: NCU01122 [Neurospora crassa OR74A] gi|7635878|emb|CAB88594.1| conserved [Neurospora crassa] gi|28922566|gb|EAA31793.1| [Neurospora crassa OR74A]
  misc_feature (216)..(568): NCBI GI: 261359097 Blast Desc: conserved [Verticillium albo-atrum VaMs.102]
  misc_feature (210)..(478): NCBI GI: 145605273 Blast Desc: MGG_10664 [Magnaporthe grisea 70-15] gi|145013104|gb|EDJ97745.1| MGG_10664 [Magnaporthe grisea 70-15]
  misc_feature (209)..(641): NCBI GI: 258577455 Blast Desc: conserved [Uncinocarpus reesii 1704] gi|237903175|gb|EEP77576.1| conserved [Uncinocarpus reesii 1704]
  misc_feature (209)..(642): NCBI GI: 145237204 Blast Desc: An07g01620 [Aspergillus niger] gi|134075715|emb|CAK96607.1| protein product [Aspergillus niger]
  misc_feature (209)..(637): NCBI GI: 169618772 Blast Desc: SNOG_12578 [Phaeosphaeria nodorum SN15] gi|160703677|gb|EAT79876.2| SNOG_12578 [Phaeosphaeria nodorum SN15]
  misc_feature (209)..(639): NCBI GI: 238482741 Blast Desc: C2H2 finger domain protein, [Aspergillus flavus NRRL3357] gi|220700659|gb|EED56997.1| C2H2 finger domain protein, [Aspergillus flavus NRRL3357]
  misc_feature (209)..(639): NCBI GI: 169766108 Blast Desc: [Aspergillus oryzae RIB40] gi|83765380|dbj|BAE55523.1| protein product [Aspergillus oryzae]
MASQNQASSTSSGAAAGYKRASRKGAPRKFACEWPSCDKIYSRAEHLQRHQLNRGHQTPSWGQPMDGVTMLPPKSNNYFAQDQTSLHDHSSFMPFANVPMTHDPDLASSSNFALWLFDNQRGYGDFNVANMPFLEGGLESSFNNNIHYDHESLTSRSQIDHTPPHHSDLSDDVISETRRHELVSWISMFRQKQNKYNSKLEHLLHESGVEFYEKMYSTRKLHERGHIYHSVTLNLLRRGSPLIGKAGIESPLDEHTGAEPSTDDRTWWIRWAETEAMHRVVFAAFMMDVVHAAMFGHAADMAPHEIRLPLPCDEALWLAPSHESVRQQEANLRMYGVKPVFFLDGLKRALHGREVQTHSFGRMIIMCGLLSVGWHLRHRETHLKWLEMTPNSSDMRDKWFQMLLKAFYDWKTSFDAAIGSNDSETSGSGQQPGLIQSAAVLYHLAHISMYVDIIDCQVYAGAKRLLGRKVSSRDLINVNQRMAAWASQPTTRHAMLHAFKLLDRILLDSRQKKTPHAQQVVYNSMNIQYSVRADTDPHRPWIMYYATLSIWSFAHAVKGQGRANPPYSPNKMRRNLNAVPEFLSKIAALSELDTATSTTLYDGLSELLDIVYSLSSQSHSELLIEACNRLLNCKEIMHGAAVS

SEQ ID NO: 12601 - DNA, 3927 bp, Muscodor strobelii
  misc_feature: SGI EST ID NO. CUFF.29882.0
  misc_feature: Variant of the nucleotide sequence at SEQ ID NO 12599
gtcaacgtcttctggcgctgctgctggttataaacgcgccagccggaagggcgcaccgaggaagttcgcttgtgaatggccctcatgcgacaagatctattcgcgtgctgagcatctccagagacatcaactcaaccatgagcccaagcagatatataagtgcgatgtcccggactgcaatcagatattcgtccgtttggacctcttggcacgtcataagaagcgccattccacatcttatgtgccaaggaacaggaccagtagcttcagtgtacctcaaaaggactcttcagaagatgggggagtcttcgcgtcgtccccaagtgctagtagcaacgggcaaactgctactgctcctactctagcaccagccccagctcatacatcaactcatggtccgccgagtctcagttcagggaccttgtcaacttcacatccaactccctcaccttatcaacagcagtcaacaagtgtgcctctgaatgcctccgtgctattgagccctaactccctgacttcccggtcaggtggacatcagactccttcatggggtcaaccaatggatggtgtgaccatgctgcctccgaagtccaacaactactttgcacaagaccagacttcgttacatgaccactcatcgttcatgcctttcgctaatgttcctatgacacatgaccctgatcttgcatcttcttcaaactttgcactatggttgtttgataatcagcgcggttatggagatttcaatgttgccaatatgccattcttagagggcgggctcgagtcatcttttaataataacatccactatgaccacgagtctttgactagcagatcccagattgaccacacgccaccgcaccattctgatctgtcggacgacgttatatccgaaactcggcggcacgagcttgtaagctggatcagcatgttccgccagaagcaaaataagtataactccaagctggagcatcttttgcatgagtccggaggtgattacccaggcttgcgacttgactttctgcatgactgtcttcggcattactgggactttgtctccccaaggctacccattgttcatcaaccaacattttcgctgacgaggtgctcgcctctgcttttgcttgtaataatcgccttaggagccgctcagattcatgatcaatctcccacgggagatcatgaagaatacaagtctctgtccgacctcatcatacactctgttcgacttgagattctcagcgacgacggcgcgtcgcctcctgtcgacctatgggtactcaggcgttgcttctagttgagttctacgaaaagatgtattctactcgcaagctacacgagagaggtcacatataccactcagtcacgctcaacctgttgcgacgaggcagtccattgattggtaaggctggtatcgaatcaccacttgacgaacatactggcgccgaaccaagtacggacgataggacgtggtggatacgatgggccgaaaccgaagctatgcatagagttgtgtttgctgccttcatgatggatgttgtccatgcggctatgtttggtcatgcagctgatatggctccgcatgagattcgactgccactgccctgcgatgaagccctctggctggctcctagtcatgaaagtgttcgccaacaagaagctaaccttcgtatgtatggagttaagccagtattcttcctcgatgggttgaaacgcgctcttcatggccgagaggtgcagactcattcttttggacgcatgattatcatgtgcggcttgcttagtgtcggctggcacctgcgacatcgcgaaacacacctgaagtggcttgagatgacgcctaattcatcagatatgcgagataaatggtttcagatgctcttgaaggcattttacgactggaaaacgagcttcgatgctgccattggctctaatgactccgagaccagcgggtctggccaacaaccaggcctgattcagagcgctgccgtgttgtaccacttggcgcacattagtatgtacgttgatattatcgactgccaagtgtatgcaggcgcgaagcgtctgcttggtcgcaaggtatcatctcgcgatctgatcaacgtcaaccagcgcatggcagcatgggcaagtcagccaaccacgcgacacgctatgctacacgcgttcaaacttctcgatcgcattctactagattcacgccagaagaaaacgccgcatgctcaacaagtcgtgtacaattcgatgaatatccagtactcagtccgggcagataccgaccctcatcgcccctggatcatgtattacgcgacgttgagcatctggtcttttgcgcatgcagtcaagggccaaggtcgcgccaacccgccttattctccaaataagatgcgacgaaacctcaatgcagtgcctgagttcctatcgaagatcgcagcattgtccgaattggacactgcaacatcaactaccttatacgatgggttgtcagagctgcttgatatagtatattcgctttcttcccagtcgcattcagagcttctgattgaggcatgcaatcgacttcttaattgcaaagagatcatgcatggtgcggctgtatcctgacgtaagataagttcaacacttctccccaacggtctatcgtgtctggcttcgtcgtgcatagcttgtggcgtagggttttagaagacaaggtgaatctcagaagagccaaagagctattcgagactgaagcggcagcatcctctatgcgtgcggtactcttaacaaacagatttgaagcaagtcgccgtcagccgaatggacgtcagattgacgatcctatataagcaaatgaacatgcgcagcttatacaagacccctgttctgtcaccatggcagtgtgggacaacggcataaccagtgcattgaatgaattagattggccacgtacagatatcttaagtaaatcgagggcttgaacccgttgtaaagacaacgttgaaaaaggacaatcaccaattgtacagggacattcatcttcaatgacttcgaaatgatctgcctataaacgggttggatatcggcgcgattagagaggcaacagcaccacgctcttcgaaacacaatatcaattgagacaagacatggtcatccgcaggtcttcattttcctctatctagacaagtaaataagtacctcgtaccgcaagcctttggtatcgtcgcatatctcgtttgatcatcaaagcgagacattttgacgcatgccgaatgatagtcggtctgatagagccatcctcctctctggctagcgacttcatacaagcggagcaaccgcgttcttcctgtaagcaccgttaccgttgcatgtaacggagtcggtgatgctcaagtgcaggctgcagatcttgctagtggtagcaagggccttgatgcgctcgatgacggcggcaggggttgagagatattctctagctatgagctagagggtaagaccgcttgtgtgaggagtagccatgggtgtaccggagatggtgctggtagcgctgttgccgccgatccaagaagacttgacatcgacgctaggatcattgatatcaacggcactgccgtagttgcagaagtaggcgaggtgttagcggcgttggctccgtcattaccggcaacgatgacggagaggacaacagattggtaggtagcgctgacagcgttgtcgaaagcggctgagtagctaccgccgagacaagctggctactgccttggacgtgggggcctttttgatgatgttattgatgggccagttgtagccatgcttgatgatggaggctgagctggaatcgccttggaatacctttgccgagatgatttctcaatgtcaaagcctcatctgttcactgcgtttgtgaaagctgattcgtaacttcttctaggtctagtaattgggcac

SEQ ID NO: 12602 - DNA, 918 bp, Muscodor strobelii
  misc_feature: SGI cDNA ID NO. 564099
  misc_feature: Encodes the peptide sequence at SEQ ID NO 12603
atgcctgccttcaagctttgttcagcctttgctctggtcaatgctgccagcgcagctattacggtcgtctggcagggaggttcctgtgcctcgccgtcgggatctacgctcgatattagccctatcgatatcaatacctgcactttatacaacttcttccccgatggcggcccgacaaatggccacattgtcgtcaccgttgaccaagacaccatcaatgccaaccgtggtctcgccgtcttccagcttccacagtcacaggaaggccagcacatccaatgcggtacgctgcagggcatcttccatcagtcaggttgttatgacagcgtgacaccagctctcgatgtcgtcacagccgagtgcgaccagactggctgcaacaatcttgagggtatcccaccaggccggcttgtcgctgacattaaggaatctgggaagacaattctagctcgcaacgttgaacagagtgcccgcaagagaaagagcgagagtagctccctagtgcgcagacagtcatcgtgtggcggtccagtcacttgtgacggctgcgtatcatgcacggcgcagggcatacgtgtctcgccatccatcacttgccccggccagggtagctcgtgcgcagtcacgctgacacagtccgtccaggtcatggactctttcaccatctcagtaggcgtctctgatgtctttaccgcaaatgtagagacaagtcattccattgccgttaccaatggcggctctcagacgttcacagttgcgcccggtgaagctggcttcgttcaggctacgcctctggccaattgtggcaccatgagcgtccacaatagtgatggctctgtttgtgcctctgcagagggtatattcgttctggataatcagggtgcaggccccccgttgtcctttgtccgcaccaactag

SEQ ID NO: 12603 - protein, 305 aa, Muscodor strobelii
  misc_feature: SGI Peptide ID NO. 564099
MPAFKLCSAFALVNAASAAITVVWQGGSCASPSGSTLDISPIDINTCTLYNFFPDGGPTNGHIVVTVDQDTINANRGLAVFQLPQSQEGQHIQCGTLQGIFHQSGCYDSVTPALDVVTAECDQTGCNNLEGIPPGRLVADIKESGKTILARNVEQSARKRKSESSSLVRRQSSCGGPVTCDGCVSCTAQGIRVSPSITCPGQGSSCAVTLTQSVQVMDSFTISVGVSDVFTANVETSHSIAVTNGGSQTFTVAPGEAGFVQATPLANCGTMSVHNSDGSVCASAEGIFVLDNQGAGPPLSFVRTN

SEQ ID NO: 12604 - DNA, 646 bp, Muscodor strobelii
  misc_feature: SGI EST ID NO. CUFF.29888.0
  misc_feature: Variant of the nucleotide sequence at SEQ ID NO 12602
ctttgatcgggtacgagcctgccgaacgtgccggcagccgtaggaagtcaacaactgaattgcgttgttcgactaccagaataaaggccatgacaagaagatcattaccactttcggagttatgacgctcttttcagaaggtctagtttaaggcttacaagctgacgccagcggctctcatgcaatagttatgtttaagatattaggtaacaggaagaaacaccaaaccaatgtccctttggaatatttgtactcctttcggtaggtctggcataggtcatgaggtgtagccatatccacaagccgagtgtggccgactagttcatgtagataaatcagatataaaacggctcagttaacagtatttagcatgtcctccaaccaccatcctctccagcttctttctgcacagtgagctctgggcccaatatctagatcttttcgcgaaaatacttaattcaccatgcctgccttcaagctttgttcagcctttgctctggtcaatgctgccagcgcagctattacggtcgtctggcagggaggttcctgtgcctcgccgtcgggatctacgctcgatattagccctatcgatatcaatacctgcactttatacaacttcttccccgatggcggcccgacaaatggc

SEQ ID NO: 12605 - DNA, 915 bp, Muscodor strobelii
  misc_feature: SGI cDNA ID NO. 564100
  misc_feature: Encodes the peptide sequence at SEQ ID NO 12606
atgccatccgatacatcgaattgcactctatcaacatgcgacgcgtcaacctctatttacggttacaggcccaaccttgggatcaacatatttttcgccatcgtctacgtgctcatcaatatacacggtctctatatagtacttaggaagcggaaatatcttgcatacaccatctccattctcatcggatcacatttagaacttattggctacgggacgagggtcaccagttattggaatccgtttcagcgctacccttggatcatccagtattcatttctgacaatttctccagtctttgtgactgcagctatttatgtctgccttggaagaatcgcacaccaccttggacgaggcgcgttcaatatccgacccagactatactctcgcattttcataacatctgatgcattcacactcctgatacaagctaccggtggaggcctggcaaccagcgcagcaacaggatctgctgacggggctgataaagcacaacttggccaggatatcattattggcggcttgggactacaagttgcctctctggctgttttcttcgtcttattcctaggtgttatctggccagctcgtatcatcagcttcaaatctcggggctcaaccggagaggaacgcaagttcagagttttcataatcgcaattatcgtcgccatccttttaataatcggtcgatctgcatacagggtcgtcgagttcgcgcaaggcattgacggttcattggctcacgacgaaattaccttcgttatcctcgatggcttccctattgcaatcgccacatcccttctcatgatattgcatcccatttaccgattgccagagaaatcacaaattagagtcaacagcgccgagggcatgctccctcccgtatatggcagtcgggacgtggagatggcgtaa

SEQ ID NO: 12606 - protein, 304 aa, Muscodor strobelii
  misc_feature: SGI Peptide ID NO. 564100
  misc_feature (58)..(286): Pfam Id: PF04479 Pfam Desc: RTA1 like protein
  misc_feature (2)..(275): NCBI GI: 119499309 Blast Desc: RTA1 domain protein, [Neosartorya fischeri NRRL 181] gi|119414576|gb|EAW24515.1| RTA1 domain protein, [Neosartorya fischeri NRRL 181]
  misc_feature (4)..(273): NCBI GI: 119182161 Blast Desc: CIMG_06126 [Coccidioides immitis RS]
  misc_feature (4)..(273): NCBI GI: 240109180 Blast Desc: RTA1 like protein family [Coccidioides posadasii C735 delta SOWgp]
  misc_feature (3)..(273): NCBI GI: 258572522 Blast Desc: UREG_04540 [Uncinocarpus reesii 1704] gi|237905293|gb|EEP79694.1| UREG_04540 [Uncinocarpus reesii 1704]
  misc_feature (2)..(275): NCBI GI: 70985426 Blast Desc: RTA1 domain protein [Aspergillus fumigatus Af293] gi|66845847|gb|EAL86181.1| RTA1 domain protein, [Aspergillus fumigatus Af293] gi|159125853|gb|EDP50969.1| RTA1 domain protein,
  misc_feature (8)..(273): NCBI GI: 226291085 Blast Desc: parasitic phase-specific protein PSP-1 [Paracoccidioides brasiliensis Pb18]
  misc_feature (6)..(273): NCBI GI: 238843031 Blast Desc: sphingoid long-chain base transporter RSB1 [Microsporum canis CBS 113480]
  misc_feature (7)..(273): NCBI GI: 119181260 Blast Desc: CIMG_05758 [Coccidioides immitis RS] gi|240108922|gb|EER27091.1| parasitic phase-specific protein PSP-1 [Coccidioides posadasii C735 delta SOWgp]
  misc_feature (8)..(273): NCBI GI: 225679363 Blast Desc: conserved [Paracoccidioides brasiliensis Pb03]
  misc_feature (8)..(273): NCBI GI: 226278257 Blast Desc: parasitic phase-specific protein PSP-1 [Paracoccidioides brasiliensis Pb01]
MPSDTSNCTLSTCDASTSIYGYRPNLGINIFFAIVYVLINIHGLYIVLRKRKYLAYTISILIGSHLELIGYGTRVTSYWNPFQRYPWIIQYSFLTISPVFVTAAIYVCLGRIAHHLGRGAFNIRPRLYSRIFITSDAFTLLIQATGGGLATSAATGSADGADKAQLGQDIIIGGLGLQVASLAVFFVLFLGVIWPARIISFKSRGSTGEERKFRVFIIAIIVAILLIIGRSAYRVVEFAQGIDGSLAHDEITFVILDGFPIAIATSLLMILHPIYRLPEKSQIRVNSAEGMLPPVYGSRDVEMA

SEQ ID NO: 12607 - DNA, 1297 bp, Muscodor strobelii
  misc_feature: SGI EST ID NO. CUFF.29900.0
  misc_feature: Variant of the nucleotide sequence at SEQ ID NO 12605
ttgcattcaacttgttgctgagatatttctcaccgtcattttgtattagtactcacgatacctaccatacctactacctggacactcgtctaccttcttattacacctgttgtacctactggcactccgagtcacgaactctcccaaaataacaaggctcacatattgaaagaaagatttgttctcctcgtcatgccatccgatacatcgaattgcactctatcaacatgcgacgcgtcaacctctatttacggttacaggcccaaccttgggatcaacatatttttcgccatcgtctacgtgctcatcaatatacacggtctctatatagtacttaggaagcggaaatatcttgcatacaccatctccattctcatcggatcacatttagaacttattggctacgggacgagggtcaccagttattggaatccgtttcagcgctacccttggatcatccagtattcatttctgacaatttctccagtctttgtgactgcagctatttatgtctgccttggaagaatcgcacaccaccttggacgaggcgcgttcaatatccgacccagactatactctcgcattttcataacatctgatgcattcacactcctgatacaagctaccggtggaggcctggcaaccagcgcagcaacaggatctgctgacggggctgataaagcacaacttggccaggatatcattattggcggcttgggactacaagttgcctctctggctgttttcttcgtcttattcctaggtgttatctggccagctcgtatcatcagcttcaaatctcggggctcaaccggagaggaacgcaagttcagagttttcataatcgcaattatcgtcgccatccttttaataatcggtcgatctgcatacagggtcgtcgagttcgcgcaaggcattgacggttcattggctcacgacgaaattaccttcgttatcctcgatggcttccctattgcaatcgccacatcccttctcatgatattgcatcccatttaccgattgccagagaaatcacaaattagagtcaacagcgccgagggcatgctccctcccgtatatggcagtcgggacgtggagatggcgtaagtgggcggaggattttcggggacaatttggttatcggcccctttgtaggacggcactacttactgttttcacttgttaagatacttgttttcatatatctatagacatctctattacgtttgatagaatatcgcatagtattacgtacgtaatatcatgtcgaatcgactcctataagcttacaagacgg

SEQ ID NO: 12608 - DNA, 1185 bp, Muscodor strobelii
  misc_feature: SGI cDNA ID NO. 564101
  misc_feature: Encodes the peptide sequence at SEQ ID NO 12609
atgggatctcgacgtccacacgttaaatctaggagcggctgtcggaactgtaagaaaagaaaggtcaagtgcggcgaggagcgcccgtcctgtcgcaactgttcaaggcgtggggtcatctgcgacctgttggacagtcccgtcacgacaaatgatctggcacatcgccctgctgttgcaactcctgctcatacaccgagtagcagttacacacctctatcattgtctagtgcgcagtccactgacgatggccgccttgggacgaggcatctcactgtattggatcttgaacttcttcatcactactgtatatcaacataccttaccctatcttcagattcaatcatgcgcaactggctacatgtgaccgttccacaattgggattttcgcatccatatgtgctctattcgattctagccctagctgcgtcgcacctggcgcgctttcgaccggaatcccgagaatactatcttgctgaatccacggctcgccatacagtagccacgtcgatggcggcgcctcttcttacagaaatctcgacgacgcaatcaattcccatgcattgttttagtattcttacattattcatctcatttgcaggcctcagggtagacgaagatctcttctttgagacagacaacgcgatcccgagcttcctcactctcttccgcggcgtgcgaactgttatggaatcgaataatctttttacgtcgtcaatatcatttctcttccgccctaggcctattttcggcataaaatgggaatcgattgaatttaatcatgacgcattgaaggagctccaagatcacatcaacgaaagctcgtctgaggacgaacaatcccagcgctacctgcttgacgcttacacagaactcgaacgagcttatcacttttactacggcgaggagcatagcaacgaggtcaagattcgtagcatgttcacgtggatgtacaaaatcccaaatgagtacgtcaatatgctgcgatatagaaatagcaacgcactttgcatactggcttttttctgtgtcctccttcaccaaatggagtataattggtggttgaaagggtggggactccacttgattgaccgcatttatgcggtactcgatgatgggcatcggttctatatcagatggcctattcaggagattggctggatacccaagcgtgaggtaaaataa

SEQ ID NO: 12609 - protein, 394 aa, Muscodor strobelii
  misc_feature: SGI Peptide ID NO. 564101
  misc_feature (12)..(51): Pfam Id: PF00172 Pfam Desc: Fungal Zn(2)-Cys(6) binuclear cluster domain
  misc_feature (3)..(389): NCBI GI: 159128204 Blast Desc: C6 transcription factor, [Aspergillus fumigatus A1163]
  misc_feature (3)..(389): NCBI GI: 119474417 Blast Desc: NFIA_005490 [Neosartorya fischeri NRRL 181] gi|119407237|gb|EAW17187.1| conserved [Neosartorya fischeri NRRL 181]
  misc_feature (3)..(389): NCBI GI: 146323225 Blast Desc: C6 transcription factor [Aspergillus fumigatus Af293] gi|129556527|gb|EAL86613.2| C6 transcription factor, [Aspergillus fumigatus Af293]
  misc_feature (1)..(391): NCBI GI: 145233111 Blast Desc: An02g07950 [Aspergillus niger] gi|134056853|emb|CAK37758.1| protein product [Aspergillus niger]
  misc_feature (3)..(389): NCBI GI: 154320642 Blast Desc: BC1G_01793 [Botryotinia fuckeliana B05.10] gi|150853482|gb|EDN28674.1| BC1G_01793 [Botryotinia fuckeliana B05.10]
  misc_feature (30)..(389): NCBI GI: 156053936 Blast Desc: SS1G_05816 [Sclerotinia sclerotiorum 1980] gi|154703596|gb|EDO03335.1| SS1G_05816 [Sclerotinia sclerotiorum 1980]
  misc_feature (3)..(385): NCBI GI: 255933159 Blast Desc: Pc12g12360 [Penicillium chrysogenum Wisconsin 54-1255] gi|211582669|emb|CAP80863.1| Pc12g12360 [Penicillium chrysogenum Wisconsin 54-1255]
  misc_feature (4)..(389): NCBI GI: 46140093 Blast Desc: FG11561.1 [Gibberella zeae PH-1] gi|117572682|gb|ABK40525.1| C6 zinc finger protein [Gibberella zeae]
  misc_feature (91)..(389): NCBI GI: 154295657 Blast Desc: BC1G_13099 [Botryotinia fuckeliana B05.10] gi|150843979|gb|EDN19172.1| BC1G_13099 [Botryotinia fuckeliana B05.10]
  misc_feature (2)..(393): NCBI GI: 212533327 Blast Desc: C6 transcription factor, [Penicillium marneffei ATCC 18224] gi|210072184|gb|EEA26273.1| C6 transcription factor, [Penicillium marneffei ATCC 18224]
MGSRRPHVKSRSGCRNCKKRKVKCGEERPSCRNCSRRGVICDLLDSPVTTNDLAHRPAVATPAHTPSSSYTPLSLSSAQSTDDGRLGTRHLTVLDLELLHHYCISTYLTLSSDSIMRNWLHVTVPQLGFSHPYVLYSILALAASHLARFRPESREYYLAESTARHTVATSMAAPLLTEISTTQSIPMHCFSILTLFISFAGLRVDEDLFFETDNAIPSFLTLFRGVRTVMESNNLFTSSISFLFRPRPIFGIKWESIEFNHDALKELQDHINESSSEDEQSQRYLLDAYTELERAYHFYYGEEHSNEVKIRSMFTWMYKIPNEYVNMLRYRNSNALCILAFFCVLLHQMEYNWWLKGWGLHLIDRIYAVLDDGHRFYIRWPIQEIGWIPKREVK

SEQ ID NO: 12610 - DNA, 1992 bp, Muscodor strobelii
  misc_feature: SGI EST ID NO. CUFF.29903.0
  misc_feature: Variant of the nucleotide sequence at SEQ ID NO 12608
cgagaactaagagccgaccgttccatagccagtaatactgtgggtacagctcagcctcaatacgaagtacgaagaagtgcgagatttgatcctcgcaaatctctgcttaggggataatgcgaggtcccactttccgagtctgatgagtcggataatgcgcatcaaaaacgtgtacggcataaactccaatctctatggagcatgatttgctcggcttgacgccgggagcaacaggaatgggatctcgacgtccacacgttaaatctaggagcggctgtcggaactgtaagaaaagaaaggtcaagtgcggcgaggagcgcccgtcctgtcgcaactgttcaaggcgtggggtcatctgcgacctgttggacagtcccgtcacgacaaatgatctggcacatcgccctgctgttgcaactcctgctcatacaccgagtagcagttacacacctctatcattgtctagtgcgcagtccactgacgatggccgccttgggacgaggcatctcactgtattggatcttgaacttcttcatcactactgtatatcaacataccttaccctatcttcagattcaatcatgcgcaactggctacatgtgaccgttccacaattgggattttcgcatccatatgtgctctattcgattctagccctagctgcgtcgcacctggcgcgctttcgaccggaatcccgagaatactatcttgctgaatccacggctcgccatacagtagccacgtcgatggcggcgcctcttcttacagaaatctcgacgacgcaatcaattcccatgcattgttttagtattcttacattattcatctcatttgcaggcctcagggtagacgaagatctcttctttgagacagacaacgcgatcccgagcttcctcactctcttccgcggcgtgcgaactgttatggaatcgaataatctttttacgtcgtcaatatcatttctcttccgccctaggcctattttcggcataaaatgggaatcgattgaatttaatcatgacgcattgaaggagctccaagatcacatcaacgaaagctcgtctgaggacgaacaatcccagcgctacctgcttgacgcttacacagaactcgaacgagcttatcacttttactacggcgaggagcatagcaacgaggtcaagattcgtagcatgttcacgtggatgtacaaaatcccaaatgagtacgtcaatatgctgcgatatagaaatagcaacgcactttgcatactggcttttttctgtgtcctccttcaccaaatggagtataattggtggttgaaagggtggggactccacttgattgaccgcatttatgcggtactcgatgatgggcatcggttctatatcagatggcctattcaggagattggctggatacccaagcgtgaggtaaaataaaggtgtttgacagcaataacatcgtttgccgcctccgatactaccaatgactctgcatcactcctgacctaggactgcctgcccgcccctagcagactccctaaacccatcatagatctcatccagtgcttgttagtaaccatccttacattctatgtgtcttgatgctctacgggacttagattattgatccttcattgcccatcactcacatgctatctagtttgcctctaagaatattcttgtggtaggcggtggctggactctcatctaccggagcactcgacggcgggtgacacaccgtccctgttttcaatacgagcaataaccgtgtcaacacagaatattagtcattgttagaactctacctaaaaagaaaaacatttgccgtccatatagcatatgatatagtcgtggcaaaacattagcggacatgggcagacgaagtaatcgcagatggcggcgtcaaccagaagccatactatcgagccatagcttaactcatgcaaaccagcgaattctgtggacgtgtaactggacttccgacatgcaaagtcaattacttctatcc

SEQ ID NO: 12611 - DNA, 882 bp, Muscodor strobelii
  misc_feature: SGI cDNA ID NO. 564102
  misc_feature: Encodes the peptide sequence at SEQ ID NO 12612
atgtcgacaataaactctttcccgcaatttgcgaaactgtcaccagagctgcgcctcgccatttgggagatcgcctgtcgaactggaacgatgcgattaacgctggctgaagtcgacgatgacaagtcccccacgttcgaaatcatgcctgaatgcagcgaacacgtactcgagcaccagcgacagcgcacgacaattcttcgtgtcaactgcgaagcacgctcggaggccttccgatatctcaccatgttacacggactatcaattgtgatcaatctcaagccgagatcggtgcattttgaaggcgatgtcgaattatattcacacaatcgctggcggatccagatctttatggactgggctagcgatattgtcatgcctctattcttctggcgctaccatgaaaaacagctagagacatcgggcacatttgcgaagctcacgcaacttgcaatacatccgtacaatgacgaaatttgcgatgtgataaaaatggaacaaataatcggtctaccgcttagctggaacgccgtgaaatacggatgggctaaagtcattctacaccagttcccggccatcaaacacataaccttggtgtggagcgcaacgcttcgggaccatcagcgactgcgatccatcttacagggcaaagatcgcccgagagaggagaaagacgtgttccccgagggatgtcctttaagtgaaagcttgaagtaccacgaaaaacaatactacggggagaaggtgcgtgccttgctcgaaaacgagcgcatggaggaaccgaggtatatttgggattcattgaagaccatacgacccgatgttaaagtcagcgtcgtcctggacatgactaagtgggaggaaagtttgttgtggtggtaa

SEQ ID NO: 12612 - protein, 293 aa, Muscodor strobelii
  misc_feature: SGI Peptide ID NO. 564102
MSTINSFPQFAKLSPELRLAIWEIACRTGTMRLTLAEVDDDKSPTFEIMPECSEHVLEHQRQRTTILRVNCEARSEAFRYLTMLHGLSIVINLKPRSVHFEGDVELYSHNRWRIQIFMDWASDIVMPLFFWRYHEKQLETSGTFAKLTQLAIHPYNDEICDVIKMEQIIGLPLSWNAVKYGWAKVILHQFPAIKHITLVWSATLRDHQRLRSILQGKDRPREEKDVFPEGCPLSESLKYHEKQYYGEKVRALLENERMEEPRYIWDSLKTIRPDVKVSVVLDMTKWEESLLWW

SEQ ID NO: 12613 - DNA, 252 bp, Muscodor strobelii
  misc_feature: SGI EST ID NO. CUFF.29906.0
  misc_feature: Variant of the nucleotide sequence at SEQ ID NO 12611
caccgtctgacagccaatctaatcatgtcgacaataaactctttcccgcaatttgcgaaactgtcaccagagctgcgcctcgccatttgggagatcgcctgtcgaactggaacgatgcgattaacgctggctgaagtcgacgatgacaagtcccccacgttcgaaatcatgcctgaatgcagcgaacacgtactcgagcaccagcgacagcgcacgacaattcttcgtgtcaactgcgaagcacgctcggag

SEQ ID NO: 12614 - DNA, 1077 bp, Muscodor strobelii
  misc_feature: SGI cDNA ID NO. 564103
  misc_feature: Elevated expression when VOC is produced
  misc_feature: Encodes the peptide sequence at SEQ ID NO 12615
atcgaggctttgtttggatcacttttactagatatgtatccggagatcgttgacgacctttgggaatacgatgatcaagttccgtggttagccaagggttttccatcgtggatcaaaccactcccgtatcggtcacgcgataaagtacgggaaaagctcaaacagtggtatgcacatgctcgagataagtttgacgagtcaatgatctttgaagacggcgacggtgatccttgttggggctcggagttgactcgagagagacacaaatttctccagcatacacatgatgacaacgcactcgcctcatctgacttgggatcaatgtgggcagtaattgctaacacagtcccctctattctttacaccgtcatacacatcttcaacgatccgagcttgctccaacggatacgtgtagaggtgtcagatcgctttcagggtaaagtcccaacgcctatgatggttaacgatctcaaaatcttgcacaaaatgcctcttctagaatcagtttatgcagagaccttgcgattatatgtaaaggtgtggttcatggtgagctctgcacatcacgatgtggctttgggacgctggcggctacctcggggcagcattggcataataaactcagatgtgtctcaccttgatgagtcgttttggaatactaaagccggaaaacaccctgttgatgaattttgggcggagcgctttctcgttgaccccacagacgaaaccagtgggcctgttgatccgtcaaaacggggacaagctgcgcccacagccaagcacggcgagaacaatgggaagccttacttctctcaggccgggttgatgggatcatggataccatatggcggtggcccctcaatctgccctggccgtcatttggcaaagcacgtaattttctttgtaagctcactattggtatctaaattcgacattgagttgcagaagccatgcaatacagtgaaactggactcacacagatttggattaggagttggcagacctgtagggccaatccctgtccgcattaagaagcgagggctaaaccaaagccggtcatattcacgttcagattaa

SEQ ID NO: 12615 - protein, 358 aa, Muscodor strobelii
  misc_feature: SGI Peptide ID NO. 564103
  misc_feature (2)..(351): NCBI GI: 242764799 Blast Desc: conserved [Talaromyces stipitatus ATCC 10500] gi|218724041|gb|EED23458.1| conserved [Talaromyces stipitatus ATCC 10500]
  misc_feature (2)..(358): NCBI GI: 212528994 Blast Desc: Pfs, NACHT and Ankyrin domain protein [Penicillium marneffei ATCC 18224] gi|210074052|gb|EEA28139.1| Pfs, NACHT and Ankyrin domain protein [Penicillium marneffei ATCC 18224]
  misc_feature (1)..(348): NCBI GI: 189195766 Blast Desc: conserved [Pyrenophora tritici-repentis Pt-1C-BFP] gi|187980100|gb|EDU46726.1| conserved [Pyrenophora tritici-repentis Pt-1C-BFP]
  misc_feature (1)..(346): NCBI GI: 169785174 Blast Desc: [Aspergillus oryzae RIB40] gi|83775795|dbj|BAE65915.1| protein product [Aspergillus oryzae]
  misc_feature (1)..(346): NCBI GI: 242813620 Blast Desc: conserved [Talaromyces stipitatus ATCC 10500] gi|218714542|gb|EED13965.1| conserved [Talaromyces stipitatus ATCC 10500]
  misc_feature (1)..(346): NCBI GI: 242813615 Blast Desc: conserved [Talaromyces stipitatus ATCC 10500] gi|218714541|gb|EED13964.1| conserved [Talaromyces stipitatus ATCC 10500]
  misc_feature (1)..(345): NCBI GI: 145246720 Blast Desc: An12g05400 [Aspergillus niger] gi|134080330|emb|CAK46252.1| protein product [Aspergillus niger]
  misc_feature (1)..(284): NCBI GI: 238507576 Blast Desc: conserved [Aspergillus flavus NRRL3357] gi|220688508|gb|EED44860.1| conserved [Aspergillus flavus NRRL3357]
  misc_feature (1)..(346): NCBI GI: 116200698 Blast Desc: CHGG_10894 [Chaetomium globosum CBS 148.51] gi|88175608|gb|EAQ83076.1| CHGG_10894 [Chaetomium globosum CBS 148.51]
  misc_feature (3)..(346): NCBI GI: 156062376 Blast Desc: SS1G_01304 [Sclerotinia sclerotiorum 1980] gi|154696640|gb|EDN96378.1| SS1G_01304 [Sclerotinia sclerotiorum 1980]
  misc_feature (17)..(348): SWISSPROT Homolog: EC 1.14.13.17 Cholesterol 7-alpha-monooxygenase
  misc_feature: Useful for introducing or modulating the production of volatile compounds
IEALFGSLLLDMYPEIVDDLWEYDDQVPWLAKGFPSWIKPLPYRSRDKVREKLKQWYAHARDKFDESMIFEDGDGDPCWGSELTRERHKFLQHTHDDNALASSDLGSMWAVIANTVPSILYTVIHIFNDPSLLQRIRVEVSDRFQGKVPTPMMVNDLKILHKMPLLESVYAETLRLYVKVWFMVSSAHHDVALGRWRLPRGSIGIINSDVSHLDESFWNTKAGKHPVDEFWAERFLVDPTDETSGPVDPSKRGQAAPTAKHGENNGKPYFSQAGLMGSWIPYGGGPSICPGRHLAKHVIFFVSSLLVSKFDIELQKPCNTVKLDSHRFGLGVGRPVGPIPVRIKKRGLNQSRSYSRSD

SEQ ID NO: 12616 - DNA, 1413 bp, Muscodor strobelii
  misc_feature: SGI EST ID NO. CUFF.29918.0
  misc_feature: Variant of the nucleotide sequence at SEQ ID NO 12614
atcgaggctttgtttggatcacttttactagatatgtatccggagatcgttgacgacctttgggaatacgatgatcaagttccgtggttagccaagggttttccatcgtggatcaaaccactcccgtatcggtcacgcgataaagtacgggaaaagctcaaacagtggtatgcacatgctcgagataagtttgacgagtcaatgatctttgaagacggcgacggtgatccttgttggggctcggagttgactcgagagagacacaaatttctccagcatacacatgatgacaacgcactcgcctcatctgacttgggatcaatgtgggcagtaattgctaacacagtcccctctattctttacaccgtcatacacatcttcaacgatccgagcttgctccaacggatacgtgtagaggtgtcagatcgctttcagggtaaagtcccaacgcctatgatggttaacgatctcaaaatcttgcacaaaatgcctcttctagaatcagtttatgcagagaccttgcgattatatgtaaaggtgtggttcatggtgagctctgcacatcacgatgtggctttgggacgctggcggctacctcggggcagcattggcataataaactcagatgtgtctcaccttgatgagtcgttttggaatactaaagccggaaaacaccctgttgatgaattttgggcggagcgctttctcgttgaccccacagacgaaaccagtgggcctgttgatccgtcaaaacggggacaagctgcgcccacagccaagcacggcgagaacaatgggaagccttacttctctcaggccgggttgatgggatcatggataccatatggcggtggcccctcaatctgccctggccgtcatttggcaaagcacgtaattttctttgtaagctcactattggtatctaaattcgacattgagttgcagaagccatgcaatacagtgaaactggactcacacagatttggattaggagttggcagacctgtagggccaatccctgtccgcattaagaagcgagggctaaaccaaagccggtcatattcacgttcagattaactcgcttgagaatggttatgtatgaatcaagagctgaagactatttgaggcaggatgtacacgctcgtggaaaccgtaacttcataatttactggtaaactttactattagactctacggctattctcctcttggaatgatgaacctagaggacgaccgaaaatcaacattgttctaatctggatcttgtcgtcaaggtattgatctcgtaaggcaatgaagtagaggttgcgaccatgctttgctatgagttcacgttggcttccctctagaaacacatctcaatgggagataaatttgaatcagctcttggttcttgtcggcagcatgttctcc

SEQ ID NO: 12617 - DNA, 2007 bp, Muscodor strobelii
  misc_feature: SGI cDNA ID NO. 564104
  misc_feature: Encodes the peptide sequence at SEQ ID NO 12618
atggcagcgattggcgattcttattccgctggaattggcgcgggcgacagactaggcgacgttggccaagctcttgataagaatagcgattgggcctgcagtcgctacgaccatgcgtatccttacgtcgtcaacagcgaccctagacttggcgacaataaaggcagaacctttgagttcaagtcctgctctggagcagttgcacaagatgtggcaacgattcaaataccagcattaactccaggccaacaagtcataatgctgtccgttggtggtaacgatgcagagttgaccagtgtgctgaatcagtgcgtctatcaatgggctgtcttcacaaaagcgcaagtagcagtagcaaaagcagctgttcttgatgcagactacaagtgggccgcgaacatcgattgggatactctgagtcgtggctgtgaaggccagctcgagcgctctaggtccatcattcaaagcgatgacttcgccgttagcattgaggcggttctagccctagccactgccaagctggcagatgatggtgtactctacttcacggggtacgggaagttctttgacgaagaatactcagtgggacagaaaccctggaattcgtatgcagatgcgaggctaacgtatgaccttcgtcgtgtcatgaacggactagttgatcttatgaatgcaaagctgaaatcaatagcggcgaaccaccccagtaatgttatcttcatcgactatgactcgtacatagggaaatggggtggcagattctgcgagcctggtgttgatgaatcgactagagagagcaataagagaccccatttgatgttctacgagcttgactcggtcgatcccttcgcaacgaatccctggaaacgcagcaccagtggagatctcagtggaactttcgccggtcagctcgacatgtttgcagagattaccagacaatttgaccctcagaccgagttccgcgacaaagagattgatgactcaactaccgggacctcgaccctcgcgtcgtctcttgcatctgatgatcatataatcgacattgagctcccagatttacaagtcccaaacgtattgcccgatggttatggtcgtgtctttcatccacaaatcttgctgcaccagattatctctaacttggtagtctggaatatcaataatgtgcgcaatgcgcaggcagggcaaatccaattcccgcaagatctgaaactagattcctgccccacaggcccaggccaagatgtaccgttagacgcaaagccgaagtgcgaccatgatcttgatagtatggaatcagacgtgttcaggagaattatagggcgttactgcgcagatcatggagacttgacccagcattccaatgccgtctacacagcacagaacgtcggagagaatggctatccaggttggcggttcgacttgatctggtcacctagcggcgaagctgcacaggaatgtcagcattcgtgcggacagatatttgacgagttcattgacacttgcgcatataccagtcatacgttggctaagtctggcattctgcaagtggactactgcggggaggcgttctacacacttgtcccgccttcgccgagtagaaagacgcctgatgatgaggtgaaactcttatcctgcactccgccctttacccaccccgatacttgggcagagcagcaagctgagggtgccggaaaggtgtgtgcccgtcatgcttacaaagacccgcaagtctacaaggatacgccgagcacatatgttgctgagcaagtgtggaccaagaagccctttgaacctattcataagatgcactataatatttggtggaagaaaggttgcatcctgaaatcgggatttacctcagttcctatcgatcatcctgtacacccaggggcacctggatgcacggagtttctcactgaggcatatgctaattgtacaaacaacggcggtgccggcgggcagattcaagttggttgcctcatctacgagtatgtccctcagggctaa

SEQ ID NO: 12618 - protein, 668 aa, Muscodor strobelii
  misc_feature: SGI Peptide ID NO. 564104
  misc_feature (1)..(408): NCBI GI: 119490417 Blast Desc: Fibronectin type III domain protein [Neosartorya fischeri NRRL 181] gi|119411185|gb|EAW21128.1| Fibronectin type III domain protein [Neosartorya fischeri NRRL 181]
  misc_feature (1)..(501): NCBI GI: 258563918 Blast Desc: [Uncinocarpus reesii 1704] gi|237908211|gb|EEP82612.1| [Uncinocarpus reesii 1704]
  misc_feature (1)..(396): NCBI GI: 169611769 Blast Desc: SNOG_08999 [Phaeosphaeria nodorum SN15] gi|111062071|gb|EAT83191.1| SNOG_08999 [Phaeosphaeria nodorum SN15]
  misc_feature (1)..(665): NCBI GI: 225557464 Blast Desc: conserved [Ajellomyces capsulatus G186AR]
  misc_feature (411)..(667): NCBI GI: 261359949 Blast Desc: [Verticillium albo-atrum VaMs.102]
  misc_feature (1)..(443): NCBI GI: 154274806 Blast Desc: [Ajellomyces capsulatus NAm1] gi|150414694|gb|EDN10056.1| [Ajellomyces capsulatus NAm1]
  misc_feature (1)..(394): NCBI GI: 258563334 Blast Desc: [Uncinocarpus reesii 1704] gi|237907919|gb|EEP82320.1| [Uncinocarpus reesii 1704]
  misc_feature (1)..(379): NCBI GI: 226279673 Blast Desc: conserved [Paracoccidioides brasiliensis Pb01]
  misc_feature (1)..(298): NCBI GI: 226286625 Blast Desc: conserved [Paracoccidioides brasiliensis Pb18]
  misc_feature (1)..(298): NCBI GI: 225684805 Blast Desc: carboxypeptidase S1 [Paracoccidioides brasiliensis Pb03]
MAAIGDSYSAGIGAGDRLGDVGQALDKNSDWACSRYDHAYPYVVNSDPRLGDNKGRTFEFKSCSGAVAQDVATIQIPALTPGQQVIMLSVGGNDAELTSVLNQCVYQWAVFTKAQVAVAKAAVLDADYKWAANIDWDTLSRGCEGQLERSRSIIQSDDFAVSIEAVLALATAKLADDGVLYFTGYGKFFDEEYSVGQKPWNSYADARLTYDLRRVMNGLVDLMNAKLKSIAANHPSNVIFIDYDSYIGKWGGRFCEPGVDESTRESNKRPHLMFYELDSVDPFATNPWKRSTSGDLSGTFAGQLDMFAEITRQFDPQTEFRDKEIDDSTTGTSTLASSLASDDHIIDIELPDLQVPNVLPDGYGRVFHPQILLHQIISNLVVWNINNVRNAQAGQIQFPQDLKLDSCPTGPGQDVPLDAKPKCDHDLDSMESDVFRRIIGRYCADHGDLTQHSNAVYTAQNVGENGYPGWRFDLIWSPSGEAAQECQHSCGQIFDEFIDTCAYTSHTLAKSGILQVDYCGEAFYTLVPPSPSRKTPDDEVKLLSCTPPFTHPDTWAEQQAEGAGKVCARHAYKDPQVYKDTPSTYVAEQVWTKKPFEPIHKMHYNIWWKKGCILKSGFTSVPIDHPVHPGAPGCTEFLTEAYANCTNNGGAGGQIQVGCLIYEYVPQG

SEQ ID NO: 12619 - DNA, 1218 bp, Muscodor strobelii
  misc_feature: SGI cDNA ID NO. 564105
  misc_feature: Encodes the peptide sequence at SEQ ID NO 12620
atgctttgtcgaccagaccttgcctcgttggtgcacgccgccaacttcgacgacgacacgattaggcatgattttcctcatggcagaatcgaaaggcttaaccccagtgagacccagcttagggatatcttggagtttgtagacaatcccgtggttccacaccgcgatctctggatatgccaactacgtcgcggctctatcgatgctttcgtcgctctattcctctgtctagcgcccaatctttcactctttcacttggggcagaagtttacacgggaagatgatctcgtgggcaagatattccgcacatctatgatcaaaactgtcaatgagaatggcgtgctccctgcgttttgtcatcttcgagaagtgagcatgttatatcacgcaccggccatcgtcgacgaggggagtgcgagacgaatgaacacggagagcgctctgtctctgttctatcttccgtctttacaacgtataactacaactattgacaatcctcctgatactctgatctggcctgggaatgtccaacctcgccttcatgctctcaggtgtttggatttaaccatgattcgcgaagcacatctcggtacgatcctccaagctactccaaacttgaccgctctccgttggaattggtactaccgtgaggatctagaagatcaggcggttacacggacagttgatcttgatcagatattgactgctcttgtcaatgttagttcgtctttagagggcttaactatcgatgggctgactgacgtggcggctgctcttcccgaatacccaacggttgagatcacaggaaccttgaaatcattggtagaatttgacaaactgaaagctctcaagatcccactgccgttcctgctggggttctcctcagcagaaacatcaagacaaatactaaaagaagtcattcctatgaatatagatactctcagtattacggacgatctatgccccgaggaagaatgttccggggatgacgacatgcttttgcaagctttgacgctatggttggcagattggaggacatcgcacccttatctcaggaaaatccacatacttctaggagagtgccgtgtagactggcaaccacgtatggatctaattggagatctatgctcgcaagctggtgtcgaatcgcagataaccttgcaacagagtggcatatacaaagatacaggagcgcttatatcagtgcccacactatga

SEQ ID NO: 12620 - protein, 405 aa, Muscodor strobelii
  misc_feature: SGI Peptide ID NO. 564105
  misc_feature (67)..(389): NCBI GI: 119490302 Blast Desc: NFIA_062870 [Neosartorya fischeri NRRL 181] gi|119411183|gb|EAW21126.1| conserved [Neosartorya fischeri NRRL 181]
  misc_feature (4)..(380): NCBI GI: 238500808 Blast Desc: conserved [Aspergillus flavus NRRL3357] gi|220691875|gb|EED48222.1| conserved [Aspergillus flavus NRRL3357]
  misc_feature (4)..(380): NCBI GI: 169782411 Blast Desc: [Aspergillus oryzae RIB40] gi|83774411|dbj|BAE64535.1| protein product [Aspergillus oryzae]
  misc_feature (3)..(358): NCBI GI: 145248672 Blast Desc: An14g00460 [Aspergillus niger] gi|134081342|emb|CAK41845.1| protein product [Aspergillus niger]
  misc_feature (1)..(381): NCBI GI: 115387727 Blast Desc: [Aspergillus terreus NIH2624] gi|114195453|gb|EAU37153.1| [Aspergillus terreus NIH2624]
  misc_feature (1)..(320): NCBI GI: 116196100 Blast Desc: CHGG_04648 [Chaetomium globosum CBS 148.51] gi|88180561|gb|EAQ88029.1| CHGG_04648 [Chaetomium globosum CBS 148.51]
  misc_feature (42)..(385): NCBI GI: 256720353 Blast Desc: NECHADRAFT_89129 [Nectria haematococca mpVI 77-13-4]
  misc_feature (1)..(337): NCBI GI: 256726600 Blast Desc: NECHADRAFT_79716 [Nectria haematococca mpVI 77-13-4]
  misc_feature (58)..(334): NCBI GI: 46126801 Blast Desc: FG07778.1 [Gibberella zeae PH-1]
  misc_feature (36)..(357): NCBI GI: 145613722 Blast Desc: MGG_01412 [Magnaporthe grisea 70-15] gi|145020755|gb|EDK04884.1| MGG_01412 [Magnaporthe grisea 70-15]
MLCRPDLASLVHAANFDDDTIRHDFPHGRIERLNPSETQLRDILEFVDNPVVPHRDLWICQLRRGSIDAFVALFLCLAPNLSLFHLGQKFTREDDLVGKIFRTSMIKTVNENGVLPAFCHLREVSMLYHAPAIVDEGSARRMNTESALSLFYLPSLQRITTTIDNPPDTLIWPGNVQPRLHALRCLDLTMIREAHLGTILQATPNLTALRWNWYYREDLEDQAVTRTVDLDQILTALVNVSSSLEGLTIDGLTDVAAALPEYPTVEITGTLKSLVEFDKLKALKIPLPFLLGFSSAETSRQILKEVIPMNIDTLSITDDLCPEEECSGDDDMLLQALTLWLADWRTSHPYLRKIHILLGECRVDWQPRMDLIGDLCSQAGVESQITLQQSGIYKDTGALISVPTL

SEQ ID NO: 12621 - DNA, 436 bp, Muscodor strobelii
  misc_feature: SGI EST ID NO. CUFF.29936.0
  misc_feature: Variant of the nucleotide sequence at SEQ ID NO 12619
ggacgatctatgccccgaggaagaatgttccggggatgacgacatgcttttgcaagctttgacgctatggttggcagattggaggacatcgcacccttatctcaggaaaatccacatacttctaggagagtgccgtgtagactggcaaccacgtatggatctaattggagatctatgctcgcaagctggtgtcgaatcgcagataaccttgcaacagagtggcatatacaaagatacaggagcgcttatatcagtgcccacactatgataccttctcgcgtcacactttgtgttgttccgacgcaataaattaccaacatagcaagaataaacttgaaaaattgaaccatagctgccaattgattacgtgctgatcaatagcggtatgtaacatagcttagtaataataaatgtcttggatttgcgtactcagctg

SEQ ID NO: 12622 - DNA, 612 bp, Muscodor strobelii
  misc_feature: SGI cDNA ID NO. 564106
  misc_feature: Encodes the peptide sequence at SEQ ID NO 12623
atggacactatacaggccataaagcagcagcttaagcccgtaatgaccaaaaaagagattaggcagaagctagatgagctcaatatacccttcacgcctagcggtatcacctcaatcgagagagcagggggggcgaacttggataagtacagagatgctgtagggaaagcaagagacaatgagctgcagaaaaataaccagaatctgggagaggttttagagaacatgataacagccgcagtcaaacgacttgaaagagtttcatttaagagggtgccgagaacagtggcaaatgcagtggacaacataataaatgacgagctcgataagatacgaccaaacgcgacgttgctgcttgatcactacgctcgcatggacaaaagcagctctgatgctgaacatttcaagaagtgggctatagatgagatctgtgatgagctctggttgttccccctggcttctgtacttaacgatatgcgaaccgaacgacgtcgtgggcagcgatcttttgaggcagaagggagtgctcaacagcaaaagagacttcaggaagaagacgaagagggagaccagggagatcaaactgttaaaaggcaaaagcgacgccgttaa

SEQ ID NO: 12623 - protein, 203 aa, Muscodor strobelii
  misc_feature: SGI Peptide ID NO. 564106
MDTIQAIKQQLKPVMTKKEIRQKLDELNIPFTPSGITSIERAGGANLDKYRDAVGKARDNELQKNNQNLGEVLENMITAAVKRLERVSFKRVPRTVANAVDNIINDELDKIRPNATLLLDHYARMDKSSSDAEHFKKWAIDEICDELWLFPLASVLNDMRTERRRGQRSFEAEGSAQQQKRLQEEDEEGDQGDQTVKRQKRRR

SEQ ID NO: 12624 - DNA, 1252 bp, Muscodor strobelii
  misc_feature: SGI EST ID NO. CUFF.29948.0
  misc_feature: Variant of the nucleotide sequence at SEQ ID NO 12622
tgagtaacaactcaaaatacatctttttggtacaatttaaatacatgaaaacctgctcatgcgccggtctcgccgtggtcacatctttaaactcgtctctctgtcgcctcacatacctcaacccgcagcagggccagtcactgatcttccgcccaagccgaccctaggctattacctcatcgacccaatccaactcagtggtatcaaaaatggacactatacaggccataaagcagcagcttaagcccgtaatgaccaaaaaagagattaggcagaagctagatgagctcaatatacccttcacgcctagcggtatcacctcaatcgagagagcagggggggcgaacttggataagtacagagatgctgtagggaaagcaagagacaatgagctgcagaaaaataaccagaatctgggagaggttttagagaacatgataacagccgcagtcaaacgacttgaaagagtttcatttaagagggtgccgagaacagtggcaaatgcagtggacaacataataaatgacgagctcgataagatacgaccaaacgcgacgttgctgcttgatcactacgctcgcatggacaaaagcagctctgatgctgaacatttcaagaagtgggctatagatgagatctgtgatgagctctggttgttccccctggcttctgtacttaacgatatgcgaaccgaacgacgtcgtgggcagcgatcttttgaggcagaagggagtgctcaacagcaaaagagacttcaggaagaagacgaagagggagaccagggagatcaaactgttaaaaggcaaaagcgacgccgttaaacccgatccaagaccctgggcgctgacactgcaaccgaaacgctgtagatgagagaattagtagtttcgaagactacgatggcattttctgggctgatcgataagcatgctgagggatgatgaggagagcgctgcggctgcgcatgcatagatgaactgcagattgagggtgaaaaagctgatgcgtcgcaacttcgggaagggatcgatacctatgcagcgtggttattgcaagcgcaggtggatttcacgactggctataggttagatccgattgttgattttggggtttggattttaagggctcgctttattttcgtactctgagtcgtgcattgaattttatgattatcaacatgttttctaattaaacgaattggcttttcttatacaagttgataacaatgcgaccctccaatccctaaggcttc

SEQ ID NO: 12625 - DNA, 465 bp, Muscodor strobelii
  misc_feature: SGI cDNA ID NO. 564107
  misc_feature: Encodes the peptide sequence at SEQ ID NO 12626
atgcctaagagaaccgacatcaccttcactaaggtgccaggcggtgtgacgtgcgacgagtgcaaggacggcgtggtcatcaaagagggcagcgcctcttctcatgcttccaagattcaccccatcaagcgcgattccatggctgaggccatgaagaagcaacacaaatgtcccgtgtgcggccacgaatgctctggacatggtatgatcaagcattccaaaaaacacggcaaggcctactctgccgatgaggcccgcaagtatgtgatccgccacggcaaccaggttgcggagcaggaggatgacactgatgatgtggttggcgagaagacggaggaggagaagaccaagcttggtcagggcccccgcaaggatgaggaggaggatgacggcaccggtggctttggtggtgctggaggcgtttctcaggttctcaccatttctcaggttttcatcgctgcctag

SEQ ID NO: 12626 - protein, 154 aa, Muscodor strobelii
  misc_feature: SGI Peptide ID NO. 564107
MPKRTDITFTKVPGGVTCDECKDGVVIKEGSASSHASKIHPIKRDSMAEAMKKQHKCPVCGHECSGHGMIKHSKKHGKAYSADEARKYVIRHGNQVAEQEDDTDDVVGEKTEEEKTKLGQGPRKDEEEDDGTGGFGGAGGVSQVLTISQVFIAA

SEQ ID NO: 12627 - DNA, 492 bp, Muscodor strobelii
  misc_feature: SGI cDNA ID NO. 564108
  misc_feature: Encodes the peptide sequence at SEQ ID NO 12628
atgtcctcaaccacgccatcatgccaaaacctctacgagatccccataaccgaagcagcatgcgcggtcccctacggcgggaaccacaccgacgccatgtcgtcctgctgcaaatccgccgacgtcgtatcttacagcaatgactgcggacttttctgcatcgccgaggaccaaaccatcaaagacctacaagattgcttgtttggggagggtgtggcataccagagtgtgttctgtaacgcgaatcagacggctacggctacgaatctcgacccgactgtccctgcgtctgcgagtgcttcaattgttgctacgggaagtagtgatagtgatgggaatggagatgggacgagcagtggtgatgatgcggatccgacgaacaccgataatgctgcggctgggctgcctccggcttttggggttacgacgacgggtgtcacaattggggccttgttattctccgctttggcttttggggcgttccaggtttga

SEQ ID NO: 12628 - protein, 163 aa, Muscodor strobelii
  misc_feature: SGI Peptide ID NO. 564108
  misc_feature (8)..(163): NCBI GI: 256726585 Blast Desc: NECHADRAFT_102602 [Nectria haematococca mpVI 77-13-4]
  misc_feature (7)..(163): NCBI GI: 256720072 Blast Desc: NECHADRAFT_105764 [Nectria haematococca mpVI 77-13-4]
  misc_feature (10)..(163): NCBI GI: 46124211 Blast Desc: FG06483.1 [Gibberella zeae PH-1]
  misc_feature (12)..(161): NCBI GI: 238497141 Blast Desc: conserved [Aspergillus flavus NRRL3357] gi|220694686|gb|EED51030.1| conserved [Aspergillus flavus NRRL3357]
  misc_feature (12)..(161): NCBI GI: 169774341 Blast Desc: [Aspergillus oryzae RIB40] gi|83769501|dbj|BAE59636.1| protein product [Aspergillus oryzae]
  misc_feature (6)..(159): NCBI GI: 67541969 Blast Desc: AN7148.2 [Aspergillus nidulans FGSC A4] gi|40742210|gb|EAA61400.1| AN7148.2 [Aspergillus nidulans FGSC A4] gi|259483521|tpe|CBF78979.1| TPA: [Aspergillus nidulans FGSC
  misc_feature (12)..(88): NCBI GI: 261205526 Blast Desc: conserved [Ajellomyces dermatitidis SLH14081] gi|239592559|gb|EEQ75140.1| conserved [Ajellomyces dermatitidis SLH14081]
  misc_feature (12)..(158): NCBI GI: 255950884 Blast Desc: Pc22g23180 [Penicillium chrysogenum Wisconsin 54-1255] gi|211593226|emb|CAP99606.1| Pc22g23180 [Penicillium chrysogenum Wisconsin 54-1255]
  misc_feature (2)..(93): NCBI GI: 238492653 Blast Desc: conserved [Aspergillus flavus NRRL3357] gi|220696057|gb|EED52399.1| conserved [Aspergillus flavus NRRL3357]
  misc_feature (12)..(152): NCBI GI: 238839816 Blast Desc: conserved [Microsporum canis CBS 113480]
MSSTTPSCQNLYEIPITEAACAVPYGGNHTDAMSSCCKSADVVSYSNDCGLFCIAEDQTIKDLQDCLFGEGVAYQSVFCNANQTATATNLDPTVPASASASIVATGSSDSDGNGDGTSSGDDADPTNTDNAAAGLPPAFGVTTTGVTIGALLFSALAFGAFQV

SEQ ID NO: 12629 - DNA, 1115 bp, Muscodor strobelii
  misc_feature: SGI EST ID NO. CUFF.29960.0
  misc_feature: Variant of the nucleotide sequence at SEQ ID NO 12627
tccatgcataataacacttcggcactcataaacaaaggatgtagccgtttcagagcttcaatgtttgctgcatccgactccttcctctgtttgcataggtagtcattgctatttcgaccatcttgcaaatcccggcctgccattgtgtcgaacatctgccagcgatacattcatcaacatccttgacggccaagcagagtacaacgacaccatattgtttacgtccaaacccaaaacagattcagcgaccgagtacaccaaactcgacaacaaattcaatggccgaagtgataagcgggacaacaacagccttctctgcccccttctcgattcactcttctgacttatcaagcacacccacaacaaccgcaacaatgtcctcaaccacgccatcatgccaaaacctctacgagatccccataaccgaagcagcatgcgcggtcccctacggcgggaaccacaccgacgccatgtcgtcctgctgcaaatccgccgacgtcgtatcttacagcaatgactgcggacttttctgcatcgccgaggaccaaaccatcaaagacctacaagattgcttgtttggggagggtgtggcataccagagtgtgttctgtaacgcgaatcagacggctacggctacgaatctcgacccgactgtccctgcgtctgcgagtgcttcaattgttgctacgggaagtagtgatagtgatgggaatggagatgggacgagcagtggtgatgatgcggatccgacgaacaccgataatgctgcggctgggctgcctccggcttttggggttacgacgacgggtgtcacaattggggccttgttattctccgctttggcttttggggcgttccaggtttgagaaagagatgatgatttggcgagcgagatgaggaacgtggatattgggaaggtgaggatcttctcagacaccagcgcgatctcaccgagtcgctcggcacgatgaataattaccaactcctacgacaagcacatacttatacagtactacatcagaaccaatgaatgaacaaatgatcaagcatctgaattatattctatatctccgtatcgtacacgacgggctctttgcagagcggcaatatcaaac

SEQ ID NO: 12630 - DNA, 1752 bp, Muscodor strobelii
  misc_feature: SGI cDNA ID NO. 564109
  misc_feature: Encodes the peptide sequence at SEQ ID NO 12631
atgtcagcagatacagagatgagtggcacgcagcccaacggcgtcgtcgagtcctacgagaatcatgtgccctcgactcctcccgactccttcggccctcagtccgtcccgctactcactcacgtcacggcctcactcccctccctccccgacaccgaagttcctggctcgcccatggaccccgccgcgtcattcagaagcgacaagaccgagcccaacgacgaccgcatgtcccaacccgccgtgattccatcctctcaaccctcgtcccagagccctcctccatcatcccagcttgctcagactcaccgtgatcccaacgttggctacagctatgtcaactcccagcggccgcgcagaatcctttccccgccacccacgactcttcacgttgctaaccgccaaaattcggctgacttcgtgccaccgtcgccaaatcagatcgagagtgcttccgttaccgaacttcgaaatatgctcaagtcatgtctggccgtgaatgctaccctcaagtcagaagctgctcaccacaagctgcagtacaatatgctgagcttacaggctggcgaggatgccaatcgtgccatggtcgagcatgagatgactcgccgcgaagtggaagctctgcgtgacgccgaccgcgcccgtcaagcccgtcgcgaaatggaggctcgcttggatcccaccaagatcaagtatcgtgagttgcaaaccacgttcgacgcactcacaaaagaacacaactctcttcgtcgccgcatgaagaacgcatccaaggttatagcgcagcaggcagaacagaacgaatcattgtcaagcgagcgcgatgtacttctgaacagaattcgtgagaaccgagaacatttctctatgctatgtagtcctggcggagcctttcatggtgccctgacgccaaagacaccacccatgacgtctccccagcaggtcaggacgacacctcgacagacacccagatccgcaagcaagactgtccaccatgagaacgatccgaactcggctggattcgctgcccttctacaggctctcaaccaagattccaacgccagtgctccttcgaccccgatgtccgtcaaacctccaccacgcgcaccctttaagcacaatcgatctgttcactcgatgtcgtctctacccactacgcccttctcccgaccccgcggtaattactctggtctcctcccttccgcggatctggtaccgcagactgaacccgcacagagatttggaacgagccgatttgaaccccagactccaacgcgcctaggaggtcgcagaagccgagagagtaccatttccgccgaggacgaggccgaagcacagcagccccgagctatgaccttggagtctgtagccgcagccgcccagttctatctgtcccacagctcgcatgcttcgcatgcctcacagcgccaagagcctgaagaggaggtctacgaaagccaggccagtcaggccgcatccgaaatgctgagacgcgatcctcgccagagttttgaagttgcaagctccgttaattcacgagaaggctcacctaggcctgccgagaagccctccaaactgcagacgaaactttatggaccggtccaaaaagccggaatagccacagagaagcgaaagattagtcgaagtgcagattttgacgccagccctccgaagaaaccgcggtatcaaaatgctagcatccacggtgccgttggacttggaattcagaattcccgccgccgagggtga

SEQ ID NO: 12631 - protein, 583 aa, Muscodor strobelii
  misc_feature: SGI Peptide ID NO. 564109
  misc_feature (42)..(580): NCBI GI: 116201797 Blast Desc: CHGG_08783 [Chaetomium globosum CBS 148.51] gi|88177301|gb|EAQ84769.1| CHGG_08783 [Chaetomium globosum CBS 148.51]
  misc_feature (1)..(577): NCBI GI: 261361069 Blast Desc: conserved [Verticillium albo-atrum VaMs.102]
  misc_feature (1)..(577): NCBI GI: 256733844 Blast Desc: NECHADRAFT_36664 [Nectria haematococca mpVI 77-13-4]
  misc_feature (1)..(580): NCBI GI: 171681710 Blast Desc: protein product [Podospora anserina] gi|170940814|emb|CAP66463.1| protein product [Podospora anserina]
  misc_feature (48)..(532): NCBI GI: 46127819 Blast Desc: FG08287.1 [Gibberella zeae PH-1]
  misc_feature (110)..(580): NCBI GI: 85097863 Blast Desc: NCU05559 [Neurospora crassa OR74A] gi|28922014|gb|EAA31285.1| conserved [Neurospora crassa OR74A]
  misc_feature (48)..(576): NCBI GI: 39963715 Blast Desc: MGG_09776 [Magnaporthe grisea 70-15] gi|145015442|gb|EDJ99978.1| MGG_09776 [Magnaporthe grisea 70-15]
  misc_feature (142)..(576): NCBI GI: 156058029 Blast Desc: SS1G_04746 [Sclerotinia sclerotiorum 1980] gi|154702531|gb|EDO02270.1| SS1G_04746 [Sclerotinia sclerotiorum 1980]
  misc_feature (143)..(577): NCBI GI: 67541681 Blast Desc: AN7004.2 [Aspergillus nidulans FGSC A4] gi|40742460|gb|EAA61650.1| AN7004.2 [Aspergillus nidulans FGSC A4] gi|259483685|tpe|CBF79277.1| TPA: conserved [Aspergillus FGSC
  misc_feature (84)..(576): NCBI GI: 115388821 Blast Desc: conserved [Aspergillus terreus NIH2624] gi|114196000|gb|EAU37700.1| conserved [Aspergillus terreus NIH2624]
MSADTEMSGTQPNGVVESYENHVPSTPPDSFGPQSVPLLTHVTASLPSLPDTEVPGSPMDPAASFRSDKTEPNDDRMSQPAVIPSSQPSSQSPPPSSQLAQTHRDPNVGYSYVNSQRPRRILSPPPTTLHVANRQNSADFVPPSPNQIESASVTELRNMLKSCLAVNATLKSEAAHHKLQYNMLSLQAGEDANRAMVEHEMTRREVEALRDADRARQARREMEARLDPTKIKYRELQTTFDALTKEHNSLRRRMKNASKVIAQQAEQNESLSSERDVLLNRIRENREHFSMLCSPGGAFHGALTPKTPPMTSPQQVRTTPRQTPRSASKTVHHENDPNSAGFAALLQALNQDSNASAPSTPMSVKPPPRAPFKHNRSVHSMSSLPTTPFSRPRGNYSGLLPSADLVPQTEPAQRFGTSRFEPQTPTRLGGRRSRESTISAEDEAEAQQPRAMTLESVAAAAQFYLSHSSHASHASQRQEPEEEVYESQASQAASEMLRRDPRQSFEVASSVNSREGSPRPAEKPSKLQTKLYGPVQKAGIATEKRKISRSADFDASPPKKPRYQNASIHGAVGLGIQNSRRRG

SEQ ID NO: 12632 - DNA, 2485 bp, Muscodor strobelii
  misc_feature: SGI EST ID NO. CUFF.29966.0
  misc_feature: Variant of the nucleotide sequence at SEQ ID NO 12630
ccaagctctcccagcttggcccaactccaaactcaggttttcgcatcacatcgacgatcgcatggccgtgactcgtgaccccgaataccaccgccattgcagtccacatttgcccctcatcatcccaatcgacagcttcatcacagacacagacttcttcgacttcgcatgctgcaattgattaggtagtctacgacgccaacaagatcaaagcacctgccttatccctcaccgcgctcgggcatcccgtctgagctgcagggccgtccgtttggtcaagtagggggcggtgttactccaattcttgcacgacagacatcgtatttctctccccgggctcgactcgctcacgacacgtcggcctgtctgacaaacgtcgacgctcttcgagtacatacgtcagcatgtcagcagatacagagatgagtggcacgcagcccaacggcgtcgtcgagtcctacgagaatcatgtgccctcgactcctcccgactccttcggccctcagtccgtcccgctactcactcacgtcacggcctcactcccctccctccccgacaccgaagttcctggctcgcccatggaccccgccgcgtcattcagaagcgacaagaccgagcccaacgacgaccgcatgtcccaacccgccgtgattccatcctctcaaccctcgtcccagagccctcctccatcatcccagcttgctcagactcaccgtgatcccaacgttggctacagctatgtcaactcccagcggccgcgcagaatcctttccccgccacccacgactcttcacgttgctaaccgccaaaattcggctgacttcgtgccaccgtcgccaaatcagatcgagagtgcttccgttaccgaacttcgaaatatgctcaagtcatgtctggccgtgaatgctaccctcaagtcagaagctgctcaccacaagctgcagtacaatatgctgagcttacaggctggcgaggatgccaatcgtgccatggtcgagcatgagatgactcgccgcgaagtggaagctctgcgtgacgccgaccgcgcccgtcaagcccgtcgcgaaatggaggctcgcttggatcccaccaagatcaagtatcgtgagttgcaaaccacgttcgacgcactcacaaaagaacacaactctcttcgtcgccgcatgaagaacgcatccaaggttatagcgcagcaggcagaacagaacgaatcattgtcaagcgagcgcgatgtacttctgaacagaattcgtgagaaccgagaacatttctctatgctatgtagtcctggcggagcctttcatggtgccctgacgccaaagacaccacccatgacgtctccccagcaggtcaggacgacacctcgacagacacccagatccgcaagcaagactgtccaccatgagaacgatccgaactcggctggattcgctgcccttctacaggctctcaaccaagattccaacgccagtgctccttcgaccccgatgtccgtcaaacctccaccacgcgcaccctttaagcacaatcgatctgttcactcgatgtcgtctctacccactacgcccttctcccgaccccgcggtaattactctggtctcctcccttccgcggatctggtaccgcagactgaacccgcacagagatttggaacgagccgatttgaaccccagactccaacgcgcctaggaggtcgcagaagccgagagagtaccatttccgccgaggacgaggccgaagcacagcagccccgagctatgaccttggagtctgtagccgcagccgcccagttctatctgtcccacagctcgcatgcttcgcatgcctcacagcgccaagagcctgaagaggaggtctacgaaagccaggccagtcaggccgcatccgaaatgctgagacgcgatcctcgccagagttttgaagttgcaagctccgttaattcacgagaaggctcacctaggcctgccgagaagccctccaaactgcagacgaaactttatggaccggtccaaaaagccggaatagccacagagaagcgaaagattagtcgaagtgcagattttgacgccagccctccgaagaaaccgcggtatcaaaatgctagcatccacggtgccgttggacttggaattcagaattcccgccgccgagggtgatttcacgcttacaaattggcaaaacaaaattggacgtattcacgacatggaaccgaatggggtgcatgaaacgggtgatgatatgaaatgacgacatgttaggatctttatgtattataccaaatttgctgacaagctactttgcattttgcaattgtctggagaattatgcgggacggaattttgggaaggataatggatctggacgatgtcttggaaggaaacaggaacggtccataaggccggtgaagacagaatcgccaatgcgccgtactaggctagaaattgagcaattaggtagctaatgaacaaaaaattaaacatcgata

SEQ ID NO: 12633 - DNA, 1260 bp, Muscodor strobelii
  misc_feature: SGI cDNA ID NO. 564110
  misc_feature: Encodes the peptide sequence at SEQ ID NO 12634
atgtcgaccctcccacgcggtctaaaagccgtgctacaaaaggcaccaacagacaccgtaatcctgtcctccctccgcacaccaatctgccgctcctacaaaggcgcactaaaagacgcctacccagaagaacttctctccgtcgtactccgcgcgaccttagacgcgcacccgaacttgccaccctcctccatcgacgacgtcgcggtgggagtagtattgagtgaattgggcgggagtaaggcagcgcgcatggcgatgaatcatgtggggtttgagaatacgacgagtttgtatacggtgaatcgcgcgtgttcgagtagtctgcaggctattgtggggattagtgcgcagattaggacgggtatgatttgtacggggattgcggcggggatggagagtatgacgaggaattatgggagtagggctattcctgttgatgtttggcccgagttgaaggagagtgaggtgaaggatgcaagggattgtataatgcccatgggtctcacctctgagaacgtcgcagagaggtataacgtctcgagacaggaccaagatgcgtttgcggtggagagtcataggagggctgcgagggcgagggagagtgggttttttgagggggagattgttccggtgaggacgaggtggcaggaggttgataaacaggggaataaggttggggaggagaagagcattacggcgacggaggatgatgggattagagcgaatgcgtccctggagggcatgcagaagttgaaacctgcgtttaaaccggatggtgcgtcaacagcgggtaattcttcgcaggtctctgacggggctgctgccacgcttttgatgcgcaggagcacggcgactgagttgggacttacggggagtatcattggcaaattcgtcggggcgcagacggtcgggtgtaaacccgatgagatgggtgttgggcccgcgattgcgattccggcgttgctaggcaagttgggactgcagaatgaggatgttgatcggtgggagatcaatgaggcgtttgctagtcaggcgatttactgtgtgagggagctgggacttgagggtgcgtgggaggagggaaaggtcaatcctgatggtggtgctattgcccttggtcatcctcttggtgctactggggctaggatggcggctacgctgcttcatgggcttgggaggagtggtggcgaggttggtgtggttagtatgtgtgttgggactggtatgggtatggctgggttgtttgttagggaatag

SEQ ID NO: 12634 - protein, 419 aa, Muscodor strobelii
  misc_feature: SGI Peptide ID NO. 564110
  misc_feature (292)..(418): Pfam Id: PF02803 Pfam Desc: Thiolase, C-terminal domain
  misc_feature (16)..(283): Pfam Id: PF00108 Pfam Desc: Thiolase, N-terminal domain
  misc_feature (1)..(419): NCBI GI: 85097859 Blast Desc: 3-ketoacyl-CoA thiolase [Neurospora crassa OR74A] gi|28922013|gb|EAA31284.1| 3-ketoacyl-CoA thiolase [Neurospora crassa OR74A]
  misc_feature (4)..(419): NCBI GI: 46127819 Blast Desc: FG08287.1 [Gibberella zeae PH-1]
  misc_feature (1)..(419): NCBI GI: 256733844 Blast Desc: NECHADRAFT_36664 [Nectria haematococca mpVI 77-13-4]
  misc_feature (3)..(419): NCBI GI: 171681712 Blast Desc: protein product [Podospora anserina] gi|170940815|emb|CAP66464.1| protein product [Podospora anserina]
  misc_feature (1)..(419): NCBI GI: 116201799 Blast Desc: conserved [Chaetomium globosum CBS 148.51] gi|88177302|gb|EAQ84770.1| conserved [Chaetomium globosum CBS 148.51]
  misc_feature (1)..(419): NCBI GI: 154295841 Blast Desc: BC1G_13290 [Botryotinia fuckeliana B05.10] gi|150843840|gb|EDN19033.1| BC1G_13290 [Botryotinia fuckeliana B05.10]
  misc_feature (2)..(419): NCBI GI: 145247901 Blast Desc: An13g00590 [Aspergillus niger] gi|134080944|emb|CAK41460.1| protein product [Aspergillus niger]
  misc_feature (2)..(419): NCBI GI: 258575861 Blast Desc: 3-ketoacyl-CoA thiolase B [Uncinocarpus reesii 1704] gi|237902378|gb|EEP76779.1| 3-ketoacyl-CoA thiolase B [Uncinocarpus reesii 1704]
  misc_feature (3)..(419): NCBI GI: 240111512 Blast Desc: 3-ketoacyl-CoA thiolase B, peroxisomal precursor , [Coccidioides posadasii C735 delta SOWgp]
  misc_feature (1)..(419): NCBI GI: 189205026 Blast Desc: 3-ketoacyl-CoA thiolase B [Pyrenophora tritici-repentis Pt-1C-BFP] gi|187985947|gb|EDU51435.1| 3-ketoacyl-CoA thiolase B [Pyrenophora tritici-repentis
  misc_feature (18)..(418): SWISSPROT Homolog: EC 2.3.1.16 Acetyl-CoA C-acyltransferase
  misc_feature: Useful for fungicidal and/or biocontrol applications
MSTLPRGLKAVLQKAPTDTVILSSLRTPICRSYKGALKDAYPEELLSVVLRATLDAHPNLPPSSIDDVAVGVVLSELGGSKAARMAMNHVGFENTTSLYTVNRACSSSLQAIVGISAQIRTGMICTGIAAGMESMTRNYGSRAIPVDVWPELKESEVKDARDCIMPMGLTSENVAERYNVSRQDQDAFAVESHRRAARARESGFFEGEIVPVRTRWQEVDKQGNKVGEEKSITATEDDGIRANASLEGMQKLKPAFKPDGASTAGNSSQVSDGAAATLLMRRSTATELGLTGSIIGKFVGAQTVGCKPDEMGVGPAIAIPALLGKLGLQNEDVDRWEINEAFASQAIYCVRELGLEGAWEEGKVNPDGGAIALGHPLGATGARMAATLLHGLGRSGGEVGVVSMCVGTGMGMAGLFVRE

SEQ ID NO: 12635 - DNA, 1670 bp, Muscodor strobelii
  misc_feature: SGI EST ID NO. CUFF.29969.0
  misc_feature: Variant of the nucleotide sequence at SEQ ID NO 12633
tcggatttcaacttttgttgtattttctctctaattaccagttcttacccttatttttcgcgaggcttcatgagttaggggccaattggagtagtactgactgccatcgctctcacacagtctgaggactcatctacacctcatcattcacccgctaccatctcatctcaccaatctcgctccatctcacactcacacacatcctcaagcaaccaccagaatgtcgaccctcccacgcggtctaaaagccgtgctacaaaaggcaccaacagacaccgtaatcctgtcctccctccgcacaccaatctgccgctcctacaaaggcgcactaaaagacgcctacccagaagaacttctctccgtcgtactccgcgcgaccttagacgcgcacccgaacttgccaccctcctccatcgacgacgtcgcggtgggagtagtattgagtgaattgggcgggagtaaggcagcgcgcatggcgatgaatcatgtggggtttgagaatacgacgagtttgtatacggtgaatcgcgcgtgttcgagtagtctgcaggctattgtggggattagtgcgcagattaggacgggtatgatttgtacggggattgcggcggggatggagagtatgacgaggaattatgggagtagggctattcctgttgatgtttggcccgagttgaaggagagtgaggtgaaggatgcaagggattgtataatgcccatgggtctcacctctgagaacgtcgcagagaggtataacgtctcgagacaggaccaagatgcgtttgcggtggagagtcataggagggctgcgagggcgagggagagtgggttttttgagggggagattgttccggtgaggacgaggtggcaggaggttgataaacaggggaataaggttggggaggagaagagcattacggcgacggaggatgatgggattagagcgaatgcgtccctggagggcatgcagaagttgaaacctgcgtttaaaccggatggtgcgtcaacagcgggtaattcttcgcaggtctctgacggggctgctgccacgcttttgatgcgcaggagcacggcgactgagttgggacttacggggagtatcattggcaaattcgtcggggcgcagacggtcgggtgtaaacccgatgagatgggtgttgggcccgcgattgcgattccggcgttgctaggcaagttgggactgcagaatgaggatgttgatcggtgggagatcaatgaggcgtttgctagtcaggcgatttactgtgtgagggagctgggacttgagggtgcgtgggaggagggaaaggtcaatcctgatggtggtgctattgcccttggtcatcctcttggtgctactggggctaggatggcggctacgctgcttcatgggcttgggaggagtggtggcgaggttggtgtggttagtatgtgtgttgggactggtatgggtatggctgggttgtttgttagggaataggaaattgtgtggttgttggaatatgagggtggtatccggatcattgtacagttcatcgtgctgaagattacctcagaattctgatgtgttgattgtggcctttgtcttactcccggtgctgactccgcaagtattaagccgtttctacactgattgcttattcttgcaattatatcgtagtcgggttaca

SEQ ID NO: 12636 - DNA, 387 bp, Muscodor strobelii
  misc_feature: SGI cDNA ID NO. 564111
  misc_feature: Encodes the peptide sequence at SEQ ID NO 12637
atgagagctacaaaccttcgcttaatctttgcggctattatggcagctatgccttttgctcttgggaacccggtgagggtatccgagcgcgatccgggaatgagaggccaagatggtacggagttggataccgacatgttcaagattgatcccgatctttacaagcatgaaaacgatgcgagcacggacgagaccgatctcttcaagcacaaacgtgataaaactgcggagtcggataccgacttctacaagcatgagagcgccgatagtaacgacgacattgatttcttcaaacacaaacgcgatgagacttcggagctcgacaaagatttctacaagcacgagagcggtgacaacactgaccgtgccgacgtcttcaagcactaa

SEQ ID NO: 12637 - protein, 128 aa, Muscodor strobelii
  misc_feature: SGI Peptide ID NO. 564111
MRATNLRLIFAAIMAAMPFALGNPVRVSERDPGMRGQDGTELDTDMFKIDPDLYKHENDASTDETDLFKHKRDKTAESDTDFYKHESADSNDDIDFFKHKRDETSELDKDFYKHESGDNTDRADVFKH

SEQ ID NO: 12638 - DNA, 853 bp, Muscodor strobelii
  misc_feature: SGI EST ID NO. CUFF.29975.0
  misc_feature: Variant of the nucleotide sequence at SEQ ID NO 12636
ggggactctctgacattgagtcgagtatgtatatatattcagtgccatcccaactccgaagttcaagacactttcactttgaaattcgtgaacaatcacccatctcccttcttgaatattctttgactctacaaatcctattgaattccaagttacagttgacctactaagaaactatgagagctacaaaccttcgcttaatctttgcggctattatggcagctatgccttttgctcttgggaacccggtgagggtatccgagcgcgatccgggaatgagaggccaagatggtacggagttggataccgacatgttcaagattgatcccgatctttacaagcatgaaaacgatgcgagcacggacgagaccgatctcttcaagcacaaacgtgataaaactgcggagtcggataccgacttctacaagcatgagagcgccgatagtaacgacgacattgatttcttcaaacacaaacgcgatgagacttcggagctcgacaaagatttctacaagcacgagagcggtgacaacactgaccgtgccgacgtcttcaagcactaaggcaacgtcacgtgtgagagcttaccaaacttcgctgtctagagcgagatttccgcgaagcaggatcagatcaattgtcaacaagaatatactccctctaagaagcttcggctgagagacgagtcaaaataagcgctcttcaaggatactcaatatccaaggacacacttgcaatgctgatgaaacccagcaacaggtggatgaatgggactgtgtatcaaggttgctttcacttgctcaaccactgtgactgttggcctgatacgttctcatagctcgtctgatcaacc

SEQ ID NO: 12639 - DNA, 1182 bp, Muscodor strobelii
  misc_feature: SGI cDNA ID NO. 564112
  misc_feature: Encodes the peptide sequence at SEQ ID NO 12640
atgcctgttagaaagcgtgagcaactcgccttattggcagcggtcttgagtactgcacagtccaaagaaatctatgtctcgccaacaggtacgggtaccgggactagcaccgctccgtatggatcaatccagtctgcagtgaatgccgcagtcgccggagacatcatctatcttcgcgctggcacttattctccgacgacaaacattcagatcaaaaagagcggcacatctacatctccaattacgctcaggtcatacggaacggagaaggtcatcatagatggagaagcgctaccagggacaccctacggcctaggcgagagtctgccaagtgcggaaagaggtatccttcacattgaaggatctgactactggaagttttacaatctcgaactcatcaacggaccttacggcatctatgcagtagattcctcgtcaaactactacgagcttctctcaacgcacgataattacgagtcgggatttcagatacaaggcgagtccgcaaacaacaccattatctacctagactcctatcgaaaccgtgaccctcgcaagaacggcgagagcgctgatggattcgcctgcaaggagggatcaggcgcgggtaacgtcttgcggaatgcgagactgtgggataatgtagacgacggattggacctctacatgttcgcctccgcggtgacaattgaggaagtgtactcatggggcaacggtgtcaatcgctggggcttcacagatttcgagggtgatgggaatggcttcaagctgggcatcactgataacccgccagcaaatcacatcatcaagaactgcatggcgttctccaacgcaaagaagggctttatcgataatggaaatcccgggtctttgacattcatccgcaacacagcctggaacaacggcgacactggattcgtgatgcggagctcgagctcgacacttactagcaatatcgcagctgttaacagtgcaagcccgcaagttagcttgatcgctacttcgaaatcttcgggtaattcgtgggattcttcgactacttggtcaaatagctcttttaagagtgtaagtccgactacgttgaaaggtgctagggatgcggatgggtcggttcatggcactgatttcctcattcccgcgtcggatgctgccattggcgcttcgactaaagtcactgtctga

SEQ ID NO: 12640 - protein, 393 aa, Muscodor strobelii
  misc_feature: SGI Peptide ID NO. 564112
  misc_feature (11)..(393): NCBI GI: 256723701 Blast Desc: polysaccharide lyase family 9 [Nectria haematococca mpVI 77-13-4]
  misc_feature (10)..(393): NCBI GI: 46114578 Blast Desc: FG03131.1 [Gibberella zeae PH-1]
  misc_feature (21)..(393): NCBI GI: 116198793 Blast Desc: CHGG_07552 [Chaetomium globosum CBS 148.51] gi|88178831|gb|EAQ86299.1| CHGG_07552 [Chaetomium globosum CBS 148.51]
  misc_feature (23)..(389): NCBI GI: 169781280 Blast Desc: [Aspergillus oryzae RIB40] gi|83773845|dbj|BAE63970.1| protein product [Aspergillus oryzae]
  misc_feature (9)..(389): NCBI GI: 159127156 Blast Desc: pectate lyase, [Aspergillus fumigatus A1163]
  misc_feature (9)..(389): NCBI GI: 70998829 Blast Desc: pectate lyase [Aspergillus fumigatus Af293] gi|66851773|gb|EAL92098.1| pectate lyase, [Aspergillus fumigatus Af293]
  misc_feature (9)..(389): NCBI GI: 119490114 Blast Desc: NFIA_062360 [Neosartorya fischeri NRRL 181] gi|119411132|gb|EAW21075.1| conserved [Neosartorya fischeri NRRL 181]
  misc_feature (11)..(389): NCBI GI: 67524159 Blast Desc: AN2537.2 [Aspergillus nidulans FGSC A4] gi|40745486|gb|EAA64642.1| AN2537.2 [Aspergillus nidulans FGSC A4] gi|259487967|tpe|CBF87052.1| TPA: pectate lyase (Eurofung)
  misc_feature (6)..(390): NCBI GI: 115390398 Blast Desc: conserved [Aspergillus terreus NIH2624] gi|114195100|gb|EAU36800.1| conserved [Aspergillus terreus NIH2624]
  misc_feature (39)..(390): NCBI GI: 261360658 Blast Desc: pectate lyase L [Verticillium albo-atrum VaMs.102]
  misc_feature (42)..(302): SWISSPROT Homolog: EC 4.2.2.2 Pectate lyase
MPVRKREQLALLAAVLSTAQSKEIYVSPTGTGTGTSTAPYGSIQSAVNAAVAGDIIYLRAGTYSPTTNIQIKKSGTSTSPITLRSYGTEKVIIDGEALPGTPYGLGESLPSAERGILHIEGSDYWKFYNLELINGPYGIYAVDSSSNYYELLSTHDNYESGFQIQGESANNTIIYLDSYRNRDPRKNGESADGFACKEGSGAGNVLRNARLWDNVDDGLDLYMFASAVTIEEVYSWGNGVNRWGFTDFEGDGNGFKLGITDNPPANHIIKNCMAFSNAKKGFIDNGNPGSLTFIRNTAWNNGDTGFVMRSSSSTLTSNIAAVNSASPQVSLIATSKSSGNSWDSSTTWSNSSFKSVSPTTLKGARDADGSVHGTDFLIPASDAAIGASTKVTV

SEQ ID NO: 12641 - DNA, 396 bp, Muscodor strobelii
  misc_feature: SGI cDNA ID NO. 564113
  misc_feature: Encodes the peptide sequence at SEQ ID NO 12642
atgcatttttcgactttaattgcggcttctctggccctcgctgcaggtgtcagtgcccaaaatcccagcccaaacaccacgatagggcttgtcagtctctacggcgactcgggatgtaccaatgagaccaacaagaagacagagacagccctcttcggtggcattggtctctgctactttttgcatttttaccccgcccccttaaacaccacagcgataaaaatcgatttcactgagaccgggtcttattattcttgcgccttccacgcatttaccgatggtggttgcagagaaaatcctactgtcattgctgagactggcgtttgtaaaagcgtctcggattactcggattcgcctgacactaactggcaatcgggtgcgctcatttgcgcttaa

SEQ ID NO: 12642 - protein, 131 aa, Muscodor strobelii
  misc_feature: SGI Peptide ID NO. 564113
MHFSTLIAASLALAAGVSAQNPSPNTTIGLVSLYGDSGCTNETNKKTETALFGGIGLCYFLHFYPAPLNTTAIKIDFTETGSYYSCAFHAFTDGGCRENPTVIAETGVCKSVSDYSDSPDTNWQSGALICA

SEQ ID NO: 12643 - DNA, 1002 bp, Muscodor strobelii
  misc_feature: SGI EST ID NO. CUFF.29996.0
  misc_feature: Variant of the nucleotide sequence at SEQ ID NO 12641
ggcatttataagaaaccgtccgcgctttcttccatcaaacacaacatcttcattgtctacaatcctttacctcacgggaatctggaaaggcagtaaatatcttgaaagaaagctagaaaatgcatttttcgactttaattgcggcttctctggccctcgctgcaggtgtcagtgcccaaaatcccagcccaaacaccacgatagggcttgtcagtctctacggcgactcgggatgtaccaatgagaccaacaagaagacagagacagccctcttcggtggcattggtctctgctactttttgcatttttaccccgcccccttaaacaccacagcgataaaaatcgatttcactgagaccgggtcttattattcttgcgccttccacgcatttaccgatggtggttgcagagaaaatcctactgtcattgctgagactggcgtttgtaaaagcgtctcggattactcggattcgcctgacactaactggcaatcgggtgcgctcatttgcgcttaatttaagcaggtcaagcgagacagggaatcaggcttttcgagcatgattcttaacaggctacatgaggacgaaattgcagccggatttcttacgcgagataacctatcacattttctcatcgaaaatatgagacgcaactttactggaatatgaatacctacacggcggatagatgaagtgcttgacgtaggatggtgaagcttagttctcgagacatcgcatttgcctgaataaatgttgtatatctagcaaagtttgcgcggatctctatactctgtaagcaagctcatcctaacagttgcagagatataagaagcgtgggagataaatgacgttacaacttaatcaactttgtattctctagcaatacgagtcatgttctattcactacttctcgtcgagaaatataaatagataacgggctagggtttcatcatatctccgcatcaccagacagacaatttggcaggctgaatgatacttccac

SEQ ID NO: 12644 - DNA, 243 bp, Muscodor strobelii
  misc_feature: SGI cDNA ID NO. 564114
  misc_feature: Encodes the peptide sequence at SEQ ID NO 12645
atgatgcactgtcttgccaagatactagtctttgccattggcgtcatggccctcgtcgctcaagacccttgcctcgcactaacacggggtattgtacgaaaagctgcgaccacgtcaactacacatattcccactcgagctgtcaatccctcgcgcaaccaggatgtcctactgcctgatggcaaaaggaaagacgccggggatctcgatatccaggagaccgaaggcatagcagaattatga

SEQ ID NO: 12645 - protein, 80 aa, Muscodor strobelii
  misc_feature: SGI Peptide ID NO. 564114
MMHCLAKILVFAIGVMALVAQDPCLALTRGIVRKAATTSTTHIPTRAVNPSRNQDVLLPDGKRKDAGDLDIQETEGIAEL

SEQ ID NO: 12646 - DNA, 1436 bp, Muscodor strobelii
  misc_feature: SGI EST ID NO. CUFF.30011.0
  misc_feature: Variant of the nucleotide sequence at SEQ ID NO 12644
ctaatatataccatggttgatcaagccgagtacgtcgatgccttgtttataaataacatgccaagtgttccgcatccacgtgcagtcagctgtcaaccgataatcattaccattgctgaaaccccaccagtttcaccgaattgatcgaccttacaatgaatcagaaatgcagcctcagcctcagagtacatacagcataggatcatacgaagccacacaaaatcttggcggtcctatcattgtggaataaaaacttggagaatatctaagatgtgttcgcgggatggcgcagggcgcgcgatatctcaatcaatgccttctagggtctccgattgcttcgtcactgcagtatcattgtcatctcatttatagttgaactatctaaaccccttcactctgcagcggctgtcaccaaataccatcgtcaaaatgatgcactgtcttgccaagatactagtctttgccattggcgtcatggccctcgtcgctcaagacccttgccgtaagtagccatttgcctaacaacatgtctacttcgtatttgatgtactaagtcgcactaacacggggtattgtacgaaaagctgcgaccagtaagtgctttactagggttccctcaaccgccaaagcacgcgcaacaactcgtttgccagcgtcaactacacatattcccactcgagctgtcaatccctcgcgcaaccaggatgtcctactgcctgatggcaaaaggaaagacgccggggatctcgatatccaggagaccgaaggcatagcagaattatgataagaagcgatgagatcgtttctgcccgcacacaccagggtatcgaactgttatccaaaggagacgcgacctagctgggaatcatatgcacgcaatcgtatagatgtgcaaagatgtataataaaaagttaaagcccaaagagagaagccgaagggtatcgaaggcggagacctcgtcgcatcggagatagagtcatgaagcttgcgtcaatgcttcggatgaattcgaccatttcgggatggttacatcggacagttacagctctcaatatgccatttaggcgtgttccttaaaacattggcccttcctgaaatctcgaaggtcttgccttcggactattcgatgcactcttgaccgctggagtcgaatttgtagggcgaggtgctaccggactaccttctggtgtttgattgtactgaggtttgcctctatccgaggaggcgctgagtcccccttggtttgcgagataatgtggaggaggactgtgatagctgtcattcgaaggcattcgttgattgatagggcgttgtacattaggttgtatcattggtgcatcgctgccagtgcggctatgcgaagaattgcttgacttattcgcgttgtctctagagcgacgcatatttctgataagcagtgcaattgcgattgcta

SEQ ID NO: 12647 - DNA, 1719 bp, Muscodor strobelii
  misc_feature: SGI cDNA ID NO. 564115
  misc_feature: Reduced expression when VOC is produced
  misc_feature: Encodes the peptide sequence at SEQ ID NO 12648
atggctaaattgtcggcgcctaatgaaacggacacctcggtcgctgactctgcgacggcatatacccgattacacattacgccattcgatcaatccttattgaatactgttatatctgtatccttattaccccgcgcacgtaatatctcgtaccacgcgatcgaggcgtttcccgaaaagcgctttggattcgttgacctgcctgctatggacgccgagaagcttaagaagaagctgaacggcgccgtactcaaaggttcaaaaatgcgcatcgagacggcgcgccctgagacggtacctgagcttacagtagatgaagaccaaactgcaacaaagaaggaaaagaagaagtcgaagaagcggaagagagaggccggcgtgaccgagggcgtcgagctggaagaccgaaagatcaagcgaggatggacagtcacggagaaggacatgatcgaggaaaagcgcaaaaagtcgaagcgggacaaggaaaagaaggagagcaaagtcaaagacgagaagaaacacaagaaggataagaaagagaagcgaagtcatgtcaaatcgaagtacactgacgaacccgagtgtctcttcaagacaaagcttcccgctgtcgcgcagccgaagcaggaaaaggaagacgatgaagatgagccccacaagaagaagcggaaacggaagagcgaccgagagatcgtggtccacgagtttgagaagaccaccaagtacccttcgttcctgaaatcgagctcgacaactggtggtgctgagcccgctgtcttcaaggacggcgttggctgggtggacagcgaggggaacgtcattgagccggtaaggtcgaatagacggcccgagggtatcccagcaccgaaacctcccccgacgaagaagcccactccgacgcctgccctagtcaaagacgatgaaaatggcgaggacgaggatgacgagacgagtagcagtggctcgtcatccaacgacgaggacgaggattcttccagctccgatgaagaagaagatgagaagtcgactaaggataacaaaaccaccgagcctgcacgactgaaactcgatacgaaagcgccgagtagtccgtcaatcactagaccggaatccgccaggcctaagtcatcaagttcaattactagtctgtcaataaagataccgccaaccacgcccgcagcgaagaaggtccatccgctagaagcgttatacaaacggcctcaaggaaacgccgagactgccaacgatgcccccgaagcgcagcctttcagcttcttcggggctgaggacgatgacgacatggaagacagtacacatgcgcgatctagccaaccacccatgacacccttcagcaagcaagacttcgacttcagaaatatccgaagtgctgctccaacacctgacactgcacacccaagccgatcattcaacttttgggcgcgaggctctgcggaaaaggatgaagaggaggaagatcaagccgatggtctcgacaatgtggaagaagaggacgaagaggacggacaaactcaaaacgtggatatggcagataccaaggacgaagatacagcaaccgctgaggatcctgttagcgatttccagaagcagttctgggagaatcgtggaaatcttaatcgtgcctggaggaaacggaagaagacagcggcgaaggagaagcgatacagagacaatcgcgcaagggctgatagagcaatctag

SEQ ID NO: 12648 - protein, 572 aa, Muscodor strobelii
  misc_feature: SGI Peptide ID NO. 564115
  misc_feature (16)..(572): NCBI GI: 171678046 Blast Desc: protein product [Podospora anserina] gi|170937092|emb|CAP61750.1| protein product [Podospora anserina]
  misc_feature (21)..(572): NCBI GI: 116201681 Blast Desc: CHGG_08725 [Chaetomium globosum CBS 148.51] gi|88177243|gb|EAQ84711.1| CHGG_08725 [Chaetomium globosum CBS 148.51]
  misc_feature (17)..(572): NCBI GI: 39941396 Blast Desc: MGG_05609 [Magnaporthe grisea 70-15] gi|145022292|gb|EDK06312.1| MGG_05609 [Magnaporthe grisea 70-15]
  misc_feature (21)..(572): NCBI GI: 256733449 Blast Desc: NECHADRAFT_91727 [Nectria haematococca mpVI 77-13-4]
  misc_feature (14)..(565): NCBI GI: 70983394 Blast Desc: conserved [Aspergillus fumigatus Af293] gi|66844850|gb|EAL85186.1| conserved [Aspergillus fumigatus Af293] gi|159123770|gb|EDP48889.1| conserved [Aspergillus A1163]
  misc_feature (22)..(568): NCBI GI: 121719647 Blast Desc: ACLA_057520 [Aspergillus clavatus NRRL 1] gi|119404734|gb|EAW15096.1| ACLA_057520 [Aspergillus clavatus NRRL 1]
  misc_feature (14)..(568): NCBI GI: 119484124 Blast Desc: NFIA_096900 [Neosartorya fischeri NRRL 181] gi|119410121|gb|EAW20068.1| NFIA_096900 [Neosartorya fischeri NRRL 181]
  misc_feature (19)..(568): NCBI GI: 169784376 Blast Desc: [Aspergillus oryzae RIB40] gi|83775396|dbj|BAE65516.1| protein product [Aspergillus oryzae]
  misc_feature (18)..(568): NCBI GI: 226288617 Blast Desc: conserved [Paracoccidioides brasiliensis Pb18]
  misc_feature (4)..(283): NCBI GI: 261361030 Blast Desc: conserved [Verticillium albo-atrum VaMs.102]
  misc_feature: Useful for introducing or modulating the production of volatile compounds
MAKLSAPNETDTSVADSATAYTRLHITPFDQSLLNTVISVSLLPRARNISYHAIEAFPEKRFGFVDLPAMDAEKLKKKLNGAVLKGSKMRIETARPETVPELTVDEDQTATKKEKKKSKKRKREAGVTEGVELEDRKIKRGWTVTEKDMIEEKRKKSKRDKEKKESKVKDEKKHKKDKKEKRSHVKSKYTDEPECLFKTKLPAVAQPKQEKEDDEDEPHKKKRKRKSDREIVVHEFEKTTKYPSFLKSSSTTGGAEPAVFKDGVGWVDSEGNVIEPVRSNRRPEGIPAPKPPPTKKPTPTPALVKDDENGEDEDDETSSSGSSSNDEDEDSSSSDEEEDEKSTKDNKTTEPARLKLDTKAPSSPSITRPESARPKSSSSITSLSIKIPPTTPAAKKVHPLEALYKRPQGNAETANDAPEAQPFSFFGAEDDDDMEDSTHARSSQPPMTPFSKQDFDFRNIRSAAPTPDTAHPSRSFNFWARGSAEKDEEEEDQADGLDNVEEEDEEDGQTQNVDMADTKDEDTATAEDPVSDFQKQFWENRGNLNRAWRKRKKTAAKEKRYRDNRARADRAI

SEQ ID NO: 12649 - DNA, 507 bp, Muscodor strobelii
  misc_feature: SGI cDNA ID NO. 564116
  misc_feature: Encodes the peptide sequence at SEQ ID NO 12650
atggccacaaagttggcgcctctgccacccctccggtttgtgcgaacggtcctaaaatcgttcatgaatgagtccggtctcgaacctaggtcaaatatacgagtgacaaatgctatcaagggcaaagtcgacttcgagttagatatctccaaagatcatacaaaccgattaaagatcttgcacgggggcaccatcgctagcatggtcgacctaggaggttcacttgctgttgcatctaccggcctctatgcgaccggtgtatcaacggatcttaatgttacatatctgtcaagcggtggtctagtcggcgacaagataagagcaacagctgtttgcgacaagatcgggaaaacattggcctacaccactatcacctttcagaatcaaaagggagagctagcagcgagaggaagccacacaaaattcgtgacgcacgctttcaagagtcaaagtgaacccttcattgcgccggaagacactgatcttgcagaggatgatgagccatga

SEQ ID NO: 12650 - protein, 168 aa, Muscodor strobelii
  misc_feature: SGI Peptide ID NO. 564116
  misc_feature (57)..(135): Pfam Id: PF03061 Pfam Desc: Thioesterase superfamily
  misc_feature (4)..(166): NCBI GI: 164425581 Blast Desc: NCU05522 [Neurospora crassa OR74A] gi|157070983|gb|EAA31248.2| conserved [Neurospora crassa OR74A]
  misc_feature (8)..(165): NCBI GI: 171681596 Blast Desc: protein product [Podospora anserina] gi|170940757|emb|CAP66406.1| protein product [Podospora anserina]
  misc_feature (8)..(159): NCBI GI: 256733853 Blast Desc: NECHADRAFT_77413 [Nectria haematococca mpVI 77-13-4]
  misc_feature (8)..(148): NCBI GI: 119179891 Blast Desc: [Coccidioides immitis RS]
  misc_feature (8)..(148): NCBI GI: 212535852 Blast Desc: PaaI_thioesterase family protein, [Penicillium marneffei ATCC 18224] gi|210070481|gb|EEA24571.1| PaaI_thioesterase family protein, [Penicillium marneffei ATCC
  misc_feature (8)..(148): NCBI GI: 242794201 Blast Desc: PaaI_thioesterase family protein, [Talaromyces stipitatus ATCC 10500] gi|218718911|gb|EED18331.1| PaaI_thioesterase family protein, [Talaromyces stipitatus ATCC
  misc_feature (8)..(148): NCBI GI: 226279720 Blast Desc: PAAG_06333 [Paracoccidioides brasiliensis Pb01]
  misc_feature (8)..(148): NCBI GI: 261187835 Blast Desc: BDBG_09263 [Ajellomyces dermatitidis SLH14081] gi|239593452|gb|EEQ76033.1| BDBG_09263 [Ajellomyces dermatitidis SLH14081] gi|239608432|gb|EEQ85419.1| BDCG_08688 [Ajellomyces
  misc_feature (8)..(148): NCBI GI: 145248678 Blast Desc: An14g00490 [Aspergillus niger] gi|134081345|emb|CAK41848.1| protein product [Aspergillus niger]
  misc_feature (8)..(148): NCBI GI: 146323655 Blast Desc: PaaI_thioesterase family protein [Aspergillus fumigatus Af293] gi|129555327|gb|EBA27194.1| PaaI_thioesterase family protein, [Aspergillus fumigatus Af293] PaaI_thioesterase
MATKLAPLPPLRFVRTVLKSFMNESGLEPRSNIRVTNAIKGKVDFELDISKDHTNRLKILHGGTIASMVDLGGSLAVASTGLYATGVSTDLNVTYLSSGGLVGDKIRATAVCDKIGKTLAYTTITFQNQKGELAARGSHTKFVTHAFKSQSEPFIAPEDTDLAEDDEP

SEQ ID NO: 12651 - DNA, 923 bp, Muscodor strobelii
  misc_feature: SGI EST ID NO. CUFF.30161.0
  misc_feature: Variant of the nucleotide sequence at SEQ ID NO 12649
tacatatctgtcaagcggtggtctagtcggcgacaagataagagcaacagctgtttgcgacaagatcgggaaaacattggcctacaccactatcacctttcagaatcaaaagggagagctagcagcgagaggaagccacacaaaattcgtgacgcacgctttcaagagtcaaagtgaacccttcattgcgccggaagacactgatcttgcagaggatgatgagccatgagattgagatctctcaatacacatagccaggtcgcgggatagtatgctgttggtcgtcacgattgttgtcagtgcttatagaacagttagatcctagatcccagatattaagtgcagagctcacgcttcacacagacgttctaaagttcaagatagacttttactcacggaaccaggcacacatttacaaagcaaattatggcattaatctaggtcctactagatggctaagatggccgaatcatgagataaatcatcgcgcggagactatcatacaaaatagggcagatgctatttgcaactgaccagagccaagtccatatagcaggctacggtgcgccggcccaatgactgtcaaaagcccgaatccgtacctactcggtctcctcggccttaatccgcttctccttcttgactttagccttctttttcttgcgcttctcgggagccggagcgtcttgcatctgtacgtccacactggaacctctagtgctcatttcgtcctttgtctcgcgcttcatcttcggttcatgatattcgtcgggaatgttcgtcgcgtttgcatcgaacgactggaaagtgatgtccggaaacctccacttcatctcccactcaaccaggatctcttgaatgcggcgctgcatgtcgagtttcaacttatcaatgtgttccagcttgaccgggtcgccctccgg

SEQ ID NO: 12652 - DNA, 3288 bp, Muscodor strobelii
  misc_feature: SGI cDNA ID NO. 564117
  misc_feature: Encodes the peptide sequence at SEQ ID NO 12653
atgagtgaaggcactatgtcggccaatggtaccatggaagtccccatcggcgcccagcttaatccatcgtgggaggtatcaccatcggccactgtcccggcgcccactgtcccagacctctacgtctgccaccaagccaactcccaagacggtatcgatgttgtcgattttgccatcttggctacaaatagaggcgacgacgtaatcgcaaaaggggacaccgacagggagtccaccgcgacggcaaaatcttccgagaatgaggatgtcatggcaattgacaccccggaaactgcagaatctaacagtgccaatgagcccgataaggtagacttcaaatggagcagctgcgaggaacttgatgacgaggatcgcattcttctgaaagaagaagcactcagatttggtattgagaagtgccacaagttactcgacgcacttgaggaggtgcagtcgcagattgccggcattgatgatccgtatgcgcggactatctggtgccccgacagcttagacaagctcatttcagagtgtaaacgaatcattaaggatcatgagaatttcagtgtccttgttggcgtcaaaggagccaccggcacgggcaagacgagcttgcttaacgcagtgcttagatatagagaacttttaccgtctaacaacgaggaggccgcgaccgcagtcccttgcacagttgcgtacaactcagatgataatccaaacaaccggtttcgttgcgaaatcatcttccgaggaaagaagagtctgagagcccaattgaaccgattcttcaaggaactggaggagctagctgatcttcaagaaaaggagcaattggatcgtacgcctgctgatgaaatcgcaatcagaaactttaacgctcatttgaagccgtcttatgaaatgatcaaagtgctcttcgacatcggtgaggagtacgttaaggatatggacacagaaaatatcctggaaagtaatccggaagtcctcaagctctgtggcaccaaaaagcaaattcgctcacacgacgaagaaactttctcaatgaatgtgaagccatatctagattccacagtcattgagcatggccattcgaagacggcattcgcgacttggcctcttgtcgaggaagtacggatcttcgttaaatcaccgattctcgagaacggcgtggtgttggtagacctcccaggcgtcgcagatgcggttgaaagtcgtgccttagttgcagaacagtacttcgagaagttggaggctgcaatcatcgtcgccccggtcgcaagagctgcgagcgcaatcatcaacacagaattgatgacaaagcatgtagagatggagttcatgaagcgcggcaggtttcacaaggacagtttctgcgtgggcgttactcaaattgattcaatcgaccgagctcccgccttgaagaagaacaatgcaagatcgaatcaacagattcaacactacttacgagaagaggctgatctcaaagacaagcgagatgagctacagaagttgatcaaagaggtggataagggcgcgggacgactccgcaagatagcgaaagaacaatccaagaaaaagaagcagttcgagaacaaaacgggtgcaaatcaacgcaaatatgatgctgccgtagcccgatatgatgaagaaagcgcaaagctagcagtagaactgaagcacttggacagactcaataagagaagcagaaagatcaaaaaggacctcaagatcgttaccgacaggatcatgttcttctgcattaaagagaggaacaaccttctcgagggcaagctccagagcgtgttcgccaagagccagttgaccttgaatggcgacgatgagaacacgaaccgtatatacgacggcaaggcttcagtttgcttcaccagtgctaaggcgtattggcagtgcgtacaaggtgaagagcacatatcgggatttccggatgagctgtacactggtatcccacacctgaggacgtggatccgaaaagcaacgattgccaaacgggaggaacacgcggatactatgttgaacagactgcactctcaacagcatatagcccgcctttgggcggcagacgaaacaggccggatcaagataaagatgagccgggttgaattcgagagagatcttctaaagggagcccttgaggatattgaacagaacatgaaagctttctgggagaaactgggcggcatggtctttgcaatgaaccccatgagcgagaagaatgctgcttttggacaatgcgcccttgagtgctcgaaggcagtaaatcgctggacgttccaaacaccgaacgacccttcatgtacggatctgatccattggcagacatataaggcgaacattactagaggcgggatgagctggacgagcaagacgggcaaaaacccccaagaccaccattggatgaaggacatctctctggtattcgagcagaccatcattcaaccctggaatcagtcattaaatcacgacattccaggcctagctaagccggcttccagagatatcaacaagatctgggacacgttcttggaacgcctaggatttgctgttgcggcttttaacgaggatatgctcatcagtctggaagcggaaaaacccgccctcgatctcctcaagacaaagatgtacaacgacctgcgtgctgtcctgggcggtctctctaggagtgcgcggaaggccaacattgctggcattgtgcagaagcagtggctcccagctttcaagaaagcacagaagatacaaggcaacggctcacatcaagcgcgacaagaagaactaagcaactacgccaagttcagcagtgagaaagtcttcgccgcgacctttgagaagactcagaggtacatggaccaggttttccgagcactcccgaaggaattgacatcggtctctaccgcggcgatggagacatgccgccagcacctgtcaactctactggacaaggtcgttgagccggagggcgacccggtcaagctggaacacattgataagttgaaactcgacatgcagcgccgcattcaagagatcctggttgagtgggagatgaagtggaggtttccggacatcactttccagtcgttcgatgcaaacgcgacgaacattcccgacgaatatcatgaaccgaagatgaagcgcgagacaaaggacgaaatgagcactagaggttccagtgtggacgtacagatgcaagacgctccggctcccgagaagcgcaagaaaaagaaggctaaagtcaagaaggagaagcggattaaggccgaggagaccgagtag

SEQ ID NO: 12653 - protein, 1095 aa, Muscodor strobelii
  misc_feature: SGI Peptide ID NO. 564117
  misc_feature (125)..(1040): NCBI GI: 85097855 Blast Desc: NCU05557 [Neurospora crassa OR74A] gi|28922012|gb|EAA31283.1| [Neurospora crassa OR74A]
  misc_feature (94)..(1043): NCBI GI: 85096982 Blast Desc: NCU04722 [Neurospora crassa OR74A] gi|28921846|gb|EAA31121.1| [Neurospora crassa OR74A]
  misc_feature (189)..(1022): NCBI GI: 261361090 Blast Desc: conserved [Verticillium albo-atrum VaMs.102]
  misc_feature (110)..(1049): NCBI GI: 46127801 Blast Desc: FG08278.1 [Gibberella zeae PH-1]
  misc_feature (65)..(1007): NCBI GI: 154308329 Blast Desc: BC1G_07910 [Botryotinia fuckeliana B05.10] gi|150852995|gb|EDN28187.1| BC1G_07910 [Botryotinia fuckeliana B05.10]
  misc_feature (191)..(698): NCBI GI: 261360851 Blast Desc: conserved [Verticillium albo-atrum VaMs.102]
  misc_feature (130)..(970): NCBI GI: 39951585 Blast Desc: MGG_01435 [Magnaporthe grisea 70-15] gi|145020731|gb|EDK04860.1| MGG_01435 [Magnaporthe grisea 70-15]
  misc_feature (131)..(988): NCBI GI: 119473545 Blast Desc: NFIA_000950 [Neosartorya fischeri NRRL 181] gi|119406801|gb|EAW16751.1| NFIA_000950 [Neosartorya fischeri NRRL 181]
  misc_feature (79)..(790): NCBI GI: 212535532 Blast Desc: conserved [Penicillium marneffei ATCC 18224] gi|210070321|gb|EEA24411.1| conserved [Penicillium marneffei ATCC 18224]
  misc_feature (177)..(917): NCBI GI: 154297711 Blast Desc: BC1G_12267 [Botryotinia fuckeliana B05.10] gi|150858396|gb|EDN33588.1| BC1G_12267 [Botryotinia fuckeliana B05.10]
MSEGTMSANGTMEVPIGAQLNPSWEVSPSATVPAPTVPDLYVCHQANSQDGIDVVDFAILATNRGDDVIAKGDTDRESTATAKSSENEDVMAIDTPETAESNSANEPDKVDFKWSSCEELDDEDRILLKEEALRFGIEKCHKLLDALEEVQSQIAGIDDPYARTIWCPDSLDKLISECKRIIKDHENFSVLVGVKGATGTGKTSLLNAVLRYRELLPSNNEEAATAVPCTVAYNSDDNPNNRFRCEIIFRGKKSLRAQLNRFFKELEELADLQEKEQLDRTPADEIAIRNFNAHLKPSYEMIKVLFDIGEEYVKDMDTENILESNPEVLKLCGTKKQIRSHDEETFSMNVKPYLDSTVIEHGHSKTAFATWPLVEEVRIFVKSPILENGVVLVDLPGVADAVESRALVAEQYFEKLEAAIIVAPVARAASAIINTELMTKHVEMEFMKRGRFHKDSFCVGVTQIDSIDRAPALKKNNARSNQQIQHYLREEADLKDKRDELQKLIKEVDKGAGRLRKIAKEQSKKKKQFENKTGANQRKYDAAVARYDEESAKLAVELKHLDRLNKRSRKIKKDLKIVTDRIMFFCIKERNNLLEGKLQSVFAKSQLTLNGDDENTNRIYDGKASVCFTSAKAYWQCVQGEEHISGFPDELYTGIPHLRTWIRKATIAKREEHADTMLNRLHSQQHIARLWAADETGRIKIKMSRVEFERDLLKGALEDIEQNMKAFWEKLGGMVFAMNPMSEKNAAFGQCALECSKAVNRWTFQTPNDPSCTDLIHWQTYKANITRGGMSWTSKTGKNPQDHHWMKDISLVFEQTIIQPWNQSLNHDIPGLAKPASRDINKIWDTFLERLGFAVAAFNEDMLISLEAEKPALDLLKTKMYNDLRAVLGGLSRSARKANIAGIVQKQWLPAFKKAQKIQGNGSHQARQEELSNYAKFSSEKVFAATFEKTQRYMDQVFRALPKELTSVSTAAMETCRQHLSTLLDKVVEPEGDPVKLEHIDKLKLDMQRRIQEILVEWEMKWRFPDITFQSFDANATNIPDEYHEPKMKRETKDEMSTRGSSVDVQMQDAPAPEKRKKKKAKVKKEKRIKAEETE

SEQ ID NO: 12654 - DNA, 1353 bp, Muscodor strobelii
  misc_feature: SGI cDNA ID NO. 564118
  misc_feature: Encodes the peptide sequence at SEQ ID NO 12655
atggacttacgcacgcggaagcgggtctggaatgagatccaagacgtcaacgccgatttcttcaaccttcgaacggtcatcaagccagcatttgatgatgacttcacgcaattctatttcgtcatgtcccccaatgacggagcgatggctcatatgagagtcgtcggctgtctttatatcccggatacctatccggagtctccgcctgttgtccatctttatacacgaactggtcgatataacgccgacgtttataggggatgcattggcgacaggacgcgaagctccttgtgcttcgatattctgcgttctcagaagaatggagggatttggaaaccagaatacactatttctatgttgtacgctactctgatggcaacgattgtttccttttacgttcctcaagagcatggtggcgaagtcgctgagtatgtgtcgatggaaaagcttgaggacatcaagagagccgcccagaagactttcgatactcacaagcatctagtcccaaagcttccagttatcccactggtacaggcaacaacgatcccggcccagcaaatgcattttcctgccgtaatcatgactgagggcaccataacaacgactgcaggtcctatctacttacagacagcagaccgggctgctgtacacacgtttgcaatcgatctatccgagctccatgcaggtattgtgttttcaatcgttcttagctcgtctatgacagacatcgtaggcaagacaccaagtactgttctcgttaggaatggggttactgctacagcagcccgaaaacggtctaatgagaacacaaaatggttctatcatggccagccaatgaacggcggggatatgcgactgcacgtcacaattgggagggatcagatgacctttgcatactactccaacggtcttcggtacatccacggggactgtccggtttcgcggctcacaaatacccagattggagacgtgcgtgggactcctttttatgtccacgtcttcaccaagaagaaatatggagatgtagcaaaattgacatttcttgacactgaaggcaagggctatatccacactgtgggtcatgagtctggcgatatgatggacggttatgaatacatcatacccgaacctatcgatacagcgggaggttgtaacaatgatcttgacttcgagcttgtgaaagactcggaagttgccgaggccgtcgagcagagcagattacaagcagcatcggtactgagagacgaacggagaagaagaaaggaagaccagccggcgaactggccggatttggatgagaacttcctggaagggatgatggacatgaatatagggagcaataacaatatctag

SEQ ID NO: 12655 - protein, 450 aa, Muscodor strobelii
  misc_feature: SGI Peptide ID NO. 564118
MDLRTRKRVWNEIQDVNADFFNLRTVIKPAFDDDFTQFYFVMSPNDGAMAHMRVVGCLYIPDTYPESPPVVHLYTRTGRYNADVYRGCIGDRTRSSLCFDILRSQKNGGIWKPEYTISMLYATLMATIVSFYVPQEHGGEVAEYVSMEKLEDIKRAAQKTFDTHKHLVPKLPVIPLVQATTIPAQQMHFPAVIMTEGTITTTAGPIYLQTADRAAVHTFAIDLSELHAGIVFSIVLSSSMTDIVGKTPSTVLVRNGVTATAARKRSNENTKWFYHGQPMNGGDMRLHVTIGRDQMTFAYYSNGLRYIHGDCPVSRLTNTQIGDVRGTPFYVHVFTKKKYGDVAKLTFLDTEGKGYIHTVGHESGDMMDGYEYIIPEPIDTAGGCNNDLDFELVKDSEVAEAVEQSRLQAASVLRDERRRRKEDQPANWPDLDENFLEGMMDMNIGSNNNI

SEQ ID NO: 12656 - DNA, 3221 bp, Muscodor strobelii
  misc_feature: SGI EST ID NO. CUFF.30182.1
  misc_feature: Variant of the nucleotide sequence at SEQ ID NO 12654
cgacagtgataagatataagtatattatacaaagtgatattgaattggcgtcttggctggattggggaaaccccaagcaaactcagtcgcttacactcaaagctgggctgtttcttcccgtatggccaaaccacacagagccaccgcaatctatggacaaggtttaaatcatagcacatccatttcctatcatccagatgcgccccatgtaggatatctacaggcgcctagctgacggtgcgcattcaaacttcacacctcaacttcgccgtagacccaagacatatacaaccgtagcttctgctagagtctcctggtcgtgctcgaatatgaacccaaaacagtcatagtgtgtatcagatgtttgcctgaatccacgtggaataataatccaatgcaacaggcgagacaggcttgcacgacttttgatcgcagtctaagatcttgccaagatcttggccgatgtccgtctgcgtgaaaagtggtctagcctatttggtgtttatgccctcttggatacacatttcgggcagaggacaggcctagaagaccctgaatttctcttttcagtggtcctgcatcatgcaatgcacctgtctcgtctgctgagacattcgagactccctatttcgacaagcacttaatcttggtactaagcgcatctggaatcggtattcctaattaccaaatgttacacaaggatcagaagtgtggtttcagatcggatgatgaagagaaccaatttaaaaattcacgtaagtctcaaagttgagccgtatggacaggctcgttttcacttcggcgcactacattctcctttctccgtgctggtctggcagtcctattattcacgacacgcgcaacgaccattagaacatctgcgaccgtcggatgcatgcgtcgtcggcgactccaatgccaagaggacccaaagcattcctccatcacattatcgatcagaaagtagtcaaagacaacttcactagcaccgagtttgcgattgtggtggccggacgtgaacgcggaagcgcgtgacaatatcaccagtaacgaatgagcagcctcctaattatgaagatgagaagaatggaagctaggccaacgtaaccctcgacttcgaattgtattcgttcttatacaatgcgaaaagaggacagcactgaactgtagacaagagtctacgtgcatgtccatctcggtgtagatacgtgattgtgttttggagcggttggtagttgattgtttagtggaccccctggcagcgaacttgcgctgaagttccgtgtctctacgtctctcaacgatgaccgtgtaacaatcatggatcgaaagattggcgacgagctttgtacgagagtccgaaaccccaggctcgatactcagttcctcgtattgcaaatcctgcgctaatgcgcatgtgaggcgtgtaggccggatagtcatgtcgaggcttattgtccgaccctgacaggctatggtctccagtgactcatctcaacccttcgcaacacagctgcacagccatcgatagcgtgccactatatatacatactggttaatgcaccgcgattgatttcataatgtatcaggcacgcatacacaatggacttacgcacgcggaagcgggtctggaatgagatccaagacgtcaacgccgatttcttcaaccttcgaacggtcatcaagccagcatttgatgatgacttcacgcaattctatttcgtcatgtcccccaatgacggagcgatggctcatatgagagtcgtcggctgtctttatatcccggatacctatccggagtctccgcctgttgtccatctttatacacgaactggtcgatataacgccgacgtttataggggatgcattggcgacaggacgcgaagctccttgtgcttcgatattctgcgttctcagaagaatggagggatttggaaaccagaatacactatttctatgttgtacgctactctgatggcaacgattgtttccttttacgttcctcaagagcatggtggcgaagtcgctgagtatgtgtcgatggaaaagcttgaggacatcaagagagccgcccagaagactttcgatactcacaagcatctagtcccaaagcttccagttatcccactggtacaggcaacaacgatcccggcccagcaaatgcattttcctgccgtaatcatgactgagggcaccataacaacgactgcaggtcctatctacttacagacagcagaccgggctgctgtacacacgtttgcaatcgatctatccgagctccatgcaggtattgtgttttcaatcgttcttagctcgtctatgacagacatcgtaggcaagacaccaagtactgttctcgttaggaatggggttactgctacagcagcccgaaaacggtctaatgagaacacaaaatggttctatcatggccagccaatgaacggcggggatatgcgactgcacgtcacaattgggagggatcagatgacctttgcatactactccaacggtcttcggtacatccacggggactgtccggtttcgcggctcacaaatacccagattggagacgtgcgtgggactcctttttatgtccacgtcttcaccaagaagaaatatggagatgtagcaaaattgacatttcttgacactgaaggcaagggctatatccacactgtgggtcatgagtctggcgatatgatggacggttatgaatacatcatacccgaacctatcgatacagcgggaggttgtaacaatgatcttgacttcgagcttgtgaaagactcggaagttgccgaggccgtcgagcagagcagattacaagcagcatcggtactgagagacgaacggagaagaagaaaggaagaccagccggcgaactggccggatttggatgagaacttcctggaagggatgatggacatgaatatagggagcaataacaatatctaggagctctgatcacggacataatacgtaatgcatgaaaattcgaagccacttcgaaagcatgttttcaaaccgaattggcagtgtttggcagacaaagtaaggatcaaccgttcatgactaggcttgggagcaattctttgcgcgatttgctaataagtccgcccagcaatatgccttgtcatatgtcaagttttggggagctaattaacccttttaatattatctaccgagcttgagaacttgaaataaatgatatgaaattgacg

SEQ ID NO: 12657 - DNA, 723 bp, Muscodor strobelii
  misc_feature: SGI cDNA ID NO. 564119
  misc_feature: Elevated expression when VOC is produced
  misc_feature: Encodes the peptide sequence at SEQ ID NO 12658
atgtcgacatcttctgacacagtctcaacggccctgcctcagttgcctccagagcttcatttccgcatcgtggagctgatgactgattcacgctatcttgcacgcgcatggctcaacttccgtcttgtttcgcgcaacttcaaggcaatcactgagtctgtatttgcacgacagcatctccccagagccattatcgactttcccacaatcacgaacaccgtatacggctcaggttgtcagaagtatggattaggtctgacactctcattcgtaaaactcgacggagaagacaatgagcgtgcagtattcagtgaacgccaaccggaacaagttccatcaaaagaaaggggtctcagcgacagcgacttggatgactatgagaacacgctctatcattgcgtcacggtcgaatggcaaaattgcttctttgatttctctgttccagtcttgcatacggcattatcgagttcctcttgtccattgagcgtacgtcgcattatcaacaacagtgcccctcccggtctaagagttgagtgggaagaccgctctatctccgttctttggaaggagatgctcaccgtattatttgctgaagaggagcatctccaacgtcgtcgagtacaagagggccaagtcgacgacagccagaagaagtccactatcagcgaaggcgggctccaatcgtggctaaacacattgatatctgggctcaaaacggtttga

SEQ ID NO: 12658 - protein, 240 aa, Muscodor strobelii
  misc_feature: SGI Peptide ID NO. 564119
  misc_feature: Useful for introducing or modulating the production of volatile compounds
MSTSSDTVSTALPQLPPELHFRIVELMTDSRYLARAWLNFRLVSRNFKAITESVFARQHLPRAIIDFPTITNTVYGSGCQKYGLGLTLSFVKLDGEDNERAVFSERQPEQVPSKERGLSDSDLDDYENTLYHCVTVEWQNCFFDFSVPVLHTALSSSSCPLSVRRIINNSAPPGLRVEWEDRSISVLWKEMLTVLFAEEEHLQRRRVQEGQVDDSQKKSTISEGGLQSWLNTLISGLKTV

SEQ ID NO: 12659 - DNA, 1468 bp, Muscodor strobelii
  misc_feature: SGI EST ID NO. CUFF.30047.0
  misc_feature: Variant of the nucleotide sequence at SEQ ID NO 12657
gcataaatcgcataatttctccaactccaatgcaacaatagccggtcgcactgcttcaacagtagtgcttcaacagcaagccaagttcggattcaacccggccataccgatatacctgttgtcaatatactgaagcattgactttcttctcggtttatagtaagactaagggctctattttttggcatccgtgaactacctttccagcaccaacaattgatcgaatgcaaacgtcatacactgcaacaatgtcgacatcttctgacacagtctcaacggccctgcctcagttgcctccagagcttcatttccgcatcgtggagctgatgactgattcacgctatcttgcacgcgcatggctcaacttccgtcttgtttcgcgcaacttcaaggcaatcactgagtctgtatttgcacgacagcatctccccagagccattatcgactttcccacaatcacgaacaccgtatacggctcaggttgtcagaagtatggattaggtctgacactctcattcgtaaaactcgacggagaagacaatgagcgtgcagtattcagtgaacgccaaccggaacaagttccatcaaaagaaaggggtctcagcgacagcgacttggatgactatgagaacacgctctatcattgcgtcacggtcgaatggcaaaattgcttctttgatttctctgttccagtcttgcatacggcattatcgagttcctcttgtccattgagcgtacgtcgcattatcaacaacagtgcccctcccggtctaagagttgagtgggaagaccgctctatctccgttctttggaaggagatgctcaccgtattatttgctgaagaggagcatctccaacgtcgtcgagtacaagagggccaagtcgacgacagccagaagaagtccactatcagcgaaggcgggctccaatcgtggctaaacacattgatatctgggctcaaaacggtttgatgagaatatgaagtcatgatctgccgagtcggggatgccggcctgaaacaccaagagggtccgtgaattgggttgccaaagatggtagatgcatcaaatgaagttaatcaagttgacttccaagggtaggggcatttagtcgacccagtttacaatttacgaacagtatcctggcgtgcgatcatatatggagtacggagtctgggttattttatgcttggacattcatggcgaggatcgagaggatcttacgaataggcccactaatgaacttagaaagggctaaacttcagggggattatttgataccaatacgttagtcagcgtcaatagcaacgtcacaatccaaatcatgattggcacgattgagcaacatgtttgataaacaaacaaatcagcttcgagaggagttatctccacaaattacaagactcattactgtacatcttgcactcgaagttccgaatcctgcaattgaagacgatattttacagcat

SEQ ID NO: 12660 - DNA, 363 bp, Muscodor strobelii
  misc_feature: SGI cDNA ID NO. 564120
  misc_feature: Encodes the peptide sequence at SEQ ID NO 12661
atgcagttgaaagctaccctcgtctttgctgtctccagcattggtgtcacgagtgcctgcaccttcaccgcatactccgggtcgggttgcacagggagtgcagatgtcgcgcacgaagttcctacgacgtcagcgtgcttcaaagtctctggtcccgcctcctacggactgagtggcagcggttgcgagattgtttccgtacaagagtgggggaacgatctctgccagtttcagggggctcttgaaggagtagtcgaaagaacgggtgctgggtgttatgctgtgctcaaccaactgcacactgtcaccaacggtccgcggagtgctaagaagggtgtcagaacacagccaacaatgctgtaa

SEQ ID NO: 12661 - protein, 120 aa, Muscodor strobelii
  misc_feature: SGI Peptide ID NO. 564120
MQLKATLVFAVSSIGVTSACTFTAYSGSGCTGSADVAHEVPTTSACFKVSGPASYGLSGSGCEIVSVQEWGNDLCQFQGALEGVVERTGAGCYAVLNQLHTVTNGPRSAKKGVRTQPTML

SEQ ID NO: 12662 - DNA, 936 bp, Muscodor strobelii
  misc_feature: SGI cDNA ID NO. 564121
  misc_feature: Encodes the peptide sequence at SEQ ID NO 12663
atggcgtcgcaatataccaacggcacaagatcacccttgccagtgaagatacgggagttccaaaatcatcacatggactcaagagtctggaacgatcacaaatttaggccggacgacatcatcatctcgacctgggctaagtctggcactacgtgggtgcaacaaattgtttcgcagctactaaactctggtaatccagatgttgccacaaacgccgtctcgccatgggttgagatgcgcgttttcccaggtgtcttagaccttttagatgtccaaaaggaccggcggttcatgaagacccatctgcccatcgacgcactggtctggaactcggaagccaagtatatcttcgttgcccgcgatccacgtgacacgatatggagcttgcataaccacatgttcaatgcaaccgatttcttctaccaaataatcaatgataccccaggtcgtgtagggccagcatataatcgcccttctgaagaccctcgtgagctattcttagagttgttaaaggacgatgaaaacgccaatctaccatggccattctgggaacacacgcgtggatggctgatggcccgaaatcagccaaacgtcttactccttcatttcaacgatctaaaagcggatatggagggcgagatgcgccggattgcaaagtttctccaagttccagagatgtcaaagaatcaatgggacgcagcggtagagcattgcacattctcatggatgaagcaaaatgctgcaatgcaggcgccgtcgattgctgagaaagtatggaacggcggcgcccagacctttatgaataaaggtactaacggaaggtggaaagacgttttaactgaagaagacaaccaaagaatcgcggaaaaatcaaggaaggaattaggggaagaacttgcgaaatggctcgaaaatggatattctgtggtaacctag

SEQ ID NO: 12663 - protein, 311 aa, Muscodor strobelii
  misc_feature: SGI Peptide ID NO. 564121
  misc_feature (37)..(299): Pfam Id: PF00685 Pfam Desc: Sulfotransferase domain
  misc_feature (7)..(308): NCBI GI: 46112771 Blast Desc: FG02887.1 [Gibberella zeae PH-1]
  misc_feature (14)..(306): NCBI GI: 119945521 Blast Desc: sulfotransferase [Psychromonas ingrahamii 37] gi|119864125|gb|ABM03602.1| sulfotransferase [Psychromonas ingrahamii 37]
  misc_feature (14)..(303): NCBI GI: 255062256 Blast Desc: sulfotransferase [Nitrosomonas sp. AL212] gi|254981964|gb|EET33073.1| sulfotransferase [Nitrosomonas sp. AL212]
  misc_feature (14)..(306): NCBI GI: 154252751 Blast Desc: sulfotransferase [Parvibaculum lavamentivorans DS-1] gi|154156701|gb|ABS63918.1| sulfotransferase [Parvibaculum lavamentivorans DS-1]
  misc_feature (13)..(306): NCBI GI: 77163623 Blast Desc: sulfotransferase [Nitrosococcus oceani ATCC 19707] gi|254436255|ref|ZP_05049762.1| Sulfotransferase domain superfamily [Nitrosococcus oceani AFC27] Sulfotransferase oceani
  misc_feature (14)..(306): NCBI GI: 159479122 Blast Desc: CHLREDRAFT_151050 [Chlamydomonas reinhardtii] gi|158274257|gb|EDP00041.1| [Chlamydomonas reinhardtii]
  misc_feature (11)..(306): NCBI GI: 262198266 Blast Desc: sulfotransferase [Haliangium ochraceum DSM 14365] gi|262081613|gb|ACY17582.1| sulfotransferase [Haliangium ochraceum DSM 14365]
  misc_feature (15)..(309): NCBI GI: 255073451 Blast Desc: [Micromonas sp. RCC299] gi|226515663|gb|ACO61658.1| [Micromonas sp. RCC299]
  misc_feature (15)..(306): NCBI GI: 116057677 Blast Desc: Sulfotransferase (ISS) [Ostreococcus tauri]
  misc_feature (13)..(309): NCBI GI: 285019552 Blast Desc: sulfotransferase protein [Xanthomonas albilineans] gi|283474770|emb|CBA17269.1| sulfotransferase protein [Xanthomonas albilineans]
  misc_feature (1)..(295): SWISSPROT Homolog: EC 2.8.2.2 Alcohol sulfotransferase
MASQYTNGTRSPLPVKIREFQNHHMDSRVWNDHKFRPDDIIISTWAKSGTTWVQQIVSQLLNSGNPDVATNAVSPWVEMRVFPGVLDLLDVQKDRRFMKTHLPIDALVWNSEAKYIFVARDPRDTIWSLHNHMFNATDFFYQIINDTPGRVGPAYNRPSEDPRELFLELLKDDENANLPWPFWEHTRGWLMARNQPNVLLLHFNDLKADMEGEMRRIAKFLQVPEMSKNQWDAAVEHCTFSWMKQNAAMQAPSIAEKVWNGGAQTFMNKGTNGRWKDVLTEEDNQRIAEKSRKELGEELAKWLENGYSVVT

SEQ ID NO: 12664 - DNA, 1296 bp, Muscodor strobelii
  misc_feature: SGI cDNA ID NO. 564122
  misc_feature: Encodes the peptide sequence at SEQ ID NO 12665
atgacttccttcaaagtccttatcgttggaggcgggattgcggggccggcagcagcccactggctgtctcgcatagctggagtgcatgttactcttatcgagcgctcatctcagatgcgagcttcaggccagcagctcgacttgcgagttcagggcgtggatgtcatgaagaaaatgggcatcgagacacaattgcgcgcagctctagttcgcgagcctggtttacagctcattgacataagtgggagaaccagggcgtacttcccagccgctgatcctggtagcagccggcaaagcatcacatccgagtttgagatcatgcgaggaaaattggtacaaattctatatggtctcactgaaaagcgctcaaatgtaaaacacctgtacaacacaaccatcaaaactttcactcaagacgacgagagtgaccccaatggaaaggtccatgtcactttctcggacggtcgtcaggaggactacgacctgttgcttgccgccgatggaacaggttcgaagacgcgcaaaatcatgcttgggccagataccccagacccacgacacaggacgggcggctacattgcctacttcagcatgccagcgcagcctggagactcagactggatgacatcatgtttactaccaggatctcgtatgcgccggactatcatgacgagaaaggattgcaaggagctcacacggatatacatgatgctaagcaaacgggacgaagccattgatgctgctcagaagtctggagacttgaccgcattgaagaaggcccttgccaatgtttacgaaggtggaggatgggagactccgcgattcatggaagctctgctaaatgctccagaagcagacgacctatattgtactccgtacgaagaggtccgtcttcctgaaggctcatggtccaagggtagagtagtgctccttggcgatgccgcacactcaggcacagccaacggctacggcacatcgtgggggttagttgggccttatctcttggccggcgaacttgctactcaatttgagaaacacggatctaagacaacggcttctattgttcaggctgcgaaaaactacgaaaagattttccgaccgactgctcttgcgggtcacggcggtagtgaggagtcttcgtttggcatgccgcattcagcattttggatcgaggtagcactccgatttgctgccgtcgcagcgtggctcagagttgacaagtggattgggtttgatggcaacgtgggaagatggaaactgcctgaatatcctgcgctggtcgaagaccgcaattaa

SEQ ID NO: 12665 - protein, 431 aa, Muscodor strobelii
  misc_feature: SGI Peptide ID NO. 564122
  misc_feature (3)..(358): Pfam Id: PF01494 Pfam Desc: FAD binding domain
  misc_feature (3)..(35): Pfam Id: PF01494 Pfam Desc: FAD binding domain
  misc_feature (1)..(426): NCBI GI: 256722799 Blast Desc: NECHADRAFT_97495 [Nectria haematococca mpVI 77-13-4]
  misc_feature (1)..(431): NCBI GI: 46115964 Blast Desc: FG03824.1 [Gibberella zeae PH-1]
  misc_feature (1)..(426): NCBI GI: 39946760 Blast Desc: MGG_08520 [Magnaporthe grisea 70-15] gi|145012362|gb|EDJ97018.1| MGG_08520 [Magnaporthe grisea 70-15]
  misc_feature (1)..(426): NCBI GI: 119485797 Blast Desc: FAD binding domain protein [Neosartorya fischeri NRRL 181] gi|119410397|gb|EAW20344.1| FAD binding domain protein [Neosartorya fischeri NRRL 181]
  misc_feature (2)..(428): NCBI GI: 116192311 Blast Desc: CHGG_05873 [Chaetomium globosum CBS 148.51] gi|88181786|gb|EAQ89254.1| CHGG_05873 [Chaetomium globosum CBS 148.51]
  misc_feature (1)..(426): NCBI GI: 169765404 Blast Desc: [Aspergillus oryzae RIB40] gi|83765028|dbj|BAE55171.1| protein product [Aspergillus oryzae]
  misc_feature (1)..(426): NCBI GI: 238481945 Blast Desc: monooxygenase, [Aspergillus flavus NRRL3357] gi|220700261|gb|EED56599.1| monooxygenase, [Aspergillus flavus NRRL3357]
  misc_feature (1)..(426): NCBI GI: 39971379 Blast Desc: MGG_10710 [Magnaporthe grisea 70-15] gi|145009399|gb|EDJ94099.1| MGG_10710 [Magnaporthe grisea 70-15]
  misc_feature (1)..(428): NCBI GI: 256722047 Blast Desc: NECHADRAFT_51179 [Nectria haematococca mpVI 77-13-4]
  misc_feature (1)..(428): NCBI GI: 256723201 Blast Desc: NECHADRAFT_86442 [Nectria haematococca mpVI 77-13-4]
MTSFKVLIVGGGIAGPAAAHWLSRIAGVHVTLIERSSQMRASGQQLDLRVQGVDVMKKMGIETQLRAALVREPGLQLIDISGRTRAYFPAADPGSSRQSITSEFEIMRGKLVQILYGLTEKRSNVKHLYNTTIKTFTQDDESDPNGKVHVTFSDGRQEDYDLLLAADGTGSKTRKIMLGPDTPDPRHRTGGYIAYFSMPAQPGDSDWMTSCLLPGSRMRRTIMTRKDCKELTRIYMMLSKRDEAIDAAQKSGDLTALKKALANVYEGGGWETPRFMEALLNAPEADDLYCTPYEEVRLPEGSWSKGRVVLLGDAAHSGTANGYGTSWGLVGPYLLAGELATQFEKHGSKTTASIVQAAKNYEKIFRPTALAGHGGSEESSFGMPHSAFWIEVALRFAAVAAWLRVDKWIGFDGNVGRWKLPEYPALVEDRN

SEQ ID NO: 12666 - DNA, 1236 bp, Muscodor strobelii
  misc_feature: SGI EST ID NO. CUFF.30074.0
  misc_feature: Variant of the nucleotide sequence at SEQ ID NO 12664
cttcgattgtgcatcaagtgggagaaccagggcgtacttcccagccgctgatcctggtagcagccggcaaagcatcacatccgagtttgagatcatgcgaggaaaattggtacaaattctatatggtctcactgaaaagcgctcaaatgtaaaacacctgtacaacacaaccatcaaaactttcactcaagacgacgagagtgaccccaatggaaaggtccatgtcactttctcggacggtcgtcaggaggactacgacctgttgcttgccgccgatggaacaggttcgaagacgcgcaaaatcatgcttgggccagataccccagacccacgacacaggacgggcggctacattgcctacttcagcatgccagcgcagcctggagactcagactggatgacatcatgtttactaccaggatctcgtatgcgccggactatcatgacgagaaaggattgcaaggagctcacacggatatacatgatgctaagcaaacgggacgaagccattgatgctgctcagaagtctggagacttgaccgcattgaagaaggcccttgccaatgtttacgaaggtggaggatgggagactccgcgattcatggaagctctgctaaatgctccagaagcagacgacctatattgtactccgtacgaagaggtccgtcttcctgaaggctcatggtccaagggtagagtagtgctccttggcgatgccgcacactcaggcacagccaacggctacggcacatcgtgggggttagttgggccttatctcttggccggcgaacttgctactcaatttgagaaacacggatctaagacaacggcttctattgttcaggctgcgaaaaactacgaaaagattttccgaccgactgctcttgcgggtcacggcggtagtgaggagtcttcgtttggcatgccgcattcagcattttggatcgaggtagcactccgatttgctgccgtcgcagcgtggctcagagttgacaagtggattgggtttgatggcaacgtgggaagatggaaactgcctgaatatcctgcgctggtcgaagaccgcaattaagtgtaacaatgctggaggagttgacgtgttctaaggcgagagcttcactttgttggcattattgcatgactgctgagcattccacttcactcaagttcgatgtgttgaaccataacaagataccccccttaattgtactatccatagagcagaatcaatccatg

SEQ ID NO: 12667 - DNA, 1962 bp, Muscodor strobelii
  misc_feature: SGI cDNA ID NO. 564123
  misc_feature: Encodes the peptide sequence at SEQ ID NO 12668
atgtcggttgcagcccgctacgtacctattgaggagaaggttgtgatgtgtctagactccaagagatcagaacaagagaaaaagccttggattcaagcctggatggtttccagcagtgttgaatcgttcatcggagagagactgtgggcactgccagctttgagtatacagttgaaagagtactatccagagttccagcagtacttccgtcaaggatccttcgcaataggatatcctgtgattgagatcgctcgcaaaatccatacctgtggagatgcgcgaagacccaagatactgtaccgcgttatccacagtggccaaccatggcaaggactgaaggctcgcggttatggtcgagccaaagtaaatcctgtttattttcacagatatgtacagaaacatctgatcccctgttctcgaacaccaagcccctttttatctgtcagcgattccttggaaaaggtgcgaactaccgtagagtactaccgcagtaagggctacacaggcattcgagtcgtcaaattcagatcagacggcacaggatggaaccatagagtgcagccactgtggcatgttccagctctcggtgtcgatctctcctgcaaagaatgggctacaaggcctttgcacagacatgagtatctactacagagtcacattccgtcgctaagcgtcatctctatcaagcctgtaccagatgatggccctgcaacgaaacaacggaaaagaagtaccaaggagcctgcatggccaaccccgggtgctgtgatcccacatgtttggggagcacttgcgcttgttctcgtatttccagcatcgaggaagatttcaaaactcatctacgaccagctgaaagcattgaagattgctcattatgtacctataggctcgaagtcctccgcgcatttcctgaaacgatcacctgtggtagtcgccagtgacttccctccatggtcacggctactactctgcagactttcgataccatctttcctccacgacgcaatttgcccacgcaacaaagacgggcggcagtttcgtccaaaatctgaactaccttcgcaatcatatcattttgaactaattttcgacatcgatgaatcctgcgcaactcgtactgttccttccgtggaattgttcgtcttcaaggtcggcaacgcgagattgatccaaaaggaacatccgcaatatccggcgtttctagtgaacagaggccagaaggtaggccgtgaaaagcatcctgtgtccttccgagtttgggcaaagcccgaatggaaggaaccattgaacacggcgtacccagagatgaaagaggaagagaggtgtgggagtttcgcgaccggtcaccctgttctcgaccttagatggccaataaagacttgcggcgggaaggaccggcccgagaccttgtatcgcgtcgtccatgacggacagcctcatggtggaatgaagccacgagggcatggtctgtatgaaaacaccgctgatcgttttcatcgtcatttgcagatgcacatcaactggagacgtcgcaatccgagcccgttcatatcagtcacgccttccttacagaaggtcaatcagattcttcgatcactccgaatcaagggctgcacagggataaagatagttcgcttcaagtcgttcggtccgggttgggaccacgacaagcaacgactctggcatttaggagcactcgcatctagtctctcagagcccaagtggatgggtcagcctatggcgaactttgagtatctcctcgaaggtccgatccctgccgaaagtattactggaatcgagggtattccagatggtctcgaccgtctcaccaagaaaacgggagggaagagaaaggcaccagataacatgaccgaacccgaatcacgcgctggcgacgagacccagtgcaagcccgagaaagggtacaagaagcgttcctcggcttacacattcggatgctaa

SEQ ID NO: 12668 - protein, 653 aa, Muscodor strobelii
  misc_feature: SGI Peptide ID NO. 564123
MSVAARYVPIEEKVVMCLDSKRSEQEKKPWIQAWMVSSSVESFIGERLWALPALSIQLKEYYPEFQQYFRQGSFAIGYPVIEIARKIHTCGDARRPKILYRVIHSGQPWQGLKARGYGRAKVNPVYFHRYVQKHLIPCSRTPSPFLSVSDSLEKVRTTVEYYRSKGYTGIRVVKFRSDGTGWNHRVQPLWHVPALGVDLSCKEWATRPLHRHEYLLQSHIPSLSVISIKPVPDDGPATKQRKRSTKEPAWPTPGAVIPHVWGALALVLVFPASRKISKLIYDQLKALKIAHYVPIGSKSSAHFLKRSPVVVASDFPPWSRLLLCRLSIPSFLHDAICPRNKDGRQFRPKSELPSQSYHFELIFDIDESCATRTVPSVELFVFKVGNARLIQKEHPQYPAFLVNRGQKVGREKHPVSFRVWAKPEWKEPLNTAYPEMKEEERCGSFATGHPVLDLRWPIKTCGGKDRPETLYRVVHDGQPHGGMKPRGHGLYENTADRFHRHLQMHINWRRRNPSPFISVTPSLQKVNQILRSLRIKGCTGIKIVRFKSFGPGWDHDKQRLWHLGALASSLSEPKWMGQPMANFEYLLEGPIPAESITGIEGIPDGLDRLTKKTGGKRKAPDNMTEPESRAGDETQCKPEKGYKKRSSAYTFGC

SEQ ID NO: 12669 - DNA, 246 bp, Muscodor strobelii
  misc_feature: SGI cDNA ID NO. 564125
  misc_feature: Encodes the peptide sequence at SEQ ID NO 12670
atgccatcttccaagggaaagccaactgatcctgagcttcgtgaggaattgaaagaagaaattaaacaagaaccaaataagtccggaggcggagaaggccaatggtcagcttggaaggcatcgaagctagctaaagagtacgagaagcaaggcggtgactacgagaatgagcccggctctaaaaacgaacccaagaagggagaaccgcagccgaagagcgagtctaagaagaagtctgagacgtag

SEQ ID NO: 12670 - protein, 81 aa, Muscodor strobelii
  misc_feature: SGI Peptide ID NO. 564125
  misc_feature (1)..(81): NCBI GI: 46114226 Blast Desc: FG02955.1 [Gibberella zeae PH-1]
  misc_feature (1)..(78): NCBI GI: 85095604 Blast Desc: NCU05619 [Neurospora crassa OR74A] gi|28921585|gb|EAA30879.1| conserved [Neurospora crassa OR74A] gi|40881952|emb|CAF06271.1| [Neurospora crassa]
  misc_feature (1)..(81): NCBI GI: 116203663 Blast Desc: CHGG_09715 [Chaetomium globosum CBS 148.51] gi|88175843|gb|EAQ83311.1| CHGG_09715 [Chaetomium globosum CBS 148.51]
  misc_feature (1)..(71): NCBI GI: 169608588 Blast Desc: SNOG_07375 [Phaeosphaeria nodorum SN15] gi|111063721|gb|EAT84841.1| SNOG_07375 [Phaeosphaeria nodorum SN15]
  misc_feature (1)..(69): NCBI GI: 171682602 Blast Desc: protein product [Podospora anserina] gi|170941260|emb|CAP66910.1| protein product [Podospora anserina]
  misc_feature (1)..(62): NCBI GI: 189199400 Blast Desc: conserved [Pyrenophora tritici-repentis Pt-1C-BFP] gi|187983136|gb|EDU48624.1| conserved [Pyrenophora tritici-repentis Pt-1C-BFP]
  misc_feature (1)..(79): NCBI GI: 116192821 Blast Desc: CHGG_06128 [Chaetomium globosum CBS 148.51] gi|88182041|gb|EAQ89509.1| CHGG_06128 [Chaetomium globosum CBS 148.51]
  misc_feature (1)..(80): NCBI GI: 71017635 Blast Desc: UM02901.1 [Ustilago maydis 521] gi|46098717|gb|EAK83950.1| UM02901.1 [Ustilago maydis 521]
  misc_feature (1)..(51): NCBI GI: 154317342 Blast Desc: BC1G_03573 [Botryotinia fuckeliana B05.10] gi|150844990|gb|EDN20183.1| BC1G_03573 [Botryotinia fuckeliana B05.10]
  misc_feature (1)..(54): NCBI GI: 238495943 Blast Desc: conserved [Aspergillus flavus NRRL3357] gi|220694087|gb|EED50431.1| conserved [Aspergillus flavus NRRL3357]
MPSSKGKPTDPELREELKEEIKQEPNKSGGGEGQWSAWKASKLAKEYEKQGGDYENEPGSKNEPKKGEPQPKSESKKKSET

SEQ ID NO: 12671 - DNA, 930 bp, Muscodor strobelii
  misc_feature: SGI cDNA ID NO. 564126
  misc_feature: Elevated expression when VOC is produced
  misc_feature: Encodes the peptide sequence at SEQ ID NO 12672
atgccggagagtgcgcctgttgagctgcacctggcggtgattccagcgcctgattttggctcggatacctacgtcaacgtggataaaaaattgacatctcaaaagggtgtcccattcgcatttggaggcagtatcttgggccagtctgccgctgccgccgccgcaaccgttccggaagcattcagcatctactccatgcaatcggcttttctgcgcgccgttaacgccagccaaaaagtttactaccacgtcgaccgaacgatggatggaaagacgttttgcacccgcacagtccgtgtgacgcaggttcaagacactaatgtctgctactatacctcaacgatctcattccagcggactgaggccaaactaggaaatgtgctcgattatcatgttcccatgccacatattgacggattgcagccagatagtatatcaaaagacaagctacaagaggtcatgaacacaaacatcaacgacttggtccccctcatgcatatcgcagcccaggatgagccttttgaatttcgaccatcagacgttccccatgacgtccagccgacagagttctggcagcgcagtttcgtgcgttcaccaccattcgcatcgaacaacccccgtctacaccaagctgcactggctcaattgtctgacacttacacgttgggtacggcgttgcatgccaaccctgacaaggtcgggaaacaattgaaaaatgtgaaaatgggcgcgacattgatcaacagcgtctcattccatgagccaacaaccaaagtcgacgaatggatgttagccgagcgcgttacgtcgtggggtgccaacggccgtgcagttgtccaccaacgattttgggatgtgcaaagcggccgtctcattttgtcgggcacgcaagaggttatgattcgtttacgagacgatccgaagctctag

SEQ ID NO: 12672 - protein, 309 aa, Muscodor strobelii
  misc_feature: SGI Peptide ID NO. 564126
  misc_feature (163)..(300): Pfam Id: PF02551 Pfam Desc: Acyl-CoA thioesterase
  misc_feature (192)..(227): Pfam Id: PF02551 Pfam Desc: Acyl-CoA thioesterase
  misc_feature (1)..(309): NCBI GI: 39976215 Blast Desc: MGG_05966 [Magnaporthe grisea 70-15] gi|145011762|gb|EDJ96418.1| MGG_05966 [Magnaporthe grisea 70-15]
  misc_feature (22)..(302): NCBI GI: 7497168 Blast Desc: MGG_05966 [Magnaporthe grisea 70-15] gi|145011762|gb|EDJ96418.1| MGG_05966 [Magnaporthe grisea 70-15]
  misc_feature (22)..(302): NCBI GI: 268555086 Blast Desc: CBG08841 [Caenorhabditis briggsae] gi|187032345|emb|CAP28595.1| CBG08841 [Caenorhabditis briggsae]
  misc_feature (22)..(302): NCBI GI: 17558508 Blast Desc: C37H5.13 [Caenorhabditis elegans] gi|14573923|gb|AAK68237.1|U88315_5 C37H5.13a [Caenorhabditis elegans]
  misc_feature (26)..(306): NCBI GI: 146281270 Blast Desc: acyl-CoA thioesterase II [Pseudomonas stutzeri A1501] gi|145569475|gb|ABP78581.1| acyl-CoA thioesterase II [Pseudomonas stutzeri A1501]
  misc_feature (41)..(302): NCBI GI: 268568564 Blast Desc: CBG24030 [Caenorhabditis briggsae] gi|268576527|ref|XP_002643243.1| CBG08110 [Caenorhabditis briggsae] gi|187032895|emb|CAP28004.1| CBG08110 [Caenorhabditis
  misc_feature (41)..(302): NCBI GI: 71988741 Blast Desc: F25E2.3 [Caenorhabditis elegans] gi|34610406|gb|AAA91256.2| F25E2.3 [Caenorhabditis elegans]
  misc_feature (36)..(304): NCBI GI: 149377691 Blast Desc: acyl-CoA thioesterase II [Marinobacter algicola DG893] gi|149358044|gb|EDM46530.1| acyl-CoA thioesterase II [Marinobacter algicola DG893]
  misc_feature (26)..(308): NCBI GI: 146308734 Blast Desc: acyl-CoA thioesterase II [Pseudomonas mendocina ymp] gi|145576935|gb|ABP86467.1| acyl-CoA thioesterase II [Pseudomonas mendocina ymp]
  misc_feature (41)..(304): NCBI GI: 47227383 Blast Desc: protein product [Tetraodon nigroviridis]
  misc_feature (41)..(304): SWISSPROT Homolog: EC 3.1.2.27 Choloyl-CoA hydrolase
  misc_feature: Useful for introducing or modulating the production of volatile compounds
MPESAPVELHLAVIPAPDFGSDTYVNVDKKLTSQKGVPFAFGGSILGQSAAAAAATVPEAFSIYSMQSAFLRAVNASQKVYYHVDRTMDGKTFCTRTVRVTQVQDTNVCYYTSTISFQRTEAKLGNVLDYHVPMPHIDGLQPDSISKDKLQEVMNTNINDLVPLMHIAAQDEPFEFRPSDVPHDVQPTEFWQRSFVRSPPFASNNPRLHQAALAQLSDTYTLGTALHANPDKVGKQLKNVKMGATLINSVSFHEPTTKVDEWMLAERVTSWGANGRAVVHQRFWDVQSGRLILSGTQEVMIRLRDDPKL

SEQ ID NO: 12673 - DNA, 958 bp, Muscodor strobelii
  misc_feature: SGI EST ID NO. CUFF.30096.0
  misc_feature: Variant of the nucleotide sequence at SEQ ID NO 12671
cgttaacgccagccaaaaagtttactaccacgtcgaccgaacgatggatggaaagacgttttgcacccgcacagtccgtgtgacgcaggttcaagacactaatgtctgctactatacctcaacgatctcattccagcggactgaggccaaactaggaaatgtgctcgattatcatgttcccatgccacatattgacggattgcagccagatagtatatcaaaagacaagctacaagaggtcatgaacacaaacatcaacgacttggtccccctcatgcatatcgcagcccaggatgagccttttgaatttcgaccatcagacgttccccatgacgtccagccgacagagttctggcagcgcagtttcgtgcgttcaccaccattcgcatcgaacaacccccgtctacaccaagctgcactggctcaattgtctgacacttacacgttgggtacggcgttgcatgccaaccctgacaaggtcgggaaacaattgaaaaatgtgaaaatgggcgcgacattgatcaacagcgtctcattccatgagccaacaaccaaagtcgacgaatggatgttagccgagcgcgttacgtcgtggggtgccaacggccgtgcagttgtccaccaacgattttgggatgtgcaaagcggccgtctcattttgtcgggcacgcaagaggttatgattcgtttacgagacgatccgaagctctaggggcccgttggcctagtgaaaatcggggggttcaggggaaggtaaggcaaagggcgtcgagttaaatgcagggaggccagataggcatacctatacattcactctgtgcaccatctccatgtggaaccctcgacgggtttaaccaccaccagcaggggctacacttaaactcgccatccttcgcagcacagcttgtcgttaagcataccgcgacgactttcaattactagcattcatttcccccgt

SEQ ID NO: 12674 - DNA, 1011 bp, Muscodor strobelii
  misc_feature: SGI cDNA ID NO. 564127
  misc_feature: Encodes the peptide sequence at SEQ ID NO 12675
atgccggagagtgcgcctgttgagctgcacctggcggtgattccagcgcctgattttggctcggatacctacgtcaacgtggataaaaaattgacatctcaaaagggtgtcccattcgcatttggaggcagtatcttgggccagtctgccgctgccgccgccgcaaccgttccggaagcattcagcatctactccatgcaatcggcttttctgcgcgccgttaacgccagccaaaaagtttactaccacgtcgaccgaacgatggatggaaagacgttttgcacccgcacagtccgtgtgacgcaggttcaagacactaatgtctgctactatacctcaacgatctcattccagcggactgaggccaaactaggaaatgtgctcgattatcatgttcccatgccacatattgacggattgcagccagatagtatatcaaaagacaagctacaagaggtcatgaacacaaacatcaacgacttggtccccctcatgcatatcgcagcccaggatgagccttttgaatttcgaccatcagacgttccccatgacgtccagccgacagagttctggcagcgcagtttcgtgcgttcaccaccattcgcatcgaacaacccccgtctacaccaagctgcactggctcaattgtctgacacttacacgttgggtacggcgttgcatgccaaccctgacaaggtcgggaaacaattgaaaaatgtgaaaagtacgcaactactaccttcctatcccaccctccaactcaattacaaagatgacatctgtaaatccatcttcacaggtattatgggcgcgacattgatcaacagcgtctcattccatgagccaacaaccaaagtcgacgaatggatgttagccgagcgcgttacgtcgtggggtgccaacggccgtgcagttgtccaccaacgattttgggatgtgcaaagcggccgtctcattttgtcgggcacgcaagaggttatgattcgtttacgagacgatccgaagctctag

SEQ ID NO: 12675 - protein, 336 aa, Muscodor strobelii
  misc_feature: SGI Peptide ID NO. 564127
  misc_feature (192)..(227): Pfam Id: PF02551 Pfam Desc: Acyl-CoA thioesterase
  misc_feature (1)..(336): NCBI GI: 39976215 Blast Desc: MGG_05966 [Magnaporthe grisea 70-15] gi|145011762|gb|EDJ96418.1| MGG_05966 [Magnaporthe grisea 70-15]
  misc_feature (22)..(329): NCBI GI: 17558508 Blast Desc: C37H5.13 [Caenorhabditis elegans] gi|14573923|gb|AAK68237.1|U88315_5 C37H5.13a [Caenorhabditis elegans]
  misc_feature (22)..(329): NCBI GI: 7497168 Blast Desc: C37H5.13 [Caenorhabditis elegans] gi|14573923|gb|AAK68237.1|U88315_5 C37H5.13a [Caenorhabditis elegans]
  misc_feature (22)..(329): NCBI GI: 268555086 Blast Desc: CBG08841 [Caenorhabditis briggsae] gi|187032345|emb|CAP28595.1| CBG08841 [Caenorhabditis briggsae]
  misc_feature (5)..(334): NCBI GI: 85074705 Blast Desc: NCU00580 [Neurospora crassa OR74A] gi|28927533|gb|EAA36484.1| NCU00580 [Neurospora crassa OR74A] gi|38567326|emb|CAE76614.1| related to acyl-CoA thiolesterase
  misc_feature (5)..(329): NCBI GI: 119494878 Blast Desc: acyl-CoA thioesterase II [Neosartorya fischeri NRRL 181] gi|119412402|gb|EAW22343.1| acyl-CoA thioesterase II [Neosartorya fischeri NRRL 181]
  misc_feature (5)..(330): NCBI GI: 70996262 Blast Desc: acyl-CoA thioesterase II [Aspergillus fumigatus Af293] gi|66850521|gb|EAL90848.1| acyl-CoA thioesterase II [Aspergillus fumigatus Af293] gi|159131640|gb|EDP56753.1| acyl-CoA II A1163]
  misc_feature (19)..(333): NCBI GI: 256733569 Blast Desc: [Nectria haematococca mpVI 77-13-4]
  misc_feature (5)..(328): NCBI GI: 145230970 Blast Desc: An01g13490 [Aspergillus niger] gi|134055874|emb|CAK44135.1| protein product [Aspergillus niger]
  misc_feature (41)..(329): NCBI GI: 268568564 Blast Desc: CBG24030 [Caenorhabditis briggsae] gi|268576527|ref|XP_002643243.1| CBG08110 [Caenorhabditis briggsae] gi|187032895|emb|CAP28004.1| CBG08110 [Caenorhabditis
  misc_feature (41)..(331): SWISSPROT Homolog: EC 3.1.2.27 Choloyl-CoA hydrolase
MPESAPVELHLAVIPAPDFGSDTYVNVDKKLTSQKGVPFAFGGSILGQSAAAAAATVPEAFSIYSMQSAFLRAVNASQKVYYHVDRTMDGKTFCTRTVRVTQVQDTNVCYYTSTISFQRTEAKLGNVLDYHVPMPHIDGLQPDSISKDKLQEVMNTNINDLVPLMHIAAQDEPFEFRPSDVPHDVQPTEFWQRSFVRSPPFASNNPRLHQAALAQLSDTYTLGTALHANPDKVGKQLKNVKSTQLLPSYPTLQLNYKDDICKSIFTGIMGATLINSVSFHEPTTKVDEWMLAERVTSWGANGRAVVHQRFWDVQSGRLILSGTQEVMIRLRDDPKL

SEQ ID NO: 12676 - DNA, 958 bp, Muscodor strobelii; identical to SEQ ID NO: 12673
  misc_feature: SGI EST ID NO. CUFF.30096.0
  misc_feature: Variant of the nucleotide sequence at SEQ ID NO 12674

SEQ ID NO: 12677 - DNA, 1398 bp, Muscodor strobelii
  misc_feature: SGI cDNA ID NO. 564128
  misc_feature: Elevated expression when VOC is produced
  misc_feature: Encodes the peptide sequence at SEQ ID NO 12678
atgtctggtctacatgcaggagtcttagccctgagacagtgtcttcacatagaaactttcaagaaccatttgaaatatggtccggtggttagagtggcgcccgaccgactggtctttaatacgacgggtgctttgcgagacatataccaaaatgagagattcatcaagtcctacgcttattctgtagcgcagcccgatcagagcaatatctttaccacgacagcaaagagcgaacatcgacccaagagaagactgatcagtcaactattgtctaaccaatcgatgagagactttgagcctactctggctgagcaggtcgcaatctttttgcgtcaaatcaatttatctactaacatgcccgtaaacatgacgccggcattccgtcacctgggcctcggtatcgcggggcttttaggcttcggctacgatctcaaacttcagacagaagatgctcacagatatctgacgaccggcgtgacgaacgggaattatcgcaccaattactgtatgcagtacacgccctttgccctgctgaagcccagcatagtcgtggctctgttcccgaacagtctccgagccaagctgctgggcactatctccgatatgatcacaactcgacttgggcagccggtcaatgcgcgacacgatctgctctcggcttttcatagcagttcagacgttgatgttcagaatctcagacaaggagaactatggaccgaggctgttttcttctttgccgcaggtggcgagacgatagcatctacgcttgcagcgactttcttctacatctcacgagataagcaatgctatgacaagttagctgccgaaattcgatctacatttaattcaggggcagaaatatgtatgggaagccgtctctctgaatgccggtacctccgcgcctgtatcgacgagtctctacgcatgacccccccagtgccgtgtaccttatggcgtgaggcagcaccgaaaggctccatagaaccaataatcgtggacgggcatgtcattcctcacggtactcaagtcggtgttaatatctacagtctccatcacaacgagctctacttcccagagccgttcagattcctgccagatcgctggctgagcgataagagcgcgcacgagatgcacgatgcctttacaccgttctcgatcggcccccgtggctgtgctggtaaagcaatggcatatcttgaaacaagccttgttcttgcgaagactctgtggtatttcgatttcgagacggcgccagcgagtgaacgtaggcgtgagagcccgtctggcgtattttatgatgcgggagagttcccgatatatgattccttcgccgcgagtcatgatgggccagaactcatattccatccacgtgatgactatgccactgagctcttgtaa

SEQ ID NO: 12678 - protein, 465 aa, Muscodor strobelii
  misc_feature: SGI Peptide ID NO. 564128
  misc_feature (1)..(445): Pfam Id: PF00067 Pfam Desc: Cytochrome P450
  misc_feature (244)..(418): Pfam Id: PF00067 Pfam Desc: Cytochrome P450
  misc_feature (4)..(458): NCBI GI: 242771379 Blast Desc: cytochrome P450, [Talaromyces stipitatus ATCC 10500] gi|218721449|gb|EED20867.1| cytochrome P450, [Talaromyces stipitatus ATCC 10500]
  misc_feature (1)..(450): NCBI GI: 255954725 Blast Desc: Pc21g10830 [Penicillium chrysogenum Wisconsin 54-1255] gi|211589826|emb|CAP95980.1| Pc21g10830 [Penicillium chrysogenum Wisconsin 54-1255]
  misc_feature (1)..(457): NCBI GI: 169596678 Blast Desc: SNOG_01106 [Phaeosphaeria nodorum SN15] gi|111071481|gb|EAT92601.1| SNOG_01106 [Phaeosphaeria nodorum SN15]
  misc_feature (1)..(457): NCBI GI: 189206195 Blast Desc: cytochrome P450 3A31 [Pyrenophora tritici-repentis Pt-1C-BFP] gi|187975525|gb|EDU42151.1| cytochrome P450 3A31 [Pyrenophora tritici-repentis Pt-1C-BFP]
  misc_feature (4)..(457): NCBI GI: 145256217 Blast Desc: An10g00660 [Aspergillus niger CBS 513.88] gi|134078632|emb|CAK40505.1| protein product [Aspergillus niger]
  misc_feature (1)..(457): NCBI GI: 121710976 Blast Desc: benzoate 4-monooxygenase cytochrome P450 [Aspergillus clavatus NRRL 1] gi|119401254|gb|EAW11678.1| benzoate 4-monooxygenase cytochrome P450 [Aspergillus clavatus NRRL 1]
  misc_feature (1)..(450): NCBI GI: 169782556 Blast Desc: [Aspergillus oryzae RIB40] gi|83774484|dbj|BAE64607.1| protein product [Aspergillus oryzae]
  misc_feature (198)..(464): NCBI GI: 156056276 Blast Desc: SS1G_05490 [Sclerotinia sclerotiorum 1980] gi|154703274|gb|EDO03013.1| SS1G_05490 [Sclerotinia sclerotiorum 1980]
  misc_feature (1)..(450): NCBI GI: 238492179 Blast Desc: cytochrome P450, [Aspergillus flavus NRRL3357] gi|220695820|gb|EED52162.1| cytochrome P450, [Aspergillus flavus NRRL3357]
  misc_feature (35)..(457): NCBI GI: 145241738 Blast Desc: An09g02000 [Aspergillus niger] gi|134078055|emb|CAK40138.1| protein product [Aspergillus niger]
  misc_feature (23)..(415): SWISSPROT Homolog: EC 1.14.13.12 Benzoate 4-monooxygenase
  misc_feature: Useful for introducing or modulating the production of volatile compounds
MSGLHAGVLALRQCLHIETFKNHLKYGPVVRVAPDRLVFNTTGALRDIYQNERFIKSYAYSVAQPDQSNIFTTTAKSEHRPKRRLISQLLSNQSMRDFEPTLAEQVAIFLRQINLSTNMPVNMTPAFRHLGLGIAGLLGFGYDLKLQTEDAHRYLTTGVTNGNYRTNYCMQYTPFALLKPSIVVALFPNSLRAKLLGTISDMITTRLGQPVNARHDLLSAFHSSSDVDVQNLRQGELWTEAVFFFAAGGETIASTLAATFFYISRDKQCYDKLAAEIRSTFNSGAEICMGSRLSECRYLRACIDESLRMTPPVPCTLWREAAPKGSIEPIIVDGHVIPHGTQVGVNIYSLHHNELYFPEPFRFLPDRWLSDKSAHEMHDAFTPFSIGPRGCAGKAMAYLETSLVLAKTLWYFDFETAPASERRRESPSGVFYDAGEFPIYDSFAASHDGPELIFHPRDDYATELL

SEQ ID NO: 12679 - DNA, 1376 bp, Muscodor strobelii
  misc_feature: SGI EST ID NO. CUFF.30104.0
  misc_feature: Variant of the nucleotide sequence at SEQ ID NO 12677
gagagattcatcaagtcctacgcttattctgtagcgcagcccgatcagagcaatatctttaccacgacagcaaagagcgaacatcgacccaagagaagactgatcagtcaactattgtctaaccaatcgatgagagactttgagcctactctggctgagcaggtcgcaatctttttgcgtcaaatcaatttatctactaacatgcccgtaaacatgacgccggcattccgtcacctgggcctcggtatcgcggggcttttaggcttcggctacgatctcaaacttcagacagaagatgctcacagatatctgacgaccggcgtgacgaacgggaattatcgcaccaattactgtatgcagtacacgccctttgccctgctgaagcccagcatagtcgtggctctgttcccgaacagtctccgagccaagctgctgggcactatctccgatatgatcacaactcgacttgggcagccggtcaatgcgcgacacgatctgctctcggcttttcatagcagttcagacgttgatgttcagaatctcagacaaggagaactatggaccgaggctgttttcttctttgccgcaggtggcgagacgatagcatctacgcttgcagcgactttcttctacatctcacgagataagcaatgctatgacaagttagctgccgaaattcgatctacatttaattcaggggcagaaatatgtatgggaagccgtctctctgaatgccggtacctccgcgcctgtatcgacgagtctctacgcatgacccccccagtgccgtgtaccttatggcgtgaggcagcaccgaaaggctccatagaaccaataatcgtggacgggcatgtcattcctcacggtactcaagtcggtgttaatatctacagtctccatcacaacgagctctacttcccagagccgttcagattcctgccagatcgctggctgagcgataagagcgcgcacgagatgcacgatgcctttacaccgttctcgatcggcccccgtggctgtgctggtaaagcaatggcatatcttgaaacaagccttgttcttgcgaagactctgtggtatttcgatttcgagacggcgccagcgagtgaacgtaggcgtgagagcccgtctggcgtattttatgatgcgggagagttcccgatatatgattccttcgccgcgagtcatgatgggccagaactcatattccatccacgtgatgactatgccactgagctcttgtaaacatagggggagagcctgtccaaaactaccatgtgcgatccgaagtctaggggttgaatctaacctcgctttcaatcattactgatacatttttatgattagaacagaaaattctcaagtcccaattatgc

SEQ ID NO: 12680 - DNA, 1431 bp, Muscodor strobelii
  misc_feature: SGI cDNA ID NO. 564129
  misc_feature: Encodes the peptide sequence at SEQ ID NO 12681
atggaatccacaggccatagcagaggtcgtttagtgatcaattttgccacgacggaccctgagaacccagtgaattggccgacgtggaagaaaaccttcgtcgtcatagtcggcctcttctgcgttttcaacagtgttttcaacacctcgctgccatcggggtacatcgatgtgctaagcgtccatttcggcgttagcgactccccacagaaaattctcccaattaccatctatcaagttgggtttctcagcggatctttgctttttgcaccattgagtgaaatttacgggcgaaggccagtcgtcacctgttcttccggacttctcgctgtgttcatcctaggaagcgtcttctcgccttcgtggccggcgtaccttggattccgattcctacaaggaacctgtgcatcgagcgccatttccgtaacagctggcctgtattctgatatcttcaacaaagcccgtgcccgcggccaagctaatgcacttttcctttgcgctctcagcgtagtgcctaatgtggcacctttggtttcagcgtacacgtcattaccgccactcaactggagatggcccttatggatcgcgtttatcgttgctgccactaccttcatcccgaccattcttctccccgagacctacggacctattatactcaaaagaagagccgtccgtctgagaagtcaacaacaggcgagctccggccatgaaattcaagcagccattgagttagaaagaagaacttataaagacataatcacactgttcttagcccgcccaatcaaaatgctttgtaccgagtggatcgtgactttcacgtctctcttccttgggtttgcgactggaatcaactttgcattgggctctgttctcgggttcttcttctgctgtatctacgacagctttctctataaagcaagggcgcttgagaaaccatggtcaatgaacgaagaatacaggcgacttcccattgcctgcgtcggcggccctctctgtgtcgccggtctattctggctcgcatggaccgcatcaatatcctttaaacccgaagtccctgctgcatctggagtcatctttggcttagggttctatctcatattagcatcacttaataactatctagcggatgcctatcgaatatactcggccagtgctttggctgctgtcagcttcacccgatctatcggtggtggaacattgattctcgcagcagattcactatacgatcgcttaggtgtggcgtggggaacatcgttacttgcctttataatgctagggctgtctacagttcccattattttcatcagaaatggtcgaaagataagggctcacagcgcgatctgtcagcaggttaagaaagactatgagaatagcgagcttaacaatggtacgggtttatcggccatcataattcgtccgcagacgggctga

SEQ ID NO: 12681 - protein, 476 aa, Muscodor strobelii
  misc_feature: SGI Peptide ID NO. 564129
  misc_feature (38)..(401): Pfam Id: PF07690 Pfam Desc: Major Facilitator Superfamily
  misc_feature (31)..(133): Pfam Id: PF00083 Pfam Desc: Sugar (and other) transporter
  misc_feature (10)..(468): NCBI GI: 156043906 Blast Desc: SS1G_10056 [Sclerotinia sclerotiorum 1980] gi|154694445|gb|EDN94183.1| SS1G_10056 [Sclerotinia sclerotiorum 1980]
  misc_feature (10)..(458): NCBI GI: 238844080 Blast Desc: polyamine transporter 3 [Microsporum canis CBS 113480]
  misc_feature (12)..(453): NCBI GI: 154296818 Blast Desc: BC1G_12498 [Botryotinia fuckeliana B05.10] gi|150843152|gb|EDN18345.1| BC1G_12498 [Botryotinia fuckeliana B05.10]
  misc_feature (10)..(459): NCBI GI: 242773224 Blast Desc: bicyclomycin resistance protein, [Talaromyces stipitatus ATCC 10500] gi|218721816|gb|EED21234.1| bicyclomycin resistance protein, [Talaromyces stipitatus ATCC 10500]
  misc_feature (10)..(459): NCBI GI: 212531537 Blast Desc: polyamine transporter, [Penicillium marneffei ATCC 18224] gi|210071289|gb|EEA25378.1| polyamine transporter, [Penicillium marneffei ATCC 18224]
  misc_feature (10)..(461): NCBI GI: 255930313 Blast Desc: Pc06g01070 [Penicillium chrysogenum Wisconsin 54-1255] gi|211581329|emb|CAP79100.1| Pc06g01070 [Penicillium chrysogenum Wisconsin 54-1255]
  misc_feature (10)..(457): NCBI GI: 119186191 Blast Desc: CIMG_03143 [Coccidioides immitis RS]
  misc_feature (11)..(452): NCBI GI: 240108662 Blast Desc: major facilitator superfamily protein [Coccidioides posadasii C735 delta SOWgp]
  misc_feature (10)..(460): NCBI GI: 261200975 Blast Desc: MFS multidrug transporter [Ajellomyces dermatitidis SLH14081] gi|239593960|gb|EEQ76541.1| MFS multidrug transporter [Ajellomyces dermatitidis SLH14081]
  misc_feature (10)..(460): NCBI GI: 239607163 Blast Desc: MFS multidrug transporter [Ajellomyces dermatitidis ER-3]
MESTGHSRGRLVINFATTDPENPVNWPTWKKTFVVIVGLFCVFNSVFNTSLPSGYIDVLSVHFGVSDSPQKILPITIYQVGFLSGSLLFAPLSEIYGRRPVVTCSSGLLAVFILGSVFSPSWPAYLGFRFLQGTCASSAISVTAGLYSDIFNKARARGQANALFLCALSVVPNVAPLVSAYTSLPPLNWRWPLWIAFIVAATTFIPTILLPETYGPIILKRRAVRLRSQQQASSGHEIQAAIELERRTYKDIITLFLARPIKMLCTEWIVTFTSLFLGFATGINFALGSVLGFFFCCIYDSFLYKARALEKPWSMNEEYRRLPIACVGGPLCVAGLFWLAWTASISFKPEVPAASGVIFGLGFYLILASLNNYLADAYRIYSASALAAVSFTRSIGGGTLILAADSLYDRLGVAWGTSLLAFIMLGLSTVPIIFIRNGRKIRAHSAICQQVKKDYENSELNNGTGLSAIIIRPQTG

SEQ ID NO: 12682 - DNA, 1362 bp, Muscodor strobelii
  misc_feature: SGI cDNA ID NO. 564130
  misc_feature: Encodes the peptide sequence at SEQ ID NO 12683
atgtctccttcttctccttctctggcgtgtaacagcggagaacatgaaatcattgtcattcatgctgtttctgtccctaatgaccagcaacttcaagtcgaatttggtgatgggattttcacatatcacgcccagtggctccacgacgcgcgcaatgatcgcaatccatcccgcagtgctgaagatgcgtttgctgttcatgtacctgatgcaaagatcacgggcgctagcgttcaggggatggggactagtgtcgttgtccaggtgtcgtggcatgatgcgacatcaacgccctttcccggcgcctggctacgggtatttgcacccctggtagcgaagccgagcataccatccaaagtccctgcctcaaacttattgaacaacgctggctgggtagttgacactgttaccatccccgatgtgccctatgaggcaatcttcccccaagacgagccatcagtcgaacaccgcgaagcgatcagtgtcaagatctgcgacatgctgttccacgagggaaacagtggaatcatcaagatcactggactacctgcaccggatatccagtcggagcgggatacgaaaaacacgctcgtcactaaggtcttgaaatcagtgtttgggagtgttttcgtccatccgagaagaggcgccgacaagaccttcaacgtcacagacaactacggcaaggaaaaggaccgcggtgcagagttgcacaattacaagacagatgtcgtccttttaccccattgtgaccatgcacactatgactaccctgcccaggtccaaggtctgtattgtctcgagggtgagagtattaacacattcgtctccagcgtggctgttctccgtaccatgcaggaggaatatccagacctgtatccatatctgttgaagtcgcctatggttgtgggtcgtgtggctcactactacgacccccccatgtttcaagcgacagttgaaccagccgtgaccttgtcgcccggatttccagatcaggtaaaacggatccgttggcacccacatttatcgggctcgcttgtagcgccattcgatgatttcgacgaggcacgacgggcataccagagatttcaggaaatcatgcggcgtcctacacaccagatgaaggtactcttcaagcctggggatctctatatttgggataactttcgaactctccacgggcgtgagagtgttatcagtgtgccccgcaccagtgtaggtcagactgtgccggagcaagttgtctcggagcgatatcgatcgctacagatcaagcgcctcaacggtctagtagatgaatcctggcttgttcatgtgcccaccccccaattgtataacatggcgaaactacttggagcttga

SEQ ID NO: 12683 - protein, 453 aa, Muscodor strobelii
  misc_feature: SGI Peptide ID NO. 564130
  misc_feature (132)..(416): Pfam Id: PF02668 Pfam Desc: Taurine catabolism dioxygenase TauD, TfdA family
  misc_feature (249)..(396): Pfam Id: PF02668 Pfam Desc: Taurine catabolism dioxygenase TauD, TfdA family
  misc_feature (239)..(397): NCBI GI: 92115286 Blast Desc: taurine catabolism dioxygenase TauD/TfdA [Chromohalobacter salexigens DSM 3043] gi|91798376|gb|ABE60515.1| Taurine catabolism dioxygenase TauD/TfdA [Chromohalobacter DSM
  misc_feature (23)..(424): NCBI GI: 262110157 Blast Desc: trimethyllysine dioxygenase, [Phytophthora infestans T30-4]
  misc_feature (240)..(424): NCBI GI: 260813348 Blast Desc: BRAFLDRAFT_82678 [Branchiostoma floridae] gi|229286675|gb|EEN57392.1| BRAFLDRAFT_82678 [Branchiostoma floridae]
  misc_feature (80)..(395): NCBI GI: 198433104 Blast Desc: : similar to gamma-butyrobetaine dioxygenase [Ciona intestinalis]
  misc_feature (246)..(397): NCBI GI: 119492163 Blast Desc: gamma-butyrobetaine hydroxylase, [Lyngbya sp. PCC 8106] gi|119453220|gb|EAW34386.1| gamma-butyrobetaine hydroxylase, [Lyngbya sp. PCC 8106]
  misc_feature (17)..(425): NCBI GI: 187608401 Blast Desc: LOC100145728 [Xenopus (Silurana) tropicalis] gi|171847140|gb|AAI61551.1| LOC100145728 protein [Xenopus (Silurana) tropicalis]
  misc_feature (87)..(397): NCBI GI: 254483477 Blast Desc: Taurine catabolism dioxygenase TauD, TfdA family [marine gamma proteobacterium HTCC2148] gi|214036266|gb|EEB76945.1| Taurine catabolism dioxygenase TauD,
  misc_feature (249)..(427): NCBI GI: 113476075 Blast Desc: taurine catabolism dioxygenase TauD/TfdA [Trichodesmium erythraeum IMS101] gi|110167123|gb|ABG51663.1| Taurine catabolism dioxygenase TauD/TfdA [Trichodesmium IMS101]
  misc_feature (242)..(397): NCBI GI: 254439106 Blast Desc: Taurine catabolism dioxygenase TauD, TfdA family [Octadecabacter antarcticus 307] gi|198254552|gb|EDY78866.1| Taurine catabolism dioxygenase TauD, TfdA family [Octadecabacter
  misc_feature (242)..(424): NCBI GI: 242025345 Blast Desc: trimethyllysine dioxygenase, [Pediculus humanus corporis] gi|212518612|gb|EEB20347.1| trimethyllysine dioxygenase, [Pediculus humanus corporis]
  misc_feature (18)..(397): SWISSPROT Homolog: EC 1.14.11.1 Gamma-butyrobetaine dioxygenase
  misc_feature: Useful for introducing or modulating the production of volatile compounds
MSPSSPSLACNSGEHEIIVIHAVSVPNDQQLQVEFGDGIFTYHAQWLHDARNDRNPSRSAEDAFAVHVPDAKITGASVQGMGTSVVVQVSWHDATSTPFPGAWLRVFAPLVAKPSIPSKVPASNLLNNAGWVVDTVTIPDVPYEAIFPQDEPSVEHREAISVKICDMLFHEGNSGIIKITGLPAPDIQSERDTKNTLVTKVLKSVFGSVFVHPRRGADKTFNVTDNYGKEKDRGAELHNYKTDVVLLPHCDHAHYDYPAQVQGLYCLEGESINTFVSSVAVLRTMQEEYPDLYPYLLKSPMVVGRVAHYYDPPMFQATVEPAVTLSPGFPDQVKRIRWHPHLSGSLVAPFDDFDEARRAYQRFQEIMRRPTHQMKVLFKPGDLYIWDNFRTLHGRESVISVPRTSVGQTVPEQVVSERYRSLQIKRLNGLVDESWLVHVPTPQLYNMAKLLGA

SEQ ID NO: 12684 - DNA, 1239 bp, Muscodor strobelii
  misc_feature: SGI cDNA ID NO. 564131
  misc_feature: Elevated expression when VOC is produced
  misc_feature: Encodes the peptide sequence at SEQ ID NO 12685
gcctgggaggccgcacaagcaacttcctcaagcccattccccttcaagccctatacacatcaagaaacacagagcgactttattgacggcgctctaagcgagatcggggaagattctttgtcacaaagggaacactccagtgaaaaaacagacatggaattgaggcataggcaaggaggttggggatctactccccctccacgacctggtccgcttccacccagaccaccaccaaacccgacaccacctccaacaggtacatttccaagtccagaacgtgacttagaaccatactcaaagcagtcgaactcagaccgaaaagctacaagatacctcggccgtacattgcagagtgcgaacgaaggattacccagtcgacacggactctatgacgatactcttgagcaatttaaggcagtcgcaacaggccgtgatgatcaccgaaccaacgttgcgggtccatcgaacaattttgaggattacaaccataccgggtatgccttttcaaccgggcaagagactgaattcgacccacaaagtcacgctgatcggcttggtcgcacactccaggcgaacactggcggcgatttaacataccccacatcggcacagcgtactcctcaaacggcgtcacgtccagagccgaacgctgatgtttctgggttcggaccagagctacagagtctagcgcagaacgttgtccatgccgttgacttcctagtgcgagcaagcgagcgatatcagagatttaaggagctcacaagagcccctgaagaagggatagagctagacgactggaacctgagccatcttgagtccggtcaacagcgccgatctctgtcacggaatctacggcgtggacgacaatcgcctaagccctcaacgatagagccggagtcaacaacatctcctagcacaagttctgttttcatgtccctgtatgagccacctcgcgtacaggcgcccaggagaacagacaacgaaactgccccaatagacccgaaaacccctggattacgaccaccaccaagcaaaagaacatgctactacctcatcacagcgctcttcacaggtctaagctccagtctaatcctagccctatggtgggcacggagcgcaggtgatatatcggctggcttcacggtaggaagctatgtcgtcgccgtagtcgcattagtaattgccgctgcaggtgtattccacgcaccgcgttgtcgatgttggaaaggtgtaacttaa

SEQ ID NO: 12685 - protein, 412 aa, Muscodor strobelii
  misc_feature: SGI Peptide ID NO. 564131
  misc_feature: Useful for introducing or modulating the production of volatile compounds
AWEAAQATSSSPFPFKPYTHQETQSDFIDGALSEIGEDSLSQREHSSEKTDMELRHRQGGWGSTPPPRPGPLPPRPPPNPTPPPTGTFPSPERDLEPYSKQSNSDRKATRYLGRTLQSANEGLPSRHGLYDDTLEQFKAVATGRDDHRTNVAGPSNNFEDYNHTGYAFSTGQETEFDPQSHADRLGRTLQANTGGDLTYPTSAQRTPQTASRPEPNADVSGFGPELQSLAQNVVHAVDFLVRASERYQRFKELTRAPEEGIELDDWNLSHLESGQQRRSLSRNLRRGRQSPKPSTIEPESTTSPSTSSVFMSLYEPPRVQAPRRTDNETAPIDPKTPGLRPPPSKRTCYYLITALFTGLSSSLILALWWARSAGDISAGFTVGSYVVAVVALVIAAAGVFHAPRCRCWKGVT

SEQ ID NO: 12686 - DNA, 1432 bp, Muscodor strobelii
  misc_feature: SGI EST ID NO. CUFF.30146.0
  misc_feature: Variant of the nucleotide sequence at SEQ ID NO 12684
gagagttcagagcctgggaggccgcacaagcaacttcctcaagcccattccccttcaagccctatacacatcaagaaacacagagcgactttattgacggcgctctaagcgagatcggggaagattctttgtcacaaagggaacactccagtgaaaaaacagacatggaattgaggcataggcaaggaggttggggatctactccccctccacgacctggtccgcttccacccagaccaccaccaaacccgacaccacctccaacaggtacatttccaagtccagaacgtgacttagaaccatactcaaagcagtcgaactcagaccgaaaagctacaagatacctcggccgtacattgcagagtgcgaacgaaggattacccagtcgacacggactctatgacgatactcttgagcaatttaaggcagtcgcaacaggccgtgatgatcaccgaaccaacgttgcgggtccatcgaacaattttgaggattacaaccataccgggtatgccttttcaaccgggcaagagactgaattcgacccacaaagtcacgctgatcggcttggtcgcacactccaggcgaacactggcggcgatttaacataccccacatcggcacagcgtactcctcaaacggcgtcacgtccagagccgaacgctgatgtttctgggttcggaccagagctacagagtctagcgcagaacgttgtccatgccgttgacttcctagtgcgagcaagcgagcgatatcagagatttaaggagctcacaagagcccctgaagaagggatagagctagacgactggaacctgagccatcttgagtccggtcaacagcgccgatctctgtcacggaatctacggcgtggacgacaatcgcctaagccctcaacgatagagccggagtcaacaacatctcctagcacaagttctgttttcatgtccctgtatgagccacctcgcgtacaggcgcccaggagaacagacaacgaaactgccccaatagacccgaaaacccctggattacgaccaccaccaagcaaaagaacatgctactacctcatcacagcgctcttcacaggtctaagctccagtctaatcctagccctatggtgggcacggagcgcaggtgatatatcggctggcttcacggtaggaagctatgtcgtcgccgtagtcgcattagtaattgccgctgcaggtgtattccacgcaccgcgttgtcgatgttggaaaggtgtaacttaagaacagatggactagaacgttgattctgtttacctatgatcgaaatcaatgacgcctctataacacttaccgacgtctagtagcactaatattatatccctgggtataggcaatgcctgcctacttgaagttgaaactatatagaactgtacacatttaattatagaacagttcaattaatt

SEQ ID NO: 12687 - DNA, 5958 bp, Muscodor strobelii
  misc_feature: SGI cDNA ID NO. 564132
  misc_feature: Reduced expression when VOC is produced
  misc_feature: Encodes the peptide sequence at SEQ ID NO 12688
atggcgactcgcgccgctccaggtcacgcgatcgttcgcctgatcggaggtcgctctacagcgatggtggtccacgccgctcgtctaacgaattccgcgcaaacaatactgccttccaggctaatcgagactcgtttcgcgacaccttgccaagagataccccgcgcggacccaaggcccttcttgatcctcctagcggacctcgcggtggcttccaaggagacttccgtggtcgcggtcgaggtggaggccgaggccgaggatggcgagatgatagtcgtgaccgtggaagagatcgtgatatggactttcgggatcggagagacaatacttaccgagatgaacgcagccgagagcgcgatcgcccggattggcgagaccgtgaccgtgatcgcgacagctttagaggacgtcgcgcctctccccgtggccgctcgccgcctgggagagactttcgagacgccagagatgcacgtgatgggcctttgggagtcgatgccgatagagcaaggcgcggttcccgagatgggcccctttcggcaggctcgtcatcatcagatccccctttcgcccatccatcgtaccgtgggggatacggtaggggccgtggcagaggccgtggtggagattgggatcgcggccggggacggcccttctacgacgaccgagacagatacggaggccctttccgatcacgctcccaagaggggcgatttcgagatagagacgaccgtgaaagagacaatagatcgtgaacctcgccctaagattgagaggacttctcacgagcctccaacctcgaccagagacgtgtcgccaccgcccgtggcaccagccgcgccctcctttggttctgtgcccaacagatctacggcgacggaggtaagttcgaacatcggaaagcctccgcctactggacctagggcattgaaggaagaccgtcctgctctttcgggagccagtcctgtctccgactctcgacctccgccgttaggaccatcgaggccgaatttcacagaaagaagcccgccctcaaccctacgtgctcccgggcgaactcctggaccttctagtaaacaatggattaacccgaatcttaagagtcgagtgccggagtctcccaaagtgggtcggtctttgagctttgcacagtctcggcctgcgggatttcgacatgacgggggacattcggaccaacttggtgacactcatcaaaggccacggagcagtgatgctaaagataacccccaaggctccaggccacaaacttcgactcgagagaaccaagatcatgctgctggtgattctgcagtcgagacaagaccccaatctgctggttcatctgtgggtcgagggcataagatcaaagactcgggatttgtcaaagagcctagtgcggacagcgaggaagagccaggtgaaattgtcatgactgatagatccaatgcgggacattcagaaagatcccaggaaaggaaacggcgtcaaccaataacgacacctgcgatccgcatctccatgcacgggaaagaaaatcaccagccagttctcgaccaatcctcagaatcagatgaagaagatattggcgatattatccggtctgaaattgtcggagtcgagaagaaactaaaggaattggaggctatcgacatggcggtgccgagagatgccatcgtacggtacgcgctgatttctcttgaatcgatcactcagattgcgctagatccggaaggcatgtcagaaatgttgggtgctctaccggaaaaagctaccgcgccgaaagaaacagttacgcaatccgaaacaactaaattcgaagaacaacctgctattggcaatgccacctctcaagaaaacgaggaacaaattgacgataagactgccgtatcacctgttgctgccaaagagcatgttgcctttgccaatagctcgccagagcgcatacaaccatccatagagccagatggcgagacttctacgaatcaaaccgcgattccagccgagcaggaatcaaacattgaggatgaagatgttcatatggaagatgctttagagagccaggaagatactaaagtgcagccaacgccttcagttctgccaagcccaacacctcaaaaggactcattgctccctgtttttgatgaggctcagatcgactctcaaagcgcgagtaagagagaatccaccacaccatcgccgccagaagaagacgaggagacggacgacgaggacattgatattcagactatcgaaatcgtgcgcgagcatggtcagacccctccgctcgattcactcccagtcttcgacgtgcaaccgtgggatcaagacgagaccttcgtgaaatctatggatgtctcacagccagccctcaacacattcatcttgcagagattgaaagatgatgccctcaaacagctttcgcttgacaatcagctcaaagagcgatatggcggaaattacgacaattacatccactttacaatgtcggatgaccccgttgcggtccgaagtcgtgagaaatttacctatgttcccggggctagtgaccctgtagggcaaaagccaggcctcaccgcagaccctaaaccggaatcgacacgacgtagcagatacgcctctgagcgtgatcttgagagagttctcgaggagtcgcggagagtagaggatgagaagcgggaacgccaacttcaagccgagcgagagaaatatcgcactgacaaagaagccgtcatacccagccagtacctcaatgaagcagagcgattcaacgatttttatctagatacctcaggtattgtcgaaccagaaaaaaccgtcacagcatgggaagttctcccccctattgacaacttcactcccgaggagactggcatctttgagaaggcatatctagaatttccgaaacagtggggtcgaatttcagacccactcgcaaatcgagatttcggaacatgtatccagttctactatctgaagaaagagccggatgctctcaatctgaaggagaaactgaagaagcagcccaagaagcgtaagagaaatacccgtggtaaggcacgtagtagtgcgcttatgtctgagctgggtaatggagacaatgacaacgacgaaaatcaggagaacggggagaatggtgaaaggcgccggccacgtagagcagccgcgcctactttcaactcggaagctactcctgctactgatggcgaaggcgggacaccagccggcaccccgggccggagaggtgcggcaggccgagcacctgcagatggctccgaaaaacctaaacgaggccgtagggcggccaaggataaagagcaaaagattccgcagaagctcggttccatgcctcttgctgcagctccgcctcagcaattgacacccgcggccgctccaaaaggcaatcgctctagatctgcgtctagagtgcaggagtggacaggcccggctacgcaggatgacggaccaagaccaccacaatttgagatgcctccaggtcttgggccagctggtcaacctatgattatgcagccattttcacagccacagcctctcctaagtcccgagagaggaccacctttagccgatgcgatggcgcctccacccttacgacctgagcctccgcagcctcctgttcaggtgattgacatgagccaaccatcaacgtcagatcgaagggcgggcgggcagccgtctagttactggagcgtacctgaggcttcagagttcccacaattgcttaaatcctttggcagcgactggagtgccatagcctcgcacatgcgcactaagactgccgtcatggttaaaaattactacacgcgccgaaaggatgctaatgactgggaaacgctcgtacgagaagcagatgagaagaggaaccgaggagaaaagagacctcctccaccgctactcactacgaacaccaaaacaaaacggcacgatgtgtctggtaatcgaccacttgcagcagcagacgcggtcatggaagacgtaagcacaagcaaattagagcatcatccaaccagtcagccgatgacaggtcgtttcaatgtccccattgctgcccagcctcagccaccacttgtgccgtctccattcgcccagacgccacaggcaacttctctcggtcagaatccccatgttcctccaacgggcccccatacctctcaaccagctactccggtcatgtcaccatcaactcggccgttgagagcaccgctgcccttcgccgaccgagaacgagagccttttctacagcaacctagtggtcgcactcctttggtgtctaagccggctcacagtcttcctccgtcggtgtctgaaccacccatgaggcatcctctacctggtgccatggtcgaacctcaactcgagcgaccaaagatcgagccaaagtctaaagagccgctgcgccaacaagaacgacaggcaatgcgtgtgaagcaagagccagaccacccacaaccggacttttacggtggtgcgcctacctctattcgaggtcctccgtcgcgtgcggagataatgccgttgacatcacgggccgctgaacctcctcgtgcaccagcacaggctcctcaagcaccatacgcgattctccaacatcagccaggccggggctttatgggcgggccaacgccttcctcatctccagcgaccccgagacctctcacggctctctcccgaccaatgtccggcaacagtggcggcgacccttatcacacgcctcccgcgcagcgtacaccacccgccgctgttccagcgccttctcgagcaccaaagacgtctaacttgatggcgcttctgaatgacgatcctccaccggcgcccgctcccgttcccgcgcctccaaagaggttagctgaggtgcctgtggctcctaagtcatcatcaacgcctcctccacagtctaatctttctcgaccacctcctccgccgccgcctccgtcgcatgtacgacgagattcaggtctcccagaagctcagccttacggatatggtcgcaaccctccgccgcctgctccatcgtcaatgccatcactgaagccatacactgcatcgcctcaaagccagcccttgcatgccccaagacacatggctcacgagggcgttactgaacgagaatattacggcaaccgtgctcgcgcattcccgcctgctactgctggctctcctcagaatactcctcattatcaacctccatctcaaactgggcaggttcagtttcaaacccaatccccatacggttacagcggaccggtccagtctcaaccgcccaacgctgcatcgccgccccctcagtatgctcaccatcaatctgcccccagagcgcacgagccacctcctccttccagtcgcgaagccagctgggccgctccaagtcaaggccatccattacagcaacagcaagcaccaccgccatgggccgcacatccacctcaaccacccaagtccacgcaacctcagccgacacagtccccgtggggtgcacagcatgggccagcatccaaacctccgcagccgagcacttcagtccctccgcaagctcaatggggtagcgcaccgccgccccggggacacgacccgatggcattgcgcgagccttactcgtcacgcatgcaacagcccctgcaaacgccgtaccctccggtatcgcgtgcccctgacccggctcctcctcaacctcaagccggatatcctcgctacgccaatacacctgctcctggacgagaccctcgagacccccgagagcagggcccgcccagaagctatacacctgtgggtgcctatgacaggccatatcccccacaaggccaagacatgcgagatgcgcacattcgcgaccaacaacagcaacagcaaacagctttgcagcagtccttgagacctcaggacagacaccctcaggacagacatatgtacgaccgccaaccaccacctgatagatatgggcggtag

SEQ ID NO: 12688 - protein, 1985 aa, Muscodor strobelii
  misc_feature: SGI Peptide ID NO. 564132
  misc_feature (1231)..(1276): Pfam Id: PF00249 Pfam Desc: Myb-like DNA-binding domain
  misc_feature (747)..(1972): NCBI GI: 256735346 Blast Desc: NECHADRAFT_98872 [Nectria haematococca mpVI 77-13-4]
  misc_feature (747)..(1938): NCBI GI: 46105392 Blast Desc: FG00324.1 [Gibberella zeae PH-1]
  misc_feature (255)..(1732): NCBI GI: 116205163 Blast Desc: CHGG_10465 [Chaetomium globosum CBS 148.51] gi|88176593|gb|EAQ84061.1| CHGG_10465 [Chaetomium globosum CBS 148.51]
  misc_feature (713)..(1868): NCBI GI: 164424824 Blast Desc: NCU10346 [Neurospora crassa OR74A] gi|157070677|gb|EDO65090.1| [Neurospora crassa OR74A]
  misc_feature (713)..(1868): NCBI GI: 16944521 Blast Desc: conserved [Neurospora crassa]
  misc_feature (254)..(1403): NCBI GI: 171689648 Blast Desc: protein product [Podospora anserina] gi|170944786|emb|CAP70897.1| protein product [Podospora anserina]
  misc_feature (721)..(1412): NCBI GI: 145605571 Blast Desc: MGG_09174 [Magnaporthe grisea 70-15] gi|145013391|gb|EDJ98032.1| MGG_09174 [Magnaporthe grisea 70-15]
  misc_feature (742)..(1314): NCBI GI: 154318880 Blast Desc: BC1G_02829 [Botryotinia fuckeliana B05.10] gi|150857959|gb|EDN33151.1| BC1G_02829 [Botryotinia fuckeliana B05.10]
  misc_feature (699)..(1375): NCBI GI: 156063896 Blast Desc: SS1G_02066 [Sclerotinia sclerotiorum 1980] gi|154697400|gb|EDN97138.1| SS1G_02066 [Sclerotinia sclerotiorum 1980]
  misc_feature (569)..(1213): NCBI GI: 261356841 Blast Desc: conserved [Verticillium albo-atrum VaMs.102]
  misc_feature: Useful for introducing or modulating the production of volatile compounds
MATRAAPGHAIVRLIGGRSTAMVVHAARLTNSAQTILPSRLIETRFATPCQEIPRADPRPFLILLADLAVASKETSVVAVEVEAEAEDGEMIVVTVEEIVIWTFGIGETILTEMNAAESAIARIGETVTVIATALEDVAPLPVAARRLGETFETPEMHVMGLWESMPIEQGAVPEMGPFRQARHHQIPLSPIHRTVGDTVGAVAEAVVEIGIAAGDGPSTTTETDTEALSDHAPKRGDFEIETTVKETIDREPRPKIERTSHEPPTSTRDVSPPPVAPAAPSFGSVPNRSTATEVSSNIGKPPPTGPRALKEDRPALSGASPVSDSRPPPLGPSRPNFTERSPPSTLRAPGRTPGPSSKQWINPNLKSRVPESPKVGRSLSFAQSRPAGFRHDGGHSDQLGDTHQRPRSSDAKDNPQGSRPQTSTRENQDHAAGDSAVETRPQSAGSSVGRGHKIKDSGFVKEPSADSEEEPGEIVMTDRSNAGHSERSQERKRRQPITTPAIRISMHGKENHQPVLDQSSESDEEDIGDIIRSEIVGVEKKLKELEAIDMAVPRDAIVRYALISLESITQIALDPEGMSEMLGALPEKATAPKETVTQSETTKFEEQPAIGNATSQENEEQIDDKTAVSPVAAKEHVAFANSSPERIQPSIEPDGETSTNQTAIPAEQESNIEDEDVHMEDALESQEDTKVQPTPSVLPSPTPQKDSLLPVFDEAQIDSQSASKRESTTPSPPEEDEETDDEDIDIQTIEIVREHGQTPPLDSLPVFDVQPWDQDETFVKSMDVSQPALNTFILQRLKDDALKQLSLDNQLKERYGGNYDNYIHFTMSDDPVAVRSREKFTYVPGASDPVGQKPGLTADPKPESTRRSRYASERDLERVLEESRRVEDEKRERQLQAEREKYRTDKEAVIPSQYLNEAERFNDFYLDTSGIVEPEKTVTAWEVLPPIDNFTPEETGIFEKAYLEFPKQWGRISDPLANRDFGTCIQFYYLKKEPDALNLKEKLKKQPKKRKRNTRGKARSSALMSELGNGDNDNDENQENGENGERRRPRRAAAPTFNSEATPATDGEGGTPAGTPGRRGAAGRAPADGSEKPKRGRRAAKDKEQKIPQKLGSMPLAAAPPQQLTPAAAPKGNRSRSASRVQEWTGPATQDDGPRPPQFEMPPGLGPAGQPMIMQPFSQPQPLLSPERGPPLADAMAPPPLRPEPPQPPVQVIDMSQPSTSDRRAGGQPSSYWSVPEASEFPQLLKSFGSDWSAIASHMRTKTAVMVKNYYTRRKDANDWETLVREADEKRNRGEKRPPPPLLTTNTKTKRHDVSGNRPLAAADAVMEDVSTSKLEHHPTSQPMTGRFNVPIAAQPQPPLVPSPFAQTPQATSLGQNPHVPPTGPHTSQPATPVMSPSTRPLRAPLPFADREREPFLQQPSGRTPLVSKPAHSLPPSVSEPPMRHPLPGAMVEPQLERPKIEPKSKEPLRQQERQAMRVKQEPDHPQPDFYGGAPTSIRGPPSRAEIMPLTSRAAEPPRAPAQAPQAPYAILQHQPGRGFMGGPTPSSSPATPRPLTALSRPMSGNSGGDPYHTPPAQRTPPAAVPAPSRAPKTSNLMALLNDDPPPAPAPVPAPPKRLAEVPVAPKSSSTPPPQSNLSRPPPPPPPPSHVRRDSGLPEAQPYGYGRNPPPPAPSSMPSLKPYTASPQSQPLHAPRHMAHEGVTEREYYGNRARAFPPATAGSPQNTPHYQPPSQTGQVQFQTQSPYGYSGPVQSQPPNAASPPPQYAHHQSAPRAHEPPPPSSREASWAAPSQGHPLQQQQAPPPWAAHPPQPPKSTQPQPTQSPWGAQHGPASKPPQPSTSVPPQAQWGSAPPPRGHDPMALREPYSSRMQQPLQTPYPPVSRAPDPAPPQPQAGYPRYANTPAPGRDPRDPREQGPPRSYTPVGAYDRPYPPQGQDMRDAHIRDQQQQQQTALQQSLRPQDRHPQDRHMYDRQPPPDRYGR

SEQ ID NO: 12689 - DNA, 7087 bp, Muscodor strobelii
  misc_feature: SGI EST ID NO. CUFF.30177.0
  misc_feature: Variant of the nucleotide sequence at SEQ ID NO 12687
gaatttcgagattgctaggcccagtcaggcttagcggtgaggagacccgattcgtgatttcaagcatcacaactacggcggctttcggccccggtcgccagccagagacacacagcagcgaggcgggtctccagatgcacactctgcaacctgcaacctgcaatctcatcagcctcctcttctgtcgccgccaaacacacacctaaccagtctttcattgccggcgccatctttccgtgttgtgcaagtcgaggcatctctcggctgccgctttcttttgttttattttgcatatctgcggtgttccgtgccgcattgcatccccgtgagagggacaacgacgacgacgacacctcagacagaacttggccgtaactgcggctcacgagtaccgcgacttgatgctttgatgttgatgcaacactacaacagccgaccgtcgaccgcaaaaactaaattggcatagagtttcactttcatggattcggttttcatgagcattttctcaacacttctcaactagcacctagtgactgggtgcctagcagttgccatggcatcccgctacccggggtcccgctacgatggcgactcgcgccgctccaggtcacgcgatcgttcgcctgatcggaggtcgctctacagcgatggtggtccacgccgctcgtctaacgaattccgcgcaaacaatactgccttccaggctaatcgagactcgtttcgcgacaccttgccaagagataccccgcgcggacccaaggcccttcttgatcctcctagcggacctcgcggtggcttccaaggagacttccgtggtcgcggtcgaggtggaggccgaggccgaggatggcgagatgatagtcgtgaccgtggaagagatcgtgatatggactttcgggatcggagagacaatacttaccgagatgaacgcagccgagagcgcgatcgcccggattggcgagaccgtgaccgtgatcgcgacagctttagaggacgtcgcgcctctccccgtggccgctcgccgcctgggagagactttcgagacgccagagatgcacgtgatgggcctttgggagtcgatgccgatagagcaaggcgcggttcccgagatgggcccctttcggcaggctcgtcatcatcagatccccctttcgcccatccatcgtaccgtgggggatacggtaggggccgtggcagaggccgtggtggagattgggatcgcggccggggacggcccttctacgacgaccgagacagatacggaggccctttccgatcacgctcccaagaggggcgatttcgagatagagacgaccgtgaaagagacaataggtacatggatcccgatgtccgtcctcgagatcctcgagattctcgcgatgaccgagatgctcgagatcgtgaacctcgccctaagattgagaggacttctcacgagcctccaacctcgaccagagacgtgtcgccaccgcccgtggcaccagccgcgccctcctttggttctgtgcccaacagatctacggcgacggaggtaagttcgaacatcggaaagcctccgcctactggacctagggcattgaaggaagaccgtcctgctctttcgggagccagtcctgtctccgactctcgacctccgccgttaggaccatcgaggccgaatttcacagaaagaagcccgccctcaaccctacgtgctcccgggcgaactcctggaccttctagtaaacaatggattaacccgaatcttaagagtcgagtgccggagtctcccaaagtgggtcggtctttgagctttgcacagtctcggcctgcgggatttcgacatgacgggggacattcggaccaacttggtgacactcatcaaaggccacggagcagtgatgctaaagataacccccaaggctccaggccacaaacttcgactcgagagaaccaagatcatgctgctggtgattctgcagtcgagacaagaccccaatctgctggttcatctgtgggtcgagggcataagatcaaagactcgggatttgtcaaagagcctagtgcggacagcgaggaagagccaggtgaaattgtcatgactgatagatccaatgcgggacattcagaaagatcccaggaaaggaaacggcgtcaaccaataacgacacctgcgatccgcatctccatgcacgggaaagaaaatcaccagccagttctcgaccaatcctcagaatcagatgaagaagatattggcgatattatccggtctgaaattgtcggagtcgagaagaaactaaaggaattggaggctatcgacatggcggtgccgagagatgccatcgtacggtacgcgctgatttctcttgaatcgatcactcagattgcgctagatccggaaggcatgtcagaaatgttgggtgctctaccggaaaaagctaccgcgccgaaagaaacagttacgcaatccgaaacaactaaattcgaagaacaacctgctattggcaatgccacctctcaagaaaacgaggaacaaattgacgataagactgccgtatcacctgttgctgccaaagagcatgttgcctttgccaatagctcgccagagcgcatacaaccatccatagagccagatggcgagacttctacgaatcaaaccgcgattccagccgagcaggaatcaaacattgaggatgaagatgttcatatggaagatgctttagagagccaggaagatactaaagtgcagccaacgccttcagttctgccaagcccaacacctcaaaaggactcattgctccctgtttttgatgaggctcagatcgactctcaaagcgcgagtaagagagaatccaccacaccatcgccgccagaagaagacgaggagacggacgacgaggacattgatattcagactatcgaaatcgtgcgcgagcatggtcagacccctccgctcgattcactcccagtcttcgacgtgcaaccgtgggatcaagacgagaccttcgtgaaatctatggatgtctcacagccagccctcaacacattcatcttgcagagattgaaagatgatgccctcaaacagctttcgcttgacaatcagctcaaagagcgatatggcggaaattacgacaattacatccactttacaatgtcggatgaccccgttgcggtccgaagtcgtgagaaatttacctatgttcccggggctagtgaccctgtagggcaaaagccaggcctcaccgcagaccctaaaccggaatcgacacgacgtagcagatacgcctctgagcgtgatcttgagagagttctcgaggagtcgcggagagtagaggatgagaagcgggaacgccaacttcaagccgagcgagagaaatatcgcactgacaaagaagccgtcatacccagccagtacctcaatgaagcagagcgattcaacgatttttatctagatacctcaggtattgtcgaaccagaaaaaaccgtcacagcatgggaagttctcccccctattgacaacttcactcccgaggagactggcatctttgagaaggcatatctagaatttccgaaacagtggggtcgaatttcagacccactcgcaaatcgagatttcggaacatgtatccagttctactatctgaagaaagagccggatgctctcaatctgaaggagaaactgaagaagcagcccaagaagcgtaagagaaatacccgtggtaaggcacgtagtagtgcgcttatgtctgagctgggtaatggagacaatgacaacgacgaaaatcaggagaacggggagaatggtgaaaggcgccggccacgtagagcagccgcgcctactttcaactcggaagctactcctgctactgatggcgaaggcgggacaccagccggcaccccgggccggagaggtgcggcaggccgagcacctgcagatggctccgaaaaacctaaacgaggccgtagggcggccaaggataaagagcaaaagattccgcagaagctcggttccatgcctcttgctgcagctccgcctcagcaattgacacccgcggccgctccaaaaggcaatcgctctagatctgcgtctagagtgcaggagtggacaggcccggctacgcaggatgacggaccaagaccaccacaatttgagatgcctccaggtcttgggccagctggtcaacctatgattatgcagccattttcacagccacagcctctcctaagtcccgagagaggaccacctttagccgatgcgatggcgcctccacccttacgacctgagcctccgcagcctcctgttcaggtgattgacatgagccaaccatcaacgtcagatcgaagggcgggcgggcagccgtctagttactggagcgtacctgaggcttcagagttcccacaattgcttaaatcctttggcagcgactggagtgccatagcctcgcacatgcgcactaagactgccgtcatggttaaaaattactacacgcgccgaaaggatgctaatgactgggaaacgctcgtacgagaagcagatgagaagaggaaccgaggagaaaagagacctcctccaccgctactcactacgaacaccaaaacaaaacggcacgatgtgtctggtaatcgaccacttgcagcagcagacgcggtcatggaagacgtaagcacaagcaaattagagcatcatccaaccagtcagccgatgacaggtcgtttcaatgtccccattgctgcccagcctcagccaccacttgtgccgtctccattcgcccagacgccacaggcaacttctctcggtcagaatccccatgttcctccaacgggcccccatacctctcaaccagctactccggtcatgtcaccatcaactcggccgttgagagcaccgctgcccttcgccgaccgagaacgagagccttttctacagcaacctagtggtcgcactcctttggtgtctaagccggctcacagtcttcctccgtcggtgtctgaaccacccatgaggcatcctctacctggtgccatggtcgaacctcaactcgagcgaccaaagatcgagccaaagtctaaagagccgctgcgccaacaagaacgacaggcaatgcgtgtgaagcaagagccagaccacccacaaccggacttttacggtggtgcgcctacctctattcgaggtcctccgtcgcgtgcggagataatgccgttgacatcacgggccgctgaacctcctcgtgcaccagcacaggctcctcaagcaccatacgcgattctccaacatcagccaggccggggctttatgggcgggccaacgccttcctcatctccagcgaccccgagacctctcacggctctctcccgaccaatgtccggcaacagtggcggcgacccttatcacacgcctcccgcgcagcgtacaccacccgccgctgttccagcgccttctcgagcaccaaagacgtctaacttgatggcgcttctgaatgacgatcctccaccggcgcccgctcccgttcccgcgcctccaaagaggttagctgaggtgcctgtggctcctaagtcatcatcaacgcctcctccacagtctaatctttctcgaccacctcctccgccgccgcctccgtcgcatgtacgacgagattcaggtctcccagaagctcagccttacggatatggtcgcaaccctccgccgcctgctccatcgtcaatgccatcactgaagccatacactgcatcgcctcaaagccagcccttgcatgccccaagacacatggctcacgagggcgttactgaacgagaatattacggcaaccgtgctcgcgcattcccgcctgctactgctggctctcctcagaatactcctcattatcaacctccatctcaaactgggcaggttcagtttcaaacccaatccccatacggttacagcggaccggtccagtctcaaccgcccaacgctgcatcgccgccccctcagtatgctcaccatcaatctgcccccagagcgcacgagccacctcctccttccagtcgcgaagccagctgggccgctccaagtcaaggccatccattacagcaacagcaagcaccaccgccatgggccgcacatccacctcaaccacccaagtccacgcaacctcagccgacacagtccccgtggggtgcacagcatgggccagcatccaaacctccgcagccgagcacttcagtccctccgcaagctcaatggggtagcgcaccgccgccccggggacacgacccgatggcattgcgcgagccttactcgtcacgcatgcaacagcccctgcaaacgccgtaccctccggtatcgcgtgcccctgacccggctcctcctcaacctcaagccggatatcctcgctacgccaatacacctgctcctggacgagaccctcgagacccccgagagcagggcccgcccagaagctatacacctgtgggtgcctatgacaggccatatcccccacaaggccaagacatgcgagatgcgcacattcgcgaccaacaacagcaacagcaaacagctttgcagcagtccttgagacctcaggacagacaccctcaggacagacatatgtacgaccgccaaccaccacctgatagatatgggcggtaggagctcccaatttctgcttgactgttggacgtctggagtattgagagttggtgcctggctgccgctctaccttattgtccgaatgatttcacaaaatcaatgtacaaacaaattcgcttatatgccatatgaagaaacggcctattgcacataaactcagtcgctgggtggtgccacaccacagccactgacttgcttgtactgctctcacatatatgtaggttttgagaaatgatgtttgatgcgatcaaaatgatgcggtggtttggggctatactttgcttttcttgcatgaaaacaaaaatggtggcatagtgtgtattatagcattgtgaagcaaaaggctagcccgtcccgtagcgactacgaatgaatcggaaaattactattataagaagttctatacgtatcctgatatatggtgtttcagtccttatccgaaatacgtataaaatgtgtgtgcattcagccctcctttca

SEQ ID NO: 12690 - DNA, 1029 bp, Muscodor strobelii
  misc_feature: SGI cDNA ID NO. 564133
  misc_feature: Encodes the peptide sequence at SEQ ID NO 12691
atgaatttcaagcacaactcagatgcatcagaggagcgatccggggccagctcgcagcaaaccgaccacgaccacgaccacgacttgggccgcgaccgcgcaccacctgtccgcaagacagcccaagagatacagatggagagggaagcaaagcaaaagcgtgaaagcaagaagaaattcgatgctcaggtgcagtcacacatggacaatatgaaggatatgaatcccgacgagttggtagatcactggctacaaaggaacaacgataagagcaagaactgggaacagctccagaaaggcaagaagttcatagaagagatggggaaagagagattggctttactcgatgataatggagagcctaccgaggctagcgaactggaggcaatgctctatcccacacctgctaaacgcacacttcgcgaacgaaaggatccactcgtttcgactcctgaaaccaagatgaagaccaagtccaagaagtccatcaagtccaacataaccacgccccttccacaacgagcaacagcttcgatttcggaatacccagttgccactaccactgaagaagaacttagattgcctagttctcctcaccacccttcagcacctgctcagcctactgagcctagtttccgaccccagcgcagttctctcagaagagctctccaagagagtgcggcttcaccacgacacggacgtctttcgtccaatgctgggaccaattctgcacccgcaatatacaacgatgcgatgaacacaagtcaggaagagatgagtaatgacgttcaccatgccccagattcctcgcagccggagcaacttttacgaccaattcagccgccaaatcaacaggctgaaacagtaactacatcctcctcggcgggaacaacaagttccacggtacggaaaaagcgttcgcgtgcggtcgcctctttggaatctgatctcaccgatgagtttaagcaacctaggagttacgacgagaacggatggagtcgggatcgcaagcatcgcaagtttacctga

SEQ ID NO: 12691 - protein, 342 aa, Muscodor strobelii
  misc_feature: SGI Peptide ID NO. 564133
MNFKHNSDASEERSGASSQQTDHDHDHDLGRDRAPPVRKTAQEIQMEREAKQKRESKKKFDAQVQSHMDNMKDMNPDELVDHWLQRNNDKSKNWEQLQKGKKFIEEMGKERLALLDDNGEPTEASELEAMLYPTPAKRTLRERKDPLVSTPETKMKTKSKKSIKSNITTPLPQRATASISEYPVATTTEEELRLPSSPHHPSAPAQPTEPSFRPQRSSLRRALQESAASPRHGRLSSNAGTNSAPAIYNDAMNTSQEEMSNDVHHAPDSSQPEQLLRPIQPPNQQAETVTTSSSAGTTSSTVRKKRSRAVASLESDLTDEFKQPRSYDENGWSRDRKHRKFT

SEQ ID NO: 12692 - DNA, 446 bp, Muscodor strobelii
  misc_feature: SGI EST ID NO. CUFF.30164.0
  misc_feature: Variant of the nucleotide sequence at SEQ ID NO 12690
cgttacactacgtgatccattctattgacggattttatgtctatacggttgactagttgaggcgacggccaaagctaactactatacttagatcctcgacccagcaaagcaacaacatgaatttcaagcacaactcagatgcatcagaggagcgatccggggccagctcgcagcaaaccgaccacgaccacgaccacgacttgggccgcgaccgcgcaccacctgtccgcaagacagcccaagagatacagatggagagggaagcaaagcaaaagcgtgaaagcaagaagaaattcgatgctcaggtgcagtcacacatggacaatatgaaggatatgaatcccgacgagttggtagatcactggctacaaaggaacaacgataagagcaagaactgggaacagctccagaaaggcaagaagttcatagaagagatggggaaagag

SEQ ID NO: 12693 - DNA, 1071 bp, Muscodor strobelii
  misc_feature: SGI cDNA ID NO. 564134
  misc_feature: Encodes the peptide sequence at SEQ ID NO 12694
atggcaacgacaccaggcagctcgaatgcgccacctgaagaggccacgaatgcagttctagttccctcggacgagctcccggcaggcgctcagaaagtggaggaaatcgatttcaacgcattcaagggacggccgatcacggtagatgatatcatgcgaggcatgggccatatgggcttccaggcttcctcgatcggtgaaggtgtcgatattatcaataagatgcgttcgtggcgggacccagaaacaggagataaaacgactattttcttagggtacacatccaacatgatatcatccggccttcgaggcattttccgctaccttgtcgaacacaagcatgtctcgtgtattgtcacttctgctggtggcattgaggaagacttcatcaaatgtctaggagatacctacatgtcttcgtttagcgcaaagggttcagagcttcgagccaaaggtctcaacagaatcggaaatcttatggtgcccaatgcgaactactgcgccttcgaagattgggtcgtgcctatcctagataagatgctcgaggaacaggaagccagcaaggggactgatgatgaactcaactggacgccatcaaaagtcatacatcgcctcgggaaggaaattaatgacgaacgatcagtctattattgggcttacaagaatgacattccggttttctgtccggctctgacagatggcagcctaggtgatatgctatattttcatactttcaagacgtccccaaaacagctcaaggtcgatattgtcgaggacatacgtcgagtcaatactatcgcagtccgggccaagcgagcgggcatgataatcttgggtggtggcgttattaaacatcacatcgcaaatgcctgtttgatgaggaatggagctgaatatgctgtttacataaatactgctcaggaatttgatgggagtgacgctggcgccaggccagacgaggctatatcttggggtaagataaagcctggggcagattatgtgaagatatatctcgaggcatccgcttgtttcccctttattgtggccagtacattcgcgaaggatacgtga

SEQ ID NO: 12694 - protein, 356 aa, Muscodor strobelii
  misc_feature: SGI Peptide ID NO. 564134
  misc_feature (48)..(353): Pfam Id: PF01916 Pfam Desc: Deoxyhypusine synthase
  misc_feature (8)..(355): NCBI GI: 116205165 Blast Desc: deoxyhypusine synthase [Chaetomium globosum CBS 148.51] gi|88176594|gb|EAQ84062.1| deoxyhypusine synthase [Chaetomium globosum CBS 148.51]
  misc_feature (7)..(355): NCBI GI: 85074617 Blast Desc: deoxyhypusine synthase [Neurospora crassa OR74A] gi|14286111|sp|P49365.2|DHYS_NEUCR RecName: Full=Deoxyhypusine synthase; Short=DHS gi|9367486|emb|CAB97475.1| DEOXYHYPUSINE
  misc_feature (7)..(355): NCBI GI: 46105390 Blast Desc: DHYS_NEUCR Deoxyhypusine synthase (DHS) [Gibberella zeae PH-1]
  misc_feature (7)..(355): NCBI GI: 1019423 Blast Desc: deoxyhypusine synthase [Neurospora crassa]
  misc_feature (20)..(355): NCBI GI: 256734615 Blast Desc: [Nectria haematococca mpVI 77-13-4]
  misc_feature (8)..(355): NCBI GI: 171689646 Blast Desc: protein product [Podospora anserina] gi|170944785|emb|CAP70896.1| protein product [Podospora anserina]
  misc_feature (1)..(355): NCBI GI: 156063894 Blast Desc: deoxyhypusine synthase [Sclerotinia sclerotiorum 1980] gi|154697399|gb|EDN97137.1| deoxyhypusine synthase [Sclerotinia sclerotiorum 1980]
  misc_feature (1)..(355): NCBI GI: 154318878 Blast Desc: deoxyhypusine synthase [Botryotinia fuckeliana B05.10] gi|150857958|gb|EDN33150.1| deoxyhypusine synthase [Botryotinia fuckeliana B05.10]
  misc_feature (26)..(355): NCBI GI: 145605573 Blast Desc: deoxyhypusine synthase [Magnaporthe grisea 70-15] gi|145013392|gb|EDJ98033.1| deoxyhypusine synthase [Magnaporthe grisea 70-15]
  misc_feature (8)..(354): NCBI GI: 225555608 Blast Desc: deoxyhypusine synthase [Ajellomyces capsulatus G186AR]
  misc_feature (7)..(355): SWISSPROT Homolog: EC 2.5.1.46 Deoxyhypusine synthase
MATTPGSSNAPPEEATNAVLVPSDELPAGAQKVEEIDFNAFKGRPITVDDIMRGMGHMGFQASSIGEGVDIINKMRSWRDPETGDKTTIFLGYTSNMISSGLRGIFRYLVEHKHVSCIVTSAGGIEEDFIKCLGDTYMSSFSAKGSELRAKGLNRIGNLMVPNANYCAFEDWVVPILDKMLEEQEASKGTDDELNWTPSKVIHRLGKEINDERSVYYWAYKNDIPVFCPALTDGSLGDMLYFHTFKTSPKQLKVDIVEDIRRVNTIAVRAKRAGMIILGGGVIKHHIANACLMRNGAEYAVYINTAQEFDGSDAGARPDEAISWGKIKPGADYVKIYLEASACFPFIVASTFAKDT

SEQ ID NO: 12695 - DNA, 4222 bp, Muscodor strobelii
  misc_feature: SGI EST ID NO. CUFF.30174.0
  misc_feature: Variant of the nucleotide sequence at SEQ ID NO 12693
cagctttacagctaaggtattatttaaggaggggcatatcacggtatggaatttgacttggtttgcgacataaaggtaatgctgcttcggcccacaactcatgttagtcctccacatttcgaccatcttcacgttcctttcgcctcgccttcacaaccccttcgactttagagctggtaccttccattttcatcatttaagtacctactgtaccgtagcaatgatggtcccatcaagaataagatatcaattagtctttagatagcctaagttaggagtacgggagcgatccatgtgccaagcgtggcacctaaattagggcagatatctctgacatctactcaatcccaaatcagacggtcttgagtaggagtgcactgtgacgtgtatgaccaagtaatggttgggtttgaacatagcatcgaatgaagggtatcacttttgttacaactaccatgcaaaagacactgcagtgatgatagaattacaatgcacacaaccctcatcatcgagcccccctaccggcaagagccgaggctcgagctagttttgcgttgcgtgcttgatcgtcccattgtcttcccgacttcccacgtttctgatccctctcctctttcagcgtccgagccttttccctcggatcgatgacaacaagctcctcttcagctttcttgcgatagcttaggtccttacccagcttatctgccgcgaagctcaacgaatgcgacatccagccctcatcagtttcgtcttcattccctgctttgtcccatgatgtgcagctctggcagttggcgataaaatgcaagtcacagagctctgcctcgtcatcgccctctccagtgactttctccttggtgtcgctttctaccggcgctgcttcctgctccttttcgggagccgcgtgtttgagttttgatcggaatgccttaaacatcgataaatcatcatctgccgctggagcttcaccacctcgccgtcgttttcgaccacgtgtcgacgtttcagggataagctgttctaaggccgttttcttcacctcaggaatcgattctgagtgtacggtgcgcttcatagatgctttcaaagcggcaatttcttcatttgcctgctccagcgcagatttacgtggtggtggctccgcatccggggatctgattttctgcgtaggttctgcgggccttttcttggggggttcttgggatacagactctttgttttgctcgggttgcggttggcgcactggtattgctgtcgcttttggtttatctatggttgatctctcctgccttggtatactgtcgatcgactccttagttgaagaactgggctcatcttcgtccacatccattataatacgtgaatcaaatttggcttttttgactaccggcatgtcgacatccccttcatcgttgtcgaagctcaaaagcttcttgctagcttttgccttcttcttctttttctcggccgttggcgcagatgctgtcggctgggccgtccgcgtcctcttcttcatgtcatcaaatgggttgactagtatctcggttcctgtgatcttgatggcgtacagcggccgttcgccaccatcggtaatctcagcctcgcccatgcgtgccagattgtatatcgtatcgcccactaccctcccgaatactgtgttcttattgttaagctcttcagccttgtcgagcgtgaaaaagaattgactgccgttggtatcaggccgtccctcgtttgccatgccgagcagacccctgcggttgaacttgagtcgtgaatggaactcatctctgaagttgacgcctgttgttcctgcattcttgcctcgtcgctgatccataggccacggatcaagatctccactgtacgcgccgccgtcgtagatgcattcgcctccattgccggtacctgttgggtcgccgccttggattatgaagccagggatgagcctgtggaatatggtgtcatcgtagtaaccgtcgatacagagctgaagaaagttgcgtgatgtaagtggcgtctgtttagcaaatagctcgacggatagatcacccagatttgtgtgcaggattaaggacgcggtcggctgtggttcgaggttgtagatggaagacatggctcgtagcggcggatagagatgcctacaaggcgttcggtcgtcaccgagaaagcgctgtgcatcgagaggtgacgcgaaaatatgtggccgtcgttgagcttttgggtactgcgcgatgggattccaagctcatgaatctggtcgacggacgaaggttgccttgagcttggcttgggtaatccggatggctaggtgcgcgtctgcgcctaaaggtgacgattcaaatcaggtcgtcgtgggcagcgcggaactcattaagtagatgatctatgttaaactggacgctagctcatttagaagtcaaaagttggttgtcgtcggtcgatgctcctcaagctctgctactaagctacagagccaaggtccaatgattgctaggcctacggcaccgtatcaaattctaggtaggcctgcacgccgcattgctgtggtgcagtactgtaaggcaatatgccaagcagatgtgcatttctaggcgcacccctcctccacattaggcaaatttgatgtttggatggaggggtaccggtataagtcacaacaacatcgataaaacttccaacccaacggtcttttgtgacataatctcaacttctactatttgatcatcttgaagcccgatcgagctgatgcgtagtttcgtcgtatcctgtgctctttctcacatcatcggtacccatctgtaaggaccatagtgggaaatcataatccagtgtccagatatcaggaattattgaaggatcatggcaacgacaccaggcagctcgaatgcgccacctgaagaggccacgaatgcagttctagttccctcggacgagctcccggcaggcgctcagaaagtggaggaaatcgatttcaacgcattcaagggacggccgatcacggtagatgatatcatgcgaggcatgggccatatgggcttccaggcttcctcgatcggtgaaggtgtcgatattatcaataagatgcgttcgtggcgggacccagaaacaggagataaaacgactattttcttagggtacacatccaacatgatatcatccggccttcgaggcattttccgctaccttgtcgaacacaagcatgtctcgtgtattgtcacttctgctggtggcattgaggaagacttcatcaaatgtctaggagatacctacatgtcttcgtttagcgcaaagggttcagagcttcgagccaaaggtctcaacagaatcggaaatcttatggtgcccaatgcgaactactgcgccttcgaagattgggtcgtgcctatcctagataagatgctcgaggaacaggaagccagcaaggggactgatgatgaactcaactggacgccatcaaaagtcatacatcgcctcgggaaggaaattaatgacgaacgatcagtctattattgggcttacaagaatgacattccggttttctgtccggctctgacagatggcagcctaggtgatatgctatattttcatactttcaagacgtccccaaaacagctcaaggtcgatattgtcgaggacatacgtcgagtcaatactatcgcagtccgggccaagcgagcgggcatgataatcttgggtggtggcgttattaaacatcacatcgcaaatgcctgtttgatgaggaatggagctgaatatgctgtttacataaatactgctcaggaatttgatgggagtgacgctggcgccaggccagacgaggctatatcttggggtaagataaagcctggggcagattatgtgaagatatatctcgaggcatccgcttgtttcccctttattgtggccagtacattcgcgaaggatacgtgaaggataaagaaggatagacacacagggcaacgacaaaaatacgatatcaccgcttgcctctagctagagaactcagggcaacgagaagtttcccatgttcgatgcagctagtcggtcgcatgacaaggcgccagctagtgcgacagcaataactaccataagccaatatttgcctcattccctgagagccactatgatgccttacagtaacattagccatctaggtagagttctgctgcattctcattagttcctcccgtcagcttaatcatgctcatgatataaagtc

SEQ ID NO: 12696 - DNA, 1611 bp, Muscodor strobelii
  misc_feature: SGI cDNA ID NO. 564135
  misc_feature: Encodes the peptide sequence at SEQ ID NO 12697
atgtcttccatctacaacctcgaaccacagccgaccgcgtccttaatcctgcacacaaatctgggtgatctatccgtcgagctatttgctaaacagacgccacttacatcacgcaactttcttcagctctgtatcgacggttactacgatgacaccatattccacaggctcatccctggcttcataatccaaggcggcgacccaacaggtaccggcaatggaggcgaatgcatctacgacggcggcgcgtacagtggagatcttgatccgtggcctatggatcagcgacgaggcaagaatgcaggaacaacaggcgtcaacttcagagatgagttccattcacgactcaagttcaaccgcaggggtctgctcggcatggcaaacgagggacggcctgataccaacggcagtcaattctttttcacgctcgacaaggctgaagagcttaacaataagaacacagtattcgggagggtagtgggcgatacgatatacaatctggcacgcatgggcgaggctgagattaccgatggtggcgaacggccgctgtacgccatcaagatcacaggaaccgagatactagtcaacccatttgatgacatgaagaagaggacgcggacggcccagccgacagcatctgcgccaacggccgagaaaaagaagaagaaggcaaaagctagcaagaagcttttgagcttcgacaacgatgaaggggatgtcgacatgccggtagtcaaaaaagccaaatttgattcacgtattataatggatgtggacgaagatgagcccagttcttcaactaaggagtcgatcgacagtataccaaggcaggagagatcaaccatagataaaccaaaagcgacagcaataccagtgcgccaaccgcaacccgagcaaaacaaagagtctgtatcccaagaaccccccaagaaaaggcccgcagaacctacgcagaaaatcagatccccggatgcggagccaccaccacgtaaatctgcgctggagcaggcaaatgaagaaattgccgctttgaaagcatctatgaagcgcaccgtacactcagaatcgattcctgaggtgaagaaaacggccttagaacagcttatccctgaaacgtcgacacgtggtcgaaaacgacggcgaggtggtgaagctccagcggcagatgatgatttatcgatgtttaaggcattccgatcaaaactcaaacacgcggctcccgaaaaggagcaggaagcagcgccggtagaaagcgacaccaaggagaaagtcactggagagggcgatgacgaggcagagctctgtgacttgcattttatcgccaactgccagagctgcacatcatgggacaaagcagggaatgaagacgaaactgatgagggctggatgtcgcattcgttgagcttcgcggcagataagctgggtaaggacctaagctatcgcaagaaagctgaagaggagcttgttgtcatcgatccgagggaaaaggctcggacgctgaaagaggagagggatcagaaacgtgggaagtcgggaagacaatgggacgatcaagcacgcaacgcaaaactagctcgagcctcggctcttgccggtaggggggctcgatga

SEQ ID NO: 12697 - protein, 536 aa, Muscodor strobelii
  misc_feature: SGI Peptide ID NO. 564135
  misc_feature (14)..(194): Pfam Id: PF00160 Pfam Desc: Cyclophilin type peptidyl-prolyl cis-trans isomerase/CLD
  misc_feature (1)..(536): NCBI GI: 46108126 Blast Desc: FG00945.1 [Gibberella zeae PH-1] gi|82592780|sp|Q4IPB3.1|CWC27_GIBZE RecName: Full=Peptidyl-prolyl isomerase CWC27
  misc_feature (1)..(536): NCBI GI: 256734673 Blast Desc: [Nectria haematococca mpVI 77-13-4]
  misc_feature (1)..(536): NCBI GI: 261356839 Blast Desc: peptidyl-prolyl isomerase CWC27 [Verticillium albo-atrum VaMs.102]
  misc_feature (1)..(515): NCBI GI: 116204573 Blast Desc: CHGG_10170 [Chaetomium globosum CBS 148.51] gi|88176298|gb|EAQ83766.1| CHGG_10170 [Chaetomium globosum CBS 148.51]
  misc_feature (1)..(536): NCBI GI: 39942326 Blast Desc: MGG_03243 [Magnaporthe grisea 70-15] gi|145015761|gb|EDK00251.1| MGG_03243 [Magnaporthe grisea 70-15]
  misc_feature (1)..(516): NCBI GI: 85109949 Blast Desc: peptidyl-prolyl isomerase CWC27 [Neurospora crassa OR74A] gi|74662718|sp|Q7SBX8.1|CWC27_NEUCR RecName: Full=Peptidyl-prolyl isomerase cwc-27 gi|28924829|gb|EAA33928.1|
  misc_feature (1)..(502): NCBI GI: 171689238 Blast Desc: protein product [Podospora anserina] gi|170944581|emb|CAP70692.1| protein product [Podospora anserina]
  misc_feature (1)..(535): NCBI GI: 154318866 Blast Desc: BC1G_02822 [Botryotinia fuckeliana B05.10] gi|150857952|gb|EDN33144.1| BC1G_02822 [Botryotinia fuckeliana B05.10]
  misc_feature (1)..(536): NCBI GI: 156063876 Blast Desc: SS1G_02056 [Sclerotinia sclerotiorum 1980] gi|154697390|gb|EDN97128.1| SS1G_02056 [Sclerotinia sclerotiorum 1980]
  misc_feature (1)..(516): NCBI GI: 189190636 Blast Desc: peptidyl-prolyl isomerase CWC27 [Pyrenophora tritici-repentis Pt-1C-BFP] gi|187973263|gb|EDU40762.1| peptidyl-prolyl isomerase CWC27 [Pyrenophora tritici-repentis
  misc_feature (1)..(516): SWISSPROT Homolog: EC 5.2.1.8 Peptidylprolyl isomerase
MSSIYNLEPQPTASLILHTNLGDLSVELFAKQTPLTSRNFLQLCIDGYYDDTIFHRLIPGFIIQGGDPTGTGNGGECIYDGGAYSGDLDPWPMDQRRGKNAGTTGVNFRDEFHSRLKFNRRGLLGMANEGRPDTNGSQFFFTLDKAEELNNKNTVFGRVVGDTIYNLARMGEAEITDGGERPLYAIKITGTEILVNPFDDMKKRTRTAQPTASAPTAEKKKKKAKASKKLLSFDNDEGDVDMPVVKKAKFDSRIIMDVDEDEPSSSTKESIDSIPRQERSTIDKPKATAIPVRQPQPEQNKESVSQEPPKKRPAEPTQKIRSPDAEPPPRKSALEQANEEIAALKASMKRTVHSESIPEVKKTALEQLIPETSTRGRKRRRGGEAPAADDDLSMFKAFRSKLKHAAPEKEQEAAPVESDTKEKVTGEGDDEAELCDLHFIANCQSCTSWDKAGNEDETDEGWMSHSLSFAADKLGKDLSYRKKAEEELVVIDPREKARTLKEERDQKRGKSGRQWDDQARNAKLARASALAGRGAR

SEQ ID NO: 12698 - DNA, 2193 bp, Muscodor strobelii
  misc_feature: SGI cDNA ID NO. 564136
  misc_feature: Encodes the peptide sequence at SEQ ID NO 12699
atgccaataccgcagcaccagcagcaacagatcccccagacctacaacaacacgccagaacaaatgctgaggtggaacggaaacaacactggcagcttcaccgacaacgccgccaactctgtcaatccgtatgccatgatggctcctacacagggcaacttcagcccggccgctcccaccccgtcgaatgcgctggccaggcgaggactgaacaatgccctggtacccgcaaaccaccccttttcaccacaatctagcgacccgtggccgacatattccgacgataacatgctggctgctcaaaacaacggatcgttagacgagcacgataatgtagaactactggaagagaaagcgcaacgagcgaagcgggatgctcagaccaagagaaagcagatacctccgtttgtccagaaacttaatagctttctggagacttcgaagaatacagacttgatcagatggtcggataagggtgattcattcatcgtgctggacgaggacgaatttgccaaaactctcatacctgaactcttcaaacataacaactacgcctcttttgtcaggcagctcaatatgtatggctttcacaagaaagtaggcctttcggataattcgatgaaggccagcgagcgcaagaacaagagccccagtgaatactacaacccttacttcagaagggggcaccctaacctgctctggttgattaacaaacctaagagcggtaatactaaaaaaggtggcaagaagcggcccgatgatggcgagggcgatagtgacgacgacgccatacccatagaagataccatcaaccaaccattcaatccacaaaatgttgcgagccgagccttgccagctccggagtctggcccactccagaaaaaggagctggctgttgtgagggatcagatggcagccttacaacagcgccaaaaacagatcagtgatgccattactcgtttgcggcaagaacacaaccagctgttccaacaggcgctgatgtttcaaaacatgcacgatcgtcatgagaactcaatcaatgcgatcttgaattttcttgcaaacgtgtttaggaaatcgttggaagaacagggaggggcacagaacgtcaatgatctgctggccagcatcatccctaatgtgcagatgcaggcgcaaggccagggctccgtcgttgacctcggcgactggatacaacagcagccctcgaacggtgcaaagatcggaactcccaagagaccacaacgacttttgccccccattcccaacaacgatcccactccgaactcgactcctactcagtctgctgcatactcgggcttttccggacagcaaccacaaacgggccaagtgactgagctatatgacactccagtagaatcttcgagtacgccaagttatctcaagcaggagcttgaatctaatccccaggagggcatgctcagacttatccaagacacaaacacaaatgctggaaagaccggcaacgtacccatagacttgtcagacatggccgcgaatacgcaagcaaatatgacgaatgatcagcgcaatcgaatgctctctatcatgtctgggacacctgcgagcacttctccaactccaacaccaggcccgtctgtgtcatcaccgtctgctgccactcccaaggcatcagccgcggcaaatgttgagcttccaacgaccagccgtgaaaccaatgccaactcaacatcattgtcacccgtcatgtcatcagcaataccagcatctatccaacgtatgtctcaaacgcaggatgagctggaacaggtgcagcgcctacaggatgaacaaaatcatgccatggaaagtctcaattcgctcctcggtcctctgagcccttcgggacgcattcctggcctagaggaccagaacaattatttcggagacgatctagacattagccaatacctcgattcgaacgcatacgcggccgatggcggtgggaatgattttaacttcgatacgactgcgttcaatgatagtgggaatttagactggaactcggagatgccggactttggtaatagcggacttggtaacctagagcctggccgggttgtagaaacgaacacgccgagccatggcacgcatagtcccaccggcacggaagagatacggggagaagaagttgaagatagcccgcccattaagaggcaacggatgacatga

SEQ ID NO: 12699 - protein, 730 aa, Muscodor strobelii
  misc_feature: SGI Peptide ID NO. 564136
  misc_feature (134)..(344): Pfam Id: PF00447 Pfam Desc: HSF-type DNA-binding
  misc_feature (134)..(236): Pfam Id: PF00447 Pfam Desc: HSF-type DNA-binding
  misc_feature (1)..(719): NCBI GI: 85109945 Blast Desc: NCU08512 [Neurospora crassa OR74A] gi|28924827|gb|EAA33926.1| conserved [Neurospora crassa OR74A] gi|38524218|emb|CAE75685.1| related to heat shock transcription
  misc_feature (18)..(729): NCBI GI: 261356838 Blast Desc: heat shock factor protein [Verticillium albo-atrum VaMs.102]
  misc_feature (1)..(728): NCBI GI: 171689240 Blast Desc: protein product [Podospora anserina] gi|170944582|emb|CAP70693.1| protein product [Podospora anserina]
  misc_feature (20)..(729): NCBI GI: 256734674 Blast Desc: NECHADRAFT_90281 [Nectria haematococca mpVI 77-13-4]
  misc_feature (7)..(729): NCBI GI: 145608270 Blast Desc: MGG_03242 [Magnaporthe grisea 70-15] gi|145015762|gb|EDK00252.1| MGG_03242 [Magnaporthe grisea 70-15]
  misc_feature (1)..(729): NCBI GI: 46108128 Blast Desc: FG00946.1 [Gibberella zeae PH-1]
  misc_feature (10)..(546): NCBI GI: 116204575 Blast Desc: CHGG_10171 [Chaetomium globosum CBS 148.51] gi|88176299|gb|EAQ83767.1| CHGG_10171 [Chaetomium globosum CBS 148.51]
  misc_feature (7)..(662): NCBI GI: 156063874 Blast Desc: SS1G_02055 [Sclerotinia sclerotiorum 1980] gi|154697389|gb|EDN97127.1| SS1G_02055 [Sclerotinia sclerotiorum 1980]
  misc_feature (10)..(422): NCBI GI: 154318860 Blast Desc: BC1G_02819 [Botryotinia fuckeliana B05.10] gi|150857949|gb|EDN33141.1| BC1G_02819 [Botryotinia fuckeliana B05.10]
  misc_feature (20)..(713): NCBI GI: 115443252 Blast Desc: ATEG_09811 [Aspergillus terreus NIH2624] gi|114188302|gb|EAU30002.1| ATEG_09811 [Aspergillus terreus NIH2624]
MPIPQHQQQQIPQTYNNTPEQMLRWNGNNTGSFTDNAANSVNPYAMMAPTQGNFSPAAPTPSNALARRGLNNALVPANHPFSPQSSDPWPTYSDDNMLAAQNNGSLDEHDNVELLEEKAQRAKRDAQTKRKQIPPFVQKLNSFLETSKNTDLIRWSDKGDSFIVLDEDEFAKTLIPELFKHNNYASFVRQLNMYGFHKKVGLSDNSMKASERKNKSPSEYYNPYFRRGHPNLLWLINKPKSGNTKKGGKKRPDDGEGDSDDDAIPIEDTINQPFNPQNVASRALPAPESGPLQKKELAVVRDQMAALQQRQKQISDAITRLRQEHNQLFQQALMFQNMHDRHENSINAILNFLANVFRKSLEEQGGAQNVNDLLASIIPNVQMQAQGQGSVVDLGDWIQQQPSNGAKIGTPKRPQRLLPPIPNNDPTPNSTPTQSAAYSGFSGQQPQTGQVTELYDTPVESSSTPSYLKQELESNPQEGMLRLIQDTNTNAGKTGNVPIDLSDMAANTQANMTNDQRNRMLSIMSGTPASTSPTPTPGPSVSSPSAATPKASAAANVELPTTSRETNANSTSLSPVMSSAIPASIQRMSQTQDELEQVQRLQDEQNHAMESLNSLLGPLSPSGRIPGLEDQNNYFGDDLDISQYLDSNAYAADGGGNDFNFDTTAFNDSGNLDWNSEMPDFGNSGLGNLEPGRVVETNTPSHGTHSPTGTEEIRGEEVEDSPPIKRQRMT

SEQ ID NO: 12700 - DNA, 4004 bp, Muscodor strobelii
  misc_feature: SGI EST ID NO. CUFF.30270.0
  misc_feature: Variant of the nucleotide sequence at SEQ ID NO 12698
cacatatatatataacgacaacccctcgcagtttttaattctttgttctttgataattcttcaattatgcgatttagctgaagtggtgggttgctggcgtgaaatgtgtcgatgaaaagaagtcaccttagtaaggctctcccccatttgggggcaccaataggtagggtagtacctgtggtgatattaatagccttatccgagctctccactgatcgcatgtcaaactccggtgattttgagaatgttttcgtcatttggacgggcacttgggcaagcacataactagcatacccagcgttcccctgctccacttgactcgattgccagtgattagatcatcttacggccacgataccaacttgaatcttgcgtgcttgactgtgacccgtagacgaggtttcctggctacatgccttagcacatgcagcagtgtgtgcgccgaatgatcggtgaatggctagagaggcttgctgacctatcggcgtctgcgtcttaatctggaagaaaaaagccttcattcttgcagttcccacgagacagcctccagactggaaccaccacgctggctaccttgaacccgcctgctgctcctgcggacggaccatccatgtgcctgctgctgccggtcctgcgcgcccagttcagccgtccacacctaagctcattgatatatgagcgcgcgacatcgcatttgtcgcaacttcgagaataaggagctgctttcttccccggctgcgccgtctcagacgcgcgcctttgaccacgcccgtcgtgtcgccaaagacgatccggtcttgagaccgtcttggaagcttctttccgccttccaacaagctgattcactcgggcctcgttcttgtgttcttctgttctgcggccttgatcctttcaggcgctgttgtccgccaaggtatatagcttgaaggctgcgaaccctgagatcctggaatgcactaccgcactctaccgaattgcgcccgaaacgaagccgacattttgcagcctgcttcgagattttgaccacctcgccaatcgagtgaatcgcattgcacacatacacacgggcacgcgcgtagcgttgtactggtgtggtcagctgccgagtcgataattgcagtttgctctggcagcctagctgcgcgataggtagcctcggtggaaatccgcccacgcctcgccaatcttccgcgaccgattattatcatcaacccgatagctacctacatttctggccattgtagtcgcgacctgcactgcgctctcttcctctgtagctcatagtatatgctcactagacggcattctacatccctgtcactgtcgatccagccctggaccacgaagcaatccccaaaaatactacgcccgtaaacgcccatctcgatcgatgtacaccttctaccgtccgatgccagcctcaaacccccgaaagcgaccagctcctggcagcatgccaataccgcagcaccagcagcaacagatcccccagacctacaacaacacgccagaacaaatgctgaggtggaacggaaacaacactggcagcttcaccgacaacgccgccaactctgtcaatccgtatgccatgatggctcctacacagggcaacttcagcccggccgctcccaccccgtcgaatgcgctggccaggcgaggactgaacaatgccctggtacccgcaaaccaccccttttcaccacaatctagcgacccgtggccgacatattccgacgataacatgctggctgctcaaaacaacggatcgttagacgagcacgataatgtagaactactggaagagaaagcgcaacgagcgaagcgggatgctcagaccaagagaaagcagatacctccgtttgtccagaaacttaatagctttctggagacttcgaagaatacagacttgatcagatggtcggataagggtgattcattcatcgtgctggacgaggacgaatttgccaaaactctcatacctgaactcttcaaacataacaactacgcctcttttgtcaggcagctcaatatgtatggctttcacaagaaagtaggcctttcggataattcgatgaaggccagcgagcgcaagaacaagagccccagtgaatactacaacccttacttcagaagggggcaccctaacctgctctggttgattaacaaacctaagagcggtaatactaaaaaaggtggcaagaagcggcccgatgatggcgagggcgatagtgacgacgacgccatacccatagaagataccatcaaccaaccattcaatccacaaaatgttgcgagccgagccttgccagctccggagtctggcccactccagaaaaaggagctggctgttgtgagggatcagatggcagccttacaacagcgccaaaaacagatcagtgatgccattactcgtttgcggcaagaacacaaccagctgttccaacaggcgctgatgtttcaaaacatgcacgatcgtcatgagaactcaatcaatgcgatcttgaattttcttgcaaacgtgtttaggaaatcgttggaagaacagggaggggcacagaacgtcaatgatctgctggccagcatcatccctaatgtgcagatgcaggcgcaaggccagggctccgtcgttgacctcggcgactggatacaacagcagccctcgaacggtgcaaagatcggaactcccaagagaccacaacgacttttgccccccattcccaacaacgatcccactccgaactcgactcctactcagtctgctgcatactcgggcttttccggacagcaaccacaaacgggccaagtgactgagctatatgacactccagtagaatcttcgagtacgccaagttatctcaagcaggagcttgaatctaatccccaggagggcatgctcagacttatccaagacacaaacacaaatgctggaaagaccggcaacgtacccatagacttgtcagacatggccgcgaatacgcaagcaaatatgacgaatgatcagcgcaatcgaatgctctctatcatgtctgggacacctgcgagcacttctccaactccaacaccaggcccgtctgtgtcatcaccgtctgctgccactcccaaggcatcagccgcggcaaatgttgagcttccaacgaccagccgtgaaaccaatgccaactcaacatcattgtcacccgtcatgtcatcagcaataccagcatctatccaacgtatgtctcaaacgcaggatgagctggaacaggtgcagcgcctacaggatgaacaaaatcatgccatggaaagtctcaattcgctcctcggtcctctgagcccttcgggacgcattcctggcctagaggaccagaacaattatttcggagacgatctagacattagccaatacctcgattcgaacgcatacgcggccgatggcggtgggaatgattttaacttcgatacgactgcgttcaatgatagtgggaatttagactggaactcggagatgccggactttggtaatagcggacttggtaacctagagcctggccgggttgtagaaacgaacacgccgagccatggcacgcatagtcccaccggcacggaagagatacggggagaagaagttgaagatagcccgcccattaagaggcaacggatgacatgatatgcagacgatgatggaacaaaaattactggcgtttgagggagcgtttgagagaactatgaacggagaactgggtttactagatatgtcggtttgggctcaacataccaagcgattgacgatggacagctagcagatgctgaaatgatacgccatgaatatgaataagatgcagctatggtgatatactctctcactccccagtgtggtttcttcttgttgatctttagtgctcttttattcgtgatgtctctacctcaattccctgcagatagtttgtaacacattgcatgccagtaaatctccctagttgagagtggtggagtgaaccgtgctaacgtgtaaaacttatcctacg

SEQ ID NO: 12701 - DNA, 984 bp, Muscodor strobelii
  misc_feature: SGI cDNA ID NO. 564137
  misc_feature: Reduced expression when VOC is produced
  misc_feature: Encodes the peptide sequence at SEQ ID NO 12702
atggccaaatgtacggatgcaccagatgcgatccccagcgatgctggagtcgctggaatcggggtcttgctttcattcatcgcaacggctgccatagcgctcgtcattagtgtgtcgctcattttccaagagactcgtggtcgtgccgcgcataaaccatcggtgttacgacgcaagctactaaatgcatactccgaccagcagatcctgacaggtatcgggatccagtccgttggactagccaaactggatacgatggcaccataccacttttttataatttggatgttgtcgctactctccatggctgtgcacaatgcctcgttgctcgcacttgtacatgactttcgacgagattgggtcctccgatggctacgacagattttgatattcgtcaatctcattctaagtgccacctacggtatcttgattctacgagcagtgcaggaagggatcaacaactccacgctgccaatagcctgtgttctgcagccccatgaacaaatctccaagggctcctcgagtgaatacgcgatttcaattataggtacgatcgcggtcatcgccggcaacgtcattgtattcgcgcttgcgacgtggtatctgcactctcgtactcaacgtttctacaagccgatacagattgtcggcctagttctcatgaccgcgataggtgtcggtgcgatcgtgcgtgtatccctactcgcgggcgcattcggaaacgcaccgatccacctcagtgaccacggcgaatcgcagtggagtttcggtcagctgctgtccgttggcatgctggttttgcctgtcgtctcgatcattgagattctacgtggcgaaatcaaattggcgccgcctgttgcggacgctggggatgacaaggcggggttattgggtgataacgagttacagtcgaatcctggagatcgatacacgttccagccaaatcctttctttggctcacagacgaacttgttcaagaaatga

SEQ ID NO: 12702 - protein, 327 aa, Muscodor strobelii
  misc_feature: SGI Peptide ID NO. 564137
  misc_feature (2)..(327): NCBI GI: 46109040 Blast Desc: FG01402.1 [Gibberella zeae PH-1]
  misc_feature (2)..(305): NCBI GI: 39969639 Blast Desc: MGG_10429 [Magnaporthe grisea 70-15] gi|145015099|gb|EDJ99667.1| MGG_10429 [Magnaporthe grisea 70-15]
  misc_feature (11)..(327): NCBI GI: 261355360 Blast Desc: conserved [Verticillium albo-atrum VaMs.102]
  misc_feature (3)..(297): NCBI GI: 85110323 Blast Desc: NCU08433 [Neurospora crassa OR74A] gi|28881258|emb|CAD70517.1| [Neurospora crassa] gi|28925082|gb|EAA34167.1| conserved [Neurospora crassa OR74A]
  misc_feature (3)..(327): NCBI GI: 169607365 Blast Desc: SNOG_06739 [Phaeosphaeria nodorum SN15] gi|111064270|gb|EAT85390.1| SNOG_06739 [Phaeosphaeria nodorum SN15]
  misc_feature (4)..(302): NCBI GI: 171683798 Blast Desc: protein product [Podospora anserina] gi|170941859|emb|CAP67512.1| protein product [Podospora anserina]
  misc_feature (13)..(271): NCBI GI: 169621484 Blast Desc: SNOG_13953 [Phaeosphaeria nodorum SN15] gi|160704266|gb|EAT78578.2| SNOG_13953 [Phaeosphaeria nodorum SN15]
  misc_feature (46)..(279): NCBI GI: 171692615 Blast Desc: protein product [Podospora anserina] gi|170946256|emb|CAP73057.1| protein product [Podospora anserina]
  misc_feature (2)..(277): NCBI GI: 149211133 Blast Desc: MGCH7_ch7g1029 [Magnaporthe grisea 70-15] gi|86196984|gb|EAQ71622.1| MGCH7_ch7g1029 [Magnaporthe grisea 70-15]
  misc_feature (49)..(258): NCBI GI: 169603365 Blast Desc: SNOG_04692 [Phaeosphaeria nodorum SN15] gi|160706378|gb|EAT88452.2| SNOG_04692 [Phaeosphaeria nodorum SN15]
  misc_feature: Useful for introducing or modulating the production of volatile compounds
MAKCTDAPDAIPSDAGVAGIGVLLSFIATAAIALVISVSLIFQETRGRAAHKPSVLRRKLLNAYSDQQILTGIGIQSVGLAKLDTMAPYHFFIIWMLSLLSMAVHNASLLALVHDFRRDWVLRWLRQILIFVNLILSATYGILILRAVQEGINNSTLPIACVLQPHEQISKGSSSEYAISIIGTIAVIAGNVIVFALATWYLHSRTQRFYKPIQIVGLVLMTAIGVGAIVRVSLLAGAFGNAPIHLSDHGESQWSFGQLLSVGMLVLPVVSIIEILRGEIKLAPPVADAGDDKAGLLGDNELQSNPGDRYTFQPNPFFGSQTNLFKK

SEQ ID NO: 12703 - DNA, 1681 bp, Muscodor strobelii
  misc_feature: SGI EST ID NO. CUFF.30207.1
  misc_feature: Variant of the nucleotide sequence at SEQ ID NO 12701
ctttttcctagcgtgttttgatgtctttgtttctctttctgatttagcctttgatttggaattgctaaagactcttggtcctacgctcgcgatcattgttttggcagataagaaacagaaaacgtcggcggccaaaacatccaaacatggccaaatgtacggatgcaccagatgcgatccccagcgatgctggagtcgctggaatcggggtcttgctttcattcatcgcaacggctgccatagcgctcgtcattagtgtgtcgctcattttccaagagactcgtggtcgtgccgcgcataaaccatcggtgttacgacgcaagctactaaatgcatactccgaccagcagatcctgacaggtatcgggatccagtccgttggactagccaaactggatacgatggcaccataccacttttttataatttggatgttgtcgctactctccatggctgtgcacaatgcctcgttgctcgcacttgtacatgactttcgacgagattgggtcctccgatggctacgacagattttgatattcgtcaatctcattctaagtgccacctacggtatcttgattctacgagcagtgcaggaagggatcaacaactccacgctgccaatagcctgtgttctgcagccccatgaacaaatctccaagggctcctcgagtgaatacgcgatttcaattataggtacgatcgcggtcatcgccggcaacgtcattgtattcgcgcttgcgacgtggtatctgcactctcgtactcaacgtttctacaagccgatacagattgtcggcctagttctcatgaccgcgataggtgtcggtgcgatcgtgcgtgtatccctactcgcgggcgcattcggaaacgcaccgatccacctcagtgaccacggcgaatcgcagtggagtttcggtcagctgctgtccgttggcatgctggttttgcctgtcgtctcgatcattgagattctacgtggcgaaatcaaattggcgccgcctgttgcggacgctggggatgacaaggcggggttattgggtgataacgagttacagtcgaatcctggagatcgatacacgttccagccaaatcctttctttggctcacagacgaacttgttcaagaaatgattacgcgatgaagtggctggattgccgcttttgactcaatatcaatattaatgccgggctgaggacaaaatcgatgtactatgttacattaaacctagagtcagtgtcgatggtccggtccgacgagcagtagcatcggtatgaagtcattgagtcatatcgaaaaactagacgcctcgtctgggcgactttgaggaacctgatggacaggttatctcgcgactgatcatatgtcacattatggggctgtttccactcttactatcatttccagatctagtatgagataagggtccaagacggaatgatgtgggcaaggatgacaatatgcaaagcttcgagaaataagggaagatatctctaacagcacaatccaactaggagatatgtctggactaagtcggttgactgaggggcagattcacgatactcaacgaagatggggactatgacggagttttggacttatttaatgctttgataagataccccttgattaataacctatgagtttgttggttccaatgtgtctgttttgacattgggttaca

SEQ ID NO: 12704 - DNA, 1233 bp, Muscodor strobelii
  misc_feature: SGI cDNA ID NO. 564138
  misc_feature: Encodes the peptide sequence at SEQ ID NO 12705
atggctcctgctctcggtgtcgatgctccagtagacatactacagagtgtcaaagcacgggtgaagacagtgaacaaggcgatcttccccgatggcttgaagacctcaggtcaacatccaccactatacgatcagatattcccctatagtgcgttccccaagcatatcgaaggaccaacagtatggagaccagaagactacgccaacaacccagaacgatgggttcatcaattctcagctactgaagtagctgagatatcccaggctgccgataacttcataaattctggtcttccaattactggtatcacgaaacagaacttcccgttgccaacttcggagacgaacttggccgctatgcgccgcgagctcatcaatgggaagggattcatgcttttcaagaatggccttcctattcaagaatggggaaacttcaagtctgctgtagcgtacttcggcttaggaattcatatcggatatcccatatcccaaaaccggaacggccatattctgggacacgttcaagatctctatgccgatagtacacaggtggacaaagttcgcatttacaaaacaacggcaagacaagcataccacgccgatgaatgcgacatcgtcggtcttctctgtctcgcacaggccgaattcggcggagaatcagacgtagcatccatccatcacgtatggaacatcttacaagcagagcgaccagatatcgccgagctcctaacccagccaatctggtatttcgaccgcaaaggcgagatctcagtcggcgaagagccatacatccggagcgcagtattctacctcgaaaccccagataccgcaaacccagaccgagagcaacgcgtctactgcaaatgggacccgtactacatccgcagtctccagcgcttctcggacgcaggaatcatccctcctctctccgccgcgcaggaagaagcagcgaatatcctcgaggcgacatgcgagcgcgtgaaattacacatggtgctgcagcccggcgacatccagttcgtggccaattcgcatacgctccatgcgcgcacggcttatcgggactacgcgcccgacagcgggaagccaagacgccatttgatgcgcttgtggctctcggtaccacagagtgaagggggttggagattacccttttgggattcggatgagaagaagcgtggtgggatccaggttgatgatacggcccctgttgcaaggcttgagggcgattag

SEQ ID NO: 12705 - protein, 410 aa, Muscodor strobelii
  misc_feature: SGI Peptide ID NO. 564138
  misc_feature (96)..(377): Pfam Id: PF02668 Pfam Desc: Taurine catabolism dioxygenase TauD, TfdA family
  misc_feature (1)..(410): NCBI GI: 154297626 Blast Desc: BC1G_12658 [Botryotinia fuckeliana B05.10] gi|150858481|gb|EDN33673.1| BC1G_12658 [Botryotinia fuckeliana B05.10]
  misc_feature (1)..(410): NCBI GI: 156030957 Blast Desc: SS1G_14259 [Sclerotinia sclerotiorum 1980] gi|154700650|gb|EDO00389.1| SS1G_14259 [Sclerotinia sclerotiorum 1980]
  misc_feature (28)..(410): NCBI GI: 115399118 Blast Desc: conserved [Aspergillus terreus NIH2624] gi|114192031|gb|EAU33731.1| conserved [Aspergillus terreus NIH2624]
  misc_feature (28)..(410): NCBI GI: 145244006 Blast Desc: An11g05230 [Aspergillus niger] gi|134079200|emb|CAL00374.1| protein product [Aspergillus niger]
  misc_feature (9)..(410): NCBI GI: 67523307 Blast Desc: AN2110.2 [Aspergillus nidulans FGSC A4] gi|40745786|gb|EAA64942.1| AN2110.2 [Aspergillus nidulans FGSC A4] gi|259487484|tpe|CBF86200.1| TPA: conserved [Aspergillus FGSC
  misc_feature (28)..(410): NCBI GI: 238487518 Blast Desc: conserved [Aspergillus flavus NRRL3357] gi|220699876|gb|EED56215.1| conserved [Aspergillus flavus NRRL3357]
  misc_feature (26)..(405): NCBI GI: 189200735 Blast Desc: taurine catabolism dioxygenase TauD [Pyrenophora tritici-repentis Pt-1C-BFP] gi|187983803|gb|EDU49291.1| taurine catabolism dioxygenase TauD [Pyrenophora tritici-repentis
  misc_feature (1)..(405): NCBI GI: 169617540 Blast Desc: SNOG_11952 [Phaeosphaeria nodorum SN15] gi|111059244|gb|EAT80364.1| SNOG_11952 [Phaeosphaeria nodorum SN15]
  misc_feature (28)..(410): NCBI GI: 169770109 Blast Desc: [Aspergillus oryzae RIB40] gi|83767383|dbj|BAE57522.1| protein product [Aspergillus oryzae]
  misc_feature (27)..(410): NCBI GI: 119480235 Blast Desc: taurine catabolism dioxygenase TauD, TfdA family protein [Neosartorya fischeri NRRL 181] gi|119408300|gb|EAW18249.1| taurine catabolism dioxygenase TauD,
MAPALGVDAPVDILQSVKARVKTVNKAIFPDGLKTSGQHPPLYDQIFPYSAFPKHIEGPTVWRPEDYANNPERWVHQFSATEVAEISQAADNFINSGLPITGITKQNFPLPTSETNLAAMRRELINGKGFMLFKNGLPIQEWGNFKSAVAYFGLGIHIGYPISQNRNGHILGHVQDLYADSTQVDKVRIYKTTARQAYHADECDIVGLLCLAQAEFGGESDVASIHHVWNILQAERPDIAELLTQPIWYFDRKGEISVGEEPYIRSAVFYLETPDTANPDREQRVYCKWDPYYIRSLQRFSDAGIIPPLSAAQEEAANILEATCERVKLHMVLQPGDIQFVANSHTLHARTAYRDYAPDSGKPRRHLMRLWLSVPQSEGGWRLPFWDSDEKKRGGIQVDDTAPVARLEGD

SEQ ID NO: 12706 - DNA, 2660 bp, Muscodor strobelii
  misc_feature: SGI EST ID NO. CUFF.30281.0
  misc_feature: Variant of the nucleotide sequence at SEQ ID NO 12704
atctgatcctccgtctcaccccgatgtacctacatataacacaggcagctatgagatacaaggctgatgaggtgagatatacaatgggatttgtaaatgccgtaggtctatgtaaggggagcttgatcgacaatgatcccctggtatttatagataacgtcacttatacaagtatgagggactgcgctctactcatgagctttgcaaacctttactatcaacactactctacctcattttgttagtgtaagcggtgaattgcactaagatattctacaatggctcctgctctcggtgtcgatgctccagtagacatactacagagtgtcaaagcacgggtgaagacagtgaacaaggcgatcttccccgatggcttgaagacctcaggtcaacatccaccactatacgatcagatattcccctatagtgcgttccccaagcatatcgaaggaccaacagtatggagaccagaagactacgccaacaacccagaacgatgggttcatcaattctcagctactgaagtagctgagatatcccaggctgccgataacttcataaattctggtcttccaattactggtatcacgaaacagaacttcccgttgccaacttcggagacgaacttggccgctatgcgccgcgagctcatcaatgggaagggattcatgcttttcaagaatggccttcctattcaagaatggggaaacttcaagtctgctgtagcgtacttcggcttaggaattcatatcggatatcccatatcccaaaaccggaacggccatattctgggacacgttcaagatctctatgccgatagtacacaggtggacaaagttcgcatttacaaaacaacggcaagacaagcataccacgccgatgaatgcgacatcgtcggtcttctctgtctcgcacaggccgaattcggcggagaatcagacgtagcatccatccatcacgtatggaacatcttacaagcagagcgaccagatatcgccgagctcctaacccagccaatctggtatttcgaccgcaaaggcgagatctcagtcggcgaagagccatacatccggagcgcagtattctacctcgaaaccccagataccgcaaacccagaccgagagcaacgcgtctactgcaaatgggacccgtactacatccgcagtctccagcgcttctcggacgcaggaatcatccctcctctctccgccgcgcaggaagaagcagcgaatatcctcgaggcgacatgcgagcgcgtgaaattacacatggtgctgcagcccggcgacatccagttcgtggccaattcgcatacgctccatgcgcgcacggcttatcgggactacgcgcccgacagcgggaagccaagacgccatttgatgcgcttgtggctctcggtaccacagagtgaagggggttggagattacccttttgggattcggatgagaagaagcgtggtgggatccaggttgatgatacggcccctgttgcaaggcttgagggcgattagataatattttttttcggatatcgcgtctattcaaatattgggataagtcgttgatgggttgatgagttatgttagaggttgggtataggatttagcaaggggagtttggagtataatatttatgttctaaaaaataaatctcaagttcagactttgagctcgacatgcattacattcaagagaaataaggccaatgccagagttatcaccgcatacgcgttgcttttttcttttcttgaagattccgaaatcggttttatttgaagaaacaaatagtattacatgtcaacatctatggaatcaacagtctcgtggttgaccccgacaacctgatctcctccggtgacaaagaagcaaattccgggcaggcacagatatttagtaactggtctttcccaagaccagggtccatcataaaggtaggttgcgtcacagcagcaactgtgctaaatgttgcacattattagcaagtagatttagatcggcaatggagcgccaatacgaagccgaaaccaatgacatatattttcaaggagacctataacaacatgtccaccacaatgaacataatgtctcgagacagaatgacgcaacttacgaagttgcaggtttccagcctccaaaggcagaggcactcctggcgacatgatcactgaagagattaccagcgctagtcgtggacggactagtgccgaacggggtggatttgggagtactggtattacttgacggagcaccgaatagaccacccggagcaggagcaggagtactgttattacttcgtggaggaccaaatagactgcctgaagcaggagttggcggattggcaaacagacctcccccggatgcctttggtggggtaccgagattcgagaagagaccgggtttgggagtttgaccatcagggcctggtgagacgccattcttagtatcggaagtcccttgtctagggaaaaagatacttggcgatgaggcgaaattttgttgtaaaacactcttaggttgattggcgggggataagcggccttctcctgtcgatgtgctaggcgtaccgatgttcgaggatgtccctggagtggtgacagctgggcttttatccttggaatcgtggccaagagttttcgatggaccttcaagtattggtaaagc

SEQ ID NO: 12707 - DNA, 2256 bp, Muscodor strobelii
  misc_feature: SGI cDNA ID NO. 564140
  misc_feature: Encodes the peptide sequence at SEQ ID NO 12708
atggacgctcctcccgtcaagctcgccgagctcctccggcatcccgacgacctcgacaagatcgccgcattgaagcttgaatttacccgcaagaagaatgccgtcgactcacagcttcgcgggggcctacgcgaccagctggagacgacacagtcgggcatgaacggcctgaccgacggccagaagaccgtccaagccatccgcgacgagatgatgaagatcgataccctatgctccgagtcccagaacatgatcaaagatttcaccagcatcaatctggtgtcccaggcgcaccgcaacttcggcgccgtcgagaccatggtcgccaacctgcagtccttcaacgaccgcctgaaccgagtcgaagacatgctgcgcgaggacgaggcagacaaggagaagatgccgaatctcctgagggtccactacgagctgacccagctgcgaaacattcgggatgatgcaatggagcagatacaacgcgcagaggataccagtctgcagtccaccctcgaggattacttttcaagactcgacgaagctatcgactggttcgatgagcatattggcctcatagcattaaacatgatcaacctgctggtcgcgggaaacgatgggcttgttgtacgtctcgcagtcatcgtcgaggccgaagagaagagcgatcagagggtcgaggcattacaggaagctctgaaggaccacaaggagatggccacccggttccagagcataacggatggtgcgaagaaggttagaggctacaaggagaagtttcttaaagctatcacggtgaattgtgagggtcagctggccgaggttcgagaagagttccttcaagaccccagcaaactcgacaaaatgatgaaatggtatttcaacgacctgaatgccgtcaagcagggaatggtgaacttaatgcccaagaaatggaaaattctgaaaacatatggcgagatctaccaccagctcatgcatgactttctagtcggcatggtggatgatcccgagtctagctcagccaatacgctggagattatcaattggcccgagagatactacaagaagatgaggaaactcggctttctggagagcgacctgaaacctcacgtactggataatagagaacaagagctcgtcaaagacttccgccagctcatcatcaagtttctcgacgaatggattgagcggatatttgctcaagagaggcgtgattttgccgacagaaatgtcgaaggctccaatctggacacagatgaatatggctacttccgaactaagaatctagttgacatgtggcgtatgctgcgagagcaggtcgatgtcgcggggaattctcagagaacagacgtcgccgaaggagtcatcgacgccatgtttcttcgactacgggcccgccagcagaacttccagaagatgcttgaagacgaagctgctaggtttgaaggtgataaggaacccgaattggaagggtttcaagctttgcaagattggctcgttgctactgccaacgaccagatggcctgcattgacgacaacgaggaagagcaaagactggcatacctgtcgagcttcaaacaaaaatttgaaccgtttgtcacaccacaatacatggagcacgcagagtccgaagtgaatatgcttcgcgatggctatgtcgacttcagtacttggtgtatcaacaaattcgccaaattagtcatttctgtggattttaaaacagtcatcacaacattctttacgccacgatggtatgaaaccaccgccatgaagcagatgattgtcacattcgaggaatatgtcagtgactaccaacaagtactccatcactccctcgtcgacatctttgtcgaaatttttgcagacgagctgctggttcgatatctcatgtgtgtgcgcaataagggtgccaagttcaagcgtgccgacccgttccaggataaaatcttcaacgatatttcgaccgcatttgaattcttccgcgccctgcccaatccagatgccagtaataccatcacacaaacctggcgcgtgactgaatacttcttacaattgcttactgcggaaaaggatgcgctgcccaatgtctttcaggacttcaagtcccgttattgggacctacagatcacgtgggtggaggctgtgcttagatcgcgggacgactttgagaggagcacgttaaatgctgtcaaagcaagggccgcgcagatggacgtcgtacgaggcccggagacaattatgggaaaggtcaaataa

SEQ ID NO: 12708 - protein, 751 aa, Muscodor strobelii
  misc_feature: SGI Peptide ID NO. 564140
  misc_feature (7)..(742): Pfam Id: PF06046 Pfam Desc: Exocyst complex component Sec6
  misc_feature (7)..(725): Pfam Id: PF06046 Pfam Desc: Exocyst complex component Sec6
  misc_feature (1)..(751): NCBI GI: 85079944 Blast Desc: NCU03341 [Neurospora crassa OR74A] gi|28881180|emb|CAD70362.1| related to protein transport protein SEC6 [Neurospora crassa] gi|28917515|gb|EAA27214.1| conserved
  misc_feature (1)..(749): NCBI GI: 25466279 Blast Desc: NCU03341 [Neurospora crassa OR74A] gi|28881180|emb|CAD70362.1| related to protein transport protein SEC6 [Neurospora crassa] gi|28917515|gb|EAA27214.1| conserved
  misc_feature (2)..(750): NCBI GI: 46121605 Blast Desc: FG05181.1 [Gibberella zeae PH-1]
  misc_feature (1)..(751): NCBI GI: 39942310 Blast Desc: MGG_03235 [Magnaporthe grisea 70-15] gi|145015772|gb|EDK00262.1| MGG_03235 [Magnaporthe grisea 70-15]
  misc_feature (1)..(751): NCBI GI: 116199857 Blast Desc: CHGG_08084 [Chaetomium globosum CBS 148.51] gi|88179363|gb|EAQ86831.1| CHGG_08084 [Chaetomium globosum CBS 148.51]
  misc_feature (1)..(751): NCBI GI: 171688946 Blast Desc: protein product [Podospora anserina] gi|170944435|emb|CAP70546.1| protein product [Podospora anserina]
  misc_feature (1)..(751): NCBI GI: 156030796 Blast Desc: SS1G_14337 [Sclerotinia sclerotiorum 1980] gi|154700728|gb|EDO00467.1| SS1G_14337 [Sclerotinia sclerotiorum 1980]
  misc_feature (1)..(751): NCBI GI: 154299561 Blast Desc: BC1G_10743 [Botryotinia fuckeliana B05.10] gi|150857235|gb|EDN32427.1| BC1G_10743 [Botryotinia fuckeliana B05.10]
  misc_feature (107)..(751): NCBI GI: 261352968 Blast Desc: conserved [Verticillium albo-atrum VaMs.102]
  misc_feature (7)..(751): NCBI GI: 119194161 Blast Desc: CIMG_01455 [Coccidioides immitis RS]
MDAPPVKLAELLRHPDDLDKIAALKLEFTRKKNAVDSQLRGGLRDQLETTQSGMNGLTDGQKTVQAIRDEMMKIDTLCSESQNMIKDFTSINLVSQAHRNFGAVETMVANLQSFNDRLNRVEDMLREDEADKEKMPNLLRVHYELTQLRNIRDDAMEQIQRAEDTSLQSTLEDYFSRLDEAIDWFDEHIGLIALNMINLLVAGNDGLVVRLAVIVEAEEKSDQRVEALQEALKDHKEMATRFQSITDGAKKVRGYKEKFLKAITVNCEGQLAEVREEFLQDPSKLDKMMKWYFNDLNAVKQGMVNLMPKKWKILKTYGEIYHQLMHDFLVGMVDDPESSSANTLEIINWPERYYKKMRKLGFLESDLKPHVLDNREQELVKDFRQLIIKFLDEWIERIFAQERRDFADRNVEGSNLDTDEYGYFRTKNLVDMWRMLREQVDVAGNSQRTDVAEGVIDAMFLRLRARQQNFQKMLEDEAARFEGDKEPELEGFQALQDWLVATANDQMACIDDNEEEQRLAYLSSFKQKFEPFVTPQYMEHAESEVNMLRDGYVDFSTWCINKFAKLVISVDFKTVITTFFTPRWYETTAMKQMIVTFEEYVSDYQQVLHHSLVDIFVEIFADELLVRYLMCVRNKGAKFKRADPFQDKIFNDISTAFEFFRALPNPDASNTITQTWRVTEYFLQLLTAEKDALPNVFQDFKSRYWDLQITWVEAVLRSRDDFERSTLNAVKARAAQMDVVRGPETIMGKVK

SEQ ID NO: 12709 - DNA, 7103 bp, Muscodor strobelii
  misc_feature: SGI EST ID NO. CUFF.30291.3
  misc_feature: Variant of the nucleotide sequence at SEQ ID NO 12707
ttcacatcccatgcaccacgattccacccaaccgttcacaacacacaatcacagcagcttgtgcgctcaacggcccgtacgactccatcgcgtgatggtcggtgatctggtgtccacgacggctgcctgagcgccactcccctcctccgccatggacgctcctcccgtcaagctcgccgagctcctccggcatcccgacgacctcgacaagatcgccgcattgaagcttgaatttacccgcaagaagaatgccgtcgactcacagcttcgcgggggcctacgcgaccagctggagacgacacagtcgggcatgaacggcctgaccgacggccagaagaccgtccaagccatccgcgacgagatgatgaagatcgataccctatgctccgagtcccagaacatgatcaaagatttcaccagcatcaatctggtgtcccaggcgcaccgcaacttcggcgccgtcgagaccatggtcgccaacctgcagtccttcaacgaccgcctgaaccgagtcgaagacatgctgcgcgaggacgaggcagacaaggagaagatgccgaatctcctgagggtccactacgagctgacccagctgcgaaacattcgggatgatgcaatggagcagatacaacgcgcagaggataccagtctgcagtccaccctcgaggattacttttcaagactcgacgaagctatcgactggttcgatgagcatattggcctcatagcattaaacatgatcaacctgctggtcgcgggaaacgatgggcttgttgtacgtctcgcagtcatcgtcgaggccgaagagaagagcgatcagagggtcgaggcattacaggaagctctgaaggaccacaaggagatggccacccggttccagagcataacggatggtgcgaagaaggttagaggctacaaggagaagtttcttaaagctatcacggtgaattgtgagggtcagctggccgaggttcgagaagagttccttcaagaccccagcaaactcgacaaaatgatgaaatggtatttcaacgacctgaatgccgtcaagcagggaatggtgaacttaatgcccaagaaatggaaaattctgaaaacatatggcgagatctaccaccagctcatgcatgactttctagtcggcatggtggatgatcccgagtctagctcagccaatacgctggagattatcaattggcccgagagatactacaagaagatgaggaaactcggctttctggagagcgacctgaaacctcacgtactggataatagagaacaagagctcgtcaaagacttccgccagctcatcatcaagtttctcgacgaatggattgagcggatatttgctcaagagaggcgtgattttgccgacagaaatgtcgaaggctccaatctggacacagatgaatatggctacttccgaactaagaatctagttgacatgtggcgtatgctgcgagagcaggtcgatgtcgcggggaattctcagagaacagacgtcgccgaaggagtcatcgacgccatgtttcttcgactacgggcccgccagcagaacttccagaagatgcttgaagacgaagctgctaggtttgaaggtgataaggaacccgaattggaagggtttcaagctttgcaagattggctcgttgctactgccaacgaccagatggcctgcattgacgacaacgaggaagagcaaagactggcatacctgtcgagcttcaaacaaaaatttgaaccgtttgtcacaccacaatacatggagcacgcagagtccgaagtgaatatgcttcgcgatggctatgtcgacttcagtacttggtgtatcaacaaattcgccaaattagtcatttctgtggattttaaaacagtcatcacaacattctttacgccacgatggtatgaaaccaccgccatgaagcagatgattgtcacattcgaggaatatgtcagtgactaccaacaagtactccatcactccctcgtcgacatctttgtcgaaatttttgcagacgagctgctggttcgatatctcatgtgtgtgcgcaataagggtgccaagttcaagcgtgccgacccgttccaggataaaatcttcaacgatatttcgaccgcatttgaattcttccgcgccctgcccaatccagatgccagtaataccatcacacaaacctggcgcgtgactgaatacttcttacaattgcttactgcggaaaaggatgcgctgcccaatgtctttcaggacttcaagtcccgttattgggacctacagatcacgtgggtggaggctgtgcttagatcgcgggacgactttgagaggagcacgttaaatgctgtcaaagcaagggccgcgcagatggacgtcgtacgaggcccggagacaattatgggaaaggtcaaataaggcgtgctgatgcgtcgactcttcaccgactagctagccatgctttgagcgtaatgatacctctggatatttctacagacccagtctcttcatctagatccttgaaaatttccggagtcctgttctcgcacgatggacctctctcgacgcggactacccttcaccgctataacaagcggatcttatctgatttgatgagagctgcagtacgatatgtgacaagatacacagattgttgctatttcgagtggtcttcttggcagcatcatgcatcgtaatgtttagaagtatccgaaagtgcttcttgatgctaattggggtgcatgtcttcaagttcgaccagcagcaatgactggtagcttagcttgtccgacgcacgggtctcgttcgcaaacgcatgataaccccaaaagatgtcatcgtgagtgtcatgcgacgcgtgttccaactcattgggcaaattgacagctgaagatattatcgggttggcggctggaatacgggcttgcctgcttcttgatagggtgcctggtccaaccatgttttctagaacgaataacggccggggaaagactgccagtggatgtcgtgcatccagcccacctgcagcattgggtatctgacacgagccatccctggccaaacgtacacgacggaaagcctggtaaggcgtcagcttccaccactgaggatgtgtgcccgtatctagatgcggctccccttcaaggcgtctgtagggtcccggactggcttggagacgttggatgcaagtcaccctgcctgatactactatttggcttgagctagcatgtaggttgggcaacatcccgcatcgtgaagtgccgggaagagaatgactcgtatttgggatgcttgcgctgcattagttggttgccaattatgcgtttcaggaagacacctctgcagacaagattcagagggctgcggcttgttgtgacattggtggtgcaacaccatgatgactatgtactaattctctgtagtcatacgacatgtatgaaatgaggttatgcaccttagaatgccttgatcgctaattgaaggggtgaagaatactggaagcaggacaacgacaaagggtcatgcatgttctactcaccttttactagcacctgaacctcgaatgcccagactcgactacaaagctcatgctagagaaccaggccattgcagcacatacagcatgtccacatctatagcactagaaaatttcctcattaatagtgtgttagattccttaaaacaccaggtgttctacaagatacttgtttcccttaccatagagactgtcgagtatggcatagtaaacctgagtaacaagctccacgtcgcccaataactctacaaacagtgcttcttgccgttaaatattgtcccctgaagctatattgaaacggccacaaagaggcaaaatgtttgtccaccctataaaaagatatcttaacattgtgcaactgcctacaagataacggtgaaagctatagctacctcaatgaggaatgtgatccactctgatctgaattacataacctgctgctagcaaccaactttcagtttcgacataaataccatttggaacatactcattacgaaacaaacaaaaacaagctggcgttaaataatcgtcaataatgctggatactagacaactgctccgtccaaattatgctccgggcgagaattgctagtgttggtgataattcgcgcgttggggtattcaactgcttgcgacttcattcactgccgctaagccgaaggatggtcgagggtggaggagaagaatgaccccgccggcataagaaataccccctcggcacagtcccgatggaccggattcccattcagcatcttgtgactgggcacgggcagaaagagaggcttactttctgactcgtcaactgcagcagcgctggcttggccccaaccataacctgctctcgcctgctcctctgaagtgatggtcagctgcaagatcgagcgtcgagcgcagcccctcgtccgctgacactaacacaggcattccccaacgccgacaaatcctcggagcctgtgcgtggacctaggttaggtttccaattgagaacatcgccatccaataccccgaagtgctcctgcagtcagcttttgctcgcgtgcgcatggctgggccactcagctgcatcgtcgacgggcagggtccagcgtagcgtgaaggagtctgtcttcatattgtctctccatctgtttgtctgccgatttgcgagcttgtttagcatctttagcatcttcagcttattgctacgttggctatattattacgtatctaaaagtatctccgtcaatcaattgatccacggctgcctccacgtgcatgtgtgcaattcccgacgctgccaccctcgttgcgccgggagatctcccgtcgatcgcgaacgcaaccgcaactgcacctctgtgaagagccatttcgcgcccctcgagcccgccctctcttttatctgcctcgctggtgctctgtacgctccgaccgggcccggagcaccgttgcccatcagcctcttggcgctgcaccagcccgtccaacaacagttcccacgacgaacgtcctcgaacgccctccagctacacgccctctgcaccacccgacgacccaatgagcgcctcccagccagcgcggtcccgaaacccgattctctagagtcgcacgaccaagacgccgttagtcatggacggcaatggcagccacaccaaggacgagacgtccgccagcgacccaaaggacccaaaggacccaaaagacccctaagtccaccccaaagtccaaggacagcacgcccgctgccacccacacgcccgcggataccaataagagccccaggaagaggcgcaaggtcaatcatggtacgctgctgtgcgattctgcggcttctgccaatgctcccgttcccctgatctcctctgccatgtcttctgccatggcctctgtgcccggccggcgccgggatggttgcactcgctgtgccgttatcactcgtcgtatatacctcccatgctaattttggctgcgcgttcctacagcctgcgtctactgccgtcgatctcatatgacgtgcgatctcgagagaccatgtacgagatgcatcaagcgcaatattggccatctttgccacgatgagcccagggactctgatgcgaagaagccaaagggctctagcaaccatgccgccgcacgtgacgaaccagaacctcagcccgaaccgtcgcggaaatcgttagatcgcggttccaatgcgatggcaccgcccgtcttcgaacccaacggaggttcgcagggggcaaaaccaggtttcgctgctctgggccagcccgaacccatacagcttgtgtcaccaagtcccatctccagtctgcagaccagtacgactggtggcaatatcaaccaatttgctggtttttctgatgcgtggttgactgcgcaaaatcaatttcacgatatgcaccattacaatcctcaatacatgctaccacaagaagtcactcacgagttcaacttactcaatgattttttaaataatagtctactggatgacggggtaaatatggcagacgacccgttactctacagaaataatcagaaccagtcgcagtcgagtcaagcggatgcagctggcttcttgggccccccattacctccgagtgctatagaagcgggatcgatgcctccccccaatgcagaaagaggcatggccattcaaaggcctgcgagcacagcgctgccagataagacgcgggacttctaccttcaagctgcggatccgtcaggtaatgacaccccggaggcccgcatgcaacgagtcatgaaggccaaatttgaggccggcctgcttaagcccttcaactacataaagggatacgctcggctgtccgcttatatggatggacacattgtaccagcctccaaacagaagattctgcggcagttggaccggtttcgacctcgcttccgggaaaaggtccaagggctgagcgacatcgagcttgtgtatgtagaaatgtggtttgagaagacacttatggagtacgaccgtgttttcgcttcgatggctgtaccagcttgctgttggcgtcgaactggagagattttcagaggcaacaaggaaatggcagagctgatccacgtgccagtggaaaggctacgagatggcaagatctcgctccacgagatactcaccgaagagtcgctagtccgatactgggaagaattcggcaccatcgctttcgacacagcacatgacacactactgactgcatgcgctttgaaaaccccagatgatcgttcgaacgatcccattgtgaactgttgcttctcctttatgattcgtagagacgaacacaagatacccagcctcattgtcggcaatttccttccgcatgatccttcgcatatgtgaggctactctacataatcacggcattttagaaaagaagcatgcgattttcatgcgtccataccctaataaccgcaatgtatcgtattgtctaggcttgggctttgcccaacattggatgagtacctataataggtctcagtgggtcttcttgaaaagccgcaggtagcattgcgtttgcatattgtaagaaattgcatatcccgagtttacaactatagattaatagagaacgttttgacatcact

SEQ ID NO: 12710 - DNA, 963 bp, Muscodor strobelii
  misc_feature: SGI cDNA ID NO. 564141
  misc_feature: Encodes the peptide sequence at SEQ ID NO 12711
atgtggcgtatgctgcgagagcaggtcgatgtcgcggggaattctcagagaacagacgtcgccgaaggagtcatcgacgccatgtttcttcgactacgggcccgccagcagaacttccagaagatgcttgaagacgaagctgctaggtttgaaggtgataaggaacccgaattggaagggtttcaagctttgcaagattggctcgttgctactgccaacgaccagatggcctgcattgacgacaacgaggaagagcaaagactggcatacctgtcgagcttcaaacaaaaatttgaaccgtttgtcacaccacaatacatggagcacgcagagtccgaagtgaatatgcttcgcgatggctatgtcgacttcagtacttggtgtatcaacaaattcgccaaattagtcatttctgtggattttaaaacagtcatcacaacattctttacgccacgatggtatgaaaccaccgccatgaagcagatgattgtcacattcgaggaatatgtcagtgactaccaacaagtactccatcactccctcgtcgacatctttgtcgaaatttttgcagacgagctgctggttcgatatctcatgtgtgtgcgcaataagggtgccaagttcaagcgtgccgacccgttccaggataaaatcttcaacgatatttcgaccgcatttgaattcttccgcgccctgcccaatccagatgccagtaataccatcacacaaacctggcgcgtgactgaatacttcttacaattgcttactgcggaaaaggatgcgctgcccaatgtctttcaggacttcaagtcccgttattgggacctacagatcacgtgggtggaggctgtgcttagatcgcgggacgactttgagaggagcacgttaaatgctgtcaaagcaagggccgcgcagatggacgtcgtacgaggcccggagacaattatgggaaaggtcaaataa

SEQ ID NO: 12711 - protein, 320 aa, Muscodor strobelii
  misc_feature: SGI Peptide ID NO. 564141
  misc_feature (3)..(294): Pfam Id: PF06046 Pfam Desc: Exocyst complex component Sec6
  misc_feature (1)..(320): NCBI GI: 171688946 Blast Desc: protein product [Podospora anserina] gi|170944435|emb|CAP70546.1| protein product [Podospora anserina]
  misc_feature (1)..(320): NCBI GI: 85079944 Blast Desc: NCU03341 [Neurospora crassa OR74A] gi|28881180|emb|CAD70362.1| related to protein transport protein SEC6 [Neurospora crassa] gi|28917515|gb|EAA27214.1| conserved
  misc_feature (1)..(318): NCBI GI: 25466279 Blast Desc: NCU03341 [Neurospora crassa OR74A] gi|28881180|emb|CAD70362.1| related to protein transport protein SEC6 [Neurospora crassa] gi|28917515|gb|EAA27214.1| conserved
  misc_feature (1)..(320): NCBI GI: 261352968 Blast Desc: conserved [Verticillium albo-atrum VaMs.102]
  misc_feature (1)..(320): NCBI GI: 39942310 Blast Desc: MGG_03235 [Magnaporthe grisea 70-15] gi|145015772|gb|EDK00262.1| MGG_03235 [Magnaporthe grisea 70-15]
  misc_feature (1)..(320): NCBI GI: 256732537 Blast Desc: [Nectria haematococca mpVI 77-13-4]
  misc_feature (1)..(319): NCBI GI: 46121605 Blast Desc: FG05181.1 [Gibberella zeae PH-1]
  misc_feature (1)..(320): NCBI GI: 116199857 Blast Desc: CHGG_08084 [Chaetomium globosum CBS 148.51] gi|88179363|gb|EAQ86831.1| CHGG_08084 [Chaetomium globosum CBS 148.51]
  misc_feature (1)..(320): NCBI GI: 156030796 Blast Desc: SS1G_14337 [Sclerotinia sclerotiorum 1980] gi|154700728|gb|EDO00467.1| SS1G_14337 [Sclerotinia sclerotiorum 1980]
  misc_feature (1)..(320): NCBI GI: 154299561 Blast Desc: BC1G_10743 [Botryotinia fuckeliana B05.10] gi|150857235|gb|EDN32427.1| BC1G_10743 [Botryotinia fuckeliana B05.10]
MWRMLREQVDVAGNSQRTDVAEGVIDAMFLRLRARQQNFQKMLEDEAARFEGDKEPELEGFQALQDWLVATANDQMACIDDNEEEQRLAYLSSFKQKFEPFVTPQYMEHAESEVNMLRDGYVDFSTWCINKFAKLVISVDFKTVITTFFTPRWYETTAMKQMIVTFEEYVSDYQQVLHHSLVDIFVEIFADELLVRYLMCVRNKGAKFKRADPFQDKIFNDISTAFEFFRALPNPDASNTITQTWRVTEYFLQLLTAEKDALPNVFQDFKSRYWDLQITWVEAVLRSRDDFERSTLNAVKARAAQMDVVRGPETIMGKVK

SEQ ID NO: 12712 - DNA, 7103 bp, Muscodor strobelii; identical to SEQ ID NO: 12709
  misc_feature: SGI EST ID NO. CUFF.30291.3
  misc_feature: Variant of the nucleotide sequence at SEQ ID NO 12710

SEQ ID NO: 12713 - DNA, 1539 bp, Muscodor strobelii
  misc_feature: SGI cDNA ID NO. 564142
  misc_feature: Encodes the peptide sequence at SEQ ID NO 12714
atggcagccacaccaaggacgagacgtccgccagcgacccaaaggacccaaaggacccaaaagacccctaagtccaccccaaagtccaaggacagcacgcccgctgccacccacacgcccgcggataccaataagagccccaggaagaggcgcaaggtcaatcatgcctgcgtctactgccgtcgatctcatatgacgtgcgatctcgagagaccatgtacgagatgcatcaagcgcaatattggccatctttgccacgatgagcccagggactctgatgcgaagaagccaaagggctctagcaaccatgccgccgcacgtgacgaaccagaacctcagcccgaaccgtcgcggaaatcgttagatcgcggttccaatgcgatggcaccgcccgtcttcgaacccaacggaggttcgcagggggcaaaaccaggtttcgctgctctgggccagcccgaacccatacagcttgtgtcaccaagtcccatctccagtctgcagaccagtacgactggtggcaatatcaaccaatttgctggtttttctgatgcgtggttgactgcgcaaaatcaatttcacgatatgcaccattacaatcctcaatacatgctaccacaagaagtcactcacgagttcaacttactcaatgattttttaaataatagtctactggatgacggggtaaatatggcagacgacccgttactctacagaaataatcagaaccagtcgcagtcgagtcaagcggatgcagctggcttcttgggccccccattacctccgagtgctatagaagcgggatcgatgcctccccccaatgcagaaagaggcatggccattcaaaggcctgcgagcacagcgctgccagataagacgcgggacttctaccttcaagctgcggatccgtcaggtaatgacaccccggaggcccgcatgcaacgagtcatgaaggccaaatttgaggccggcctgcttaagcccttcaactacataaagggatacgctcggctgtccgcttatatggatggacacattgtaccagcctccaaacagaagattctgcggcagttggaccggtttcgacctcgcttccgggaaaaggtccaagggctgagcgacatcgagcttgtgtatgtagaaatgtggtttgagaagacacttatggagtacgaccgtgttttcgcttcgatggctgtaccagcttgctgttggcgtcgaactggagagattttcagaggcaacaaggaaatggcagagctgatccacgtgccagtggaaaggctacgagatggcaagatctcgctccacgagatactcaccgaagagtcgctagtccgatactgggaagaattcggcaccatcgctttcgacacagcacatgacacactactgactgcatgcgctttgaaaaccccagatgatcgttcgaacgatcccattgtgaactgttgcttctcctttatgattcgtagagacgaacacaagatacccagcctcattgtcggcaatttccttccgcatgatccttcgcatatgtga

SEQ ID NO: 12714 - protein, 512 aa, Muscodor strobelii
  misc_feature: SGI Peptide ID NO. 564142
  misc_feature (55)..(95): Pfam Id: PF00172 Pfam Desc: Fungal Zn(2)-Cys(6) binuclear cluster domain
  misc_feature (55)..(80): Pfam Id: PF00172 Pfam Desc: Fungal Zn(2)-Cys(6) binuclear cluster domain
  misc_feature (7)..(509): NCBI GI: 46109360 Blast Desc: FG01562.1 [Gibberella zeae PH-1]
  misc_feature (1)..(509): NCBI GI: 164427352 Blast Desc: NCU03352 [Neurospora crassa OR74A] gi|157071707|gb|EAA27225.2| conserved [Neurospora crassa OR74A]
  misc_feature (10)..(496): NCBI GI: 116199839 Blast Desc: CHGG_08075 [Chaetomium globosum CBS 148.51] gi|88179354|gb|EAQ86822.1| CHGG_08075 [Chaetomium globosum CBS 148.51]
  misc_feature (70)..(509): NCBI GI: 25465822 Blast Desc: CHGG_08075 [Chaetomium globosum CBS 148.51] gi|88179354|gb|EAQ86822.1| CHGG_08075 [Chaetomium globosum CBS 148.51]
  misc_feature (65)..(496): NCBI GI: 145608244 Blast Desc: MGG_12739 [Magnaporthe grisea 70-15] gi|145015739|gb|EDK00229.1| MGG_12739 [Magnaporthe grisea 70-15]
  misc_feature (18)..(506): NCBI GI: 119190345 Blast Desc: CIMG_05220 [Coccidioides immitis RS] gi|240107203|gb|EER25388.1| Fungal Zn binuclear cluster domain containing protein [Coccidioides posadasii C735 delta SOWgp]
  misc_feature (17)..(506): NCBI GI: 259479493 Blast Desc: TPA: acuM, Zn(II)2Cys6 transcription factor involved in transcription control of gluconeogenisis (Eurofung) [Aspergillus nidulans FGSC A4]
  misc_feature (19)..(506): NCBI GI: 115383968 Blast Desc: conserved [Aspergillus terreus NIH2624] gi|114196223|gb|EAU37923.1| conserved [Aspergillus terreus NIH2624]
  misc_feature (1)..(500): NCBI GI: 21622378 Blast Desc: conserved [Neurospora crassa]
  misc_feature (11)..(506): NCBI GI: 261195350 Blast Desc: Zn cluster transcription factor Rds2 [Ajellomyces dermatitidis SLH14081] gi|239587951|gb|EEQ70594.1| Zn cluster transcription factor Rds2 [Ajellomyces dermatitidis SLH14081] Zn
MAATPRTRRPPATQRTQRTQKTPKSTPKSKDSTPAATHTPADTNKSPRKRRKVNHACVYCRRSHMTCDLERPCTRCIKRNIGHLCHDEPRDSDAKKPKGSSNHAAARDEPEPQPEPSRKSLDRGSNAMAPPVFEPNGGSQGAKPGFAALGQPEPIQLVSPSPISSLQTSTTGGNINQFAGFSDAWLTAQNQFHDMHHYNPQYMLPQEVTHEFNLLNDFLNNSLLDDGVNMADDPLLYRNNQNQSQSSQADAAGFLGPPLPPSAIEAGSMPPPNAERGMAIQRPASTALPDKTRDFYLQAADPSGNDTPEARMQRVMKAKFEAGLLKPFNYIKGYARLSAYMDGHIVPASKQKILRQLDRFRPRFREKVQGLSDIELVYVEMWFEKTLMEYDRVFASMAVPACCWRRTGEIFRGNKEMAELIHVPVERLRDGKISLHEILTEESLVRYWEEFGTIAFDTAHDTLLTACALKTPDDRSNDPIVNCCFSFMIRRDEHKIPSLIVGNFLPHDPSHM

SEQ ID NO: 12715 - DNA, 7103 bp, Muscodor strobelii; identical to SEQ ID NO: 12709
  misc_feature: SGI EST ID NO. CUFF.30291.3
  misc_feature: Variant of the nucleotide sequence at SEQ ID NO 12713

SEQ ID NO: 12716 - DNA, 2556 bp, Muscodor strobelii
  misc_feature: SGI cDNA ID NO. 564143
  misc_feature: Encodes the peptide sequence at SEQ ID NO 12717
atggtcgacgatctctactacaatcttgccgacgacctctactccgatctcgcggacgatctctactacggtattatcgacgatctctaccacgatctctacgacagcctgtacggcaatctctaccagcaactcgtcgacgatatcaaatttgccacagagttacaaacacagcctcccaaagtgttcgatgagacatatatcgcaaacatcaacaaaaagctcgaaaccgaaattcagaatctgaaaccacatattggttcacctcccaagtcgcaacatcatgggcccctgagatccactggcttgagcctttggaattggtgtacaagactaacgcgtgaccaagatgatcaattaattgtcatcaacgaaagatttatcgcattagtgcgtgtcttgtcatttcttatgaccatttgggtgcagcccaacggcgatagtcgtcccaaagctatcctccgattagaaatactagcagtcaaaacgtctgcatcttgcatgaacagcaacgaacacgaactcgcactgtttgtgctacaaaaagctgcggagtacaatgggctgcttcaggacatgcgtgagtcgctaccagaggaagaattccaagcttctacgaagtacgaagccgaatatctcacccttcgcttagtattgtcctggaaacaagaccgcatggacgtcgcggagcacctatatagcacaatcaagaaaactatggagaatggagatcttcggtcagtcgagaaactcagtgatgccttgttcgaaatcgggaaagatttatcaggcaaaaagaactacccccttgccatgaagtggctagagagatcctacgaatggatcaacagtcgagatattgaactgctatcaagagacgcaattgagctaagacttgctgtctctcaatgtctaattcaggtctacatggacatcaaaacgcccgaaagtttcgagaaagctgagaatcacatcgcctacatcgaatctgagctgggagacaagtttgtcgtccttctgtttcgcctcgaactcttgttgcgatctcccgaggaggcattcgacgtcgacggatatacagaaatacttcggcgtatgatgagagcaatagacctatctgagtcatcgtttaagatgattgtgaattttataaggaagctcgaagctagaaatctgccagctgcttgctccgctttggacgagtttctgacagtctgcgttctcaaaacacaacaagaagcatggatcgaacgagctgttattctacgaataagcatggcagttcgagacaatggagagaatgcagtcgagaacgcgaagaggatactggatcagattgttccccacctcaataagcccttacaatccgataccgcagccggcattcatacgttgatatggaagagagcagactctcactatagccaagggcaattcagtgtggctggtcattggagccaactaggtctacatcctgctcttgaacagtctggtccgaccaacgtgaacaagttgtcaaggaaattggtcctctgtgcgatccaagataatgatttaaatacagcaaccgctgccttgcaggcaatgagcgactcgtcgaaacaagaaccgttaactgcattccttgctttcaaagttgctttgagaaatcaagacatcgatgcggctgcgcaatgtttagaacaagtccgtaaggcctggccgtcgaacccggaatacttgtatgcatgttgtctcgaggcacaacaagccgaagaaaagttcagtaccattcagtcattacgccatatggtctccgggcaccaattccacccatcgaaattcattcatcttccggcattactgcgcactctcatccgacttgagcttcttatgatcaacgataagaaagaagctgacgaggttcgagatatacttaaggaagatctctgcaagacgtttgaagtcgctgccatggcgatacaaaaagagagccgagatgctaacgtagagaaagcattcaccgtgagtgaactagattggttcagtaaaaatgcctataaccttggtcttgcaaattcaacggtttgggaggctcgccaggtgattcgtattctggaagcctgcctttgttttctgtctagctacccacaagatgtaccgacacaaacaagcactgatatctcacttcgtgctatgttctgcgacttcatagttgctactgtccttttggcgctggcacgctctgaggacaatattgaaatacagcttcaggattatcttaacatgcgaaagcatattcagcacttcacaaagacgctggaatcgagggaacaagacctcgacgaggcatcaggcgaagatctaaatgccaagctttcaacaatgcttgtctttgagttcgaaggagccgtttgcctgaagtcgtgggacgacctgaaatcaatactcctcaccgcacagcacgggaagaatctcccagcttatcaagcgatggcagactgcattctgcgacatcacgatgtgcctggaaaaggcgagtacttggcgaacaaactctgctctattgaagactaa

SEQ ID NO: 12717 - protein, 851 aa, Muscodor strobelii
  misc_feature: SGI Peptide ID NO. 564143
  misc_feature (213)..(657): Pfam Id: PF08631 Pfam Desc: Sporulation protein SPO22 like
  misc_feature (213)..(566): Pfam Id: PF08631 Pfam Desc: Sporulation protein SPO22 like
  misc_feature (102)..(841): NCBI GI: 21622377 Blast Desc: conserved [Neurospora crassa]
  misc_feature (73)..(830): NCBI GI: 156030816 Blast Desc: SS1G_14347 [Sclerotinia sclerotiorum 1980] gi|154700738|gb|EDO00477.1| SS1G_14347 [Sclerotinia sclerotiorum 1980]
  misc_feature (100)..(850): NCBI GI: 171688992 Blast Desc: protein product [Podospora anserina] gi|170944458|emb|CAP70569.1| protein product [Podospora anserina]
  misc_feature (102)..(800): NCBI GI: 164427350 Blast Desc: NCU03351 [Neurospora crassa OR74A] gi|157071706|gb|EAA27224.2| [Neurospora crassa OR74A]
  misc_feature (75)..(840): NCBI GI: 189200336 Blast Desc: conserved [Pyrenophora tritici-repentis Pt-1C-BFP] gi|187983604|gb|EDU49092.1| conserved [Pyrenophora tritici-repentis Pt-1C-BFP]
  misc_feature (160)..(833): NCBI GI: 39942364 Blast Desc: MGG_03262 [Magnaporthe grisea 70-15] gi|145015738|gb|EDK00228.1| MGG_03262 [Magnaporthe grisea 70-15]
  misc_feature (88)..(830): NCBI GI: 225563275 Blast Desc: conserved [Ajellomyces capsulatus G186AR]
  misc_feature (41)..(810): NCBI GI: 261195348 Blast Desc: conserved [Ajellomyces dermatitidis SLH14081] gi|239587950|gb|EEQ70593.1| conserved [Ajellomyces dermatitidis SLH14081]
  misc_feature (64)..(810): NCBI GI: 239610560 Blast Desc: conserved [Ajellomyces dermatitidis ER-3]
  misc_feature (126)..(648): NCBI GI: 116199839 Blast Desc: CHGG_08075 [Chaetomium globosum CBS 148.51] gi|88179354|gb|EAQ86822.1| CHGG_08075 [Chaetomium globosum CBS 148.51]
  misc_feature: Useful for introducing or modulating the production of volatile compounds
MVDDLYYNLADDLYSDLADDLYYGIIDDLYHDLYDSLYGNLYQQLVDDIKFATELQTQPPKVFDETYIANINKKLETEIQNLKPHIGSPPKSQHHGPLRSTGLSLWNWCTRLTRDQDDQLIVINERFIALVRVLSFLMTIWVQPNGDSRPKAILRLEILAVKTSASCMNSNEHELALFVLQKAAEYNGLLQDMRESLPEEEFQASTKYEAEYLTLRLVLSWKQDRMDVAEHLYSTIKKTMENGDLRSVEKLSDALFEIGKDLSGKKNYPLAMKWLERSYEWINSRDIELLSRDAIELRLAVSQCLIQVYMDIKTPESFEKAENHIAYIESELGDKFVVLLFRLELLLRSPEEAFDVDGYTEILRRMMRAIDLSESSFKMIVNFIRKLEARNLPAACSALDEFLTVCVLKTQQEAWIERAVILRISMAVRDNGENAVENAKRILDQIVPHLNKPLQSDTAAGIHTLIWKRADSHYSQGQFSVAGHWSQLGLHPALEQSGPTNVNKLSRKLVLCAIQDNDLNTATAALQAMSDSSKQEPLTAFLAFKVALRNQDIDAAAQCLEQVRKAWPSNPEYLYACCLEAQQAEEKFSTIQSLRHMVSGHQFHPSKFIHLPALLRTLIRLELLMINDKKEADEVRDILKEDLCKTFEVAAMAIQKESRDANVEKAFTVSELDWFSKNAYNLGLANSTVWEARQVIRILEACLCFLSSYPQDVPTQTSTDISLRAMFCDFIVATVLLALARSEDNIEIQLQDYLNMRKHIQHFTKTLESREQDLDEASGEDLNAKLSTMLVFEFEGAVCLKSWDDLKSILLTAQHGKNLPAYQAMADCILRHHDVPGKGEYLANKLCSIED

SEQ ID NO: 12718 - DNA, 374 bp, Muscodor strobelii
  misc_feature: SGI EST ID NO. CUFF.30195.0
  misc_feature: Variant of the nucleotide sequence at SEQ ID NO 12716
tgacagtctgcgttctcaaaacacaacaagaagcatggatcgaacgagctgttattctacgaataagcatggcagttcgagacaatggagagaatgcagtcgagaacgcgaagaggatactggatcagattgttccccacctcaataagcccttacaatccgataccgcagccggcattcatacggttcgtcaatgtgaatagttctaggaagatgttagctaacgattgccaatagttgatatggaagagagcagactctcactatagccaagggcaattcagtgtggctggtcattggagccaactaggtctacatcctgctcttgaacagtctggtccgaccaacgtgaacaagttgtcaaggaaattggt

SEQ ID NO: 12719 - DNA, 291 bp, Muscodor strobelii
  misc_feature: SGI cDNA ID NO. 564144
  misc_feature: Encodes the peptide sequence at SEQ ID NO 12720
atggaacacgagatttcgcttggtcttattgtggagatatgctcgatagtcaagcagtcgtcagccagccagaaacactttccacctttggagttagaatggatcatcacgacgacattcaaccatggcattgacctacttggtagccacgaacacgaactcagtaaagcatgggtcgcgcacgcgctaacccttgcacattatgctcaagatggtggtgagatcgagagacaattacaagacagaagtttgaagctgtcatgggatggccaagatgatgagatccagtag

SEQ ID NO: 12720 - protein, 96 aa, Muscodor strobelii
  misc_feature: SGI Peptide ID NO. 564144
  misc_feature (1)..(94): NCBI GI: 164427350 Blast Desc: NCU03351 [Neurospora crassa OR74A] gi|157071706|gb|EAA27224.2| [Neurospora crassa OR74A]
  misc_feature (1)..(90): NCBI GI: 116199839 Blast Desc: CHGG_08075 [Chaetomium globosum CBS 148.51] gi|88179354|gb|EAQ86822.1| CHGG_08075 [Chaetomium globosum CBS 148.51]
  misc_feature (1)..(94): NCBI GI: 21622377 Blast Desc: conserved [Neurospora crassa]
  misc_feature (1)..(86): NCBI GI: 256730769 Blast Desc: NECHADRAFT_30505 [Nectria haematococca mpVI 77-13-4]
  misc_feature (1)..(86): NCBI GI: 46109362 Blast Desc: FG01563.1 [Gibberella zeae PH-1]
  misc_feature (20)..(89): NCBI GI: 258565383 Blast Desc: [Uncinocarpus reesii 1704] gi|237907137|gb|EEP81538.1| [Uncinocarpus reesii 1704]
  misc_feature (2)..(89): NCBI GI: 156030816 Blast Desc: SS1G_14347 [Sclerotinia sclerotiorum 1980] gi|154700738|gb|EDO00477.1| SS1G_14347 [Sclerotinia sclerotiorum 1980]
  misc_feature (1)..(90): NCBI GI: 261357262 Blast Desc: conserved [Verticillium albo-atrum VaMs.102]
  misc_feature (1)..(81): NCBI GI: 39942364 Blast Desc: MGG_03262 [Magnaporthe grisea 70-15] gi|145015738|gb|EDK00228.1| MGG_03262 [Magnaporthe grisea 70-15]
  misc_feature (5)..(82): NCBI GI: 171688992 Blast Desc: protein product [Podospora anserina] gi|170944458|emb|CAP70569.1| protein product [Podospora anserina]
MEHEISLGLIVEICSIVKQSSASQKHFPPLELEWIITTTFNHGIDLLGSHEHELSKAWVAHALTLAHYAQDGGEIERQLQDRSLKLSWDGQDDEIQ

SEQ ID NO: 12721 - DNA, 753 bp, Muscodor strobelii
  misc_feature: SGI cDNA ID NO. 564145
  misc_feature: Encodes the peptide sequence at SEQ ID NO 12722
atggactatgacggaacatctactgctgacggttcgggtgaagcaagaggcagagaatcccaccacaaaggtgccatagacgccgcgctctccgcaggcgtgaagcgtatcgtctactcctcgctcgccttcggattctcgcccaatctcagtcctcaggcaagcaattcgagtaaagcaggcgtgatgcgcgcacacttgcgcacagaggcctatctcaaatccctatccaccaaaaccggtatctccatcacgattctgcgcgaaggactatacagcgagtcctggcccctctacctaggatatttcgacgctgcaaatgctcaaagcgagagggacgtcgtgccccttgcgggcgatggaaagatatgctggaccgcaatccacgatctaggtgtcgctagtacaatcgtgctcacgtccggtgatgaattcgcgggaaagacattctacctctctacaaaccctcaaaccgcaaaatcagtgtcagagatagcgagtctagtcggtaaggcgcgaggcaaagaagtacaggtgaagatcgtcggtcaggactcgcacatcaagtactacgtttcagaaagaggtcaacccaagccagccgtagagtggtgggcgagcacgtatgacgcgctggaagaaggcgaatgtctagttgatgataacacgttggaagagttgctcagtcgcgtgggattgaagcccattcccgttgaggaaacggtcaagaacatggtcgaagcttcaggttag

SEQ ID NO: 12722 - protein, 250 aa, Muscodor strobelii
  misc_feature: SGI Peptide ID NO. 564145
  misc_feature (1)..(247): NCBI GI: 169608466 Blast Desc: SNOG_07311 [Phaeosphaeria nodorum SN15] gi|111063657|gb|EAT84777.1| SNOG_07311 [Phaeosphaeria nodorum SN15]
  misc_feature (16)..(246): NCBI GI: 154302384 Blast Desc: BC1G_09976 [Botryotinia fuckeliana B05.10] gi|150855464|gb|EDN30656.1| BC1G_09976 [Botryotinia fuckeliana B05.10]
  misc_feature (16)..(246): NCBI GI: 189198656 Blast Desc: conserved [Pyrenophora tritici-repentis Pt-1C-BFP] gi|187982764|gb|EDU48252.1| conserved [Pyrenophora tritici-repentis Pt-1C-BFP]
  misc_feature (16)..(246): NCBI GI: 156055878 Blast Desc: SS1G_05291 [Sclerotinia sclerotiorum 1980] gi|154703075|gb|EDO02814.1| SS1G_05291 [Sclerotinia sclerotiorum 1980]
  misc_feature (3)..(246): NCBI GI: 115387651 Blast Desc: conserved [Aspergillus terreus NIH2624] gi|114195415|gb|EAU37115.1| conserved [Aspergillus terreus NIH2624]
  misc_feature (2)..(246): NCBI GI: 67904670 Blast Desc: AN9322.2 [Aspergillus nidulans FGSC A4] gi|40747233|gb|EAA66389.1| AN9322.2 [Aspergillus nidulans FGSC A4] gi|259488157|tpe|CBF87400.1| TPA: NmrA-like family protein
  misc_feature (12)..(245): NCBI GI: 145249086 Blast Desc: An14g02560 [Aspergillus niger] gi|134081558|emb|CAK46504.1| protein product [Aspergillus niger]
  misc_feature (11)..(245): NCBI GI: 238492499 Blast Desc: NmrA-like family protein [Aspergillus flavus NRRL3357] gi|220695980|gb|EED52322.1| NmrA-like family protein [Aspergillus flavus NRRL3357]
  misc_feature (11)..(245): NCBI GI: 169782846 Blast Desc: [Aspergillus oryzae RIB40] gi|83774629|dbj|BAE64752.1| protein product [Aspergillus oryzae]
  misc_feature (25)..(249): NCBI GI: 256722517 Blast Desc: NECHADRAFT_34886 [Nectria haematococca mpVI 77-13-4]
MDYDGTSTADGSGEARGRESHHKGAIDAALSAGVKRIVYSSLAFGFSPNLSPQASNSSKAGVMRAHLRTEAYLKSLSTKTGISITILREGLYSESWPLYLGYFDAANAQSERDVVPLAGDGKICWTAIHDLGVASTIVLTSGDEFAGKTFYLSTNPQTAKSVSEIASLVGKARGKEVQVKIVGQDSHIKYYVSERGQPKPAVEWWASTYDALEEGECLVDDNTLEELLSRVGLKPIPVEETVKNMVEASG

SEQ ID NO: 12723 - DNA, 1519 bp, Muscodor strobelii
  misc_feature: SGI EST ID NO. CUFF.30204.0
  misc_feature: Variant of the nucleotide sequence at SEQ ID NO 12721
gcggtctctcagatgtgatcactataatcgtgatacacaatgaatgatataaaaacgagcgatatgacctatgtccagacgaattgacagcatcaagctaagccgtcttgaaggaaccaacattaagcagtctggtggtttctcctcatcgatcaaaacgtcatcgaagacccttaacacacatcaccctaacctcacatctcagcaacaacctcattcaacactcacactcatcatcaatctcaagatgtccaaagtagcaataataggcgcctcaggcaaactcggcggcgcaaccctctccgcgctactaacacacaacctcctcccccatcccaaatcatagccctaacctcctcaacgactaactcccaaacatggaccacactctcacaaaaaggcgtcatcgtccgccacgcgacattcgacgacccatcagcattcgcctctgcactggagggcgtagaatgtttattcctagtctcaaccccaaacatcgggctcgacttcggtgtagctatggactatgacggaacatctactgctgacggttcgggtgaagcaagaggcagagaatcccaccacaaaggtgccatagacgccgcgctctccgcaggcgtgaagcgtatcgtctactcctcgctcgccttcggattctcgcccaatctcagtcctcaggcaagcaattcgagtaaagcaggcgtgatgcgcgcacacttgcgcacagaggcctatctcaaatccctatccaccaaaaccggtatctccatcacgattctgcgcgaaggactatacagcgagtcctggcccctctacctaggatatttcgacgctgcaaatgctcaaagcgagagggacgtcgtgccccttgcgggcgatggaaagatatgctggaccgcaatccacgatctaggtgtcgctagtacaatcgtgctcacgtccggtgatgaattcgcgggaaagacattctacctctctacaaaccctcaaaccgcaaaatcagtgtcagagatagcgagtctagtcggtaaggcgcgaggcaaagaagtacaggtgaagatcgtcggtcaggactcgcacatcaagtactacgtttcagaaagaggtcaacccaagccagccgtagagtggtgggcgagcacgtatgacgcgctggaagaaggcgaatgtctagttgatgataacacgttggaagagttgctcagtcgcgtgggattgaagcccattcccgttgaggaaacggtcaagaacatggtcgaagcttcaggttaggtgtatgagtggaacattcaatgttggaggggtcagctagcactttatatagcaggataatgagctcagtttcaaaaaacccaccagaacaaacctgtcatcctagatggcgcagtggtaaagtcgtcagactttccaccttagaggtaccagactaccggttcgagccccgctccagtcaactagacccgtcgtgaaggtgcataccgacctgtataactatctcactgcaacaacaaaacaaaat

SEQ ID NO: 12724 - DNA, 2397 bp, Muscodor strobelii
  misc_feature: SGI cDNA ID NO. 564146
  misc_feature: Encodes the peptide sequence at SEQ ID NO 12725
atggcaccgattgctatctcaccagaacggccatcaggccttgatgaatccgcgttaacgaccgtctatcatgacaccatccgtttcttcctcaacggcactagagtcgtgcttgatgaaatcgacccagaagttacccttcttgaatatctccgcggtattggcttaactggaacaaagcttggatgcgctgaaggcggatgcggcgcttgcacagtagttgtctctcagtacaacccaaccaccaaacagatctaccacgcaagcgtaaatgcctgcctggcgcctctcgcaagtgtcgacggaaaacatgtcataacgatagaaggtataggaaatgtgaaaagtccacatccggctcaggagcggatagccaaaagcaacggaagccagtgtggcttctgcacgcccggtattgttatgagtctgtatgccttgttgcggaataacggaagtcccagcgagcacgatatcgaagaggcattcgatggtaacctctgtcgatgtacgggatatcgacctattcttgacgctgcccagacatttagtgtgaagagcgcttgcggtaagagctcgacaaatggtggctcagactgctgcatggagaatggaaacggacccaatggtggatgttgcaaagataagaacatcgacgacagccagcctatcaagcgtttcacgccaccaggttttatcgagtacaacagagatacggaactcatcttcccgccatcattgaagaagcacgagttccggccgttggctttcggaaacaagagaaagaagtggtatcgacctgtcaccttgaatcagcttctggaaatcaagagcgtatatccgaatgccaagatcatcggtggaagtacagaaacccagattgagatcaagtttaaagcattgcagtatccggtgtcggtgtttgttggcgacattcccgaattgcgacattattcattcaaggatgagcatgttgaagttggcggtaatgtcatcctaacggatctcgaaaatatctgccaagaagcaattaaacactacggtgcagcgagggggcaagtcttcgaggctatttataaacaactcaagtatttcgccggcagacaaattcgtaatgtcggaactccagctggaaacctggtcactgcatcaccgatttcagatctaaaccctgtatttatgggtgcgaactgcgttctaattgcgaagtccacatatgaggagactgaaatacccatggcttcattctttacgggctatcgtcggacggctttggctgaagatgctatcattgcctctatacgcattcccctaacgaaagaacgtggagactatttccgcgcctacaaacaagcaaaaaggaaagacgacgacatcgcaattgtaactggtgcacttcatgtgtctttggatcaaaagggcaccgttgagcactgtaatttggcttatggcggtatggctccgttcacagtggcagctaagaacaccaacacgtatctcgttggaaagatgtttgcacatccagacacactcgaaggcgcaatgaatgcattggaaaaagattttgatctagttttctctgtacccggcggcatggcctcatataggaaagccttggcactaggattcttctatcgattctatcacgatgtgttgtcggaagtcagtgttgaaagcaagcacggcgatagcgaagctgtcgaagaactggagagagcattatcgacaggctggaaagatcaagatgctacttctgaatacgtgaaggagtccctcggcaaagctgctaatcacgtcgccgctctgaaacaggtgacaggagaggctcagtatactgatgacattccgcccctgaagaacgaactccacgcatctcttatattttcttctcgagcgcatgctaagatcaagtcaatcgactataccgccactctggaaatccctggagtaattgacattgttgacaaaaatgatctgcacaagcctgaggataacagatggggcgcgccgaatttcgacgactatttctttgccgaagatgaggtattcaccgccggtcagcctattgccatagttctcgcgaccacgaaggccaaggcagtcgatggggtccgtgctgtcaagatcgagtacgaggatcttcctgctatattcacaatggaagaggctattgagaaagagagcttccataaatggtcaaactacatcaagaagggcgacgttgagactgccttcaagaactgcgaccatgtcttctcaggtgtggcgcgaatgggcggccaagaacatttctaccttgaaacgaacgcctgccttgcgattccaaaaccggaagacggcgagatggagatttggacaagtagccaaaatcccacagaaaggtatggtttttccacatga

SEQ ID NO: 12725 - protein, 798 aa, Muscodor strobelii
  misc_feature: SGI Peptide ID NO. 564146
  misc_feature (29)..(99): Pfam Id: PF00111 Pfam Desc: 2Fe-2S iron-sulfur cluster binding domain
  misc_feature (605)..(714): Pfam Id: PF01315 Pfam Desc: Aldehyde oxidase and xanthine dehydrogenase, a/b hammerhead domain
  misc_feature (446)..(555): Pfam Id: PF03450 Pfam Desc: CO dehydrogenase flavoprotein C-terminal domain
  misc_feature (259)..(438): Pfam Id: PF00941 Pfam Desc: FAD binding domain in molybdopterin dehydrogenase
  misc_feature (107)..(181): Pfam Id: PF01799 Pfam Desc: [2Fe-2S] binding domain
  misc_feature (722)..(792): Pfam Id: PF02738 Pfam Desc: Aldehyde oxidase and xanthine dehydrogenase, molybdopterin binding domain
  misc_feature (1)..(797): NCBI GI: 261357264 Blast Desc: xanthine dehydrogenase [Verticillium albo-atrum VaMs.102]
  misc_feature (1)..(797): NCBI GI: 116199841 Blast Desc: CHGG_08076 [Chaetomium globosum CBS 148.51] gi|88179355|gb|EAQ86823.1| CHGG_08076 [Chaetomium globosum CBS 148.51]
  misc_feature (1)..(798): NCBI GI: 256730771 Blast Desc: [Nectria haematococca mpVI 77-13-4]
  misc_feature (1)..(798): NCBI GI: 46109358 Blast Desc: FG01561.1 [Gibberella zeae PH-1]
  misc_feature (1)..(796): NCBI GI: 189200064 Blast Desc: xanthine dehydrogenase/oxidase [Pyrenophora tritici-repentis Pt-1C-BFP] gi|187983468|gb|EDU48956.1| xanthine dehydrogenase/oxidase [Pyrenophora tritici-repentis Pt-1C-BFP]
  misc_feature (1)..(797): NCBI GI: 164427348 Blast Desc: xanthine dehydrogenase [Neurospora crassa OR74A] gi|157071705|gb|EAA27223.2| xanthine dehydrogenase [Neurospora crassa OR74A]
  misc_feature (1)..(796): NCBI GI: 121707949 Blast Desc: xanthine dehydrogenase HxA, [Aspergillus clavatus NRRL 1] gi|119400133|gb|EAW10559.1| xanthine dehydrogenase HxA, [Aspergillus clavatus NRRL 1]
  misc_feature (1)..(797): NCBI GI: 21622376 Blast Desc: xanthine dehydrogenase [Neurospora crassa]
  misc_feature (1)..(792): NCBI GI: 145257982 Blast Desc: An04g05440 [Aspergillus niger] gi|134074512|emb|CAK38806.1| protein product [Aspergillus niger]
  misc_feature (1)..(792): NCBI GI: 119500332 Blast Desc: xanthine dehydrogenase HxA, [Neosartorya fischeri NRRL 181] gi|119415088|gb|EAW25026.1| xanthine dehydrogenase HxA, [Neosartorya fischeri NRRL 181]
  misc_feature (19)..(792): SWISSPROT Homolog: EC 1.17.1.4 Xanthine dehydrogenase
MAPIAISPERPSGLDESALTTVYHDTIRFFLNGTRVVLDEIDPEVTLLEYLRGIGLTGTKLGCAEGGCGACTVVVSQYNPTTKQIYHASVNACLAPLASVDGKHVITIEGIGNVKSPHPAQERIAKSNGSQCGFCTPGIVMSLYALLRNNGSPSEHDIEEAFDGNLCRCTGYRPILDAAQTFSVKSACGKSSTNGGSDCCMENGNGPNGGCCKDKNIDDSQPIKRFTPPGFIEYNRDTELIFPPSLKKHEFRPLAFGNKRKKWYRPVTLNQLLEIKSVYPNAKIIGGSTETQIEIKFKALQYPVSVFVGDIPELRHYSFKDEHVEVGGNVILTDLENICQEAIKHYGAARGQVFEAIYKQLKYFAGRQIRNVGTPAGNLVTASPISDLNPVFMGANCVLIAKSTYEETEIPMASFFTGYRRTALAEDAIIASIRIPLTKERGDYFRAYKQAKRKDDDIAIVTGALHVSLDQKGTVEHCNLAYGGMAPFTVAAKNTNTYLVGKMFAHPDTLEGAMNALEKDFDLVFSVPGGMASYRKALALGFFYRFYHDVLSEVSVESKHGDSEAVEELERALSTGWKDQDATSEYVKESLGKAANHVAALKQVTGEAQYTDDIPPLKNELHASLIFSSRAHAKIKSIDYTATLEIPGVIDIVDKNDLHKPEDNRWGAPNFDDYFFAEDEVFTAGQPIAIVLATTKAKAVDGVRAVKIEYEDLPAIFTMEEAIEKESFHKWSNYIKKGDVETAFKNCDHVFSGVARMGGQEHFYLETNACLAIPKPEDGEMEIWTSSQNPTERYGFST

SEQ ID NO: 12726 - DNA, 5123 bp, Muscodor strobelii
  misc_feature: SGI EST ID NO. CUFF.30253.0
  misc_feature: Variant of the nucleotide sequence at SEQ ID NO 12724
aacagatccagacaattggaaaatagtgctcgtctaatcgtatatacttctcctatgatttgctaattttgattgccaattgcgttaaaatctctagataggcaactcgtatgtcaaacacatagagagtcaggcccaacatccgaagctctgtgcagaagctcccctcctattcttcgactttatctacgacagctgtttatcgccaccggacaccttgagatctcaacgttattctctggcatactcactgcttccaacatcaatactagttttccgttctcatacataatcatcttctataactccaagttacacactgtgtgtacatccatgtttcaactacctttgtgaatatacgtaaggtaccgaggaaaccgagtttgcatatcgccaagccgctgtcaatcaccgtgatcaatcagtgagattgctgttcggcattatttgttactcgtgtagccgacaactatatctacctgaaacattatgtacgattcatgagcttcaaatccttcgacacaattctaagacctcgcaattgggcctgaatccttcgatatcatggcaccgattgctatctcaccagaacggccatcaggccttgatgaatccgcgttaacgaccgtctatcatgacaccatccgtttcttcctcaacggcactagagtcgtgcttgatgaaatcgacccagaagttacccttcttgaatatctccgcggtattggcttaactggaacaaagcttggatgcgctgaaggcggatgcggcgcttgcacagtagttgtctctcagtacaacccaaccaccaaacagatctaccacgcaagcgtaaatgcctgcctggcgcctctcgcaagtgtcgacggaaaacatgtcataacgatagaaggtataggaaatgtgaaaagtccacatccggctcaggagcggatagccaaaagcaacggaagccagtgtggcttctgcacgcccggtattgttatgagtctgtatgccttgttgcggaataacggaagtcccagcgagcacgatatcgaagaggcattcgatggtaacctctgtcgatgtacgggatatcgacctattcttgacgctgcccagacatttagtgtgaagagcgcttgcggtaagagctcgacaaatggtggctcagactgctgcatggagaatggaaacggacccaatggtggatgttgcaaagataagaacatcgacgacagccagcctatcaagcgtttcacgccaccaggttttatcgagtacaacagagatacggaactcatcttcccgccatcattgaagaagcacgagttccggccgttggctttcggaaacaagagaaagaagtggtatcgacctgtcaccttgaatcagcttctggaaatcaagagcgtatatccgaatgccaagatcatcggtggaagtacagaaacccagattgagatcaagtttaaagcattgcagtatccggtgtcggtgtttgttggcgacattcccgaattgcgacattattcattcaaggatgagcatgttgaagttggcggtaatgtcatcctaacggatctcgaaaatatctgccaagaagcaattaaacactacggtgcagcgagggggcaagtcttcgaggctatttataaacaactcaagtatttcgccggcagacaaattcgtaatgtcggaactccagctggaaacctggtcactgcatcaccgatttcagatctaaaccctgtatttatgggtgcgaactgcgttctaattgcgaagtccacatatgaggagactgaaatacccatggcttcattctttacgggctatcgtcggacggctttggctgaagatgctatcattgcctctatacgcattcccctaacgaaagaacgtggagactatttccgcgcctacaaacaagcaaaaaggaaagacgacgacatcgcaattgtaactggtgcacttcatgtgtctttggatcaaaagggcaccgttgagcactgtaatttggcttatggcggtatggctccgttcacagtggcagctaagaacaccaacacgtatctcgttggaaagatgtttgcacatccagacacactcgaaggcgcaatgaatgcattggaaaaagattttgatctagttttctctgtacccggcggcatggcctcatataggaaagccttggcactaggattcttctatcgattctatcacgatgtgttgtcggaagtcagtgttgaaagcaagcacggcgatagcgaagctgtcgaagaactggagagagcattatcgacaggctggaaagatcaagatgctacttctgaatacgtgaaggagtccctcggcaaagctgctaatcacgtcgccgctctgaaacaggtgacaggagaggctcagtatactgatgacattccgcccctgaagaacgaactccacgcatctcttatattttcttctcgagcgcatgctaagatcaagtcaatcgactataccgccactctggaaatccctggagtaattgacattgttgacaaaaatgatctgcacaagcctgaggataacagatggggcgcgccgaatttcgacgactatttctttgccgaagatgaggtattcaccgccggtcagcctattgccatagttctcgcgaccacgaaggccaaggcagtcgatggggtccgtgctgtcaagatcgagtacgaggatcttcctgctatattcacaatggaagaggctattgagaaagagagcttccataaatggtcaaactacatcaagaagggcgacgttgagactgccttcaagaactgcgaccatgtcttctcaggtgtggcgcgaatgggcggccaagaacatttctaccttgaaacgaacgcctgccttgcgattccaaaaccggaagacggcgagatggagatttggacaagtagccaaaatcccacagaaagtcaagtctatgcggcgaagatcctcggtgtccaagccaacaaagtcttagcccgcgtcaagcgtctcggtggcgggttcggcggaaaagaaactcgatgcgtgcaactgagcaccatgatggcgctagctgcacagaagactaagcgtcctgtacggtgtatgctcaatcgtgacgaagacatgataatgtctggccagcgtcacccattcctcgcaaggtggaaagtgggcgtcaataaagacggcaaactccaggctatggatgtcgatgttttcaacaacgccggatggtctttcgatttaagtgccgctgtctgcgaacgctctatgacacatattgataactgctacaagttcccgaatctccacgtccgcggacgtttgtgcaagaccaatacgatgtcaaatacggcattccgcggatttggcggtccccagggcatgttcatcaccgagtcaatgatgtctgaagttgcggatcgtttaggtatgcctgttgagcagttccgtgaaattaacctctacgaaccgaacgaagaaacacatttcaaccaagctcttcaagattggcatgtgccattgatgtacaaacaaattaaggaagagtccgattatgacaaccgacagaaagctattgagcagttcaacaaggatcacaagtggcggaaacgtggtatcgccatcattcctaccaagttcggtatctcgtttactgctttgtggttcaaccaggctggagcgttggttcacatttatcatgatgggtccgttcttcttgcacatggcggtaccgaaatgggtcaaggattgcacaccaagatgattacactggctgctgaggcactgcaggtccctatggaggatgtctttatctcagagaccgccacaaatactgtcgccaacacttcagctacggctgcttcggcgtcgtctgatctgaatggatatgcgatttgggatgcctgcgaacagctcaacaaacgcctggccccttacagagaaaaacttggtccaaaagcgactatgaaggaccttgctcacgctgcatatttcgatcgtgtaaacctgagcgccaatggtttctataagaccccagagattggatacaaatggggtgagaatgttggcaagatgttcttctacttcactcagggtgtcactgccgcagaagtcgaggttgacacgttgacgggaacttggacatgtctgagagccgatatcaagatggacgttggaaggtcgattaatccttcgatcgactacggccaaatcgaaggcgcttttgtccaaggcatgggtctcttcacaatggaagagagcttatggcttcgcaatggtcccgcagctggcaatctgttcaccaagggtcccggtgcatataagattcctggcttccgcgatatcccgcaggagttcaatgtcagtctgctcaaaggcgtgacgtgggagaatctccgcactatccagcggagtcgcggtgtcggtgagccacccctgttcatgggaagtgcagtattcttcgcaatccgagatgccctgaagtctgcccgatcggactatggtgtgaaggcgaagcagggatctgaaggaggcgatgatgatgggttattgagactggagagtccagctacgccggagagaatacggctttcttgcgttgaccctatcatggagcgcgcacgcgtgctacccaaggagggcgagaagagctttttcatcgctatttaattgcttagtttcgtgtccgggactcgggggctatggaacggttgcattgtggtattatcatcgaggggtcacgaacaccatttggctaagtattctggctctggtaattgaactgagattgttactatcctcgatctaagtatgacgatactaaaagtcaagcaaaacaatatccaatgaattctcatgccagtaaataatagggggaatgcccgcactcagtctactcggccttaagcgtatgccctgcctcttatatccgagtgaataggaaaacatcgacaagacacacgagacaactaacgctcaggttggaaaacgccaggttacaattctgttagaatttaggtgaaaagtagagccgcattgataatacctaaaggcactcaagcacatttcgcagcatatttcccaaattaggcaagattttgccattgaacagtgattattaa

SEQ ID NO: 12727 - DNA, 1449 bp, Muscodor strobelii
  misc_feature: SGI cDNA ID NO. 564147
  misc_feature: Encodes the peptide sequence at SEQ ID NO 12728
atgcctagtgtagagacaaacggccatacgaatggcgactccaaattcgcgttctttaacatcgtcgatgggaagaagcgtagctcagacacgaatgaacaggtaaccgatccacgcacagaagaacagctttgggatgtcccaatagcgtcaacagaagatctcgatgatgctgtcgaagcagctgctcgagctttcaagacatggaaactcacaacacaagaagaacgccacaagacgctccaagatctagcagactgtattcgcgcaaataaggagttgctgacggagatccatgtaaaagagacgggaaagtcttgggcaatgggaggtgtcgacatcgaagtgtctgctatacaattcgaatattataccaaaatcacactcgaagacatagaccaatacgaagacgacacggtaagaatcatcgggacgcatattcccattggcgtaatgggcgccatatcaccctggaatttccccatgattctcagctcagtgaaagtcgtatccgcgctcacgaccggcaactgcgtaatcattaagccatcaccattcacgccttattcacttctcaagttctgcgaactcgctcaatccgtcctaccaccgggtgttttccaagctttgagcggtggcgcagacctaggcgagcgcatgacactacacccgaagattcaacatataagcttcacaggcacggttgcggttggacagcggatacttcaaaattgcgcgagaaccatgaagaaagtcgtccttgaactcgcgggaaacgacgcagcgatcatttgcgaagacgctgatctggagaaagctgtaccaagtgtcgcatacggatgtttcttccacgcaggtcaagtgtgcgttgcttcgaaacgggtgtatgtccatgagtctatctacgataaattcatggagttatttgtcgaagaggcaaagaagtgggagcctagcgaggataaagacaatttgtttgcgccgctgagtaatcgaccgaattatgagagagcgttgagatttattgaggattgtaagaagaataatcacaagattgtggcgggtggtgaggttaagggtgctgaggaaaaggggttttggattcggcctgttattgttgagaagccgcctgaggagtcgttgcttgtgcaggaagaacagtttgctcctattgcccctgttctctcatggagcgacgaagcagacgtcatctctcgcgcgaatcttgataatgccggtttgggagcttcagtctacacatcggatctccatcgtgcccgtcgaattgctcgaaatctcgagtctggatctgtgtggattaatcggttcgagcgcccgcatatcggtgcatactttggaggctggaaacttagtggatttgggggcgagttgggcaaacatggactattggactattgccagcttcagagtctacatttccataagtag

SEQ ID NO: 12728 - protein, 482 aa, Muscodor strobelii
  misc_feature: SGI Peptide ID NO. 564147
  misc_feature (26)..(478): Pfam Id: PF00171 Pfam Desc: Aldehyde dehydrogenase family
  misc_feature (18)..(482): NCBI GI: 116199843 Blast Desc: aldehyde dehydrogenase [Chaetomium globosum CBS 148.51] gi|88179356|gb|EAQ86824.1| aldehyde dehydrogenase [Chaetomium globosum CBS 148.51]
  misc_feature (18)..(482): NCBI GI: 85079970 Blast Desc: NCU03348 [Neurospora crassa OR74A] gi|21622375|emb|CAD37029.1| related to aldehyde dehydrogenase (NAD+), mitochondrial [Neurospora crassa] conserved [Neurospora
  misc_feature (15)..(482): NCBI GI: 171688976 Blast Desc: protein product [Podospora anserina] gi|170944450|emb|CAP70561.1| protein product [Podospora anserina]
  misc_feature (10)..(482): NCBI GI: 39942366 Blast Desc: MGG_03263 [Magnaporthe grisea 70-15] gi|145015736|gb|EDK00226.1| MGG_03263 [Magnaporthe grisea 70-15]
  misc_feature (18)..(482): NCBI GI: 169616454 Blast Desc: SNOG_11399 [Phaeosphaeria nodorum SN15] gi|160703188|gb|EAT81107.2| SNOG_11399 [Phaeosphaeria nodorum SN15]
  misc_feature (18)..(482): NCBI GI: 255949354 Blast Desc: Pc22g15260 [Penicillium chrysogenum Wisconsin 54-1255] gi|211592461|emb|CAP98814.1| Pc22g15260 [Penicillium chrysogenum Wisconsin 54-1255]
  misc_feature (18)..(482): NCBI GI: 189197301 Blast Desc: betaine aldehyde dehydrogenase 1 [Pyrenophora tritici-repentis Pt-1C-BFP] gi|187980936|gb|EDU47562.1| betaine aldehyde dehydrogenase 1 [Pyrenophora tritici-repentis Pt-1C-BFP]
  misc_feature (17)..(482): NCBI GI: 256726338 Blast Desc: NECHADRAFT_43411 [Nectria haematococca mpVI 77-13-4]
  misc_feature (13)..(482): NCBI GI: 261359898 Blast Desc: aldehyde dehydrogenase [Verticillium albo-atrum VaMs.102]
  misc_feature (18)..(482): NCBI GI: 169768486 Blast Desc: [Aspergillus oryzae RIB40] gi|238497792|ref|XP_002380131.1| aldehyde dehydrogenase, [Aspergillus flavus NRRL3357] gi|83766571|dbj|BAE56711.1| protein
  misc_feature (26)..(480): SWISSPROT Homolog: EC 1.2.1.3 Aldehyde dehydrogenase (NAD(+))
  misc_feature: Useful for introducing or modulating the production of volatile compounds
  misc_feature: Useful for fungicidal and/or biocontrol applications
MPSVETNGHTNGDSKFAFFNIVDGKKRSSDTNEQVTDPRTEEQLWDVPIASTEDLDDAVEAAARAFKTWKLTTQEERHKTLQDLADCIRANKELLTEIHVKETGKSWAMGGVDIEVSAIQFEYYTKITLEDIDQYEDDTVRIIGTHIPIGVMGAISPWNFPMILSSVKVVSALTTGNCVIIKPSPFTPYSLLKFCELAQSVLPPGVFQALSGGADLGERMTLHPKIQHISFTGTVAVGQRILQNCARTMKKVVLELAGNDAAIICEDADLEKAVPSVAYGCFFHAGQVCVASKRVYVHESIYDKFMELFVEEAKKWEPSEDKDNLFAPLSNRPNYERALRFIEDCKKNNHKIVAGGEVKGAEEKGFWIRPVIVEKPPEESLLVQEEQFAPIAPVLSWSDEADVISRANLDNAGLGASVYTSDLHRARRIARNLESGSVWINRFERPHIGAYFGGWKLSGFGGELGKHGLLDYCQLQSLHFHK

SEQ ID NO: 12729 - DNA, 960 bp, Muscodor strobelii
  misc_feature: SGI cDNA ID NO. 564148
  misc_feature: Encodes the peptide sequence at SEQ ID NO 12730
atgtcggaaaaatcgggcgacgataacaatgagtacgatttcgctgacgtcgaacttccgcttcctgcctccgaatgccgtgaagccgccaaccaccctgccacccaagacaatgttgaaaaaaatgtcgatcaccaagacactcagctcgatcgcattgaggccggactcgatgttcttgtagcctcaacccgagagatattgcaccagctcaaaagcaaggacaaatacggtgctaccactgagctcctcgatgagtgtacaagcaccaagccaaagccgctacctaccgttggcgacgttgtccggcagcttaaggtcctgaagggggatatcgagataagctcgaaggcgtacaacgatcactgggatgaatttgaccttgctacgaaaattgaagctgaagtggcgcggcgtgaaaattacatacagttcaataccattaaggttgtgttgcaagaactacacaaacgagaccaactaagcgtactcgatgaggatgatcttgttgccatccagcgactgatcttggataagcaaaaaccccttcaggttgttaccactgctgatgagacgtgtttgacttctactaagccagtcgacaagaccaccacttctacgaataacaatactgaagatgtcataaaggtagagaaaccatctctacgcgatacctctgaggatgaatccgaaacgcgagttgacgtcaaagctggctccattgcgaaaaagcttcctgttcccgagaaatccaggtccaagtctacattgtcactcaagcctacattcggagctagtgatattcatgacttggagctgcgtgacaagacgaaccagttcttcaagactgtgtccaagatcgaaccaacgatcacgtatgaagcttgctatcatgctttcctacaggctcaggacgttgtcagtcaactgttggggggccacaaatcctcaataccataa

SEQ ID NO: 12730 - protein, 319 aa, Muscodor strobelii
  misc_feature: SGI Peptide ID NO. 564148
MSEKSGDDNNEYDFADVELPLPASECREAANHPATQDNVEKNVDHQDTQLDRIEAGLDVLVASTREILHQLKSKDKYGATTELLDECTSTKPKPLPTVGDVVRQLKVLKGDIEISSKAYNDHWDEFDLATKIEAEVARRENYIQFNTIKVVLQELHKRDQLSVLDEDDLVAIQRLILDKQKPLQVVTTADETCLTSTKPVDKTTTSTNNNTEDVIKVEKPSLRDTSEDESETRVDVKAGSIAKKLPVPEKSRSKSTLSLKPTFGASDIHDLELRDKTNQFFKTVSKIEPTITYEACYHAFLQAQDVVSQLLGGHKSSIP

SEQ ID NO: 12731 - DNA, 450 bp, Muscodor strobelii
  misc_feature: SGI EST ID NO. CUFF.30243.0
  misc_feature: Variant of the nucleotide sequence at SEQ ID NO 12729
aagcaccaagccaaagccgctacctaccgttggcgacgttgtccggcagcttaaggtcctgaagggggatatcgagataagctcgaaggcgtacaacgatcactgggatgaatttgaccttgctacgaaaattgaagctgaagtggcgcggcgtgaaaattacatacagttcaataccattaaggttgtgttgcaagaactacacaaacgagaccaactaagcgtactcgatgaggatgatcttgttgccatccagcgactgatcttggataagcaaaaaccccttcaggttgttaccactgctgatgagacgtgtttgacttctactaagccagtcgacaagaccaccacttctacgaataacaatactgaagatgtcataaaggtagagaaaccatctctacgcgatacctctgaggatgaatccgaaacgcgagttgacgtcaaagc

SEQ ID NO: 12732 - DNA, 1278 bp, Muscodor strobelii
  misc_feature: SGI cDNA ID NO. 564149
  misc_feature: Reduced expression when VOC is produced
  misc_feature: Encodes the peptide sequence at SEQ ID NO 12733
atggggctttccgacaaactcaagcctgctgccagagttgccggccaaagacaagatgtttggtcgatcgttaatgaggctgcagccgcttcgcccgtacagcccatcgtgaatatgggtcagggtttctttggctacaaccctccagacttcatcctcaacgccgccaagtccgcccttgatcgcgtggaatgcaaccaatattccccgaccaagggcaggccgcggctgaagcaggccatatcggatgcctatgcccctttttggggtcgcaagctcaaccctgataccgaggtgactatcaccactggcgccaacgagggtatgctcagcgcctttatggcgtttatcgagcctggcgatgaagtcattatcttcgagccattttttgaccagtatatcagcaatatcgaaatgcccggaggcaagattgtctacgtgcccctgagcccgccggcagacggatccacgcggacatcttcctcggcagagtggacagttgactttgacaagctggagaaggccataacgcccaagacgaaaatgatcgtcatcaacacacctcataaccctgtcggcaaggtcttctccaaggaagagctcctacgtataggagaactttgcgtcaagaacgagattatcattctctctgacgaagtctatgatcgtcttttctatgtcccgttcacgaggatagcgactttgtctccggaaattgagaacctaacgttgacggttggctcggctggaaagaacttttatgctactggatggcgtgttggctggcttatggggcctccccatctcatccagtatgtttctgcggctcatacccgaatctgctactcctctgtatcgccattacaggaggcttgcgcaatcggtttcgaagaggccgacaaagaaggattctgggacaaggcagtagtcgacatgaaggccaagattacccgattcaacgagatctgggatgaactcggccttccatacacagacccagagggtggatacttcgtcatggtgaacatggccaaagtcaagcttccagcagactacccatttccaccgcacgtagctagcaggccccgtgactttaagctagcttggttcctcatccaggaagttggcgttgctgccatccctcctaccgagttttacaccgatccaaacgcttggatcgctgaggattacatgcgctttgctgtttgcaagccagatgaggttctggagactgcgaaagacaggctgagggggttgaagaagtatatagagtcatag

SEQ ID NO: 12733 - protein, 425 aa, Muscodor strobelii
  misc_feature: SGI Peptide ID NO. 564149
  misc_feature (34)..(416): Pfam Id: PF00155 Pfam Desc: Aminotransferase class I and II
  misc_feature (1)..(425): NCBI GI: 261357285 Blast Desc: kynurenine-oxoglutarate transaminase [Verticillium albo-atrum VaMs.102]
  misc_feature (4)..(425): NCBI GI: 39942368 Blast Desc: conserved [Magnaporthe grisea 70-15] gi|145015735|gb|EDK00225.1| conserved [Magnaporthe grisea 70-15]
  misc_feature (3)..(425): NCBI GI: 85079967 Blast Desc: NCU03347 [Neurospora crassa OR74A] gi|21622374|emb|CAD37028.1| conserved [Neurospora crassa] gi|28917521|gb|EAA27220.1| NCU03347 [Neurospora crassa OR74A]
  misc_feature (3)..(424): NCBI GI: 171688902 Blast Desc: protein product [Podospora anserina] gi|170944413|emb|CAP70523.1| protein product [Podospora anserina]
  misc_feature (3)..(424): NCBI GI: 116199879 Blast Desc: conserved [Chaetomium globosum CBS 148.51] gi|88179374|gb|EAQ86842.1| conserved [Chaetomium globosum CBS 148.51]
  misc_feature (5)..(423): NCBI GI: 255947798 Blast Desc: Pc22g06360 [Penicillium chrysogenum Wisconsin 54-1255] gi|211591683|emb|CAP97924.1| Pc22g06360 [Penicillium chrysogenum Wisconsin 54-1255]
  misc_feature (5)..(423): NCBI GI: 145257997 Blast Desc: An04g05490 [Aspergillus niger] gi|134074517|emb|CAK38811.1| protein product [Aspergillus niger]
  misc_feature (1)..(424): NCBI GI: 256730772 Blast Desc: [Nectria haematococca mpVI 77-13-4]
  misc_feature (5)..(424): NCBI GI: 169609182 Blast Desc: SNOG_07678 [Phaeosphaeria nodorum SN15] gi|111064024|gb|EAT85144.1| SNOG_07678 [Phaeosphaeria nodorum SN15]
  misc_feature (5)..(423): NCBI GI: 225559887 Blast Desc: aminotransferase class I and II [Ajellomyces capsulatus G186AR] gi|225559937|gb|EEH08219.1| aminotransferase class I and II [Ajellomyces capsulatus G186AR]
  misc_feature (18)..(423): SWISSPROT Homolog: EC 2.6.1.7 Kynurenine--oxoglutarate transaminase
  misc_feature: Useful for introducing or modulating the production of volatile compounds
  misc_feature: Useful for fungicidal and/or biocontrol applications
  misc_feature: Useful for production of fusel alcohols
MGLSDKLKPAARVAGQRQDVWSIVNEAAAASPVQPIVNMGQGFFGYNPPDFILNAAKSALDRVECNQYSPTKGRPRLKQAISDAYAPFWGRKLNPDTEVTITTGANEGMLSAFMAFIEPGDEVIIFEPFFDQYISNIEMPGGKIVYVPLSPPADGSTRTSSSAEWTVDFDKLEKAITPKTKMIVINTPHNPVGKVFSKEELLRIGELCVKNEIIILSDEVYDRLFYVPFTRIATLSPEIENLTLTVGSAGKNFYATGWRVGWLMGPPHLIQYVSAAHTRICYSSVSPLQEACAIGFEEADKEGFWDKAVVDMKAKITRFNEIWDELGLPYTDPEGGYFVMVNMAKVKLPADYPFPPHVASRPRDFKLAWFLIQEVGVAAIPPTEFYTDPNAWIAEDYMRFAVCKPDEVLETAKDRLRGLKKYIES

SEQ ID NO: 12734 - DNA, 1580 bp, Muscodor strobelii
  misc_feature: SGI EST ID NO. CUFF.30278.1
  misc_feature: Variant of the nucleotide sequence at SEQ ID NO 12732
ccacaaataaataccgagtagagccgtgacgcatcggagaaagggtgaatcaacggcagtagacggtataaagcggggagaggtgcgagtttagttagaaatcttaaaatcgttagctactccaagctgcatatatgaggtcgatatctggttgggcgtcactttcccggcgacgtctgcttggcaccgcattcagtaacaacgctcagagttcacgtagaccaccaaccgcacatcgcggctttcacactaccatggggctttccgacaaactcaagcctgctgccagagttgccggccaaagacaagatgtttggtcgatcgttaatgaggctgcagccgcttcgcccgtacagcccatcgtgaatatgggtcagggtttctttggctacaaccctccagacttcatcctcaacgccgccaagtccgcccttgatcgcgtggaatgcaaccaatattccccgaccaagggcaggccgcggctgaagcaggccatatcggatgcctatgcccctttttggggtcgcaagctcaaccctgataccgaggtgactatcaccactggcgccaacgagggtatgctcagcgcctttatggcgtttatcgagcctggcgatgaagtcattatcttcgagccattttttgaccagtatatcagcaatatcgaaatgcccggaggcaagattgtctacgtgcccctgagcccgccggcagacggatccacgcggacatcttcctcggcagagtggacagttgactttgacaagctggagaaggccataacgcccaagacgaaaatgatcgtcatcaacacacctcataaccctgtcggcaaggtcttctccaaggaagagctcctacgtataggagaactttgcgtcaagaacgagattatcattctctctgacgaagtctatgatcgtcttttctatgtcccgttcacgaggatagcgactttgtctccggaaattgagaacctaacgttgacggttggctcggctggaaagaacttttatgctactggatggcgtgttggctggcttatggggcctccccatctcatccagtatgtttctgcggctcatacccgaatctgctactcctctgtatcgccattacaggaggcttgcgcaatcggtttcgaagaggccgacaaagaaggattctgggacaaggcagtagtcgacatgaaggccaagattacccgattcaacgagatctgggatgaactcggccttccatacacagacccagagggtggatacttcgtcatggtgaacatggccaaagtcaagcttccagcagactacccatttccaccgcacgtagctagcaggccccgtgactttaagctagcttggttcctcatccaggaagttggcgttgctgccatccctcctaccgagttttacaccgatccaaacgcttggatcgctgaggattacatgcgctttgctgtttgcaagccagatgaggttctggagactgcgaaagacaggctgagggggttgaagaagtatatagagtcatagagagattacttctaggtatgattcaaatgatagattcaagacagtgat

SEQ ID NO: 12735 - DNA, 1122 bp, Muscodor strobelii
  misc_feature: SGI cDNA ID NO. 564150
  misc_feature: Encodes the peptide sequence at SEQ ID NO 12736
atgacgattgctgtgaaaccccaaattgacagaagggaagcacgccatttgcagggccaggcttcaatatcgaaactccaatatcaccatcgcgactcttcaaccttaagcgcatcgcaccaacgatgccttacccacctgaccacccaacatgacgaccacggcccctccaccaaaaacacctatccccccctactcaacccccccctcctcctaacaatccgcttcagcgccgcgctcccggatctcgagctcgacatcccgcgtccagcctgcacaacagtcgtctccctcaaacacctaatccgcacacgtctcgagtcatcccactccaaaagacgtcttcgcttcatccacggcgggaaaatcctccccgacaccgcggttctctccaccgtcctacgcgcgctccccgcgcccccaccacgcggcccttcaaattcaaataccaaaccatcagacaaagattcgttagatattaggggtaaagatggctcctcaaaaggaaaacaagtccccggccgaccagagcccggtctcaggatctacataaactgcagcataggcgacgagctgacaccctccgaactcgaatccgaagccgtcgctgcttctctgcctccaccatctgccacacttccctctacgccgcgacgacccgggggtaatgggtcgggtctatcactcgatactgggactacgccggcgccgaggggcttcgatagattgcttagtgcgggattcacagcttcggaagtcaatcaactacggttgcagtttcggtctatacactctagtcggtatacaccggataccctgcctagtccggattcttttcgaagaatggaggactcttggattgacgataatggggcctcgatgcctacgtctaatactagcgaccctgccaatacctctggtgggttgataggcgggctgggaggcggcgggacagactccgatgaagtgggactcgtagctatggtcgatgtcctgatccgtggtgtaatcacgggtttcatatggcccttaggttccgcaggctggttgatgagagaggagggcatgagttccggccgctggcggtttatggttggtgtgggtgttgtgtttagtttttga

SEQ ID NO: 12736 - protein, 373 aa, Muscodor strobelii
  misc_feature: SGI Peptide ID NO. 564150
  misc_feature (72)..(373): NCBI GI: 39943842 Blast Desc: MGG_03932 [Magnaporthe grisea 70-15] gi|145014641|gb|EDJ99209.1| MGG_03932 [Magnaporthe grisea 70-15]
  misc_feature (66)..(372): NCBI GI: 154290432 Blast Desc: BC1G_15553 [Botryotinia fuckeliana B05.10] gi|150847724|gb|EDN22917.1| BC1G_15553 [Botryotinia fuckeliana B05.10]
  misc_feature (70)..(372): NCBI GI: 261357284 Blast Desc: conserved [Verticillium albo-atrum VaMs.102]
  misc_feature (69)..(373): NCBI GI: 256730732 Blast Desc: [Nectria haematococca mpVI 77-13-4]
  misc_feature (69)..(373): NCBI GI: 46109550 Blast Desc: FG01657.1 [Gibberella zeae PH-1]
  misc_feature (60)..(372): NCBI GI: 156030850 Blast Desc: SS1G_14364 [Sclerotinia sclerotiorum 1980] gi|154700755|gb|EDO00494.1| SS1G_14364 [Sclerotinia sclerotiorum 1980]
  misc_feature (53)..(373): NCBI GI: 169771537 Blast Desc: [Aspergillus oryzae RIB40] gi|83768097|dbj|BAE58236.1| protein product [Aspergillus oryzae]
  misc_feature (70)..(373): NCBI GI: 240105406 Blast Desc: CPC735_049690 [Coccidioides posadasii C735 delta SOWgp]
  misc_feature (64)..(372): NCBI GI: 169624822 Blast Desc: SNOG_15675 [Phaeosphaeria nodorum SN15] gi|160705246|gb|EAT77050.2| SNOG_15675 [Phaeosphaeria nodorum SN15]
  misc_feature (52)..(373): NCBI GI: 212542109 Blast Desc: conserved membrane protein, [Penicillium marneffei ATCC 18224] gi|210066116|gb|EEA20209.1| conserved membrane protein, [Penicillium marneffei ATCC 18224]
MTIAVKPQIDRREARHLQGQASISKLQYHHRDSSTLSASHQRCLTHLTTQHDDHGPSTKNTYPPLLNPPLLLTIRFSAALPDLELDIPRPACTTVVSLKHLIRTRLESSHSKRRLRFIHGGKILPDTAVLSTVLRALPAPPPRGPSNSNTKPSDKDSLDIRGKDGSSKGKQVPGRPEPGLRIYINCSIGDELTPSELESEAVAASLPPPSATLPSTPRRPGGNGSGLSLDTGTTPAPRGFDRLLSAGFTASEVNQLRLQFRSIHSSRYTPDTLPSPDSFRRMEDSWIDDNGASMPTSNTSDPANTSGGLIGGLGGGGTDSDEVGLVAMVDVLIRGVITGFIWPLGSAGWLMREEGMSSGRWRFMVGVGVVFSF

SEQ ID NO: 12737 - DNA, 3318 bp, Muscodor strobelii
  misc_feature: SGI cDNA ID NO. 564151
  misc_feature: Reduced expression when VOC is produced
  misc_feature: Encodes the peptide sequence at SEQ ID NO 12738
atggatgaccttttcgacgtcttcgacgaaaaacccggcgctaaagtcaaggtcgacactcaagaagtcgccgagtctccgtcctccaaaagcaacaagaaggaaaagaagaaagacaagaagagcaagaagcgcaaggccgacggtggcatcaaaaatggctccgacgcagccgtttcagctccctccgcccccgaggtcgacatggccgacatccagcccacatcgcctgaggacgacgctatggacgacgctgcctcggacaaccagggcgactccaagaggcgccgcaaggacgctgccgccgagcccgtcatgaccgacaccttcgagaccgccgagtccagagaggtcgccggcgctgcaggctttgccgacaccaaggacgagtcctctctcgtcctctcccacaacatccagcaccaggtcgccctcccgcctgacctcgactacgaatacgtgcccctctccgaacacaagcctcccgaaaaccctgcccgaacatggcccttccagctcgaccccttccagcgtctctccatctcctctatcgagcgagacgaaagcgtgctggtgtctgcccacacgagtgccggcaagaccgtggtcgccgaatacgccattgcacactgcttgaagaagaaccagcgtgtcatctacaccagtcccatcaaggctctcagcaaccagaaatacagagagttccacgaagcctttggcgacgtcggtctcatgacgggcgatgttaccatcaaccctaccgcctcttgtctcgttatgacgaccgagattctgcggtctatgttgtaccgtggctccgagatcatgcgtgaggtcgcttgggtcgtcttcgacgagattcactacatgcgtgataagatccgtggtgtagtctgggaggagaccatcattctcttgcccgacaaggtccgctacgtctttttatctgccaccattccgaatgccttccaattcgccgagtggattgccaagattcatcgtcaagcctgtcacgttgtgtacaccgacttcagacctactcctctacagaactacttcttccccgccggtggcaccggtatcttcctcgttgtagacgagaagggcgtcttccgagaggccagcttcaacaaaaccatgcagctgatcgaggaaaagaaggctgccgatgccgaagccgcagaatctaagcaaccaggtaagggcaaaaacaagaaggctacacaacggcaaaagcagagcgaggatcagcaagccgacatccagaggatcgtgaagatgattatgaagaaaagcttcaacccggttatcgtcttcagcttcagcaagagggagtgcgaggtcttggcggtgcacacttccaagtatgccttcaacgatgacagcgagaaagccatggtccgcaaagtattccagagtgccatagagtcgctttccgaagaggatcgtgaacttcctcagatccagaatatcctcccgctgcttgagaagggcattggcgttcatcactccggtcttcttccaattctcaaggaaacaattgagattctgttccaggagggattgatcaaggttcttttcgccaccgagaccttctccatcggcctgaacatgcccgccaagactgttgtgttcaccaaggttcagaagtgggatggcacgtctacgcgcccgctcacaccatctgagtacgttcaaatgtctgggcgcgctggtcgtcgaggtctcgacgagcgcggaattgttatcatgatggtcgatgacaaactcgaaccagaggttgccaagactattgtcgtaggtcagcaagatcatcttaactcggccttccatctcggctataacatggttctgaatctgctcagaattgaggcgatttctcccgacttcatgctggagaattgcttcttccaattccagaatgctgcaagcgtcgccggtcttgaacatgacttgatgcagatgcaaaaggagcgagatacaatgaccattcccgacgaggccatcgtcaaggattactggggcctgcgtcaacaaatcacaacctacaccaaggacatgttgactgtcattcaacatcccacacattgtcttgagttccttcagccgggacgcttgatccagattgcagatcccaagtctggcaaagacttcggctggggtgtcgtccttaatttcactaagcgtaaggagccgaagttcggagagaaggagtacgaaccacaggagtcctacttcattgacgtctttcttcgacttgaccctggctgcgatccatggggcccagctaactcctcggcggcgatgcctgctggtgcacggcccagtgaccccaatagtgcgagtatcttcgaagctgtcccgtgtatgctcacatgcatcaaagctctaagccagatccgcgttttcgtgcccaaagacgtgaagactaggtctgacgtcgaaggggcgcgtgaacagcttctgaaagctctgaaggaagtggagcggcgtttccccgacggactgcccctgttggaccctatcgagaacatgaacattacggacgactcgttcaaaaagcttctccgcaagattgaggtcttagagtctcgtctactctccaacccactgcacggctcgcctttactcccaggtctgtgggatcaatattcaaagaagattgatcgaaccgacgagatcaaggctctcaagaagaggattggcaaggctcattctatcgctcaactcgacgagttgaagtcgaggaagcgtgtactgcgtcgtcttggcttcatcaacgagggagaagtcgttcagatgaaggctcgcgttgcttgcgagatctcttcaaccgaaggccacgaactacttctttctgaactgctcttcaacagattcttcaatgagttatcgccagaactcgttgccgctatcctcagcgtcttcatcttcgaagagaaagtagaggcgactgcactcccggaggatctcgcaaagccgtatgcgcaagtccaggcccaggctcgtatcattgccaaggtcagccaggagagtaagctcgaggtcaacgaggacgagtacgttcagagtctgaagtggcagttgatggagaccgtgtatgcgtgggccaatggcaagccttttgtggacgtctgcaaaatgaccgacgcctacgaaggctccctaatccgtcttttccgtcgtctcgaagaactccttcgacagatggctcaagctgccaaagtgatgggcagcgaggatttacagaccaaattcgaggaaacgctgaccaagatccgccgtgacatcgtggctgcccagtctctttatttgtaa

SEQ ID NO: 12738 - protein, 1105 aa, Muscodor strobelii
  misc_feature: SGI Peptide ID NO. 564151
  misc_feature (174)..(326): Pfam Id: PF00270 Pfam Desc: DEAD/DEAH box helicase
  misc_feature (916)..(1105): Pfam Id: PF08148 Pfam Desc: DSHCT (NUC185) domain
  misc_feature (491)..(575): Pfam Id: PF00271 Pfam Desc: Helicase conserved C-terminal domain
  misc_feature (1)..(1105): NCBI GI: 46109548 Blast Desc: FG01656.1 [Gibberella zeae PH-1]
  misc_feature (1)..(1105): NCBI GI: 261357283 Blast Desc: ATP-dependent RNA helicase DOB1 [Verticillium albo-atrum VaMs.102]
  misc_feature (91)..(1105): NCBI GI: 85079176 Blast Desc: ATP-dependent RNA helicase DOB1 [Neurospora crassa OR74A] gi|28881140|emb|CAD70310.1| ATP dependent RNA helicase [Neurospora crassa] gi|28917356|gb|EAA27062.1| ATP-dependent RNA
  misc_feature (1)..(1105): NCBI GI: 171688888 Blast Desc: protein product [Podospora anserina] gi|170944406|emb|CAP70516.1| protein product [Podospora anserina]
  misc_feature (1)..(1105): NCBI GI: 39943840 Blast Desc: MGG_03931 [Magnaporthe grisea 70-15] gi|145014640|gb|EDJ99208.1| MGG_03931 [Magnaporthe grisea 70-15]
  misc_feature (1)..(1105): NCBI GI: 156059878 Blast Desc: SS1G_03952 [Sclerotinia sclerotiorum 1980] gi|154701738|gb|EDO01477.1| SS1G_03952 [Sclerotinia sclerotiorum 1980]
  misc_feature (1)..(1105): NCBI GI: 242766394 Blast Desc: ATP dependent RNA helicase (Dob1), [Talaromyces stipitatus ATCC 10500] gi|218724357|gb|EED23774.1| ATP dependent RNA helicase (Dob1), [Talaromyces stipitatus ATCC 10500]
  misc_feature (1)..(1105): NCBI GI: 212528460 Blast Desc: ATP dependent RNA helicase (Dob1), [Penicillium marneffei ATCC 18224] gi|210073785|gb|EEA27872.1| ATP dependent RNA helicase (Dob1), [Penicillium marneffei ATCC 18224]
  misc_feature (1)..(1105): NCBI GI: 238491802 Blast Desc: ATP dependent RNA helicase (Dob1), [Aspergillus flavus NRRL3357] gi|220697551|gb|EED53892.1| ATP dependent RNA helicase (Dob1), [Aspergillus flavus NRRL3357]
  misc_feature (1)..(1105): NCBI GI: 169773785 Blast Desc: [Aspergillus oryzae RIB40] gi|83769222|dbj|BAE59359.1| protein product [Aspergillus oryzae]
  misc_feature: Useful for introducing or modulating the production of volatile compounds
MDDLFDVFDEKPGAKVKVDTQEVAESPSSKSNKKEKKKDKKSKKRKADGGIKNGSDAAVSAPSAPEVDMADIQPTSPEDDAMDDAASDNQGDSKRRRKDAAAEPVMTDTFETAESREVAGAAGFADTKDESSLVLSHNIQHQVALPPDLDYEYVPLSEHKPPENPARTWPFQLDPFQRLSISSIERDESVLVSAHTSAGKTVVAEYAIAHCLKKNQRVIYTSPIKALSNQKYREFHEAFGDVGLMTGDVTINPTASCLVMTTEILRSMLYRGSEIMREVAWVVFDEIHYMRDKIRGVVWEETIILLPDKVRYVFLSATIPNAFQFAEWIAKIHRQACHVVYTDFRPTPLQNYFFPAGGTGIFLVVDEKGVFREASFNKTMQLIEEKKAADAEAAESKQPGKGKNKKATQRQKQSEDQQADIQRIVKMIMKKSFNPVIVFSFSKRECEVLAVHTSKYAFNDDSEKAMVRKVFQSAIESLSEEDRELPQIQNILPLLEKGIGVHHSGLLPILKETIEILFQEGLIKVLFATETFSIGLNMPAKTVVFTKVQKWDGTSTRPLTPSEYVQMSGRAGRRGLDERGIVIMMVDDKLEPEVAKTIVVGQQDHLNSAFHLGYNMVLNLLRIEAISPDFMLENCFFQFQNAASVAGLEHDLMQMQKERDTMTIPDEAIVKDYWGLRQQITTYTKDMLTVIQHPTHCLEFLQPGRLIQIADPKSGKDFGWGVVLNFTKRKEPKFGEKEYEPQESYFIDVFLRLDPGCDPWGPANSSAAMPAGARPSDPNSASIFEAVPCMLTCIKALSQIRVFVPKDVKTRSDVEGAREQLLKALKEVERRFPDGLPLLDPIENMNITDDSFKKLLRKIEVLESRLLSNPLHGSPLLPGLWDQYSKKIDRTDEIKALKKRIGKAHSIAQLDELKSRKRVLRRLGFINEGEVVQMKARVACEISSTEGHELLLSELLFNRFFNELSPELVAAILSVFIFEEKVEATALPEDLAKPYAQVQAQARIIAKVSQESKLEVNEDEYVQSLKWQLMETVYAWANGKPFVDVCKMTDAYEGSLIRLFRRLEELLRQMAQAAKVMGSEDLQTKFEETLTKIRRDIVAAQSLYL

SEQ ID NO: 12739 - DNA, 4056 bp, Muscodor strobelii
  misc_feature: SGI EST ID NO. CUFF.30262.0
  misc_feature: Variant of the nucleotide sequence at SEQ ID NO 12737
ggtgggtcttctggcgagggagcaaccccctgctcggtacgtagctgcagggaccaaaaacttcgatctcaccgcctggcctcgatccctgggtgacctattttggtggtgcagctatcttttttctgccacctcccaccttcccacctgcacctgtcgccgaagcacaatttctcctcacacatcagcacacacatccatacagacttatcacgggtgcgtagagctccgttgattgttacgatggatgaccttttcgacgtcttcgacgaaaaacccggcgctaaagtcaaggtcgacactcaagaagtcgccgagtctccgtcctccaaaagcaacaagaaggaaaagaagaaagacaagaagagcaagaagcgcaaggccgacggtggcatcaaaaatggctccgacgcagccgtttcagctccctccgcccccgaggtcgacatggccgacatccagcccacatcgcctgaggacgacgctatggacgacgctgcctcggacaaccagggcgactccaagaggcgccgcaaggacgctgccgccgagcccgtcatgaccgacaccttcgagaccgccgagtccagagaggtcgccggcgctgcaggctttgccgacaccaaggacgagtcctctctcgtcctctcccacaacatccagcaccaggtcgccctcccgcctgacctcgactacgaatacgtgcccctctccgaacacaagcctcccgaaaaccctgcccgaacatggcccttccagctcgaccccttccagcgtctctccatctcctctatcgagcgagacgaaagcgtgctggtgtctgcccacacgagtgccggcaagaccgtggtcgccgaatacgccattgcacactgcttgaagaagaaccagcgtgtcatctacaccagtcccatcaaggctctcagcaaccagaaatacagagagttccacgaagcctttggcgacgtcggtctcatgacgggcgatgttaccatcaaccctaccgcctcttgtctcgttatgacgaccgagattctgcggtctatgttgtaccgtggctccgagatcatgcgtgaggtcgcttgggtcgtcttcgacgagattcactacatgcgtgataagatccgtggtgtagtctgggaggagaccatcattctcttgcccgacaaggtccgctacgtctttttatctgccaccattccgaatgccttccaattcgccgagtggattgccaagattcatcgtcaagcctgtcacgttgtgtacaccgacttcagacctactcctctacagaactacttcttccccgccggtggcaccggtatcttcctcgttgtagacgagaagggcgtcttccgagaggccagcttcaacaaaaccatgcagctgatcgaggaaaagaaggctgccgatgccgaagccgcagaatctaagcaaccaggtaagggcaaaaacaagaaggctacacaacggcaaaagcagagcgaggatcagcaagccgacatccagaggatcgtgaagatgattatgaagaaaagcttcaacccggttatcgtcttcagcttcagcaagagggagtgcgaggtcttggcggtgcacacttccaagtatgccttcaacgatgacagcgagaaagccatggtccgcaaagtattccagagtgccatagagtcgctttccgaagaggatcgtgaacttcctcagatccagaatatcctcccgctgcttgagaagggcattggcgttcatcactccggtcttcttccaattctcaaggaaacaattgagattctgttccaggagggattgatcaaggttcttttcgccaccgagaccttctccatcggcctgaacatgcccgccaagactgttgtgttcaccaaggttcagaagtgggatggcacgtctacgcgcccgctcacaccatctgagtacgttcaaatgtctgggcgcgctggtcgtcgaggtctcgacgagcgcggaattgttatcatgatggtcgatgacaaactcgaaccagaggttgccaagactattgtcgtaggtcagcaagatcatcttaactcggccttccatctcggctataacatggttctgaatctgctcagaattgaggcgatttctcccgacttcatgctggagaattgcttcttccaattccagaatgctgcaagcgtcgccggtcttgaacatgacttgatgcagatgcaaaaggagcgagatacaatgaccattcccgacgaggccatcgtcaaggattactggggcctgcgtcaacaaatcacaacctacaccaaggacatgttgactgtcattcaacatcccacacattgtcttgagttccttcagccgggacgcttgatccagattgcagatcccaagtctggcaaagacttcggctggggtgtcgtccttaatttcactaagcgtaaggagccgaagttcggagagaaggagtacgaaccacaggagtcctacttcattgacgtctttcttcgacttgaccctggctgcgatccatggggcccagctaactcctcggcggcgatgcctgctggtgcacggcccagtgaccccaatagtgcgagtatcttcgaagctgtcccgtgtatgctcacatgcatcaaagctctaagccagatccgcgttttcgtgcccaaagacgtgaagactaggtctgacgtcgaaggggcgcgtgaacagcttctgaaagctctgaaggaagtggagcggcgtttccccgacggactgcccctgttggaccctatcgagaacatgaacattacggacgactcgttcaaaaagcttctccgcaagattgaggtcttagagtctcgtctactctccaacccactgcacggctcgcctttactcccaggtctgtgggatcaatattcaaagaagattgatcgaaccgacgagatcaaggctctcaagaagaggattggcaaggctcattctatcgctcaactcgacgagttgaagtcgaggaagcgtgtactgcgtcgtcttggcttcatcaacgagggagaagtcgttcagatgaaggctcgcgttgcttgcgagatctcttcaaccgaaggccacgaactacttctttctgaactgctcttcaacagattcttcaatgagttatcgccagaactcgttgccgctatcctcagcgtcttcatcttcgaagagaaagtagaggcgactgcactcccggaggatctcgcaaagccgtatgcgcaagtccaggcccaggctcgtatcattgccaaggtcagccaggagagtaagctcgaggtcaacgaggacgagtacgttcagagtctgaagtggcagttgatggagaccgtgtatgcgtgggccaatggcaagccttttgtggacgtctgcaaaatgaccgacgcctacgaaggctccctaatccgtcttttccgtcgtctcgaagaactccttcgacagatggctcaagctgccaaagtgatgggcagcgaggatttacagaccaaattcgaggaaacgctgaccaagatccgccgtgacatcgtggctgcccagtctctttatttgtaatatcggtccggagcatggcaggagatgtctgtgaccgaagtttgtgaacctgtgggcaagtgctcactccgtagcaggcttctcgcggctctcgactgttgactccatgggtatacggcgttaaggaggataccactacttctgcgtatagggattataaaaatttggcggggcgttacggcctggaatttgtgtatccagtctctaggtctagtcggtgcgttaggcacttcctttctcgtgtgaggtgtgataggtttttagagtgcgtcgtctgcactgattgcctagatagagaaaccgagcatcgctaccgttggtgatgctccaagccccctgcgtccctccaacctcagattttgattccgaataatcaacgtgacagcaactctcttaattatggagacgacgagccggatagtcttggagcatcaaatcttcatgatcattgaaaatcccatgggatcaactttgtagtagtgacttgacagtgaa

SEQ ID NO: 12740 - DNA, 405 bp, Muscodor strobelii
  misc_feature: SGI cDNA ID NO. 564152
  misc_feature: Encodes the peptide sequence at SEQ ID NO 12741
atgccattcatctttctgaggggagctctgaccaatagcagccatccaatacctcccgtcaaccgacgattatccgcctccgacctgtctcctcaacaccacattcgaccacatcgtcaacgtccaaccacgacctctccactccacctgaccaaacccgagatgtctcctcagcccatgttccgcgccagccagcgcatcacccaggccgtgagccgccgggccttccacgccactcgcgcccgtctgtcctcgccttaccattaccccgagggtccctactccaacttgccctttaacaccaagactcgcttcttcgccgtccgctactggctctactgcatcaccggtttcttcctgcctttcggcatcgctgtctggcaaaccaagaagcccaaggcttaa

SEQ ID NO: 12741 - protein, 134 aa, Muscodor strobelii
  misc_feature: SGI Peptide ID NO. 564152
  misc_feature (71)..(133): NCBI GI: 145607033 Blast Desc: MGG_03930 [Magnaporthe grisea 70-15] gi|145014639|gb|EDJ99207.1| MGG_03930 [Magnaporthe grisea 70-15]
  misc_feature (63)..(132): NCBI GI: 171688948 Blast Desc: protein product [Podospora anserina] gi|170944436|emb|CAP70547.1| protein product [Podospora anserina]
  misc_feature (62)..(133): NCBI GI: 14165222 Blast Desc: cytochrome-c oxidase chain VIIc-like protein [Ophiostoma ulmi]
  misc_feature (62)..(133): NCBI GI: 14165220 Blast Desc: cytochrome-c oxidase chain VIIc-like protein [Ophiostoma novo-ulmi]
  misc_feature (62)..(133): NCBI GI: 14269417 Blast Desc: cytochrome-c oxydase chain VIIc-like protein [Ophiostoma novo-ulmi]
  misc_feature (68)..(131): NCBI GI: 156059880 Blast Desc: SS1G_03953 [Sclerotinia sclerotiorum 1980] gi|154701739|gb|EDO01478.1| SS1G_03953 [Sclerotinia sclerotiorum 1980]
  misc_feature (71)..(134): NCBI GI: 85079940 Blast Desc: NCU03340 [Neurospora crassa OR74A] gi|25466188|pir||T51909 related to cytochrome-c oxidase chain VIIc [imported] - Neurospora crassa gi|28881179|emb|CAD70361.1|
  misc_feature (71)..(131): NCBI GI: 154292210 Blast Desc: cytochrome-c oxidase chain VIIc [Botryotinia fuckeliana B05.10] gi|150846208|gb|EDN21401.1| cytochrome-c oxidase chain VIIc [Botryotinia fuckeliana B05.10]
  misc_feature (69)..(132): NCBI GI: 116199859 Blast Desc: CHGG_08085 [Chaetomium globosum CBS 148.51] gi|88179364|gb|EAQ86832.1| CHGG_08085 [Chaetomium globosum CBS 148.51]
  misc_feature (55)..(133): NCBI GI: 189195842 Blast Desc: conserved [Pyrenophora tritici-repentis Pt-1C-BFP] gi|187980138|gb|EDU46764.1| conserved [Pyrenophora tritici-repentis Pt-1C-BFP]
MPFIFLRGALTNSSHPIPPVNRRLSASDLSPQHHIRPHRQRPTTTSPLHLTKPEMSPQPMFRASQRITQAVSRRAFHATRARLSSPYHYPEGPYSNLPFNTKTRFFAVRYWLYCITGFFLPFGIAVWQTKKPKA

SEQ ID NO: 12742 - DNA, 1049 bp, Muscodor strobelii
  misc_feature: SGI EST ID NO. CUFF.30332.1
  misc_feature: Variant of the nucleotide sequence at SEQ ID NO 12740
agaaacggaaagagaatatgtgcaagagtctcggtaacactccttatgcgacggtgccttaacacggcaaactttagagacggtgacccagtccaaacagaggtagaaacgagcacggatttggtcacgggtgaaggcactggaaagagcgttgttttcaaggaaatcctggaaggtatcgttagataccttaggtactaatactcgttaacaaaattgccatcatgatatggaacagacaccattctcagtctactatatgccattcatctttctgaggggagctctgaccaatagcagccatccaatacctcccgtcaaccgacgattatccgcctccgacctgtctcgtacgattgcccaaagcagcctagcctctaccaatccccaggtctaagcattcaatgattcaacctccgtcgttttgctccttcaagctcaacaccacattcgaccacatcgtcaacgtccaaccacgacctctccactccacctgaccaaacccgagatgtctcctcagcccatgttccgcgccagccagcgcatcacccaggccgtgagccgccgggccttccacgccactcgcgcccgtctgtcctcgccttaccattaccccgagggtccctactccaacttgccctttaacaccaagactcgcttcttcgccgtccgctactggctctactgcatcaccggtttcttcctgcctttcggcatcgctgtctggcaaaccaagaagcccaaggcttaagcgcaaagtcgagcggatccttgtacgagggaggaataggcatacacaagcattgcatcgatatctcagaaacggcaagctcctctcaacaaaagacaagatgggcgagaagcactgtgcaccaattgtacatataggaatactatagacggagaaggctatcgccgaaaccccaaacaacgattttatttgtccctgagctttgcaccgtggaatcaatgtgtttcgtgacaatactgataggatgtggaatagagtgctgaatcttcatgacataattcggtgcacgtcactacag

SEQ ID NO: 12743 - DNA, 1851 bp, Muscodor strobelii
  misc_feature: SGI cDNA ID NO. 564153
  misc_feature: Reduced expression when VOC is produced
  misc_feature: Encodes the peptide sequence at SEQ ID NO 12744
atgaacatctccagaattgacgggtcgagatacggcgcggtactcttgagccagccctccgctgctaccactaccgccttctcgcgggccacccgaccaccacgccgcagcttcattgctcatgctgttcccgctcttctcgctgccggctgcggcccatctgcaccctggctgtcaccacatcacaagactcgccgggacctcccagcctctcgaagcttttgtgcggccgtagccccggcttcaagcccaattccgagctctaattacttcacctcgcacatcccaacagctcggagttggaaccacactgcagtcgcttctacggaaccatctgcccagagtacatcgtcggactcttcgagatttgggaagagagagatagtcgtgcagcgaaaagaagatgtgctggattttgtcgaccaatacgacgacgagatcaacgtcgatgagcacttctcattttacaaagacccctacagaagcggctatgcccagcccgatggcccggttctcgccgtatcaaacagaaaggaagaccttgagatcctggcaatcgatggcgacagagagaactggcaggagagattcaaggcgggagagaaactgcgacgggcccttgatcgcagacaacgctatcgtcataagatttctctggacaagatatgggatctctatcaggaactcccagaacccaggatcgctcatatttcccctcgagtgcgtcatcagctaatggctgcgctggggtctgttgagcgcaaggaccagaaatccatgcttcgctattttgccgctgtggccgatattaagaacagtggcttttccttggcgcattttgaatggaacacggccgtgtcctttgcgagtcgatacgtcgccgtgaccacagaaacggaggttggagcagctcttcagctctggcgtgagatggagaagtcctccaatgtaaaagcaaccgatgtgacattcaatatcctttttgacgccgcctcaaaggccggcaagttcgacctcggcgaggctatatatcaggaaatgggtacccgtggctttgtgtacaaccgataccatcacgtcagcctgattcattttttcggactcaagcgagattccgcaggcgttagggcggcatatagagagatgatcaacaacggcgagattatcgatacggtcgtcttgaactgtgtcattgccagctttattcgttgcggagaggaagcatcggccgagcgcgtgtacgagaagatgaaggccgctaaccaagaccttcctacaatcccacatcggaattattcacttcagaaggccatgaccaaaacgctcatgatgttcgcgcgtattggaaaggagcacccgaccatgcgtacccagtttcagaagacagctctgctgtcaccagatttgcgcacataccgtatactcattaatcattacgggttgaagcttggtgacctttccaaggtggcccagtatctcgacgagatgagacattacaaagtccccatccacggatccatatttcttgccctgtttcaatcattcgcccggcacggtgggcctggatcagattggagtcggcaaagactgaacggagtctgggacgcatttctagacgcagtcgactccgaagccgacggcctacacataagcacgtggttggccatggcggctctacaatcccatgcgaagtacgctactaaaaacgacatgttggacgtctatgaatccctccggacgaggtgggaccttgacccgactaattcgcagtatatgctagatttgttgcgtaaaattcttacgaagacaggcttacatactggttcttggcgggagtctctagtgatgtga

SEQ ID NO: 12744 - protein, 616 aa, Muscodor strobelii
  misc_feature: SGI Peptide ID NO. 564153
  misc_feature (322)..(356): Pfam Id: PF01535 Pfam Desc: PPR repeat
  misc_feature (45)..(605): NCBI GI: 145607031 Blast Desc: MGG_03929 [Magnaporthe grisea 70-15] gi|145014638|gb|EDJ99206.1| MGG_03929 [Magnaporthe grisea 70-15]
  misc_feature (144)..(610): NCBI GI: 46109544 Blast Desc: FG01654.1 [Gibberella zeae PH-1]
  misc_feature (129)..(614): NCBI GI: 261357281 Blast Desc: pentatricopeptide repeat protein [Verticillium albo-atrum VaMs.102]
  misc_feature (131)..(610): NCBI GI: 256730520 Blast Desc: NECHADRAFT_89656 [Nectria haematococca mpVI 77-13-4]
  misc_feature (229)..(602): NCBI GI: 116199851 Blast Desc: CHGG_08081 [Chaetomium globosum CBS 148.51] gi|88179360|gb|EAQ86828.1| CHGG_08081 [Chaetomium globosum CBS 148.51]
  misc_feature (1)..(582): NCBI GI: 171688982 Blast Desc: protein product [Podospora anserina] gi|170944453|emb|CAP70564.1| protein product [Podospora anserina]
  misc_feature (133)..(551): NCBI GI: 85079947 Blast Desc: NCU03342 [Neurospora crassa OR74A] gi|25465812|pir||T51912 B23I11.240 [imported] - Neurospora crassa gi|28881181|emb|CAD70363.1| conserved [Neurospora crassa] crassa
  misc_feature (70)..(604): NCBI GI: 154315976 Blast Desc: BC1G_04560 [Botryotinia fuckeliana B05.10] gi|150846956|gb|EDN22149.1| BC1G_04560 [Botryotinia fuckeliana B05.10]
  misc_feature (84)..(604): NCBI GI: 156059836 Blast Desc: SS1G_03931 [Sclerotinia sclerotiorum 1980] gi|154701717|gb|EDO01456.1| SS1G_03931 [Sclerotinia sclerotiorum 1980]
  misc_feature (186)..(608): NCBI GI: 189195638 Blast Desc: pentatricopeptide repeat protein [Pyrenophora tritici-repentis Pt-1C-BFP] gi|187980036|gb|EDU46662.1| pentatricopeptide repeat protein [Pyrenophora tritici-repentis
  misc_feature: Useful for introducing or modulating the production of volatile compounds
MNISRIDGSRYGAVLLSQPSAATTTAFSRATRPPRRSFIAHAVPALLAAGCGPSAPWLSPHHKTRRDLPASRSFCAAVAPASSPIPSSNYFTSHIPTARSWNHTAVASTEPSAQSTSSDSSRFGKREIVVQRKEDVLDFVDQYDDEINVDEHFSFYKDPYRSGYAQPDGPVLAVSNRKEDLEILAIDGDRENWQERFKAGEKLRRALDRRQRYRHKISLDKIWDLYQELPEPRIAHISPRVRHQLMAALGSVERKDQKSMLRYFAAVADIKNSGFSLAHFEWNTAVSFASRYVAVTTETEVGAALQLWREMEKSSNVKATDVTFNILFDAASKAGKFDLGEAIYQEMGTRGFVYNRYHHVSLIHFFGLKRDSAGVRAAYREMINNGEIIDTVVLNCVIASFIRCGEEASAERVYEKMKAANQDLPTIPHRNYSLQKAMTKTLMMFARIGKEHPTMRTQFQKTALLSPDLRTYRILINHYGLKLGDLSKVAQYLDEMRHYKVPIHGSIFLALFQSFARHGGPGSDWSRQRLNGVWDAFLDAVDSEADGLHISTWLAMAALQSHAKYATKNDMLDVYESLRTRWDLDPTNSQYMLDLLRKILTKTGLHTGSWRESLVM

SEQ ID NO: 12745 - DNA, 2120 bp, Muscodor strobelii
  misc_feature: SGI EST ID NO. CUFF.30274.0
  misc_feature: Variant of the nucleotide sequence at SEQ ID NO 12743
cgacgccaacatttttctcggagccacatgcaatccgtcgccgactattgtatctgcactttccagagtcaagctgtgatgacggaaccaccatgcgggacggctcatgaacatctccagaattgacgggtcgagatacggcgcggtactcttgagccagccctccgctgctaccactaccgccttctcgcgggccacccgaccaccacgccgcagcttcattgctcatgctgttcccgctcttctcgctgccggctgcggcccatctgcaccctggctgtcaccacatcacaagactcgccgggacctcccagcctctcgaagcttttgtgcggccgtagccccggcttcaagcccaattccgagctctaattacttcacctcgcacatcccaacagctcggagttggaaccacactgcagtcgcttctacggaaccatctgcccagagtacatcgtcggactcttcgagatttgggaagagagagatagtcgtgcagcgaaaagaagatgtgctggattttgtcgaccaatacgacgacgagatcaacgtcgatgagcacttctcattttacaaagacccctacagaagcggctatgcccagcccgatggcccggttctcgccgtatcaaacagaaaggaagaccttgagatcctggcaatcgatggcgacagagagaactggcaggagagattcaaggcgggagagaaactgcgacgggcccttgatcgcagacaacgctatcgtcataagatttctctggacaagatatgggatctctatcaggaactcccagaacccaggatcgctcatatttcccctcgagtgcgtcatcagctaatggctgcgctggggtctgttgagcgcaaggaccagaaatccatgcttcgctattttgccgctgtggccgatattaagaacagtggcttttccttggcgcattttgaatggaacacggccgtgtcctttgcgagtcgatacgtcgccgtgaccacagaaacggaggttggagcagctcttcagctctggcgtgagatggagaagtcctccaatgtaaaagcaaccgatgtgacattcaatatcctttttgacgccgcctcaaaggccggcaagttcgacctcggcgaggctatatatcaggaaatgggtacccgtggctttgtgtacaaccgataccatcacgtcagcctgattcattttttcggactcaagcgagattccgcaggcgttagggcggcatatagagagatgatcaacaacggcgagattatcgatacggtcgtcttgaactgtgtcattgccagctttattcgttgcggagaggaagcatcggccgagcgcgtgtacgagaagatgaaggccgctaaccaagaccttcctacaatcccacatcggaattattcacttcagaaggccatgaccaaaacgctcatgatgttcgcgcgtattggaaaggagcacccgaccatgcgtacccagtttcagaagacagctctgctgtcaccagatttgcgcacataccgtatactcattaatcattacgggttgaagcttggtgacctttccaaggtggcccagtatctcgacgagatgagacattacaaagtccccatccacggatccatatttcttgccctgtttcaatcattcgcccggcacggtgggcctggatcagattggagtcggcaaagactgaacggagtctgggacgcatttctagacgcagtcgactccgaagccgacggcctacacataagcacgtggttggccatggcggctctacaatcccatgcgaagtacgctactaaaaacgacatgttggacgtctatgaatccctccggacgaggtgggaccttgacccgactaattcgcagtatatgctagatttgttgcgtaaaattcttacgaagacaggcttacatactggttcttggcgggagtctctagtgatgtgatgtagcatagggatcatggagtttggggaatgacatatagacacacatatatttgtaccatcattgtaacgtggtgggctcatatggcctgcatcgaaagaagataagatataggagctctctattgtatatactcaattaatcgaaaacaatctgaacaaca

SEQ ID NO: 12746 - DNA, 756 bp, Muscodor strobelii
  misc_feature: SGI cDNA ID NO. 564154
  misc_feature: Reduced expression when VOC is produced
  misc_feature: Encodes the peptide sequence at SEQ ID NO 12747
atgaccggcctgcgacagacacggccgggtcgggtctaccagacagcaacgcagctcctcgatcatagaataagatcccatctcaaagtccagaaacccgtatggtacaatgccgtcgaatccataccgccctccgagatgctcactcgccctctccctccacagcacaaagctcccaactccaggacaagaaagccgagccggttattccaaccccagcacttggtctacgaggaggatgctctgagaaggaatttctataaagaccacccttgggagcttgcgcgcccgaggatgatcgtcgagatggatggccgagacgctgagcattacgactggtctaagggcttgaggcagcccggcatgcctctgtgtggagagagcgtcgtacaaagacaattatggatgatgcacaacgtcgcgggcataacccaagcacaggcctacgatattgtgcgccgcgaattctacgagctgcgccagcaagaagacatcgagcgccgtatcgccaaggaggaagccatgcacgtcggctcctactttggcaagaccttcactcagatcggtgtcgagctcgaaggcaagcagttcgacagctggcggaagtgggccggcaaacagatcgatctcgtccgcagcgaggaagacgctgcgtatacaaactttggagagaccgaggagggcgacggagaggaggaggccggattcgaggcagaggaaattcaagccgaggaggcacagacgccaaaacagtag

SEQ ID NO: 12747 - protein, 251 aa, Muscodor strobelii
  misc_feature: SGI Peptide ID NO. 564154
  misc_feature (3)..(223): NCBI GI: 256730730 Blast Desc: NECHADRAFT_102941 [Nectria haematococca mpVI 77-13-4]
  misc_feature (5)..(240): NCBI GI: 261357280 Blast Desc: 37S ribosomal protein Rsm25 [Verticillium albo-atrum VaMs.102]
  misc_feature (5)..(223): NCBI GI: 39943834 Blast Desc: MGG_03928 [Magnaporthe grisea 70-15] gi|193806460|sp|A4R4J0.1|RT25_MAGGR RecName: Full=37S ribosomal protein S25, mitochondrial gi|145014637|gb|EDJ99205.1| MGG_03928
  misc_feature (10)..(221): NCBI GI: 85079951 Blast Desc: NCU03343 [Neurospora crassa OR74A] gi|28917517|gb|EAA27216.1| conserved [Neurospora crassa OR74A]
  misc_feature (10)..(221): NCBI GI: 74619996 Blast Desc: RT25_NEUCR RecName: Full=37S ribosomal protein S25, mitochondrial gi|25369344|pir||T51913 B23I11.250 [imported] - Neurospora crassa gi|28881182|emb|CAD70364.1| conserved crassa]
  misc_feature (10)..(234): NCBI GI: 171688984 Blast Desc: protein product [Podospora anserina] gi|170944454|emb|CAP70565.1| protein product [Podospora anserina]
  misc_feature (1)..(225): NCBI GI: 116199853 Blast Desc: CHGG_08082 [Chaetomium globosum CBS 148.51] gi|121780258|sp|Q2GVC2.1|RT25_CHAGB RecName: Full=37S ribosomal protein S25, mitochondrial gi|88179361|gb|EAQ86829.1| CHGG_08082
  misc_feature (3)..(249): NCBI GI: 46109542 Blast Desc: FG01653.1 [Gibberella zeae PH-1]
  misc_feature (31)..(236): NCBI GI: 258566153 Blast Desc: conserved [Uncinocarpus reesii 1704] gi|237907522|gb|EEP81923.1| conserved [Uncinocarpus reesii 1704]
  misc_feature (8)..(230): NCBI GI: 189195636 Blast Desc: 37S ribosomal protein Rsm25 [Pyrenophora tritici-repentis Pt-1C-BFP] gi|187980035|gb|EDU46661.1| 37S ribosomal protein Rsm25 [Pyrenophora tritici-repentis Pt-1C-BFP]
  misc_feature: Useful for introducing or modulating the production of volatile compounds
MTGLRQTRPGRVYQTATQLLDHRIRSHLKVQKPVWYNAVESIPPSEMLTRPLPPQHKAPNSRTRKPSRLFQPQHLVYEEDALRRNFYKDHPWELARPRMIVEMDGRDAEHYDWSKGLRQPGMPLCGESVVQRQLWMMHNVAGITQAQAYDIVRREFYELRQQEDIERRIAKEEAMHVGSYFGKTFTQIGVELEGKQFDSWRKWAGKQIDLVRSEEDAAYTNFGETEEGDGEEEAGFEAEEIQAEEAQTPKQ

SEQ ID NO: 12748 - DNA, 2069 bp, Muscodor strobelii
  misc_feature: SGI EST ID NO. CUFF.30294.0
  misc_feature: Variant of the nucleotide sequence at SEQ ID NO 12746
cggctggctatcactatcaattcccgtcagttcagtcgacgttctcagattttatatccgcgttttaggccgtcgaccgacgactgagtcgatccgcatcacgacaccagcgcttcctcgccagcctcgaaggaccgaactcttcacccacgatcccttgactatcgagtctctgttcgtcacccgtattggggtcccgtcatcgccatgaccggcctgcgacagacacggccgggtcgggtctaccagacagcaacgcagctcctcgatcatagaataagatcccatctcaaagtccagaaacccgtatggtacaatgccgtcgaatccataccgccctccgagatgctcactcgccctctccctccacagcacaaagctcccaactccaggacaagaaagccgagccggttattccaaccccagcacttggtctacgaggaggatgctctgagaaggaatttctataaagaccacccttgggagcttgcgcgcccgaggatgatcgtcgagatggatggccgagacgctgagcattacgactggtctaagggcttgaggcagcccggcatgcctctgtgtggagagagcgtcgtacaaagacaattatggatgatgcacaacgtcgcgggcataacccaagcacaggcctacgatattgtgcgccgcgaattctacgagctgcgccagcaagaagacatcgagcgccgtatcgccaaggaggaagccatgcacgtcggctcctactttggcaagaccttcactcagatcggtgtcgagctcgaaggcaagcagttcgacagctggcggaagtgggccggcaaacagatcgatctcgtccgcagcgaggaagacgctgcgtatacaaactttggagagaccgaggagggcgacggagaggaggaggccggattcgaggcagaggaaattcaagccgaggaggcacagacgccaaaacagtagatgcaagaagcgctgtattgcaaataaatgtagaactaattgtacaaacatgctacatgtgtataccatccaaaacgccttcgccaaaacaccctcctggaaaattgttgaatatgatgggctccggaaatgctggtctgatgtgctgatagtccgttgtaaatgcaataatgatttcgttttaccaattactctctcatacggttggaagcgcaatagttgacatttgacaattgacaattcggtcatgttcttgatggtaaaagttggtctagttgatgtatgcggatcgtatatgctcgtctctgaagagattggatgattagtcaagccgctcacaatatcaaagatattcccaaaacatacaacgtcctggagcttcttcgcatcggcctcattcgaaacccggccaatgactctgtccaagaattcgcaagcttcgctgtaatatctccgcgcaccatcgtgatattgtgcttggtccagctgcactgctgttcgagctctcgctagggcggcggagagggtcgccttggacgacattggcatgtccatggctacttttaaatcagggtaaccgagctccgttcaagtcgtcgctattctctgcgttttactccccttaaccattcgttgagataaacacaagctcgaatacttaaaagttaaaaggcatgaagaattgctttgtgcttcatgatagagattacagtaacgtaggagtcgaattgatcctgagtggggagctcacagacacaaacacacacatattatgtgtcgtgtcgcaagatcccttgctccaagagacgaacagcttcgtgccataggtcgcttgtttgatcaagcgcggctatgcgtcaatgcctgatctccagcattgatcgatcatccgttgcaccacgaggcgagggagacgatcatgtaacggctagaatagttgtcataccctcgtcctcctctcaaaacatttgatctgggacggggtaatctaagcttcagggttcattgagaatccaagaagtgatgttctcgccggcgtcagatggtgaaacaaacgtcatctaacctggtacactttccgactacatgtatatatcaaaaacgac

SEQ ID NO: 12749 - DNA, 249 bp, Muscodor strobelii
  misc_feature: SGI cDNA ID NO. 564155
  misc_feature: Encodes the peptide sequence at SEQ ID NO 12750
atggacatgccaatgtcgtccaaggcgaccctctccgccgccctagcgagagctcgaacagcagtgcagctggaccaagcacaatatcacgatggtgcgcggagatattacagcgaagcttgcgaattcttggacagagtcattggccgggtttcgaatgaggccgatgcgaagaagctccaggacgttagacgagcatatacgatccgcatacatcaactagaccaacttttaccatcaagaacatga

SEQ ID NO: 12750 - protein, 82 aa, Muscodor strobelii
  misc_feature: SGI Peptide ID NO. 564155
  misc_feature (10)..(78): Pfam Id: PF04212 Pfam Desc: MIT (microtubule interacting and transport) domain
  misc_feature (4)..(79): NCBI GI: 256726243 Blast Desc: NECHADRAFT_104843 [Nectria haematococca mpVI 77-13-4]
  misc_feature (4)..(79): NCBI GI: 46111563 Blast Desc: FG02663.1 [Gibberella zeae PH-1]
  misc_feature (6)..(79): NCBI GI: 154310104 Blast Desc: BC1G_06972 [Botryotinia fuckeliana B05.10] gi|150851533|gb|EDN26726.1| BC1G_06972 [Botryotinia fuckeliana B05.10]
  misc_feature (8)..(78): NCBI GI: 85089812 Blast Desc: NCU05926 [Neurospora crassa OR74A] gi|28919446|gb|EAA28885.1| [Neurospora crassa OR74A]
  misc_feature (11)..(79): NCBI GI: 156043189 Blast Desc: SS1G_10597 [Sclerotinia sclerotiorum 1980] gi|154694985|gb|EDN94723.1| SS1G_10597 [Sclerotinia sclerotiorum 1980]
  misc_feature (4)..(63): NCBI GI: 116201379 Blast Desc: CHGG_08574 [Chaetomium globosum CBS 148.51] gi|88177092|gb|EAQ84560.1| CHGG_08574 [Chaetomium globosum CBS 148.51]
  misc_feature (6)..(77): NCBI GI: 115386002 Blast Desc: [Aspergillus terreus NIH2624] gi|114190540|gb|EAU32240.1| [Aspergillus terreus NIH2624]
  misc_feature (6)..(77): NCBI GI: 238493927 Blast Desc: conserved [Aspergillus flavus NRRL3357] gi|220696694|gb|EED53036.1| conserved [Aspergillus flavus NRRL3357]
  misc_feature (6)..(77): NCBI GI: 169784082 Blast Desc: [Aspergillus oryzae RIB40] gi|83775247|dbj|BAE65370.1| protein product [Aspergillus oryzae]
  misc_feature (6)..(81): NCBI GI: 212532555 Blast Desc: conserved [Penicillium marneffei ATCC 18224] gi|210071798|gb|EEA25887.1| conserved [Penicillium marneffei ATCC 18224]
MDMPMSSKATLSAALARARTAVQLDQAQYHDGARRYYSEACEFLDRVIGRVSNEADAKKLQDVRRAYTIRIHQLDQLLPSRT

SEQ ID NO: 12751 - DNA, 2072 bp, Muscodor strobelii
  misc_feature: SGI EST ID NO. CUFF.30295.1
  misc_feature: Variant of the nucleotide sequence at SEQ ID NO 12749
gtcgtttttgatatatacatgtagtcggaaagtgtaccaggttagatgacgtttgtttcaccatctgacgccggcgagaacatcacttcttggattctcaatgaaccctgaagcttagattaccccgtcccagatcaaatgttttgagaggaggacgagggtatgacaactattctagccgttacatgatcgtctccctcgcctcgtggtgcaacggatgatcgatcaatgctggagatcaggcattgacgcatagccgcgcttgatcaaacaagcgacctatggcacgaagctgttcgtctcttggagcaagggatcttgcgacacgacacataatatgtgtgtgtttgtgtctgtgagctccccactcaggatcaattcgactcctacgttactgtaatctctatcatgaagcacaaagcaattcttcatgccttttaacttttaagtattcgagcttgtgtttatctcaacgaatggttaaggggagtaaaacgcagagaatagcgacgacttgaacggagctcggttaccctgatttaaaagtagccatggacatgccaatgtcgtccaaggcgaccctctccgccgccctagcgagagctcgaacagcagtgcagctggaccaagcacaatatcacgatggtgcgcggagatattacagcgaagcttgcgaattcttggacagagtcattggccgggtttcgaatgaggccgatgcgaagaagctccaggacgttagacgagcatatacgatccgcatacatcaactagaccaacttttaccatcaagaacatgaccgaattgtcaattgtcaaatgtcaactattgcgcttccaaccgtatgagagagtaattggtaaaacgaaatcattattgcatttacaacggactatcagcacatcagaccagcatttccggagcccatcatattcaacaattttccaggagggtgttttggcgaaggcgttttggatggtatacacatgtagcatgtttgtacaattagttctacatttatttgcaatacagcgcttcttgcatctactgttttggcgtctgtgcctcctcggcttgaatttcctctgcctcgaatccggcctcctcctctccgtcgccctcctcggtctctccaaagtttgtatacgcagcgtcttcctcgctgcggacgagatcgatctgtttgccggcccacttccgccagctgtcgaactgcttgccttcgagctcgacaccgatctgagtgaaggtcttgccaaagtaggagccgacgtgcatggcttcctccttggcgatacggcgctcgatgtcttcttgctggcgcagctcgtagaattcgcggcgcacaatatcgtaggcctgtgcttgggttatgcccgcgacgttgtgcatcatccataattgtctttgtacgacgctgcgatattgctattagctcaacatgatcttgataacaaaaatcgtgttcgaattggacctacctctctccacacagaggcatgccgggctgcctcaagcccttagaccagtcgtaatgctcagcgtctcggccatccatctcgacgatcatcctcgggcgcgcaagctcccaagggtggtctttatagaaattccttctcagagcatcctcctcgtagaccaagtgctggggttggaataaccggctcggctttcttgtcctggagttgggagctttgtgctgtggagggagagggcgagtgagcatctcggagggcggtatggattcgacggcattgtaccatacgggtttctggactttgagatgggatcttattctatgatcgaggagctgcgttgctgtctggtagacccgacccggccgtgtctgtcgcaggccggtcatggcgatgacgggaccccaatacgggtgacgaacagagactcgatagtcaagggatcgtgggtgaagagttcggtccttcgaggctggcgaggaagcgctggtgtcgtgatgcggatcgactcagtcgtcggtcgacggcctaaaacgcggatataaaatctgagaacgtcgactgaactgacgggaattgatagtgatagccagccg

SEQ ID NO: 12752 - DNA, 714 bp, Muscodor strobelii
  misc_feature: SGI cDNA ID NO. 564157
  misc_feature: Encodes the peptide sequence at SEQ ID NO 12753
atggaacttcttggtgcgatcgcaagtggcgtcacccttgttgcattgttcaaacacactctcaaagccttggaacttatccgtctttaccagacccacgacgatgatttcaacaagcttcaattagatttcaaaatgcagaaatcccgattatacagttggggcatagccttagaactcaccactggtccttcgactcaaacccttctcagcggctggcattcggaagcccttgctaggcaatgcctcgaacgaattattcgtagttccagcgaagctcgtaagattatcgacgaatacgacaactcggagatatcgccgacaacgcttcctcaaatcgagcaactacagttgcacaccaatactcttaccaacactactctagcccccaaacccgcagagaaaccaccgagcgcgattcagaaaatcaagtgggctattcaagaccgcaagaaagtcatgatcatactcaaggaggtcacagctctaatggatagtctcgaagggctcactcaggagctgctcgagacagcgagactaaacaagatgctgaaaacaagacctgtcttgaaactcaaaatcgacaccattttcaaggttgtgaaggcgttgaggttggggcccccagcctcattcatttctagtgtcgacgcagagaagacgctgatcgacgaggcgcgagaaaccccaagatacatcagctcaggtcgatag

SEQ ID NO: 12753 - protein, 237 aa, Muscodor strobelii
  misc_feature: SGI Peptide ID NO. 564157
  misc_feature (2)..(173): NCBI GI: 46138171 Blast Desc: FG10600.1 [Gibberella zeae PH-1]
  misc_feature (2)..(168): NCBI GI: 256728996 Blast Desc: NECHADRAFT_79833 [Nectria haematococca mpVI 77-13-4]
  misc_feature (2)..(197): NCBI GI: 256733801 Blast Desc: NECHADRAFT_99486 [Nectria haematococca mpVI 77-13-4]
  misc_feature (2)..(167): NCBI GI: 238839504 Blast Desc: kinesin light chain [Microsporum canis CBS 113480]
  misc_feature (2)..(168): NCBI GI: 234864 Blast Desc: s gene 30 kDa polypeptide [Podospora anserina=fungus, Peptide, 289 aa]
  misc_feature (2)..(168): NCBI GI: 2739337 Blast Desc: small s protein [Podospora anserina]
  misc_feature (2)..(168): NCBI GI: 256724752 Blast Desc: NECHADRAFT_48298 [Nectria haematococca mpVI 77-13-4]
  misc_feature (16)..(168): NCBI GI: 46127535 Blast Desc: FG08145.1 [Gibberella zeae PH-1]
MELLGAIASGVTLVALFKHTLKALELIRLYQTHDDDFNKLQLDFKMQKSRLYSWGIALELTTGPSTQTLLSGWHSEALARQCLERIIRSSSEARKIIDEYDNSEISPTTLPQIEQLQLHTNTLTNTTLAPKPAEKPPSAIQKIKWAIQDRKKVMIILKEVTALMDSLEGLTQELLETARLNKMLKTRPVLKLKIDTIFKVVKALRLGPPASFISSVDAEKTLIDEARETPRYISSGR

SEQ ID NO: 12754 - DNA, 1285 bp, Muscodor strobelii
  misc_feature: SGI EST ID NO. CUFF.30289.0
  misc_feature: Variant of the nucleotide sequence at SEQ ID NO 12752
ctacgtcatcccaggaaaccgtttgaaatttgattcagggaggaactcgatggtctagaacaccacaggcactgagtctcgagctcatttggcgtttttgggggctgttatgacgtcgagtcttaatgctcccagtcgctgccaatctcgtgaacccatttttatgtccagtacccatgccaccgcgctcttgctccttgaacaacaacacctgaacgtatatttaaatgggcactgcagccgtcctggtagagtcatgtttctgaatcattctcactatcctctccattatggaacttcttggtgcgatcgcaagtggcgtcacccttgttgcattgttcaaacacactctcaaagccttggaacttatccgtctttaccagacccacgacgatgatttcaacaagcttcaattagatttcaaaatgcagaaatcccgattatacagttggggcatagccttagaactcaccactggtccttcgactcaaacccttctcagcggctggcattcggaagcccttgctaggcaatgcctcgaacgaattattcgtagttccagcgaagctcgtaagattatcgacgaatacgacaactcggagatatcgccgacaacgcttcctcaaatcgagcaactacagttgcacaccaatactcttaccaacactactctagcccccaaacccgcagagaaaccaccgagcgcgattcagaaaatcaagtgggctattcaagaccgcaagaaagtcatgatcatactcaaggaggtcacagctctaatggatagtctcgaagggctcactcaggagctgctcgagacagcgagactaaacaagatgctgaaaacaagacctgtcttgaaactcaaaatcgacaccattttcaaggttgtgaaggcgttgaggttggggcccccagcctcattcatttctagtgtcgacgcagagaagacgctgatcgacgaggcgcgagaaaccccaagatacatcagctcaggtcgatagcgacgagggcgcctgctagactagacgcccactgcgaaacacatcgatgtgcccctcacagaccctcaaagaaatggtcccgtggttgaccgaagggatgcctgagctcgaaactccatccaacagcgataacgacgaggtcagcaatcggtgcggagctcacccttgtaatcatcatttgcctacgctttgcatgtcaacattcgtatttactcaaagtgctctgttcatttcgacaagggcttaatagtctctaaatatttcgtattcggatgactcgc

SEQ ID NO: 12755 - DNA, 1662 bp, Muscodor strobelii
  misc_feature: SGI cDNA ID NO. 564158
  misc_feature: Reduced expression when VOC is produced
  misc_feature: Encodes the peptide sequence at SEQ ID NO 12756
atggctacacttgacgtcgaggcattgctcgatgccaccgcaggcaaaaacgacgaccaggcccagtcccgtgactccatcgaccgtgacagatccgatcgcaacgatggcagaaacggctccgaccgtggacgccgcgaccgcacccctaggaggcgtgatcgtagctctgaccgtggacgacgtgacaggccagatgacagagaagctacaccgcgcagtgacgcaggtagccacaagagtaggcgtagaagtcggagccgtgatgatgatcgtcgacactcacgccgtcacagaggaggcgacggcgactactaccgcaatggccgaggcggtcgagaccgctctcgctcccgctcccctcgtcgtcactaccgtcccagagacgaccagcgtgacgaccgcggcggctaccgacacagagacgaagaacgccatcgcggtggccgcactcccaagcgtgatgccacgcccccgcccaccgaggacgagcgcgatcgccgcacggtctttgtccagcagttggcagcccgcttgagaaccaaagagttaaaagaattcttcgaaaaagtcggccccgtcaacgaggcacagattgtgaaagacaggattagcggtagatccaagggagtcggctacgttgaattcaaaaatgaagactctgtcacttctgcgcttcagctcaccggccaaaagctactaggaattcctgtcattgtccagcttaccgaagctgagaagaatcgccaagtgcgcaacaccgatggctcagcccagggtaactcagtgcctttccaccgtttatacgtaggaaacatccactttagtatcacggaacaggacctccagaacgtcttcgagccctttggcgaactcgaatttgtccagttgcagaaggatgatactggccgcagccgtggttatggctttgtacaattccgtgaagccgaccaggctcgcgaggcactcgaaaagatgaacggattcgacctcgccggtcgtcccatccgtgttggtcttggaaacgataagtttacccctgagtcaactgccaatctcctccagagatttcaaggccaaaaccaaccgtatcagggatccgctttctccggcgctggtggacgtggtccccaggcttctggcttcgatcgcgccggcggtcgcgataacgacaaggctaccggtgccagtgccttagatgacactgatgttgctggagtgaactttaacaattatagtcgcgatgctctcatgcgaaaactcgcacgaacagatgattctgccaacggagcccagaatgacggcccgatcatcaagcccaagactgagaccaagccattacctgtcaaggtcaacatggcaagtcgttgtgtagtcttgcacaacatgtttgaccctcaagaggaagaaggtgaaagctggattaaagaactcgaggatgacgttcgacaggaagccgaagacaaatatggacacgtagttcatatttctcttgatcctaactccgccggcgatatctatctcaaattcgacaaagttcagggtggagagaacgctatcaagggtctgaacggccggtactttggtggtcgcatgattagcgccgctcctgttgtggatgcagtctacagcagtttgttctctcgcaccaaggctatataa

SEQ ID NO: 12756 - protein, 553 aa, Muscodor strobelii
  misc_feature: SGI Peptide ID NO. 564158
  misc_feature (268)..(338): Pfam Id: PF00076 Pfam Desc: RNA recognition motif. (a.k.a. RRM, RBD, or RNP domain)
  misc_feature (170)..(240): Pfam Id: PF00076 Pfam Desc: RNA recognition motif. (a.k.a. RRM, RBD, or RNP domain)
  misc_feature (1)..(553): NCBI GI: 46121573 Blast Desc: FG05165.1 [Gibberella zeae PH-1]
  misc_feature (1)..(553): NCBI GI: 256732526 Blast Desc: NECHADRAFT_68161 [Nectria haematococca mpVI 77-13-4]
  misc_feature (151)..(553): NCBI GI: 18376336 Blast Desc: RNA splicing factor Pad-1 [Neurospora crassa]
  misc_feature (1)..(544): NCBI GI: 4530579 Blast Desc: Pad-1 [Neurospora crassa]
  misc_feature (151)..(544): NCBI GI: 85076094 Blast Desc: NCU03491 [Neurospora crassa OR74A] gi|28916904|gb|EAA26642.1| NCU03491 [Neurospora crassa OR74A]
  misc_feature (1)..(553): NCBI GI: 156064869 Blast Desc: SS1G_00444 [Sclerotinia sclerotiorum 1980] gi|154691304|gb|EDN91042.1| SS1G_00444 [Sclerotinia sclerotiorum 1980]
  misc_feature (1)..(553): NCBI GI: 154322639 Blast Desc: BC1G_00662 [Botryotinia fuckeliana B05.10] gi|150847996|gb|EDN23189.1| BC1G_00662 [Botryotinia fuckeliana B05.10]
  misc_feature (71)..(553): NCBI GI: 145607015 Blast Desc: MGG_12101 [Magnaporthe grisea 70-15] gi|145014628|gb|EDJ99196.1| MGG_12101 [Magnaporthe grisea 70-15]
  misc_feature (1)..(553): NCBI GI: 171690010 Blast Desc: protein product [Podospora anserina] gi|170944960|emb|CAP71071.1| protein product [Podospora anserina]
  misc_feature (102)..(553): NCBI GI: 116200107 Blast Desc: CHGG_08209 [Chaetomium globosum CBS 148.51] gi|88179488|gb|EAQ86956.1| CHGG_08209 [Chaetomium globosum CBS 148.51]
  misc_feature: Useful for introducing or modulating the production of volatile compounds
MATLDVEALLDATAGKNDDQAQSRDSIDRDRSDRNDGRNGSDRGRRDRTPRRRDRSSDRGRRDRPDDREATPRSDAGSHKSRRRSRSRDDDRRHSRRHRGGDGDYYRNGRGGRDRSRSRSPRRHYRPRDDQRDDRGGYRHRDEERHRGGRTPKRDATPPPTEDERDRRTVFVQQLAARLRTKELKEFFEKVGPVNEAQIVKDRISGRSKGVGYVEFKNEDSVTSALQLTGQKLLGIPVIVQLTEAEKNRQVRNTDGSAQGNSVPFHRLYVGNIHFSITEQDLQNVFEPFGELEFVQLQKDDTGRSRGYGFVQFREADQAREALEKMNGFDLAGRPIRVGLGNDKFTPESTANLLQRFQGQNQPYQGSAFSGAGGRGPQASGFDRAGGRDNDKATGASALDDTDVAGVNFNNYSRDALMRKLARTDDSANGAQNDGPIIKPKTETKPLPVKVNMASRCVVLHNMFDPQEEEGESWIKELEDDVRQEAEDKYGHVVHISLDPNSAGDIYLKFDKVQGGENAIKGLNGRYFGGRMISAAPVVDAVYSSLFSRTKAI

SEQ ID NO: 12757 - DNA, 2290 bp, Muscodor strobelii
  misc_feature: SGI EST ID NO. CUFF.30484.1
  misc_feature: Variant of the nucleotide sequence at SEQ ID NO 12755
ttttcatgctccacctctcacacaaccacatcaacgtcgctaagccgcaacttcttttcctcctccaccatcggcgtaaggctgcacatccaacatctcatccagccacttttcatcaccatcaagaacttacaagtactgaactatccccagcactagatcttcgagatggctacacttgacgtcgaggcattgctcgatgccaccgcaggcaaaaacgacgaccaggcccagtcccgtgactccatcgaccgtgacagatccgatcgcaacgatggcagaaacggctccgaccgtggacgccgcgaccgcacccctaggaggcgtgatcgtagctctgaccgtggacgacgtgacaggccagatgacagagaagctacaccgcgcagtgacgcaggtagccacaagagtaggcgtagaagtcggagccgtgatgatgatcgtcgacactcacgccgtcacagaggaggcgacggcgactactaccgcaatggccgaggcggtcgagaccgctctcgctcccgctcccctcgtcgtcactaccgtcccagagacgaccagcgtgacgaccgcggcggctaccgacacagagacgaagaacgccatcgcggtggccgcactcccaagcgtgatgccacgcccccgcccaccgaggacgagcgcgatcgccgcacggtctttgtccagcagttggcagcccgcttgagaaccaaagagttaaaagaattcttcgaaaaagtcggccccgtcaacgaggcacagattgtgaaagacaggattagcggtagatccaagggagtcggctacgttgaattcaaaaatgaagactctgtcacttctgcgcttcagctcaccggccaaaagctactaggaattcctgtcattgtccagcttaccgaagctgagaagaatcgccaagtgcgcaacaccgatggctcagcccagggtaactcagtgcctttccaccgtttatacgtaggaaacatccactttagtatcacggaacaggacctccagaacgtcttcgagccctttggcgaactcgaatttgtccagttgcagaaggatgatactggccgcagccgtggttatggctttgtacaattccgtgaagccgaccaggctcgcgaggcactcgaaaagatgaacggattcgacctcgccggtcgtcccatccgtgttggtcttggaaacgataagtttacccctgagtcaactgccaatctcctccagagatttcaaggccaaaaccaaccgtatcagggatccgctttctccggcgctggtggacgtggtccccaggcttctggcttcgatcgcgccggcggtcgcgataacgacaaggctaccggtgccagtgccttagatgacactgatgttgctggagtgaactttaacaattatagtcgcgatgctctcatgcgaaaactcgcacgaacagatgattctgccaacggagcccagaatgacggcccgatcatcaagcccaagactgagaccaagccattacctgtcaaggtcaacatggcaagtcgttgtgtagtcttgcacaacatgtttgaccctcaagaggaagaaggtgaaagctggattaaagaactcgaggatgacgttcgacaggaagccgaagacaaatatggacacgtagttcatatttctcttgatcctaactccgccggcgatatctatctcaaattcgacaaagttcagggtggagagaacgctatcaagggtctgaacggccggtactttggtggtcgcatgattagcgccgctcctgttgtggatgcagtctacagcagtttgttctctcgcaccaaggctatataagatgctaataactctcggcctgacttatcattcctaggaaacatcacttcttcaacgaagtcgcaacagcatcccacctcgcaaatcaaagtcccccaaaccacccgtttttcccatgttctacacagtggtaaacgacccaggcttacgacatgtctgcggtctctcgtcgccctccctctactccgttgtgtagagccaccagtacttgacttcacgctgattttgctgcagcatatcattcatagccgaggactatgcgcctcctaagggtatgccagcacagcaaagtttcacactgatttcttcctaggccggattttctctttaggaccacgatgtggtgagaataacatgcttgtacatagttcgctcggcacacacgaagtgatgagctcttcttactctagctgtcgtagagaattgattcaaatcataatgacctttttattgatgcaca

SEQ ID NO: 12758 - DNA, 1716 bp, Muscodor strobelii
  misc_feature: SGI cDNA ID NO. 564159
  misc_feature: Encodes the peptide sequence at SEQ ID NO 12759
atggctacacttgacgtcgaggcattgctcgatgccaccgcaggcaaaaacgacgaccaggcccagtcccgtgactccatcgaccgtgacagatccgatcgcaacgatggcagaaacggctccgaccgtggacgccgcgaccgcacccctaggaggcgtgatcgtagctctgaccgtggacgacgtgacaggccagatgacagagaagctacaccgcgcagtgacgcaggtagccacaagagtaggcgtagaagtcggagccgtgatgatgatcgtcgacactcacgccgtcacagaggaggcgacggcgactactaccgcaatggccgaggcggtcgagaccgctctcgctcccgctcccctcgtcgtcactaccgtcccagagacgaccagcgtgacgaccgcggcggctaccgacacagagacgaagaacgccatcgcggtggccgcactcccaagcgtgatgccacgcccccgcccaccgaggacgagcgcgatcgccgcacggtctttgtccagcagttggcagcccgcttgagaaccaaagagttaaaagaattcttcgaaaaagtcggccccgtcaacgaggcacagattgtgaaagacaggattagcggtagatccaagggagtcggctacgttgaattcaaaaatgaagactctgtcacttctgcgcttcagctcaccggccaaaagctactaggaattcctgtcattgtccagcttaccgaagctgagaagaatcgccaagtgcgcaacaccgatggctcagcccagggtaactcagtgcctttccaccgtttatacgtaggaaacatccactttagtatcacggaacaggacctccagaacgtcttcgagccctttggcgaactcgaatttgtccagttgcagaaggatgatactggccgcagccgtggttatggctttgtacaattccgtgaagccgaccaggctcgcgaggcactcgaaaagatgaacggattcgacctcgccggtcgtcccatccgtgttggtcttggaaacgataagtttacccctgagtcaactgccaatctcctccagagatttcaaggccaaaaccaaccgtatcagggatccgctttctccggcgctggtggacgtggtccccaggcttctggcttcgatcgcgccggcggtcgcgataacgacaaggctaccggtgccagtgccttagatgacactgatgttgctggagtgaactttaacaattatagtcgcgatgctctcatgcgaaaactcgcacgaacagatgattctgccaacggagcccagaatgacggcccgatcatcaagcccaagactgagaccaagccattacctgtcaaggtcaacatggcaagtcgttgtgtagtcttgcacaacatgtttgaccctcaagagtatgcagacccctattacccgctgttcaatcaaattattaaccaaaagtacagggaagaaggtgaaagctggattaaagaactcgaggatgacgttcgacaggaagccgaagacaaatatggacacgtagttcatatttctcttgatcctaactccgccggcgatatctatctcaaattcgacaaagttcagggtggagagaacgctatcaagggtctgaacggccggtactttggtggtcgcatgattagcgccgctcctgttgtggatgcagtctacagcagtttgttctctcgcaccaaggctatataa

SEQ ID NO: 12759 - protein, 571 aa, Muscodor strobelii
  misc_feature: SGI Peptide ID NO. 564159
  misc_feature (268)..(338): Pfam Id: PF00076 Pfam Desc: RNA recognition motif. (a.k.a. RRM, RBD, or RNP domain)
  misc_feature (170)..(240): Pfam Id: PF00076 Pfam Desc: RNA recognition motif. (a.k.a. RRM, RBD, or RNP domain)
  misc_feature (1)..(571): NCBI GI: 46121573 Blast Desc: FG05165.1 [Gibberella zeae PH-1]
  misc_feature (1)..(571): NCBI GI: 256732526 Blast Desc: NECHADRAFT_68161 [Nectria haematococca mpVI 77-13-4]
  misc_feature (151)..(571): NCBI GI: 18376336 Blast Desc: RNA splicing factor Pad-1 [Neurospora crassa]
  misc_feature (1)..(562): NCBI GI: 4530579 Blast Desc: Pad-1 [Neurospora crassa]
  misc_feature (151)..(562): NCBI GI: 85076094 Blast Desc: NCU03491 [Neurospora crassa OR74A] gi|28916904|gb|EAA26642.1| NCU03491 [Neurospora crassa OR74A]
  misc_feature (1)..(571): NCBI GI: 156064869 Blast Desc: SS1G_00444 [Sclerotinia sclerotiorum 1980] gi|154691304|gb|EDN91042.1| SS1G_00444 [Sclerotinia sclerotiorum 1980]
  misc_feature (1)..(571): NCBI GI: 154322639 Blast Desc: BC1G_00662 [Botryotinia fuckeliana B05.10] gi|150847996|gb|EDN23189.1| BC1G_00662 [Botryotinia fuckeliana B05.10]
  misc_feature (102)..(571): NCBI GI: 116200107 Blast Desc: CHGG_08209 [Chaetomium globosum CBS 148.51] gi|88179488|gb|EAQ86956.1| CHGG_08209 [Chaetomium globosum CBS 148.51]
  misc_feature (71)..(571): NCBI GI: 145607015 Blast Desc: MGG_12101 [Magnaporthe grisea 70-15] gi|145014628|gb|EDJ99196.1| MGG_12101 [Magnaporthe grisea 70-15]
  misc_feature (1)..(571): NCBI GI: 171690010 Blast Desc: protein product [Podospora anserina] gi|170944960|emb|CAP71071.1| protein product [Podospora anserina]
MATLDVEALLDATAGKNDDQAQSRDSIDRDRSDRNDGRNGSDRGRRDRTPRRRDRSSDRGRRDRPDDREATPRSDAGSHKSRRRSRSRDDDRRHSRRHRGGDGDYYRNGRGGRDRSRSRSPRRHYRPRDDQRDDRGGYRHRDEERHRGGRTPKRDATPPPTEDERDRRTVFVQQLAARLRTKELKEFFEKVGPVNEAQIVKDRISGRSKGVGYVEFKNEDSVTSALQLTGQKLLGIPVIVQLTEAEKNRQVRNTDGSAQGNSVPFHRLYVGNIHFSITEQDLQNVFEPFGELEFVQLQKDDTGRSRGYGFVQFREADQAREALEKMNGFDLAGRPIRVGLGNDKFTPESTANLLQRFQGQNQPYQGSAFSGAGGRGPQASGFDRAGGRDNDKATGASALDDTDVAGVNFNNYSRDALMRKLARTDDSANGAQNDGPIIKPKTETKPLPVKVNMASRCVVLHNMFDPQEYADPYYPLFNQIINQKYREEGESWIKELEDDVRQEAEDKYGHVVHISLDPNSAGDIYLKFDKVQGGENAIKGLNGRYFGGRMISAAPVVDAVYSSLFSRTKAI

SEQ ID NO: 12760 - DNA, 2290 bp, Muscodor strobelii; identical to SEQ ID NO: 12757
  misc_feature: SGI EST ID NO. CUFF.30484.1
  misc_feature: Variant of the nucleotide sequence at SEQ ID NO 12758

SEQ ID NO: 12761 - DNA, 1128 bp, Muscodor strobelii
  misc_feature: SGI cDNA ID NO. 564160
  misc_feature: Reduced expression when VOC is produced
  misc_feature: Encodes the peptide sequence at SEQ ID NO 12762
atgccaggtcggacgctcccgactttgacccaggccgaggtcgagtcgcacaactccgagaagtcttgctatgtgacactcggcaccaacgtctacgacgtcaccgactttctcgatgcgcatcccggcggcgccgacctcgttctcgaatatgccggcaaggacatcaccgccattctcaaggacgaggactcccacgcccactctgaagctgcctacgaagtcctcgacgactctctcgtcggctttctcgtgaccaccaagctcaagcccgacgcccaggtgcagaagaagatcgatgactcccagatcaacgagagggtcacgcccttaatccacccccgaacgggtatggcctgcgaggaggatctgagcaaggacacagattacaaccaagactacaagacgcacaagttcctcgatctgaacaaacccctgttgatgcaggtatggtacggaggtttcaccaaggcattctacctggaccaagtccaccgaccaaggcattacaaaggcggcgcgtcggcgccactgtttggaaacttcctcgagcctctcagtctgacgccttggtgggtggtcccgatgatttggattccatgcgacgcctacggaacctacttggcagctcaaggcttcaactcgatcagcaaccttgctgctacctggcttttcggtatcttcgtctggactctggttgagtacttgatgcacagatttctgtttcatctggatgagtggctaccagacaacagggtcggattaacgctacactttctgctccacggtgttcatcactatctaccaatggacaaatatcgactcgtcatgccgccaacactgttccttgtgcttgcggttccgttctggaaactcgcgcacacactctttttctgggactggcacgtggccacggccatctactgcggaggtatcttcggctacattatgtacgatatgacgcattacttcctgcaccaccagaacttgcctctgtggtacaagggtctcaagaagtaccatctcgcccatcacttcctcgactatgagctgggcttcggtgtcaccagtgcattctgggaccgcatcttccataccgaattgcccaccgttaccaagacaaaatag

SEQ ID NO: 12762 - protein, 375 aa, Muscodor strobelii
  misc_feature: SGI Peptide ID NO. 564160
  misc_feature (8)..(85): Pfam Id: PF00173 Pfam Desc: Cytochrome b5-like Heme/Steroid binding domain
  misc_feature (223)..(346): Pfam Id: PF04116 Pfam Desc: Fatty acid hydroxylase superfamily
  misc_feature (1)..(375): NCBI GI: 39943818 Blast Desc: MGG_03920 [Magnaporthe grisea 70-15] gi|145014627|gb|EDJ99195.1| MGG_03920 [Magnaporthe grisea 70-15]
  misc_feature (1)..(375): NCBI GI: 171690008 Blast Desc: protein product [Podospora anserina] gi|170944959|emb|CAP71070.1| protein product [Podospora anserina]
  misc_feature (1)..(375): NCBI GI: 116200109 Blast Desc: CHGG_08210 [Chaetomium globosum CBS 148.51] gi|88179489|gb|EAQ86957.1| CHGG_08210 [Chaetomium globosum CBS 148.51]
  misc_feature (2)..(374): NCBI GI: 156064871 Blast Desc: SS1G_00445 [Sclerotinia sclerotiorum 1980] gi|154691305|gb|EDN91043.1| SS1G_00445 [Sclerotinia sclerotiorum 1980]
  misc_feature (1)..(375): NCBI GI: 85076098 Blast Desc: inositolphosphorylceramide-B C-26 hydroxylase [Neurospora crassa OR74A] gi|28916905|gb|EAA26643.1| inositolphosphorylceramide-B C-26 hydroxylase [Neurospora crassa
  misc_feature (1)..(373): NCBI GI: 46121571 Blast Desc: FG05164.1 [Gibberella zeae PH-1]
  misc_feature (1)..(368): NCBI GI: 256732525 Blast Desc: NECHADRAFT_68157 [Nectria haematococca mpVI 77-13-4]
  misc_feature (2)..(374): NCBI GI: 154322637 Blast Desc: fatty acid hydroxylase [Botryotinia fuckeliana B05.10] gi|150847995|gb|EDN23188.1| fatty acid hydroxylase [Botryotinia fuckeliana B05.10]
  misc_feature (1)..(375): NCBI GI: 18376335 Blast Desc: related to fatty acid hydroxylase [Neurospora crassa]
  misc_feature (1)..(368): NCBI GI: 169599152 Blast Desc: SNOG_02392 [Phaeosphaeria nodorum SN15] gi|160704546|gb|EAT90604.2| SNOG_02392 [Phaeosphaeria nodorum SN15]
  misc_feature: Useful for introducing or modulating the production of volatile compounds
MPGRTLPTLTQAEVESHNSEKSCYVTLGTNVYDVTDFLDAHPGGADLVLEYAGKDITAILKDEDSHAHSEAAYEVLDDSLVGFLVTTKLKPDAQVQKKIDDSQINERVTPLIHPRTGMACEEDLSKDTDYNQDYKTHKFLDLNKPLLMQVWYGGFTKAFYLDQVHRPRHYKGGASAPLFGNFLEPLSLTPWWVVPMIWIPCDAYGTYLAAQGFNSISNLAATWLFGIFVWTLVEYLMHRFLFHLDEWLPDNRVGLTLHFLLHGVHHYLPMDKYRLVMPPTLFLVLAVPFWKLAHTLFFWDWHVATAIYCGGIFGYIMYDMTHYFLHHQNLPLWYKGLKKYHLAHHFLDYELGFGVTSAFWDRIFHTELPTVTKTK

SEQ ID NO: 12763 - DNA, 1822 bp, Muscodor strobelii
  misc_feature: SGI EST ID NO. CUFF.30355.0
  misc_feature: Variant of the nucleotide sequence at SEQ ID NO 12761
ttcgggcgttggcaacgagctgtccctcaattttacttttcttcaacccctgagccagcgaatcctcaagtcatataaatctctttcgggtctctttgcatacgcgactgcacgattttgactgcagccttaccctcctttgttaccttaacttcttaccaggctgagaatctcgcacttactcctctagattccgcgtctccgtgctaaatctgcctacacttccgtctcgcgcaactactttgtcctcatatctcatcccctgcgatcgaaagcccccactaccatcgacatctccaacaccgcacagtcacgcgcatcatgccaggtcggacgctcccgactttgacccaggccgaggtcgagtcgcacaactccgagaagtcttgctatgtgacactcggcaccaacgtctacgacgtcaccgactttctcgatgcgcatcccggcggcgccgacctcgttctcgaatatgccggcaaggacatcaccgccattctcaaggacgaggactcccacgcccactctgaagctgcctacgaagtcctcgacgactctctcgtcggctttctcgtgaccaccaagctcaagcccgacgcccaggtgcagaagaagatcgatgactcccagatcaacgagagggtcacgcccttaatccacccccgaacgggtatggcctgcgaggaggatctgagcaaggacacagattacaaccaagactacaagacgcacaagttcctcgatctgaacaaacccctgttgatgcaggtatggtacggaggtttcaccaaggcattctacctggaccaagtccaccgaccaaggcattacaaaggcggcgcgtcggcgccactgtttggaaacttcctcgagcctctcagtctgacgccttggtgggtggtcccgatgatttggattccatgcgacgcctacggaacctacttggcagctcaaggcttcaactcgatcagcaaccttgctgctacctggcttttcggtatcttcgtctggactctggttgagtacttgatgcacagatttctgtttcatctggatgagtggctaccagacaacagggtcggattaacgctacactttctgctccacggtgttcatcactatctaccaatggacaaatatcgactcgtcatgccgccaacactgttccttgtgcttgcggttccgttctggaaactcgcgcacacactctttttctgggactggcacgtggccacggccatctactgcggaggtatcttcggctacattatgtacgatatgacgcattacttcctgcaccaccagaacttgcctctgtggtacaagggtctcaagaagtaccatctcgcccatcacttcctcgactatgagctgggcttcggtgtcaccagtgcattctgggaccgcatcttccataccgaattgcccaccgttaccaagacaaaatagaacactgcccgggtttagaagtggcaatagcaaacctcgtctgttttagttcttgtatatatactttgatacctgacgaggcctggagatgcaagctggctggagcagctggcttagaggaacatggaatgaatgctcacgggtttgcatgaacagtattatatacctacctataaataaacacataatgtctattggtctaccatctcatctccaggcccaacatagtgtgcattttctttccgatctgtgtaatgaatcagtatctgatgtcgcccctccattgacctgaccctacttttataagcaccgggcatacttggtctaatttcatccctgggctacacacttcaataacacatggatttggaag

SEQ ID NO: 12764 - DNA, 2196 bp, Muscodor strobelii
  misc_feature: SGI cDNA ID NO. 564161
  misc_feature: Reduced expression when VOC is produced
  misc_feature: Encodes the peptide sequence at SEQ ID NO 12765
atggggactctccggtccagggcgttccttcgctgcttctactgcggcaagaagtccaccacccgcttcgatggccagaggtcctttgactgcgcgcactgcgatgcaaccaactggcttgatcctaatggcgacatcactgaccccccaatcgaccatcattctccagatgccagctcggttcaatacgccattccacgatccaacgccttccgctctccttcgccgcctcccaactctctccttcagcctcggcccgatcaccctatcttctgcagcacatgtattcgcaatcagcacatgctcaatagctctcttgcccaattcgagtggcctgatgactcgacgagcgccgaatatgccgccagggagcgcaagttctgggcgctgcgaaaggacctcgaagcccgatatccccaagtctgccaggactgcgcgcccaaagtcaaccagaagctcaaccaagccagctatgcggctcagaccgatcatctcaggcgcatgatggaccgcagccgggcgcaaagaaaggaaaccaaaggatggtcccccctagactcaatagacaccctgggacgatggtgctggtaccttggcttcattctccaggctatttggcatattactatcatttgctttctacttacggagcaatacgccacggaggaagagggttcgtggctaacatccgccgtaagcatacttcgtcaattagtcgcctttgctctccctcattcagatcgacttatgcaatgggcaatcaatcttggtttatgtacatttccatggaacccgcgattcaaacagtccatccgaggcttcactgcgcatatccttggctttaggcaatggtatacctaccagctcttcatcgtgctcatgcgcctcgtctgtctgtcgattgcgcaatacagcacgtctcaaggactgcctataggagcccagctgggtgcgcagctgtttattccaatgcttatggtttatgtatatggtgcagcgagaagatccattcgtacagacactagccctctgtttaggcggccagtgcccgtttcagcaaactcccctactgcgccgaggaaaggtcccgttgtaagtagctcaactgatatggggagcatcctcgacgaaattcttcattcctcggacgcaaatgagccgcggaataaagtagatataacccagcaaatctcagcaaatgcaattcaggcagcgcccaggccatatcagagatcaaatggtcagatatccacgattcgaacatcaccacagtctgaaccaagctttggggacctgcgcctatctaactcggccactcccacaagacatcaagaacccactgtatcacattatgatgaggagatggactggtcgccatctgcttcccagcaccgcgcttttagctcttacaattcctacaagatcaagaactcaaatccgcggtttagtgacatgcccacggagccaaaagctgggcccatctggtacaaggtgccgccggctccgactaacccggctcagatggcgcgcaacccaccgatgcgccctatcatccgtgaaagccctaaagacacgaaagagaacttctttcagtcgacgcgaaggccagttgatctgggaggcaagcctcaatcgactgcgtctgatttcacgttgtcacagccaaagttctatgctcctcaacccaaagacgatcctcgagatgggctatcccgcatgtttgcgagctctttcagcttgagtcctagtccggaagatgcagaggccaggacggctcaggcaaatcacgcggctaactctgaacactacgaagttggtattgccccggatcgtaccatgacacgtgttgttgagctgtttgctctcgtacttgctttgggcggctggatctttgcgctgggctctacggagcattacgcacgaagtattgccatggcatccatctgcggctgtttgattgtgtcgattaggttggcagcagacctcgaagtggatcgtcgagttcaaagccaaggccaaagccaaatatctgttcttcagccatctttcgctagccttgctctggtacaagttgtcgtcattctcctacttttgtggagtgtatggtccggaggcgcattgcaggtttctggcacttttggaaatgccttgtttgggtgcatgatgatccaccatatatggcatatctttgcctag

SEQ ID NO: 12765 - protein, 731 aa, Muscodor strobelii
  misc_feature: SGI Peptide ID NO. 564161
  misc_feature (1)..(727): NCBI GI: 256730522 Blast Desc: NECHADRAFT_89660 [Nectria haematococca mpVI 77-13-4]
  misc_feature (1)..(726): NCBI GI: 261357278 Blast Desc: conserved [Verticillium albo-atrum VaMs.102]
  misc_feature (1)..(725): NCBI GI: 46109552 Blast Desc: FG01658.1 [Gibberella zeae PH-1]
  misc_feature (1)..(364): NCBI GI: 85079959 Blast Desc: NCU03345 [Neurospora crassa OR74A] gi|25465816|pir||T51915 B23I11.270 [imported] - Neurospora crassa gi|28881184|emb|CAD70366.1| conserved [Neurospora crassa] crassa
  misc_feature (10)..(586): NCBI GI: 121709988 Blast Desc: conserved [Aspergillus clavatus NRRL 1] gi|119400760|gb|EAW11184.1| conserved [Aspergillus clavatus NRRL 1]
  misc_feature (10)..(344): NCBI GI: 261206330 Blast Desc: conserved [Ajellomyces dermatitidis SLH14081] gi|239592961|gb|EEQ75542.1| conserved [Ajellomyces dermatitidis SLH14081]
  misc_feature (10)..(584): NCBI GI: 225683637 Blast Desc: conserved [Paracoccidioides brasiliensis Pb03]
  misc_feature (10)..(344): NCBI GI: 239610863 Blast Desc: conserved [Ajellomyces dermatitidis ER-3]
  misc_feature (10)..(632): NCBI GI: 146324385 Blast Desc: conserved [Aspergillus fumigatus Af293] gi|129557220|gb|EAL88550.2| conserved [Aspergillus fumigatus Af293] gi|159124144|gb|EDP49262.1| conserved [Aspergillus A1163]
  misc_feature (10)..(584): NCBI GI: 226292987 Blast Desc: conserved [Paracoccidioides brasiliensis Pb18]
  misc_feature: Useful for introducing or modulating the production of volatile compounds
MGTLRSRAFLRCFYCGKKSTTRFDGQRSFDCAHCDATNWLDPNGDITDPPIDHHSPDASSVQYAIPRSNAFRSPSPPPNSLLQPRPDHPIFCSTCIRNQHMLNSSLAQFEWPDDSTSAEYAARERKFWALRKDLEARYPQVCQDCAPKVNQKLNQASYAAQTDHLRRMMDRSRAQRKETKGWSPLDSIDTLGRWCWYLGFILQAIWHITIICFLLTEQYATEEEGSWLTSAVSILRQLVAFALPHSDRLMQWAINLGLCTFPWNPRFKQSIRGFTAHILGFRQWYTYQLFIVLMRLVCLSIAQYSTSQGLPIGAQLGAQLFIPMLMVYVYGAARRSIRTDTSPLFRRPVPVSANSPTAPRKGPVVSSSTDMGSILDEILHSSDANEPRNKVDITQQISANAIQAAPRPYQRSNGQISTIRTSPQSEPSFGDLRLSNSATPTRHQEPTVSHYDEEMDWSPSASQHRAFSSYNSYKIKNSNPRFSDMPTEPKAGPIWYKVPPAPTNPAQMARNPPMRPIIRESPKDTKENFFQSTRRPVDLGGKPQSTASDFTLSQPKFYAPQPKDDPRDGLSRMFASSFSLSPSPEDAEARTAQANHAANSEHYEVGIAPDRTMTRVVELFALVLALGGWIFALGSTEHYARSIAMASICGCLIVSIRLAADLEVDRRVQSQGQSQISVLQPSFASLALVQVVVILLLLWSVWSGGALQVSGTFGNALFGCMMIHHIWHIFA

SEQ ID NO: 12766 - DNA, 565 bp, Muscodor strobelii
  misc_feature: SGI EST ID NO. CUFF.30377.0
  misc_feature: Variant of the nucleotide sequence at SEQ ID NO 12764
taggaaaagtgattttttgtcgactcagtctgttctcacgcacattctcgccaaaccctttacttaactaccagcttgcatggtatacacaattcgcgatggggactctccggtccagggcgttccttcgctgcttctactgcggcaagaagtccaccacccgcttcgatggccagaggtcctttgactgcgcgcactgcgatgcaaccaactggcttgatcctaatggcgacatcactgaccccccaatcgaccatcattctccagatgccagctcggttcaatacgccattccacgatccaacgccttccgctctccttcgccgcctcccaactctctccttcagcctcggcccgatcaccctatcttctgcagcacatgtattcgcaatcagcacatgctcaatagctctcttgcccaattcgagtggcctgatgactcgacgagcgccgaatatgccgccagggagcgcaagttctgggcgctgcgaaaggacctcgaagcccgatatccccaagtctgccaggactgcgcgcccaaagtcaaccagaagctcaaccaagc

SEQ ID NO: 12767 - DNA, 894 bp, Muscodor strobelii
  misc_feature: SGI cDNA ID NO. 564162
  misc_feature: Encodes the peptide sequence at SEQ ID NO 12768
atggaagctgctcgtgatcgtgttgtccagaatacggtgggcaacaccatggcctacatgtatctagtcccctattttgctgctgttgggctcggcctcgctatcgtcgcaacgggcgctatcgtcgttaccgcgagcatgtccaagcctcagggccgtgacactttgctcatcttcgccatcatgctgatctgctcattacctttaatcagcatggcgctacgcaaggggttggtaggttcacagtctgttcattatatcttcatcgtgtgtggatcaggcggtcacactgcggagatgatccaaatggtcgagcggagtattcggtgtgagaaaaaagcacaccgccggtgggctgtcggcaaaggcgacagcaagagcttcgataaagtcctggctttcgaacgtcggttggtagatcgtttctcgaaaattggtctcgatagtggaaccttcgatattgtactattcggtagagctcgctatgttcaccagagttggctaacgacaccgttcacggcgatcttaagcttactggataccgtccgtctcctcgcctcccctgtctatttcggcaatacgacttctggagtcaggtttcccagggttatcatcaccaacggccctggcaccggattcatttttcttcttgttgccttcatgtacaaactcttaggcattgtgcctgcgcacctaatgcgcacgatctatgtcgagagctgggcacgcgtcaagtctcttagcttgacaggtaaactgattcgtcgtttcaggctagctgatcgtttcgtcgtgcagtcgcggccggtcgccgaccaaaccaacgttctagcagagaacctcctcgtaatgccgactaatcctcctattccactccacgttttggtgaaataa

SEQ ID NO: 12768 - protein, 297 aa, Muscodor strobelii
  misc_feature: SGI Peptide ID NO. 564162
  misc_feature (87)..(277): Pfam Id: PF08660 Pfam Desc: Oligosaccharide biosynthesis protein Alg14 like
  misc_feature (87)..(266): Pfam Id: PF08660 Pfam Desc: Oligosaccharide biosynthesis protein Alg14 like
  misc_feature (86)..(284): NCBI GI: 261357279 Blast Desc: conserved [Verticillium albo-atrum VaMs.102]
  misc_feature (86)..(276): NCBI GI: 46109540 Blast Desc: FG01652.1 [Gibberella zeae PH-1]
  misc_feature (86)..(271): NCBI GI: 85079955 Blast Desc: NCU03344 [Neurospora crassa OR74A] gi|25465815|pir||T51914 B23I11.260 [imported] - Neurospora crassa gi|28881183|emb|CAD70365.1| conserved [Neurospora crassa] crassa
  misc_feature (83)..(273): NCBI GI: 39943832 Blast Desc: MGG_03927 [Magnaporthe grisea 70-15] gi|145014636|gb|EDJ99204.1| MGG_03927 [Magnaporthe grisea 70-15]
  misc_feature (86)..(289): NCBI GI: 256730519 Blast Desc: NECHADRAFT_29802 [Nectria haematococca mpVI 77-13-4]
  misc_feature (89)..(275): NCBI GI: 154315980 Blast Desc: BC1G_04562 [Botryotinia fuckeliana B05.10] gi|150846958|gb|EDN22151.1| BC1G_04562 [Botryotinia fuckeliana B05.10]
  misc_feature (79)..(251): NCBI GI: 116199855 Blast Desc: CHGG_08083 [Chaetomium globosum CBS 148.51] gi|88179362|gb|EAQ86830.1| CHGG_08083 [Chaetomium globosum CBS 148.51]
  misc_feature (92)..(266): NCBI GI: 169846826 Blast Desc: CC1G_04560 [Coprinopsis cinerea okayama7#130] gi|116508897|gb|EAU91792.1| CC1G_04560 [Coprinopsis cinerea okayama7#130]
  misc_feature (100)..(273): NCBI GI: 171688986 Blast Desc: protein product [Podospora anserina] gi|170944455|emb|CAP70566.1| protein product [Podospora anserina]
  misc_feature (81)..(266): NCBI GI: 67539132 Blast Desc: AN5736.2 [Aspergillus nidulans FGSC A4] gi|40743639|gb|EAA62829.1| AN5736.2 [Aspergillus nidulans FGSC A4] gi|259484787|tpe|CBF81307.1| TPA: glycosyltransferase family
MEAARDRVVQNTVGNTMAYMYLVPYFAAVGLGLAIVATGAIVVTASMSKPQGRDTLLIFAIMLICSLPLISMALRKGLVGSQSVHYIFIVCGSGGHTAEMIQMVERSIRCEKKAHRRWAVGKGDSKSFDKVLAFERRLVDRFSKIGLDSGTFDIVLFGRARYVHQSWLTTPFTAILSLLDTVRLLASPVYFGNTTSGVRFPRVIITNGPGTGFIFLLVAFMYKLLGIVPAHLMRTIYVESWARVKSLSLTGKLIRRFRLADRFVVQSRPVADQTNVLAENLLVMPTNPPIPLHVLVK

SEQ ID NO: 12769 - DNA, 3089 bp, Muscodor strobelii
  misc_feature: SGI EST ID NO. CUFF.30338.0
  misc_feature: Variant of the nucleotide sequence at SEQ ID NO 12767
aaaacatcgaagtcatccgtggcattagctaacccatcaccaacatactgctattttcggccccctttcatgtaaatgctaggttggtaaaagggtcggctgcactcgattactaaagctcaaagaaagactgccttcggcgacatctctgttggtcctctggaagcaagaccgcgaagttctgtcttgggaagtttacctatgtgttctttccgagttctagcccacgttatccctaaacaccttcagatataagggcagaacgacatagtgaagatcaaccagacataaagcaaatttacgctcagcgcctcccaatgaatgatatcggcttgtgttaccagaagcgacacatacatcttcctgtattgtgtctggatcacacataggtcgatacctatcgggaaggccgagttgaatgcctcactgctatccgtatcgcaacaaatgttcagatgccacgatgggacagtagcttgtgaagcatcgaatcgatattgtttgtccgaaataggagagcggaactggatcgattagtcttggggcttactaggtcacattgcattcaaaatcaatgactccagcctaacgccgattgttcaatttgactttcgacttcatatcgccaggctcattcatcactatcaactgatctaggtggtacctctgattcaacaatggcgagagctcagcataaaagcgaagcttctcagttctctagagagactcgtagtaatgccctccccaatactcccactccttcggttcacgcaaaccatcctcatcaagagagcttgtccgtcatggaagctgctcgtgatcgtgttgtccagaatacggtgggcaacaccatggcctacatgtatctagtcccctattttgctgctgttgggctcggcctcgctatcgtcgcaacgggcgctatcgtcgttaccgcgagcatgtccaagcctcagggccgtgacactttgctcatcttcgccatcatgctgatctgctcattacctttaatcagcatggcgctacgcaaggggttggtaggttcacagtctgttcattatatcttcatcgtgtgtggatcaggcggtcacactgcggagatgatccaaatggtcgagcggagtattcggtgtgagaaaaaagcacaccgccggtgggctgtcggcaaaggcgacagcaagagcttcgataaagtcctggctttcgaacgtcggttggtagatcgtttctcgaaaattggtctcgatagtggaaccttcgatattgtactattcggtagagctcgctatgttcaccagagttggctaacgacaccgttcacggcgatcttaagcttactggataccgtccgtctcctcgcctcccctgtctatttcggcaatacgacttctggagtcaggtttcccagggttatcatcaccaacggccctggcaccggattcatttttcttcttgttgccttcatgtacaaactcttaggcattgtgcctgcgcacctaatgcgcacgatctatgtcgagagctgggcacgcgtcaagtctcttagcttgacaggtaaactgattcgtcgtttcaggctagctgatcgtttcgtcgtgcagtcgcggccggtcgccgaccaaaccaacgttctagcagagaacctcctcgtaatgccgactaatcctcctattccactccacgttttggtgaaataattcctcaagtcatccatgatcggggcgaagaatatcccggaaaatatgagagtaattgtggcactctaaacatttcttgcgaagcttttcaaaggagatagcaccagtccagcagaaataaagtgttcatctcggctccccagtgttacaagtgaatcaaatagcgcgtcctcttgacgccttagcatcgtctcatgaccacttttctacactcctgagtatatcgatcttaagctccatcaagtcatctttgtggtacaaatttgatgaaacatctggaaaatatcgatccttgcactaaatacttgacgtgcatcaagattatgacacagcgccggtcagaacttgcagatcctcttagtagatgttttccaatttatctagaacacgtgtctcaaatctgggctggccaagctaacgattttccgctccgtgaattcttcaacgccagccatgcctccgaatcgaccataacccgagcttcctcctgttccaccgttcggcaaaggcgcctctatatacacactgggtccattgatgtgacaagcaccagctcgcaccagtttcgtcacgcgaagtgctcgcattatgtccttggaaaagacggaagcgcagaggctgtactcactatcattggccacggcgattccctcttcttccgtctgaaattctgacaaacagatcaaaggtccaaagatctcctgacatgagatgtccatctctttagtcacaccttccaagatgtgaggcatgataatcgtcttgttgggtccactgacttgcatatcgccatataacaactttgcgccggccgagacagcgcctttcaccagtcccaaaactctcgttgctgatgcctgagtaaatagcccggagatggatacttctgtgtcttcctcatggttaccaactttcagcgtcttcaccttttcaatcaaggccgtcttgaaagtctctgctatcgacgtatggacaatcacccgctctgtggacatgcagatctgaccggagtatgccaaggcaccgaagacaactgcgtcgactgcatcgtcgatattcgcatcttcaaagataatgactggcgctttgccacccagctcaaaaacgcatggctttaattgtgaagctgcccagccagccactatccgaccgactctgtcactgccagtgaagttgatgcgacgcactgctggatgcttcacagtgaactccgtcacagccggagagtttacaggtgctgtcggcagaaaattcaaacatcctttaggcaaacccgcagcttggaaagctcggaccactagatgttgactcttgggcgaatattcagaaggcttgagcacgatggtgttcccgcaaattagcggtgttgctatcgctctcgcagtcaagttg

SEQ ID NO: 12770 - DNA, 1512 bp, Muscodor strobelii
  misc_feature: SGI cDNA ID NO. 564163
  misc_feature: Elevated expression when VOC is produced
  misc_feature: Encodes the peptide sequence at SEQ ID NO 12771
atgaccaccaccgactacttagagcatctcgactcccttgcagagcaacaacaactattcatagacggcgtgccctgtccaagctcagatggcgcaacttttacggtcaataatccgatgacgggcaagcggatctacgactgctcctctgcgacgcaaagtgactacgcgcgagcaatcgacagtgcatcagaagcattcaagacttggtcgaacacaagtcccacgactcgccgacaaatatttctcaaagcagctgatatcctagagggatacatcaaaggcgatgcaccgagcatcttgtcttcggaaatcagtgcaacgaataattgggtaaaagtcaatatcttcgcaaccgttggtgtgcttcgagaatctgcagggctggtgacgcatatcaagggtgagattgtccctgcggacagaccgggaactacgctcttgttgcagagagaggcgattggtgttattttcgctattagtccttggaacgcacctgtcaacttgactgcgagagcgatagcaacaccgctaatttgcgggaacaccatcgtgctcaagccttctgaatattcgcccaagagtcaacatctagtggtccgagctttccaagctgcgggtttgcctaaaggatgtttgaattttctgccgacagcacctgtaaactctccggctgtgacggagttcactgtgaagcatccagcagtgcgtcgcatcaacttcactggcagtgacagagtcggtcggatagtggctggctgggcagcttcacaattaaagccatgcgtttttgagctgggtggcaaagcgccagtcattatctttgaagatgcgaatatcgacgatgcagtcgacgcagttgtcttcggtgccttggcatactccggtcagatctgcatgtccacagagcgggtgattgtccatacgtcgatagcagagactttcaagacggccttgattgaaaaggtgaagacgctgaaagttggtaaccatgaggaagacacagaagtatccatctccgggctatttactcaggcatcagcaacgagagttttgggactggtgaaaggcgctgtctcggccggcgcaaagttgttatatggcgatatgcaagtcagtggacccaacaagacgattatcatgcctcacatcttggaaggtgtgactaaagagatggacatctcatgtcaggagatctttggacctttgatctgtttgtcagaatttcagacggaagaagagggaatcgccgtggccaatgatagtgagtacagcctctgcgcttccgtcttttccaaggacataatgcgagcacttcgcgtgacgaaactggtgcgagctggtgcttgtcacatcaatggacccagtgtgtatatagaggcgcctttgccgaacggtggaacaggaggaagctcgggttatggtcgattcggaggcatggctggcgttgaagaattcacggagcggaaaatcgttagcttggccagcccagatttgagacacgtgttctag

SEQ ID NO: 12771 - protein, 503 aa, Muscodor strobelii
  misc_feature: SGI Peptide ID NO. 564163
  misc_feature (20)..(492): Pfam Id: PF00171 Pfam Desc: Aldehyde dehydrogenase family
  misc_feature (116)..(492): Pfam Id: PF00171 Pfam Desc: Aldehyde dehydrogenase family
  misc_feature (20)..(90): Pfam Id: PF00171 Pfam Desc: Aldehyde dehydrogenase family
  misc_feature (8)..(500): NCBI GI: 171687160 Blast Desc: protein product [Podospora anserina] gi|170943541|emb|CAP69194.1| protein product [Podospora anserina]
  misc_feature (19)..(501): NCBI GI: 170112324 Blast Desc: [Laccaria bicolor S238N-H82] gi|164637690|gb|EDR01973.1| [Laccaria bicolor S238N-H82]
  misc_feature (28)..(494): NCBI GI: 269921944 Blast Desc: Aldehyde Dehydrogenase [Brevundimonas subvibrioides ATCC 15264] gi|269143535|gb|EEZ69955.1| Aldehyde Dehydrogenase [Brevundimonas subvibrioides ATCC 15264]
  misc_feature (22)..(497): NCBI GI: 239831237 Blast Desc: Succinate-semialdehyde dehydrogenase [Ochrobactrum intermedium LMG 3301] gi|239823504|gb|EEQ95072.1| Succinate-semialdehyde dehydrogenase [Ochrobactrum intermedium
  misc_feature (18)..(494): NCBI GI: 242207654 Blast Desc: [Postia placenta Mad-698-R] gi|220731297|gb|EED85143.1| [Postia placenta Mad-698-R]
  misc_feature (19)..(497): NCBI GI: 256060509 Blast Desc: succinate semialdehyde dehydrogenase [Brucella neotomae 5K33] gi|261324503|ref|ZP_05963700.1| dehydrogenase [Brucella neotomae 5K33] gi|261300483|gb|EEY03980.1| [Brucella
  misc_feature (19)..(494): NCBI GI: 119382936 Blast Desc: aldehyde dehydrogenase [Paracoccus denitrificans PD1222] gi|119372703|gb|ABL68296.1| aldehyde dehydrogenase [Paracoccus denitrificans PD1222]
  misc_feature (19)..(497): NCBI GI: 225626885 Blast Desc: aldehyde dehydrogenase family protein [Brucella ceti str. Cudo] gi|254707893|ref|ZP_05169721.1| succinate semialdehyde dehydrogenase [Brucella pinnipedialis M163/99/10] succinate ceti
  misc_feature (19)..(497): NCBI GI: 163842654 Blast Desc: succinate semialdehyde dehydrogenase [Brucella suis ATCC 23445] gi|254701182|ref|ZP_05163010.1| succinate semialdehyde dehydrogenase [Brucella suis bv. 5 str. 513] bv. 3 5
  misc_feature (19)..(497): NCBI GI: 23501272 Blast Desc: aldehyde dehydrogenase family protein [Brucella suis 1330] gi|23347158|gb|AAN29314.1| aldehyde dehydrogenase family protein [Brucella suis 1330]
  misc_feature (16)..(464): SWISSPROT Homolog: EC 1.2.1.65 Salicylaldehyde dehydrogenase
  misc_feature: Useful for introducing or modulating the production of volatile compounds
  misc_feature: Useful for fungicidal and/or biocontrol applications
MTTTDYLEHLDSLAEQQQLFIDGVPCPSSDGATFTVNNPMTGKRIYDCSSATQSDYARAIDSASEAFKTWSNTSPTTRRQIFLKAADILEGYIKGDAPSILSSEISATNNWVKVNIFATVGVLRESAGLVTHIKGEIVPADRPGTTLLLQREAIGVIFAISPWNAPVNLTARAIATPLICGNTIVLKPSEYSPKSQHLVVRAFQAAGLPKGCLNFLPTAPVNSPAVTEFTVKHPAVRRINFTGSDRVGRIVAGWAASQLKPCVFELGGKAPVIIFEDANIDDAVDAVVFGALAYSGQICMSTERVIVHTSIAETFKTALIEKVKTLKVGNHEEDTEVSISGLFTQASATRVLGLVKGAVSAGAKLLYGDMQVSGPNKTIIMPHILEGVTKEMDISCQEIFGPLICLSEFQTEEEGIAVANDSEYSLCASVFSKDIMRALRVTKLVRAGACHINGPSVYIEAPLPNGGTGGSSGYGRFGGMAGVEEFTERKIVSLASPDLRHVF

SEQ ID NO: 12772 - DNA, 3361 bp, Muscodor strobelii
  misc_feature: SGI EST ID NO. CUFF.30339.1
  misc_feature: Variant of the nucleotide sequence at SEQ ID NO 12770
ggacaaagtcgtttcatttggtgcatagttagccttcatagaagtgagcgatctcgtcaacaccttcacaatgaccaccaccgactacttagagcatctcgactcccttgcagagcaacaacaactattcatagacggcgtgccctgtccaagctcagatggcgcaacttttacggtcaataatccgatgacgggcaagcggatctacgactgctcctctgcgacgcaaagtgactacgcgcgagcaatcgacagtgcatcagaagcattcaagacttggtcgaacacaagtcccacgactcgccgacaaatatttctcaaagcagctgatatcctagagggatacatcaaaggcgatgcaccgagcatcttgtcttcggaaatcagtgcaacgaataattgggtaaaagtcaatatcttcgcaaccgttggtgtgcttcgagaatctgcagggctggtgacgcatatcaagggtgagattgtccctgcggacagaccgggaactacgctcttgttgcagagagaggcgattggtgttattttcgctattagtccttggaacgcacctgtcaacttgactgcgagagcgatagcaacaccgctaatttgcgggaacaccatcgtgctcaagccttctgaatattcgcccaagagtcaacatctagtggtccgagctttccaagctgcgggtttgcctaaaggatgtttgaattttctgccgacagcacctgtaaactctccggctgtgacggagttcactgtgaagcatccagcagtgcgtcgcatcaacttcactggcagtgacagagtcggtcggatagtggctggctgggcagcttcacaattaaagccatgcgtttttgagctgggtggcaaagcgccagtcattatctttgaagatgcgaatatcgacgatgcagtcgacgcagttgtcttcggtgccttggcatactccggtcagatctgcatgtccacagagcgggtgattgtccatacgtcgatagcagagactttcaagacggccttgattgaaaaggtgaagacgctgaaagttggtaaccatgaggaagacacagaagtatccatctccgggctatttactcaggcatcagcaacgagagttttgggactggtgaaaggcgctgtctcggccggcgcaaagttgttatatggcgatatgcaagtcagtggacccaacaagacgattatcatgcctcacatcttggaaggtgtgactaaagagatggacatctcatgtcaggagatctttggacctttgatctgtttgtcagaatttcagacggaagaagagggaatcgccgtggccaatgatagtgagtacagcctctgcgcttccgtcttttccaaggacataatgcgagcacttcgcgtgacgaaactggtgcgagctggtgcttgtcacatcaatggacccagtgtgtatatagaggcgcctttgccgaacggtggaacaggaggaagctcgggttatggtcgattcggaggcatggctggcgttgaagaattcacggagcggaaaatcgttagcttggccagcccagatttgagacacgtgttctagataaattggaaaacatctactaagaggatctgcaagttctgaccggcgctgtgtcataatcttgatgcacgtcaagtatttagtgcaaggatcgatattttccagatgtttcatcaaatttgtaccacaaagatgacttgatggagcttaagatcgatatactcaggagtgtagaaaagtggtcatgagacgatgctaaggcgtcaagaggacgcgctatttgattcacttgtaacactggggagccgagatgaacactttatttctgctggactggtgctatctcctttgaaaagcttcgcaagaaatgtttagagtgccacaattactctcatattttccgggatattcttcgccccgatcatggatgacttgaggaattatttcaccaaaacgtggagtggaataggaggattagtcggcattacgaggaggttctctgctagaacgttggtttggtcggcgaccggccgcgactgcacgacgaaacgatcagctagcctgaaacgacgaatcagtttacctgtcaagctaagagacttgacgcgtgcccagctctcgacatagatcgtgcgcattaggtgcgcaggcacaatgcctaagagtttgtacatgaaggcaacaagaagaaaaatgaatccggtgccagggccgttggtgatgataaccctgggaaacctgactccagaagtcgtattgccgaaatagacaggggaggcgaggagacggacggtatccagtaagcttaagatcgccgtgaacggtgtcgttagccaactctggtgaacatagcgagctctaccgaatagtacaatatcgaaggttccactatcgagaccaattttcgagaaacgatctaccaaccgacgttcgaaagccaggactttatcgaagctcttgctgtcgcctttgccgacagcccaccggcggtgtgcttttttctcacaccgaatactccgctcgaccatttggatcatctccgcagtgtgaccgcctgatccacacacgatgaagatataatgaacagactgtgaacctaccaaccccttgcgtagcgccatgctgattaaaggtaatgagcagatcagcatgatggcgaagatgagcaaagtgtcacggccctgaggcttggacatgctcgcggtaacgacgatagcgcccgttgcgacgatagcgaggccgagcccaacagcagcaaaataggggactagatacatgtaggccatggtgttgcccaccgtattctggacaacacgatcacgagcagcttccatgacggacaagctctcttgatgaggatggtttgcgtgaaccgaaggagtgggagtattggggagggcattactacgagtctctctagagaactgagaagcttcgcttttatgctgagctctcgccattgttgaatcagaggtaccacctagatcagttgatagtgatgaatgagcctggcgatatgaagtcgaaagtcaaattgaacaatcggcgttaggctggagtcattgattttgaatgcaatgtgacctagtaagccccaagactaatcgatccagttccgctctcctatttcggacaaacaatatcgattcgatgcttcacaagctactgtcccatcgtggcatctgaacatttgttgcgatacggatagcagtgaggcattcaactcggccttcccgataggtatcgacctatgtgtgatccagacacaatacaggaagatgtatgtgtcgcttctggtaacacaagccgatatcattcattgggaggcgctgagcgtaa

SEQ ID NO: 12773 - DNA, 882 bp, Muscodor strobelii
  misc_feature: SGI cDNA ID NO. 564164
  misc_feature: Elevated expression when VOC is produced
  misc_feature: Encodes the peptide sequence at SEQ ID NO 12774
atggctacgtctacatccgccgcaactctgcatttaccagacaaaagagtgctgtcatacgatatcacatatgcatcaaaagatacggctcgaccatacgtccttcttgccagcccattgtgcgcacctctcgcagtatgggatcatgtagttcccgagctggtgtcgctgggcttcaacgtactaagatttgatcaaccgggtcatgggtcatctggtgtgcctgcagacttatcttcgacgacgttcgagtccatggctgacgacattcaacatcttcttacacatcttcggatcaagaaactacacgcatggattggtgttagcatgggagctgcaactggaatagtctatgctgccaaatatccagaggtcatcgagcgccttattccctgcgacaccatctcgtcgtctccggtgaatgccggggttgaagacgccttcgggcctcgtgtggctgctgcacgtgaagccggtaatcttgacgcgagtgtcgagggcaccttggagcgctggtttggacgtcaatggatggaaaccaacatctcggagagggaaaggatgaggaaactgatgcgcagcacaagtatcgatggattcgagacgtgttgcgctgcactccgaagccatacttttgatctgcgaccattgaccgccaaggctgggactggtgtcgaatcagcattgctgatggtaggcgcaaacgacgcaaacctgcctcagtccatgcaagaactccgaaaagggattgaagatgggctgagaagcaaaaagggagagtccgtttcagtcgaattgaaagttgtcgaaaatgctggccatgtcttgttcattgatggatttacgcaattcatagataacataacccaattcctcgcctaa

SEQ ID NO: 12774 - protein, 293 aa, Muscodor strobelii
  misc_feature: SGI Peptide ID NO. 564164
  misc_feature (59)..(290): Pfam Id: PF00561 Pfam Desc: alpha/beta hydrolase fold
  misc_feature (59)..(148): Pfam Id: PF00561 Pfam Desc: alpha/beta hydrolase fold
  misc_feature (8)..(292): NCBI GI: 39940018 Blast Desc: MGG_05231 [Magnaporthe grisea 70-15] gi|145010494|gb|EDJ95150.1| MGG_05231 [Magnaporthe grisea 70-15]
  misc_feature (18)..(292): NCBI GI: 144228243 Blast Desc: zearalenone lactonase [Magnaporthe grisea]
  misc_feature (7)..(262): NCBI GI: 256730680 Blast Desc: NECHADRAFT_89598 [Nectria haematococca mpVI 77-13-4]
  misc_feature (8)..(292): NCBI GI: 85068319 Blast Desc: NCU05345 [Neurospora crassa OR74A] gi|28881339|emb|CAD70342.1| related to 3-OXOADIPATE ENOL-LACTONASE II [Neurospora crassa] gi|28925013|gb|EAA34100.1|
  misc_feature (59)..(293): NCBI GI: 242811709 Blast Desc: conserved [Talaromyces stipitatus ATCC 10500] gi|218714144|gb|EED13567.1| conserved [Talaromyces stipitatus ATCC 10500]
  misc_feature (2)..(293): NCBI GI: 71023813 Blast Desc: UM05989.1 [Ustilago maydis 521] gi|46101728|gb|EAK86961.1| UM05989.1 [Ustilago maydis 521]
  misc_feature (12)..(293): NCBI GI: 46139663 Blast Desc: FG11346.1 [Gibberella zeae PH-1]
  misc_feature (32)..(292): NCBI GI: 171683800 Blast Desc: protein product [Podospora anserina] gi|170941860|emb|CAP67513.1| protein product [Podospora anserina]
  misc_feature (32)..(293): NCBI GI: 116750396 Blast Desc: 3-oxoadipate enol-lactonase [Syntrophobacter fumaroxidans MPOB] gi|116750438|ref|YP_847125.1| 3-oxoadipate enol-lactonase [Syntrophobacter fumaroxidans MPOB] 3-oxoadipate
  misc_feature (16)..(292): NCBI GI: 241661781 Blast Desc: alpha/beta hydrolase fold protein [Ralstonia pickettii 12D] gi|240863808|gb|ACS61469.1| alpha/beta hydrolase fold protein [Ralstonia pickettii 12D]
  misc_feature (22)..(236): SWISSPROT Homolog: EC 3.1.1.24 3-oxoadipate enol-lactonase
  misc_feature: Useful for introducing or modulating the production of volatile compounds
MATSTSAATLHLPDKRVLSYDITYASKDTARPYVLLASPLCAPLAVWDHVVPELVSLGFNVLRFDQPGHGSSGVPADLSSTTFESMADDIQHLLTHLRIKKLHAWIGVSMGAATGIVYAAKYPEVIERLIPCDTISSSPVNAGVEDAFGPRVAAAREAGNLDASVEGTLERWFGRQWMETNISERERMRKLMRSTSIDGFETCCAALRSHTFDLRPLTAKAGTGVESALLMVGANDANLPQSMQELRKGIEDGLRSKKGESVSVELKVVENAGHVLFIDGFTQFIDNITQFLA

SEQ ID NO: 12775 - DNA, 3855 bp, Muscodor strobelii
  misc_feature: SGI cDNA ID NO. 564165
  misc_feature: Elevated expression when VOC is produced
  misc_feature: Encodes the peptide sequence at SEQ ID NO 12776
atgagtacaccttcgcctctctctgcagctgaatctaaggcccggcgccgaagagttcccgaagatcaaaggaaacgcggagttcaaagctgcgacctctgtcgcaagaaacgatgcaaatgcatccctgccccaggcggagggcatcaatgtgccaattgcttggctcagaacgccccatgtacatataggcttccgcggaaaacaagaatctatgggagtgtagaggatttgagtgatcgctttcgttgtctggaagcccttgttcgaggtgcatttccaaatgagacactcaactctgtccaagacctgctcgagcttggacagcgcaaaggctatgagatgcctgcattgaatcatgaagcgggagaatcctctaaattggatgacatcttgcagaatcaaggtcgctccacttctgtcgaacagcataatgaggcaaaccatcgcgtaattggccaacttaaacgagacgacacgtcacggactctgaccgaatcatcagggtcctctgcacctgcagatgaaagctctaccgacaattatcctctgatcaaggatccgtctggaagggaacattatatagggccatctggcggtcttcaatttttaggccagctacgtcggttactcatctccagtgaacaagactctgaacttgatgaaccacccagcgcaacggagggatccaagtttgtcgaagacgatggcgctttggccttggagactgatgatctcaacgcagaaaaagtcgatggagaactagaagcactttcgatcaattctggggtagttcatagctctcctggaagtattctcaccacgaatagcgatgtgacgaagaagtcaacagccgaaatcgataggtattggaggcagctgcctagtccaaacgtcataagccaattgcttcacgcttatttcttgaaggcgcatgatgattttcctcttttccatcaaggtacatttgaggaggaatacgaggcgcgacttggacgttatcaagcgcgctgtcgctcaacgaccacaacaccacagccagttgaagacttggatatgggttggttaggttgccttcacatgatgatcgccgtcggtagcatgcgggagccacccatttccgaaggcgaatccgacaacgcgaggttgattcgctattgcgtccaaagcacgaaagccatgattccatattttaccagcaactgcacgctcaatcatctcagagcactcatcttatttgctctcttcctacataacaataatgagagaaacgcaacctggaatctaattgggactgctattagaatgtcattcgccttgggtttgcatcaagaaagtacgagctcaaatttccggcccattgagagggaagttagaaagcgagtcttctgcactttgtatggggttgagcaatttctggcgaacaacctcggaaggcccagcggcatggtcgatagcgacatcgagatcagtccccctcgtgaagatctacttggcggcaatggaggcagcggagatacccgtactcaagtagttgcttattcagtacgattataccaagcgatgaaaaagggcgttccacctcgaagccaagcgccgagcgacatcgaagttggcatccgtgatgctgaggccgttttgaatgaattggaagcatggaacgccgaggttttgaagcagaaatggctaaacataccgtctgtcaagagcgacacccagcttttcaacgagccaaataatgtcccgtccatggaattctcacacttgaagacactattagcctggcaccccgtgtctagactgcgagcaatgttactgctacgcatgcagtaccattacattgtgcttcttaacactcggccatttcttttgcaccagttgtctgagaggactcccacagaagcagatgatccttctggaggctccgaccaacaacatgatagagcggtgagaatggccgatctctgtattcgacattcaggacagctggccttgctaatccttctgatggactctttcgatctcgtcaatggagtgtctggcctagatcatttttacatctattggtcctcacagtcttttatggacttagtcacccaagtacatgctgtctcgatgaagttgaagcagtgcggaacaatgaagaggttcacggggcttatacatgacttcataaaatatgttcggaaacctaaaggacgcccccggaataatgtaaagtccccaagtatcgaacaacacgcggaaacaacaccggcgatcgatgagggcagtgttacccaggcagctgtataccagacgttcaacccgaacgcctacaacgctcctgcgttctattggccgggcggactgatgccgctgggtgacacaatggagggtggtatggcagtggatactagtattcccactcttgggacttgggaagggactttcgttgatcccagtttcgttccgcctataacggactatgagtacgagaatggttataactttatgccacatcacatgcatggtcgccgctggcttgaccttgagcctcacattatgaacaccgaatgcaataccaattatttatctttcaaacttgaaggcatgccccgcgcagcccgtaaactcgatgtcctcgttgttggtggtgggctcggcggcctagccactggtctggcactccaaactgatggccatagagtacgaatactagattccgcgccagaatttgccgagcctcctagtacttgcactaaagattgcaaaaaggccggcgccggcatccgtataccaccgaactccagccgcctccttctccgatggggcgtggacctagaaaatatgaagaaatcacagtctagaagatatcatttcgttagatggaaagatggtgcaactatcgttcaaattccatttgaaaatattgtcgagacccacggtgcaccatactatctagtacaccgagctgacctgcacgctggactggtcgacgcagttcttaaatccggggtcgaaataatcaacagtaaaagaattacttcttatgactttgatgctcctagtgccactacagacgaaggcgaaacgttcacggcagatctcgtgatcggcgcagatggcattaagtctctagtccggcctttacttacgggccaggccgacagacctcgtgatactggggatgtggcatatcgtatcatcatacctgcggagaagttgctgcaggatccggagttagaagatctcattacgaacccctgtacaacatcgtggtgtggaccagatgcccatattgtcggataccctatccgcaacggcgaattatataatatcgtcgtctgcgcaacctcctacaacgagactacagacgatgtttgggtcgttgaaggtgataatactgaattgtgcaagcgttttgagcaatgggagtctcgtgttcagaagttgtgcgccttaacaggtggtttcagaaaatggaggctctgtgatcttggaaacttgagtcgctgggttcacccatccggcaaagttgctctagtcggtgacgcatgccatcctatgctaccataccttgcccaaggtgcggcacaatcattcgaggatgccgcagcactacgtcagtgtttggcactagacatcgatatgaaagaggcattggacaagtatgagtcgatacgcacccctagagcgacacttgttcagggcaagacgcgtgagcatcagtatatcctacatattgacgatggagaggaacaagtagagcgcgatcgaaagctgaagataaatggtgaagagaatcctatcttctgggggtttgatcagcgacggcattggctgttcagtcatgatgctgagaagttgacctga

SEQ ID NO: 12776 - protein, 1284 aa, Muscodor strobelii
  misc_feature: SGI Peptide ID NO. 564165
  misc_feature (29)..(70): Pfam Id: PF00172 Pfam Desc: Fungal Zn(2)-Cys(6) binuclear cluster domain
  misc_feature (871)..(1233): Pfam Id: PF01494 Pfam Desc: FAD binding domain
  misc_feature (403)..(496): Pfam Id: PF04082 Pfam Desc: Fungal specific transcription factor domain
  misc_feature (873)..(907): Pfam Id: PF01266 Pfam Desc: FAD dependent oxidoreductase
  misc_feature (871)..(901): Pfam Id: PF01494 Pfam Desc: FAD binding domain
  misc_feature (920)..(1283): NCBI GI: 145251680 Blast Desc: An16g00390 [Aspergillus niger] gi|134082889|emb|CAK42719.1| protein product [Aspergillus niger]
  misc_feature (81)..(735): NCBI GI: 256730474 Blast Desc: NECHADRAFT_89599 [Nectria haematococca mpVI 77-13-4]
  misc_feature (92)..(741): NCBI GI: 261361070 Blast Desc: conserved [Verticillium albo-atrum VaMs.102]
  misc_feature (80)..(735): NCBI GI: 46109698 Blast Desc: FG01731.1 [Gibberella zeae PH-1]
  misc_feature (893)..(1283): NCBI GI: 256723340 Blast Desc: NECHADRAFT_51747 [Nectria haematococca mpVI 77-13-4]
  misc_feature (881)..(1284): NCBI GI: 242218696 Blast Desc: [Postia placenta Mad-698-R] gi|220725700|gb|EED79676.1| [Postia placenta Mad-698-R]
  misc_feature (860)..(1282): NCBI GI: 170100905 Blast Desc: [Laccaria bicolor S238N-H82] gi|164643629|gb|EDR07881.1| [Laccaria bicolor S238N-H82]
  misc_feature (865)..(1280): NCBI GI: 258568520 Blast Desc: conserved [Uncinocarpus reesii 1704] gi|237906450|gb|EEP80851.1| conserved [Uncinocarpus reesii 1704]
  misc_feature (867)..(1282): NCBI GI: 170106283 Blast Desc: [Laccaria bicolor S238N-H82] gi|164640699|gb|EDR04963.1| [Laccaria bicolor S238N-H82]
  misc_feature (871)..(1257): NCBI GI: 115402247 Blast Desc: conserved [Aspergillus terreus NIH2624] gi|114189046|gb|EAU30746.1| conserved [Aspergillus terreus NIH2624]
  misc_feature: Useful for introducing or modulating the production of volatile compounds
MSTPSPLSAAESKARRRRVPEDQRKRGVQSCDLCRKKRCKCIPAPGGGHQCANCLAQNAPCTYRLPRKTRIYGSVEDLSDRFRCLEALVRGAFPNETLNSVQDLLELGQRKGYEMPALNHEAGESSKLDDILQNQGRSTSVEQHNEANHRVIGQLKRDDTSRTLTESSGSSAPADESSTDNYPLIKDPSGREHYIGPSGGLQFLGQLRRLLISSEQDSELDEPPSATEGSKFVEDDGALALETDDLNAEKVDGELEALSINSGVVHSSPGSILTTNSDVTKKSTAEIDRYWRQLPSPNVISQLLHAYFLKAHDDFPLFHQGTFEEEYEARLGRYQARCRSTTTTPQPVEDLDMGWLGCLHMMIAVGSMREPPISEGESDNARLIRYCVQSTKAMIPYFTSNCTLNHLRALILFALFLHNNNERNATWNLIGTAIRMSFALGLHQESTSSNFRPIEREVRKRVFCTLYGVEQFLANNLGRPSGMVDSDIEISPPREDLLGGNGGSGDTRTQVVAYSVRLYQAMKKGVPPRSQAPSDIEVGIRDAEAVLNELEAWNAEVLKQKWLNIPSVKSDTQLFNEPNNVPSMEFSHLKTLLAWHPVSRLRAMLLLRMQYHYIVLLNTRPFLLHQLSERTPTEADDPSGGSDQQHDRAVRMADLCIRHSGQLALLILLMDSFDLVNGVSGLDHFYIYWSSQSFMDLVTQVHAVSMKLKQCGTMKRFTGLIHDFIKYVRKPKGRPRNNVKSPSIEQHAETTPAIDEGSVTQAAVYQTFNPNAYNAPAFYWPGGLMPLGDTMEGGMAVDTSIPTLGTWEGTFVDPSFVPPITDYEYENGYNFMPHHMHGRRWLDLEPHIMNTECNTNYLSFKLEGMPRAARKLDVLVVGGGLGGLATGLALQTDGHRVRILDSAPEFAEPPSTCTKDCKKAGAGIRIPPNSSRLLLRWGVDLENMKKSQSRRYHFVRWKDGATIVQIPFENIVETHGAPYYLVHRADLHAGLVDAVLKSGVEIINSKRITSYDFDAPSATTDEGETFTADLVIGADGIKSLVRPLLTGQADRPRDTGDVAYRIIIPAEKLLQDPELEDLITNPCTTSWCGPDAHIVGYPIRNGELYNIVVCATSYNETTDDVWVVEGDNTELCKRFEQWESRVQKLCALTGGFRKWRLCDLGNLSRWVHPSGKVALVGDACHPMLPYLAQGAAQSFEDAAALRQCLALDIDMKEALDKYESIRTPRATLVQGKTREHQYILHIDDGEEQVERDRKLKINGEENPIFWGFDQRRHWLFSHDAEKLT

SEQ ID NO: 12777 - DNA, 5320 bp, Muscodor strobelii
  misc_feature: SGI EST ID NO. CUFF.30308.0
  misc_feature: Variant of the nucleotide sequence at SEQ ID NO 12775
tatacgaaaggttataagctttgttcaagagctattctcccctgtatggccattgtactttaggcgaggaattgggttatgttatctatgaattgcgtaaatccatcaatgaacaagacatggccagcattttcgacaactttcaattcgactgaaacggactctccctttttgcttctcagcccatcttcaatcccttttcggagttcttgcatggactgaggcaggtttgcgtcgtttgcgcctaccatcagcaatgctgattcgacaccagtcccagccttggcggtcaatggtcgcagatcaaaagtatggcttcggagtgcagcgcaacacgtctcgaatccatcgatacttgtgctgcgcatcagtttcctcatcctttccctctccgagatgttggtttccatccattgacgtccaaaccagcgctccaaggtgccctcgacactcgcgtcaagattaccggcttcacgtgcagcagccacacgaggcccgaaggcgtcttcaaccccggcattcaccggagacgacgagatggtgtcgcagggaataaggcgctcgatgacctctggatatttggcagcatagactattccagttgcagctcccatgctaacaccaatccatgcgtgtagtttcttgatccgaagatgtgtaagaagatgttgaatgtcgtcagccatggactcgaacgtcgtcgaagataagtctgcaggcacaccagatgacccatgacccggttgatcaaatcttagtacgttgaagcccagcgacaccagctcgggaactacatgatcccatactgcgagaggtgcgcacaatgggctggcaagaaggacgtatggtcgagccgtatcttttgatgcatatgtgatatcgtatgacagcactcttttgtctggtaaatgcagagttgcggcggatgtagacgtagccatcgtgcgattcacaactccaatgaaggcttgatgttgtttcaggagttaacagaattacagaataaaatagtaagtctgagttgttgcgttgtctaataccgtcaatatggttcaacttatggtagtttcgccagtcacgtcatcccgaattggcgtcacagataaaccttatatgcatccgaaccgtgcctggggtagcactaagatatttggcagtgcgatcaaacaatgagtatcgtttcaacagaacaacagtgtgttcgaatcgaacaatcaatatcataagcaacgattattcaccccagcctccacatcgcaaaagctgcagttgacattgattcaccttttcaatgctactgaacctgtcgcatcgtaactacctgtactcacagccttaggtcaaactatttcagggtagcttggtccaggctgaagtctgtgcctggctcgtatactcgtttagggtaccgtatccccgcattcaacccagtgagcatggagcagctgtatggagaatttgatgttgaaatgagccaatcaacccctcgcaccatgtctgaggacggataggcatggtgaccttccagaacaaggacatcaatggctaggagtcatgattcctggttcgtagatgcgccatcacgtgttttagcaggggctgttggaggtatttgcggttttgatcagaatgttgaatcccctgtttttgtttgtctcaagagtcccgcatctgctagtaggaatgatccatccgctctgtaagcacttggacccgttcatctgtcgttggccgtattgtcgcgcgaagtcgagacccatacggtccaccaccatcggaagtgacgggtaacagtaccatgagtacaccttcgcctctctctgcagctgaatctaaggcccggcgccgaagagttcccgaagatcaaaggaaacgcggagttcaaagctgcgacctctgtcgcaagaaacgatgcaaatgcatccctgccccaggcggagggcatcaatgtgccaattgcttggctcagaacgccccatgtacatataggcttccgcggaaaacaagaatctatgggagtgtagaggatttgagtgatcgctttcgttgtctggaagcccttgttcgaggtgcatttccaaatgagacactcaactctgtccaagacctgctcgagcttggacagcgcaaaggctatgagatgcctgcattgaatcatgaagcgggagaatcctctaaattggatgacatcttgcagaatcaaggtcgctccacttctgtcgaacagcataatgaggcaaaccatcgcgtaattggccaacttaaacgagacgacacgtcacggactctgaccgaatcatcagggtcctctgcacctgcagatgaaagctctaccgacaattatcctctgatcaaggatccgtctggaagggaacattatatagggccatctggcggtcttcaatttttaggccagctacgtcggttactcatctccagtgaacaagactctgaacttgatgaaccacccagcgcaacggagggatccaagtttgtcgaagacgatggcgctttggccttggagactgatgatctcaacgcagaaaaagtcgatggagaactagaagcactttcgatcaattctggggtagttcatagctctcctggaagtattctcaccacgaatagcgatgtgacgaagaagtcaacagccgaaatcgataggtattggaggcagctgcctagtccaaacgtcataagccaattgcttcacgcttatttcttgaaggcgcatgatgattttcctcttttccatcaaggtacatttgaggaggaatacgaggcgcgacttggacgttatcaagcgcgctgtcgctcaacgaccacaacaccacagccagttgaagacttggatatgggttggttaggttgccttcacatgatgatcgccgtcggtagcatgcgggagccacccatttccgaaggcgaatccgacaacgcgaggttgattcgctattgcgtccaaagcacgaaagccatgattccatattttaccagcaactgcacgctcaatcatctcagagcactcatcttatttgctctcttcctacataacaataatgagagaaacgcaacctggaatctaattgggactgctattagaatgtcattcgccttgggtttgcatcaagaaagtacgagctcaaatttccggcccattgagagggaagttagaaagcgagtcttctgcactttgtatggggttgagcaatttctggcgaacaacctcggaaggcccagcggcatggtcgatagcgacatcgagatcagtccccctcgtgaagatctacttggcggcaatggaggcagcggagatacccgtactcaagtagttgcttattcagtacgattataccaagcgatgaaaaagggcgttccacctcgaagccaagcgccgagcgacatcgaagttggcatccgtgatgctgaggccgttttgaatgaattggaagcatggaacgccgaggttttgaagcagaaatggctaaacataccgtctgtcaagagcgacacccagcttttcaacgagccaaataatgtcccgtccatggaattctcacacttgaagacactattagcctggcaccccgtgtctagactgcgagcaatgttactgctacgcatgcagtaccattacattgtgcttcttaacactcggccatttcttttgcaccagttgtctgagaggactcccacagaagcagatgatccttctggaggctccgaccaacaacatgatagagcggtgagaatggccgatctctgtattcgacattcaggacagctggccttgctaatccttctgatggactctttcgatctcgtcaatggagtgtctggcctagatcatttttacatctattggtcctgtatgtgtctttgtcttgcgagcttaagagtaaagcggtcttcgcctgaatgggacccttcgtcagcacagtcttttatggacttagtcacccaagtacatgctgtctcgatgaagttgaagcagtgcggaacaatgaagaggttcacggggcttatacatgacttcataaaatatgttcggaaacctaaaggacgcccccggaataatgtaaagtccccaagtatcgaacaacacgcggaaacaacaccggcgatcgatgagggcagtgttacccaggcagctgtataccagacgttcaacccgaacgcctacaacgctcctgcgttctattggccgggcggactgatgccgctgggtgacacaatggagggtggtatggcagtggatactagtattcccactcttgggacttgggaagggactttcgttgatcccagtttcgttccgcctataacggactatgagtacgagaatggttataactttatgccacatcacatgcatggtcgccgctggtgagtgactctgaactggaattctgaatcaacttcggaccttctggagtcgtagcttctactaggaggcccaggaactggaaaactgggaaattgattagcgggaatgaatttggaattggtaaaccagacccatccggagtatattagggtttttttgggttgaacatgattgcgtttgatggattttctgtaagcgaattggtatatatgatgtgtaaataggataagcaacatattttagagcggtctgcgccaggtacgcgatctacaggagttatacattttaaggtactgagcagatcctgacgatcgtgaatggatacgtcgttcgctggcggcggcaaacagttcggtttctgggatgactccacgctctcgggtccattattcgcctggcgagcttgatatgtcaggcggtgggcgggttcgtggggaaaactggagataataatgactcgaaaagaacgggttggacccttaaacatgattatcgttctccggcttcttgattccgaaccccggaaacatgcaaccgctccgaggagatgggaggcgaggtagggtcccccgggaggcagcatcctttgtgcgacgttgtcccaggtcatcgggccgcatgcatatggtatcaagactagttgtgaatagatcatagagcagtgcccaaatgtaagggcgagcctcgaaatgaacaatggtataaatctaatagctacctgattgtctcgtaggcttgaccttgagcctcacattatgaacaccgaatggtatttcaaggcagtccacattcgcttgttctcgttccaatgcaacaatctctagcaataccaattatttatctttcaaacttgaaggcatgccccgcgcagcccgtaaactcgatgtcctcgttgttggtggtgggctcggcggcctagccactggtctggca

SEQ ID NO: 12778 - DNA, 1908 bp, Muscodor strobelii
  misc_feature: SGI cDNA ID NO. 564166
  misc_feature: Encodes the peptide sequence at SEQ ID NO 12779
atggcgtcgtcttcaacgacgaatggcacttctcctggtgcttccataaacgatatcccaaagtcatggaacttcacatcaaaattgccacccgacaccatctttccgaccccagcagactcccataagaccccgcgcggcgagatcggtccacgccaagtacgagatgccctgttcacttgggttagacctcagcctgttaaagagccggagctgttggccgtaagtccggcggcaatgcgcgatcttggaatccgcagtggcgatgagaaaagtcccgatttcgtggccaccgtagccggcaacaagatacaaggatgggacgaggagaaaggcgagggtggatatccatgggcgcaatgctatggcgggtttcaattcggaagttgggccggccagctcggagatgggcgcgccatctcactattcgaaacgacgaacccagattcccgagttcgatacgaattagcactcaaaggcgctggtctaacgccttacagccgctttgccgacggcaaggctgtgctgcggagtagcattcgggaattcgtagtcagtgaagcgctcaatgcccttgggataccgagtacccgcgccctcagtttgactctattacccgataccaaagtctttcgggaaacggttgagcctggtgccattgtagcccgatttgcgcagagctggttacgaattggaaattttgatatcttacgcgcgagaggagaccgaaagctcatacgccagcttgccacctatttagcagacgacgtatttggaggctgggagacattgcccgcgcgtctcgaaaacccagacaaggccgcagaaaatctgacgccacagcgtggtgtctcttacgatacgatacaagggccatcagaatcaagcgagaatcgtttcacacgcctgtacagagaaatcgtgcgacgcaatgcgctcacggtggcaaagtggcaggcgtacggattcatgaatggggtactaaatacagataatacgtctctcttcggactgagcattgactttggtccttttgcatttatggataacttcgatcctatgtacacaccaaatcacgacgacggcatgctgcgatacagctatcgtaaccagcccagcattatttggtggaatcttgtacgattgggtgagtcactgggtgagctcatcggtgcgggtgaccaggtcgatagtgagaaattcgtcaaagatggtgtcgcagaggacgaggcaagcggaatcgtcgagagggcggaaaaaatcattatgcaggtcggcgaggaatacaaagccgtcttcctggccgaatacaagagagtcatgacatcaagacttggccttaagaacttcaaagagagcgatttcgatcagttattcagcgagctcctagatactatggaagctttagagctagacttcaacgtgttcttcaggagactgagcgctgtcaaaatttctgagctcgagacagaggaggcgcgccaagagaaggctgcggtgttcttctaccaggatggtgtcaccggccttggaggcgaggaagaagggcgtaagcgtgttggtgcctggttagacaaatggcgtcaacgcatcactgaagactggagtgaggacgagtcagtttcggaagaagctgaggctcagcgccgagaggctatgaagaaagtaaacccaaatttcatcccgcgaagctggatacttgacgaacttatccgccgagtcgagaaagagaaagagagagatgtccttgaccgcgtcatgaccttggcgttaaatcctttcgaagactcatgggctggtcgtgagttcaatggcgagatttacgagggcaatgcagacgaggaaaaacggtggactagtgatgttccaaaggtcgggcgattgatgcagtgcagttgcagttcataa

SEQ ID NO: 12779 - protein, 635 aa, Muscodor strobelii
  misc_feature: SGI Peptide ID NO. 564166
  misc_feature (57)..(594): Pfam Id: PF02696 Pfam Desc: Uncharacterized ACR, YdiU/UPF0061 family
  misc_feature (117)..(252): Pfam Id: PF02696 Pfam Desc: Uncharacterized ACR, YdiU/UPF0061 family
  misc_feature (304)..(481): Pfam Id: PF02696 Pfam Desc: Uncharacterized ACR, YdiU/UPF0061 family
  misc_feature (13)..(635): NCBI GI: 46121637 Blast Desc: FG05197.1 [Gibberella zeae PH-1]
  misc_feature (7)..(635): NCBI GI: 116204689 Blast Desc: CHGG_10228 [Chaetomium globosum CBS 148.51] gi|88176356|gb|EAQ83824.1| CHGG_10228 [Chaetomium globosum CBS 148.51]
  misc_feature (13)..(635): NCBI GI: 145608380 Blast Desc: MGG_03159 [Magnaporthe grisea 70-15] gi|145015860|gb|EDK00350.1| MGG_03159 [Magnaporthe grisea 70-15]
  misc_feature (1)..(635): NCBI GI: 164428165 Blast Desc: NCU01758 [Neurospora crassa OR74A] gi|16416091|emb|CAB91237.2| conserved [Neurospora crassa] gi|157072037|gb|EAA27945.2| NCU01758 [Neurospora crassa OR74A]
  misc_feature (13)..(635): NCBI GI: 154318896 Blast Desc: BC1G_02837 [Botryotinia fuckeliana B05.10] gi|150857967|gb|EDN33159.1| BC1G_02837 [Botryotinia fuckeliana B05.10]
  misc_feature (1)..(635): NCBI GI: 156063906 Blast Desc: SS1G_02071 [Sclerotinia sclerotiorum 1980] gi|154697405|gb|EDN97143.1| SS1G_02071 [Sclerotinia sclerotiorum 1980]
  misc_feature (4)..(635): NCBI GI: 145238912 Blast Desc: An07g10280 [Aspergillus niger] gi|134076604|emb|CAK45157.1| protein product [Aspergillus niger]
  misc_feature (8)..(635): NCBI GI: 226287746 Blast Desc: conserved [Paracoccidioides brasiliensis Pb18]
  misc_feature (10)..(635): NCBI GI: 255931617 Blast Desc: Pc12g05180 [Penicillium chrysogenum Wisconsin 54-1255] gi|211581984|emb|CAP80145.1| Pc12g05180 [Penicillium chrysogenum Wisconsin 54-1255]
  misc_feature (4)..(635): NCBI GI: 115385943 Blast Desc: conserved [Aspergillus terreus NIH2624] gi|114187965|gb|EAU29665.1| conserved [Aspergillus terreus NIH2624]
MASSSTTNGTSPGASINDIPKSWNFTSKLPPDTIFPTPADSHKTPRGEIGPRQVRDALFTWVRPQPVKEPELLAVSPAAMRDLGIRSGDEKSPDFVATVAGNKIQGWDEEKGEGGYPWAQCYGGFQFGSWAGQLGDGRAISLFETTNPDSRVRYELALKGAGLTPYSRFADGKAVLRSSIREFVVSEALNALGIPSTRALSLTLLPDTKVFRETVEPGAIVARFAQSWLRIGNFDILRARGDRKLIRQLATYLADDVFGGWETLPARLENPDKAAENLTPQRGVSYDTIQGPSESSENRFTRLYREIVRRNALTVAKWQAYGFMNGVLNTDNTSLFGLSIDFGPFAFMDNFDPMYTPNHDDGMLRYSYRNQPSIIWWNLVRLGESLGELIGAGDQVDSEKFVKDGVAEDEASGIVERAEKIIMQVGEEYKAVFLAEYKRVMTSRLGLKNFKESDFDQLFSELLDTMEALELDFNVFFRRLSAVKISELETEEARQEKAAVFFYQDGVTGLGGEEEGRKRVGAWLDKWRQRITEDWSEDESVSEEAEAQRREAMKKVNPNFIPRSWILDELIRRVEKEKERDVLDRVMTLALNPFEDSWAGREFNGEIYEGNADEEKRWTSDVPKVGRLMQCSCSS

SEQ ID NO: 12780 - DNA, 2562 bp, Muscodor strobelii
  misc_feature: SGI EST ID NO. CUFF.30326.0
  misc_feature: Variant of the nucleotide sequence at SEQ ID NO 12778
gccaactacagtttaggtgatccatgagatgagacagggatctaagacccctccatgactgacggacagcagcgccctgtggcgggagctctgacgagcgctgacgacatttggcctcggccttgcattgcaatttacagtacatccggagctgctcggtagaaattttgaccctgaattaccatttgcatctggtttctattgacaattacttccattcacacttttattactatctgtactactcgtaagatacccgcaaataccgaacagcttttattatcaatacccgatcatccgctccgaggcggcgccctatatgttacgaacttgtgtcaaattgcgcaacatttcgccacggatacggtacagcactagaatcgtccacctgacgcagaaaatggcgtcgtcttcaacgacgaatggcacttctcctggtgcttccataaacgatatcccaaagtcatggaacttcacatcaaaattgccacccgacaccatctttccgaccccagcagactcccataagaccccgcgcggcgagatcggtccacgccaagtacgagatgccctgttcacttgggttagacctcagcctgttaaagagccggagctgttggccgtaagtccggcggcaatgcgcgatcttggaatccgcagtggcgatgagaaaagtcccgatttcgtggccaccgtagccggcaacaagatacaaggatgggacgaggagaaaggcgagggtggatatccatgggcgcaatgctatggcgggtttcaattcggaagttgggccggccagctcggagatgggcgcgccatctcactattcgaaacgacgaacccagattcccgagttcgatacgaattagcactcaaaggcgctggtctaacgccttacagccgctttgccgacggcaaggctgtgctgcggagtagcattcgggaattcgtagtcagtgaagcgctcaatgcccttgggataccgagtacccgcgccctcagtttgactctattacccgataccaaagtctttcgggaaacggttgagcctggtgccattgtagcccgatttgcgcagagctggttacgaattggaaattttgatatcttacgcgcgagaggagaccgaaagctcatacgccagcttgccacctatttagcagacgacgtatttggaggctgggagacattgcccgcgcgtctcgaaaacccagacaaggccgcagaaaatctgacgccacagcgtggtgtctcttacgatacgatacaagggccatcagaatcaagcgagaatcgtttcacacgcctgtacagagaaatcgtgcgacgcaatgcgctcacggtggcaaagtggcaggcgtacggattcatgaatggggtactaaatacagataatacgtctctcttcggactgagcattgactttggtccttttgcatttatggataacttcgatcctatgtacacaccaaatcacgacgacggcatgctgcgatacagctatcgtaaccagcccagcattatttggtggaatcttgtacgattgggtgagtcactgggtgagctcatcggtgcgggtgaccaggtcgatagtgagaaattcgtcaaagatggtgtcgcagaggacgaggcaagcggaatcgtcgagagggcggaaaaaatcattatgcaggtcggcgaggaatacaaagccgtcttcctggccgaatacaagagagtcatgacatcaagacttggccttaagaacttcaaagagagcgatttcgatcagttattcagcgagctcctagatactatggaagctttagagctagacttcaacgtgttcttcaggagactgagcgctgtcaaaatttctgagctcgagacagaggaggcgcgccaagagaaggctgcggtgttcttctaccaggatggtgtcaccggccttggaggcgaggaagaagggcgtaagcgtgttggtgcctggttagacaaatggcgtcaacgcatcactgaagactggagtgaggacgagtcagtttcggaagaagctgaggctcagcgccgagaggctatgaagaaagtaaacccaaatttcatcccgcgaagctggatacttgacgaacttatccgccgagtcgagaaagagaaagagagagatgtccttgaccgcgtcatgaccttggcgttaaatcctttcgaagactcatgggctggtcgtgagttcaatggcgagatttacgagggcaatgcagacgaggaaaaacggtggactagtgatgttccaaaggtcgggcgattgatgcagtgcagttgcagttcataacttaggtagatagtcgcaatacacctaacatagtgcataacaacgtcgccaagagttgcacgttatgttgctagctgtctgtatcggggacaagaatacgtgtgtgaaaccctcgatcattgttgtctgaaagaccacctgatgcgctgagcttagtttcttgtatggacgtcaggctcgatccactggagactcccaaacggtttgacctggtgttgtttcatcaaaatgctcattctcgagactactgcccg

SEQ ID NO: 12781 - DNA, 393 bp, Muscodor strobelii
  misc_feature: SGI cDNA ID NO. 564167
  misc_feature: Encodes the peptide sequence at SEQ ID NO 12782
atgcctatcccgagtaaagcaacagacacgtccttgtggcaaggtaaaggctactggatgagacggtatcgacgggatatagtagaattgcgcaaattctggcagtgggaatttggtcctatgcggattcacaccaattcgatgcatgtctgccgaaatgcctacggcccaggattcgagatgccaatcgacaagtgtggtatcgggcgctggatcctcaatgtcgtcgacgaatacgacgagaatacggccgctgtagagacgggacccagcgcagagaccgatgtcaaccgtcatccgttgcgcccacaacgcgatgcccgtcctcagaacaacggtccagacaagctggatatctactgttcaagctgtgaagagtggaggacatcatga

SEQ ID NO: 12782 - protein, 130 aa, Muscodor strobelii
  misc_feature: SGI Peptide ID NO. 564167
MPIPSKATDTSLWQGKGYWMRRYRRDIVELRKFWQWEFGPMRIHTNSMHVCRNAYGPGFEMPIDKCGIGRWILNVVDEYDENTAAVETGPSAETDVNRHPLRPQRDARPQNNGPDKLDIYCSSCEEWRTS

SEQ ID NO: 12783 - DNA, 927 bp, Muscodor strobelii
  misc_feature: SGI cDNA ID NO. 564168
  misc_feature: Encodes the peptide sequence at SEQ ID NO 12784
atgaactcaattgactcttcctttaaaccagacgcttctggtgtctcacctaagcaaatggactatattcctaacttaaaaatgaatgatggacatgaaatcccaatgcttgcttatggtgtaggcacggcacgagctagagacgaaagtcaaaaggttgaagagttaacttgcttagctatcaagaacgggtactaccacttggacgatgctgaatcatacggaaatgagactgaactcggtcgcgcgattaagaagtctggcgtagacagatctaagctcttcgtaactacgaagctgaagtccatggccagtgatatcccaagtgcttttgccgcctctctggcacgcctcggtctcgattacgtcgacctatatctgatccattcacccttctacaccgaacccaaacggatacaggaagcctgggccgacctcgaagccatccaagcttcaggccgcgcacgttcaatcggagtatccaatttctcggtcgccaatctagaggccgtcctgaagaccgcacgtgtgacaccagccatcaaccaaattgagtaccatccttacctacagcacacaccggacgggctgattgacttctgccgtgagaagtcaatcgccgtcgcggcttacggacccctaacagcagtcaccaaagcgaagccgggtcctgtggatgatacatacgccgctctctctaagaaatacggcgtgagcgaggctcatattgcgctgcggtggtgtattgatagtggaattgtggctgttacgacgagctccaatgaacagcgattacaggggtacatgacctggcttcataagttcaagcttacacctaaggaggtaactacgattgccgaggagggcgacaagaagcactttaggggcttctggactaaacattatgaggaaggtgatagacggtga

SEQ ID NO: 12784 - protein, 308 aa, Muscodor strobelii
  misc_feature: SGI Peptide ID NO. 564168
  misc_feature (28)..(290): Pfam Id: PF00248 Pfam Desc: Aldo/keto reductase family
  misc_feature (1)..(308): NCBI GI: 171688682 Blast Desc: protein product [Podospora anserina] gi|170944303|emb|CAP70413.1| protein product [Podospora anserina]
  misc_feature (1)..(308): NCBI GI: 39942160 Blast Desc: MGG_03160 [Magnaporthe grisea 70-15] gi|145015859|gb|EDK00349.1| MGG_03160 [Magnaporthe grisea 70-15]
  misc_feature (1)..(307): NCBI GI: 85083767 Blast Desc: NCU01759 [Neurospora crassa OR74A] gi|7800878|emb|CAB91236.1| related to aldo-keto reductase YPR1 [Neurospora crassa] gi|28918269|gb|EAA27946.1| NCU01759 crassa
  misc_feature (6)..(307): NCBI GI: 154318898 Blast Desc: BC1G_02838 [Botryotinia fuckeliana B05.10] gi|150857968|gb|EDN33160.1| BC1G_02838 [Botryotinia fuckeliana B05.10]
  misc_feature (11)..(308): NCBI GI: 116204691 Blast Desc: CHGG_10229 [Chaetomium globosum CBS 148.51] gi|88176357|gb|EAQ83825.1| CHGG_10229 [Chaetomium globosum CBS 148.51]
  misc_feature (23)..(307): NCBI GI: 256732959 Blast Desc: [Nectria haematococca mpVI 77-13-4]
  misc_feature (23)..(302): NCBI GI: 258569733 Blast Desc: conserved [Uncinocarpus reesii 1704] gi|237903940|gb|EEP78341.1| conserved [Uncinocarpus reesii 1704]
  misc_feature (23)..(307): NCBI GI: 189194960 Blast Desc: aldo-keto reductase family 1 member C13 [Pyrenophora tritici-repentis Pt-1C-BFP] gi|187979697|gb|EDU46323.1| aldo-keto reductase family 1 member C13 [Pyrenophora tritici-repentis
  misc_feature (16)..(307): NCBI GI: 115385945 Blast Desc: conserved [Aspergillus terreus NIH2624] gi|114187966|gb|EAU29666.1| conserved [Aspergillus terreus NIH2624]
  misc_feature (23)..(308): NCBI GI: 70991324 Blast Desc: ketoreductase [Aspergillus fumigatus Af293] gi|66848143|gb|EAL88473.1| ketoreductase, [Aspergillus fumigatus Af293] gi|159130984|gb|EDP56097.1| ketoreductase, [Aspergillus
  misc_feature (31)..(304): SWISSPROT Homolog: EC 1.1.1.190 Indole-3-acetaldehyde reductase (NADH)
  misc_feature (31)..(304): SWISSPROT Homolog: EC 1.1.1.191 Indole-3-acetaldehyde reductase (NADPH)
MNSIDSSFKPDASGVSPKQMDYIPNLKMNDGHEIPMLAYGVGTARARDESQKVEELTCLAIKNGYYHLDDAESYGNETELGRAIKKSGVDRSKLFVTTKLKSMASDIPSAFAASLARLGLDYVDLYLIHSPFYTEPKRIQEAWADLEAIQASGRARSIGVSNFSVANLEAVLKTARVTPAINQIEYHPYLQHTPDGLIDFCREKSIAVAAYGPLTAVTKAKPGPVDDTYAALSKKYGVSEAHIALRWCIDSGIVAVTTSSNEQRLQGYMTWLHKFKLTPKEVTTIAEEGDKKHFRGFWTKHYEEGDRR

SEQ ID NO: 12785 - DNA, 2464 bp, Muscodor strobelii
  misc_feature: SGI EST ID NO. CUFF.30385.0
  misc_feature: Variant of the nucleotide sequence at SEQ ID NO 12783
cactcatgctacgctggtgtgcctagacgtttgcatttgtgaaacttttttagtccagtgtgttataatcatatttcatcaatcgtgggccaccatctattttgtccatgcttaccagatctcgacctgtgtccacgatatcctcccgattcttaagagcacagattgtttcatttcgagccaggctaataacacccatcactcctactgcaaaatccatactcgatcgaaatattgtttcaactcacgcagtcaaaatgaactcaattgactcttcctttaaaccagacgcttctggtgtctcacctaagcaaatggactatattcctaacttaaaaatgaatgatggacatgaaatcccaatgcttgcttatggtgtaggcacggcacgagctagagacgaaagtcaaaaggttgaagagttaacttgcttagctatcaagaacgggtactaccacttggacgatgctgaatcatacggaaatgagactgaactcggtcgcgcgattaagaagtctggcgtagacagatctaagctcttcgtaactacgaagctgaagtccatggccagtgatatcccaagtgcttttgccgcctctctggcacgcctcggtctcgattacgtcgacctatatctgatccattcacccttctacaccgaacccaaacggatacaggaagcctgggccgacctcgaagccatccaagcttcaggccgcgcacgttcaatcggagtatccaatttctcggtcgccaatctagaggccgtcctgaagaccgcacgtgtgacaccagccatcaaccaaattgagtaccatccttacctacagcacacaccggacgggctgattgacttctgccgtgagaagtcaatcgccgtcgcggcttacggacccctaacagcagtcaccaaagcgaagccgggtcctgtggatgatacatacgccgctctctctaagaaatacggcgtgagcgaggctcatattgcgctgcggtggtgtattgatagtggaattgtggctgttacgacgagctccaatgaacagcgattacaggggtacatgacctggcttcataagttcaagcttacacctaaggaggtaactacgattgccgaggagggcgacaagaagcactttaggggcttctggactaaacattatgaggaaggtgatagacggtgatggattggatagagagattatagaggcttagtaaaggggggtatcatcaattttattgagctcgatgtttgactcgataatggtgacggaatcgacgacgatgattaccctcaaactgagtctcaaagcagaggaggaatgcaaatgtaatgcaagaatggtgagatcggattgaccaggagtaatacacaatatactcatcaaaacatgttctcattttatcatatagctcatgaatactaccacatttaagactcgagctactatcatcatatctagagctcatcatcctcgtctgaaggtgtttcatcaccgtccgcaggcttcggcggagaggtaactctcttgcctctcgaaactggcagagtacgcttgggtggggatgattccgcatcttcatcgctctcctcggaagaatcgtgggtcgaagcttgtgctttcgactttgtcgttctggtattacgaccaggcggcgacgctgctttacctcttgtgcgtggagcctcatcctcgctgtccgtatctggcacactttcagttgcgtcgtcctcagtagaattctgatcgtcttcttgatcttcatcagcattctgggctgacttgccggtgccagagcccctaatgtcatcgacgtccattctgtcaaggtcagcaccgctatccgactcgtctttgacatcggcctttcgtttgcgagggtgtgatggccctgggctcccgctctcctcatctataacatcatggctacttgctcccacactggccagcagagaagtgtctaccttggcggcagcaagaagacgctgttgctgtcggatcttagccttcttctcattgagcaaatcctggaacttctcgatcaagattgtctcatcttctgccttggatgtgattaaatcttcgagatgggctttgagctctttgatagactcctcgagagtatcgatcttggtgttggcagtagcaagttcttccgtgactttagatcgtgtggctaaggcagatatacaccaatcaaatggctggatctctattttttcttccttcaatttgatggatccaagtcgttgctatgaatttgtcattagcaaggcctagagtagcagagatcttggtagatggttgtaccgtgattccttggatattcttccgaaatgatagtgttactgatgtgccgtcttctgggagctcggctctgacctcaatgtcaggtaccggcttcagattgacaaaggtcgagagtagcagttgttcccactcctcatcggtgcaatgtccac

SEQ ID NO: 12786 - DNA, 1125 bp, Muscodor strobelii
  misc_feature: SGI cDNA ID NO. 564169
  misc_feature: Encodes the peptide sequence at SEQ ID NO 12787
atggcagaattgtccatattgcatttcccggtctctggacaagatgacggccacttcatactgcaagtgtcatctaatggatcgcgatcgttagacctgaagttagtcggatctgaaggcaccgctgtgttcttgcacaaagtgcgacacaagaagatcgacgattataggaactcaagtggacattgcaccgatgaggagtgggaacaactgctactctcgacctttgtcaatctgaagccggtacctgacattgaggtcagagccgagctcccagaagacggcacatcagtaacactatcatttcggaagaatatccaaggaatcacgcaacgacttggatccatcaaattgaaggaagaaaaaatagagatccagccatttgattggtgtatatctgccttagccacacgatctaaagtcacggaagaacttgctactgccaacaccaagatcgatactctcgaggagtctatcaaagagctcaaagcccatctcgaagatttaatcacatccaaggcagaagatgagacaatcttgatcgagaagttccaggatttgctcaatgagaagaaggctaagatccgacagcaacagcgtcttcttgctgccgccaaggtagacacttctctgctggccagtgtgggagcaagtagccatgatgttatagatgaggagagcgggagcccagggccatcacaccctcgcaaacgaaaggccgatgtcaaagacgagtcggatagcggtgctgaccttgacagaatggacgtcgatgacattaggggctctggcaccggcaagtcagcccagaatgctgatgaagatcaagaagacgatcagaattctactgaggacgacgcaactgaaagtgtgccagatacggacagcgaggatgaggctccacgcacaagaggtaaagcagcgtcgccgcctggtcgtaataccagaacgacaaagtcgaaagcacaagcttcgacccacgattcttccgaggagagcgatgaagatgcggaatcatccccacccaagcgtactctgccagtttcgagaggcaagagagttacctctccgccgaagcctgcggacggtgatgaaacaccttcagacgaggatgatgagctctag

SEQ ID NO: 12787 - protein, 374 aa, Muscodor strobelii
  misc_feature: SGI Peptide ID NO. 564169
  misc_feature (1)..(331): NCBI GI: 171690284 Blast Desc: protein product [Podospora anserina] gi|170945090|emb|CAP71201.1| protein product [Podospora anserina]
  misc_feature (1)..(374): NCBI GI: 239614964 Blast Desc: conserved [Ajellomyces dermatitidis ER-3]
  misc_feature (1)..(374): NCBI GI: 261190432 Blast Desc: conserved [Ajellomyces dermatitidis SLH14081] gi|239591048|gb|EEQ73629.1| conserved [Ajellomyces dermatitidis SLH14081]
  misc_feature (1)..(358): NCBI GI: 116204693 Blast Desc: CHGG_10230 [Chaetomium globosum CBS 148.51] gi|88176358|gb|EAQ83826.1| CHGG_10230 [Chaetomium globosum CBS 148.51]
  misc_feature (17)..(374): NCBI GI: 240277013 Blast Desc: conserved [Ajellomyces capsulatus H143]
  misc_feature (1)..(374): NCBI GI: 256732509 Blast Desc: NECHADRAFT_78775 [Nectria haematococca mpVI 77-13-4]
  misc_feature (17)..(374): NCBI GI: 225554662 Blast Desc: conserved [Ajellomyces capsulatus G186AR]
  misc_feature (1)..(374): NCBI GI: 240109339 Blast Desc: CPC735_028440 [Coccidioides posadasii C735 delta SOWgp]
  misc_feature (19)..(374): NCBI GI: 156063912 Blast Desc: SS1G_02074 [Sclerotinia sclerotiorum 1980] gi|154697408|gb|EDN97146.1| SS1G_02074 [Sclerotinia sclerotiorum 1980]
  misc_feature (1)..(374): NCBI GI: 119182615 Blast Desc: CIMG_06327 [Coccidioides immitis RS]
MAELSILHFPVSGQDDGHFILQVSSNGSRSLDLKLVGSEGTAVFLHKVRHKKIDDYRNSSGHCTDEEWEQLLLSTFVNLKPVPDIEVRAELPEDGTSVTLSFRKNIQGITQRLGSIKLKEEKIEIQPFDWCISALATRSKVTEELATANTKIDTLEESIKELKAHLEDLITSKAEDETILIEKFQDLLNEKKAKIRQQQRLLAAAKVDTSLLASVGASSHDVIDEESGSPGPSHPRKRKADVKDESDSGADLDRMDVDDIRGSGTGKSAQNADEDQEDDQNSTEDDATESVPDTDSEDEAPRTRGKAASPPGRNTRTTKSKAQASTHDSSEESDEDAESSPPKRTLPVSRGKRVTSPPKPADGDETPSDEDDEL

SEQ ID NO: 12788 - DNA, 2546 bp, Muscodor strobelii
  misc_feature: SGI EST ID NO. CUFF.30386.1
  misc_feature: Variant of the nucleotide sequence at SEQ ID NO 12786
catcaacattccgattgtcaatgtagagttcaatgtcgtcccaacatattaaataattatacatgtcgtctgtataattgaaaggtcaattgcggtgaagtagggttatgtctgtatgtttttcgatgacgacgtgtgtgatccatcggccttgggtttgaaacatctctatacctgagttgttaatatcaatacttccatcaccagtgtcatatcgaacgaaccgtcaagcatgagattcccatgactacgacggaagttacatgtcatctgttcgaattgatacacgggactcatccatagtcctgttttagatgagcaaggcattacgtctagaatctcggaatccctttcatctcccccactaatccatccgatccatcatcacccaggattatcaggttccccggacggagcacagacggcataatccagcaatatggcagaattgtccatattgcatttcccggtctctggacaagatgacggccacttcatactgcaagtgtcatctaatggatcgcgatcgttagacctgaagttagtcggatctgaaggcaccgctgtgttcttgcacaaagtgcgacacaagaagatcgacgattataggaactcaagtggacattgcaccgatgaggagtgggaacaactgctactctcgacctttgtcaatctgaagccggtacctgacattgaggtcagagccgagctcccagaagacggcacatcagtaacactatcatttcggaagaatatccaaggaatcacgcaacgacttggatccatcaaattgaaggaagaaaaaatagagatccagccatttgattggtgtatatctgccttagccacacgatctaaagtcacggaagaacttgctactgccaacaccaagatcgatactctcgaggagtctatcaaagagctcaaagcccatctcgaagatttaatcacatccaaggcagaagatgagacaatcttgatcgagaagttccaggatttgctcaatgagaagaaggctaagatccgacagcaacagcgtcttcttgctgccgccaaggtagacacttctctgctggccagtgtgggagcaagtagccatgatgttatagatgaggagagcgggagcccagggccatcacaccctcgcaaacgaaaggccgatgtcaaagacgagtcggatagcggtgctgaccttgacagaatggacgtcgatgacattaggggctctggcaccggcaagtcagcccagaatgctgatgaagatcaagaagacgatcagaattctactgaggacgacgcaactgaaagtgtgccagatacggacagcgaggatgaggctccacgcacaagaggtaaagcagcgtcgccgcctggtcgtaataccagaacgacaaagtcgaaagcacaagcttcgacccacgattcttccgaggagagcgatgaagatgcggaatcatccccacccaagcgtactctgccagtttcgagaggcaagagagttacctctccgccgaagcctgcggacggtgatgaaacaccttcagacgaggatgatgagctctagatatgatgatagtagctcgagtcttaaatgtggtagtattcatgagctatatgataaaatgagaacatgttttgatgagtatattgtgtattactcctggtcaatccgatctcaccattcttgcattacatttgcattcctcctctgctttgagactcagtttgagggtaatcatcgtcgtcgattccgtcaccattatcgagtcaaacatcgagctcaataaaattgatgatacccccctttactaagcctctataatctctctatccaatccatcaccgtctatcaccttcctcataatgtttagtccagaagcccctaaagtgcttcttgtcgccctcctcggcaatcgtagttacctccttaggtgtaagcttgaacttatgaagccaggtcatgtacccctgtaatcgctgttcattggagctcgtcgtaacagccacaattccactatcaatacaccaccgcagcgcaatatgagcctcgctcacgccgtatttcttagagagagcggcgtatgtatcatccacaggacccggcttcgctttggtgactgctgttaggggtccgtaagccgcgacggcgattgacttctcacggcagaagtcaatcagcccgtccggtgtgtgctgtaggtaaggatggtactcaatttggttgatggctggtgtcacacgtgcggtcttcaggacggcctctagattggcgaccgagaaattggatactccgattgaacgtgcgcggcctgaagcttggatggcttcgaggtcggcccaggcttcctgtatccgtttgggttcggtgtagaagggtgaatggatcagatataggtcgacgtaatcgagaccgaggcgtgccagagaggcggcaaaagcacttgggatatcactggccatggacttcagcttcgtagttacgaagagcttagatctgtctacgccagacttcttaatcgcgcgaccgagttcagtctcatttccgt

SEQ ID NO: 12789 - DNA, 3279 bp, Muscodor strobelii
  misc_feature: SGI cDNA ID NO. 564170
  misc_feature: Encodes the peptide sequence at SEQ ID NO 12790
atggagccactacgcctcaagccgcgcaagccggtcgaggatgtcgtcgagaattgggacgacgacgacttcatcattgacaatgatgaggaccttaccttccgcagccattcttctaccgccactgccaccacaaccactacgaacacgacaaactctgccaacccttccaccaccttcaataacttccagcgtcgcagcgccagtcgttcttcattccggtctgatcgagagtcgatccccggcgaggaacgccaagtccatttacctggtgacgacgagaaatctaccttgggtgccattgccgctgctgccaatgccggcattcccattcctaccaatgttccaccctcagctctagtgggcggatccatcaagcgactcggtggtcgcaagaccaagaaggtcgtccaagaagattgggacgacgatctggaacttccaactactggccaggctcttcgtttgaagagaaaggaggggatcattttccccgatgcgttgcgtcaagttagtaactcgacgaacccaagcccgtccaagaagagcgcttccagtattcctactgccattcctgccatcacgcaaatgctaccaccacgaacgacgcagcccaagtctcttggtgcacctatcaatttggccaagttcagagacacggatgacgacgacgacattttcgccgaccccgcggctaccatcaagccatccaaattacaagtcgtcaagtcaagaccgatttcacttatcacgcctcccacgccgtctccggccaagaagagcaacaaggccgtggtcgatgaggactttgaagccgatctagagcttccttcagacggaaagcttaagctatcaagcagaagagacattcccaagacgccatctcttcagactagtgacgacttcgactggggtgaaggcagcttgggtacacgctttggtggaaccaagcgagatgcgttctccaaccccagctcatccgtatcagccttgagcccgagtatcgctagctcaatcacagccgaaagcgaaggcgaagacgagcttttcgacggcctcgtacttcctattggacccttggacttcagcgagcgattgagaaccaggaagaagagtcggtctccagaacgctcggcaccagagtcacgtcagcaggacaaacgttctcgctcgcccaaagccaccttagcccaagccaaacgctctccatcacctaagacctcgtatccgcttggacagccaactcgcttttcccctcccccagtagcaacaaagcgacgttcccctcaacatgtatcaacccatcaggcttcgcgtggcggaaaggacgaagaggattttgcttctggtcttgagtttggcgatggcaacgttttccgctacgcaaaacctaccgctcatcgtaacatcaaggtgaaagaagcacgagccgccagccctactagacctaagactgcggtgaccatcacctttactaataagccagtaacctctaccaactctcgactcccccgacctctgatcagtcatgagcgatctcacacacaatcgtctttggagcccgtaccggagagcggaggtcccttgcaacagattcccatgcgaagatctcagtctcgtcttagcggccattcagcccattcctcgatctcgagcattcatacgcccaccacaccatcttcctcgcaaggcaacttcccttccactccgagacgaagagaattgggccaaaaagcctcgacaggagctctcagaaacgagcctaccacgactagtgctcaattgctgcgtctcaagcgctcactgcctgttatgcgcaatcctcaatcgccagccaaattacctgccacacggtctgataggcccacatcgcgtggagagtctcgcgcagaggtccagcgcgcgcagtcatcactgcgacccaaaacacctgttgaccgggctcgacccacccttgagaccaatgcagctcaggcacggaaaggtcaggcgccttttctgcccgcgggtgcatctcagtctcagtcccatcacgttaccgccagagcctcacgcgtgttccgacgccatgactcggaccaaggacctgagatcaggccactatcaagggcactctcgcgtaatgcgatgcgatcacctagtcctcgaagactcagacatgagaagtcgcttggtgaaccgacatggcaacagcttagtaagcctcgccgcgttcgtccctttggcgatggtcatgaattagatgccttcgacgatctacctacttcagtccatacagaatcacgtttcacaaagaacccgacaggcactagagtcaccattcgtaacaagaactaccagaatgtactcccagagcggaacactcctagccctgtttcgccatactctcccgcccgcactgactcgcagccccattttgcccgcgatactgctgctagccgtatggcacgtgaagccagtttggcccagcgagcacagcccacaggccctttagccaacgtgaccgctcaacgcgctccccgattgctggctcggagtaacctcaatcctcatcaagcgcacggcaatagccgatcaaagaaatccaaacagccagttcagttgaaaccccatttgatttccaacttgaacccggccaaggagaccaagggtatgttcaacaccaagaaatcaccaccacccaaattcaaccaaatcccccaagctcacatccaatcagtcgtgaatggcatgacctataacccagcgacgttcagatgggaaggtaacgaaaacgattaccgtttgaacggcttcgatgtcccagcctcgtcacccgtgacgacacctctaactcagaatgcgatgcgcgaacgagagaactccacaccccgacccctcctcataaccaacatcaatgcgcgaaaggacgccaaacgagtaggagacatggtttttgaccctcagaacatgtgttggcttaaggtcgacacatccacaccaacaagcgacttacgtgacaaccctatggctggcttcgatgctatggaggacgaagatcctttcaagaacattccggatctcgaagacaagaagtctaccgttggccgtgtcagcgatatcagagatgattggctggttggcgaagaattcgacgtcggccccgaatttatacggcgacaacgcgaagaagaagtccgctggcaacgaaagtgcggcaagtggattggtcagagtactcgcagtcgagctgatttgcgatgggacctccacatgatggtcgttccgctgaagcgctaa

SEQ ID NO: 12790 - protein, 1092 aa, Muscodor strobelii
  misc_feature: SGI Peptide ID NO. 564170
  misc_feature (1)..(1092): NCBI GI: 39942164 Blast Desc: MGG_03162 [Magnaporthe grisea 70-15] gi|145015857|gb|EDK00347.1| MGG_03162 [Magnaporthe grisea 70-15]
  misc_feature (4)..(1087): NCBI GI: 116204695 Blast Desc: CHGG_10231 [Chaetomium globosum CBS 148.51] gi|88176359|gb|EAQ83827.1| CHGG_10231 [Chaetomium globosum CBS 148.51]
  misc_feature (1)..(1088): NCBI GI: 261356675 Blast Desc: conserved [Verticillium albo-atrum VaMs.102]
  misc_feature (121)..(1087): NCBI GI: 46123729 Blast Desc: FG06242.1 [Gibberella zeae PH-1]
  misc_feature (121)..(1087): NCBI GI: 256732958 Blast Desc: NECHADRAFT_37789 [Nectria haematococca mpVI 77-13-4]
  misc_feature (1)..(1024): NCBI GI: 156063914 Blast Desc: SS1G_02075 [Sclerotinia sclerotiorum 1980] gi|154697409|gb|EDN97147.1| SS1G_02075 [Sclerotinia sclerotiorum 1980]
  misc_feature (446)..(1087): NCBI GI: 171690286 Blast Desc: protein product [Podospora anserina] gi|170945091|emb|CAP71202.1| protein product [Podospora anserina]
  misc_feature (3)..(1087): NCBI GI: 225554663 Blast Desc: conserved [Ajellomyces capsulatus G186AR]
  misc_feature (6)..(1087): NCBI GI: 238839431 Blast Desc: two-component GAP Byr4 [Microsporum canis CBS 113480]
  misc_feature (3)..(1067): NCBI GI: 154276954 Blast Desc: [Ajellomyces capsulatus NAm1] gi|150414395|gb|EDN09760.1| [Ajellomyces capsulatus NAm1]
MEPLRLKPRKPVEDVVENWDDDDFIIDNDEDLTFRSHSSTATATTTTTNTTNSANPSTTFNNFQRRSASRSSFRSDRESIPGEERQVHLPGDDEKSTLGAIAAAANAGIPIPTNVPPSALVGGSIKRLGGRKTKKVVQEDWDDDLELPTTGQALRLKRKEGIIFPDALRQVSNSTNPSPSKKSASSIPTAIPAITQMLPPRTTQPKSLGAPINLAKFRDTDDDDDIFADPAATIKPSKLQVVKSRPISLITPPTPSPAKKSNKAVVDEDFEADLELPSDGKLKLSSRRDIPKTPSLQTSDDFDWGEGSLGTRFGGTKRDAFSNPSSSVSALSPSIASSITAESEGEDELFDGLVLPIGPLDFSERLRTRKKSRSPERSAPESRQQDKRSRSPKATLAQAKRSPSPKTSYPLGQPTRFSPPPVATKRRSPQHVSTHQASRGGKDEEDFASGLEFGDGNVFRYAKPTAHRNIKVKEARAASPTRPKTAVTITFTNKPVTSTNSRLPRPLISHERSHTQSSLEPVPESGGPLQQIPMRRSQSRLSGHSAHSSISSIHTPTTPSSSQGNFPSTPRRRELGQKASTGALRNEPTTTSAQLLRLKRSLPVMRNPQSPAKLPATRSDRPTSRGESRAEVQRAQSSLRPKTPVDRARPTLETNAAQARKGQAPFLPAGASQSQSHHVTARASRVFRRHDSDQGPEIRPLSRALSRNAMRSPSPRRLRHEKSLGEPTWQQLSKPRRVRPFGDGHELDAFDDLPTSVHTESRFTKNPTGTRVTIRNKNYQNVLPERNTPSPVSPYSPARTDSQPHFARDTAASRMAREASLAQRAQPTGPLANVTAQRAPRLLARSNLNPHQAHGNSRSKKSKQPVQLKPHLISNLNPAKETKGMFNTKKSPPPKFNQIPQAHIQSVVNGMTYNPATFRWEGNENDYRLNGFDVPASSPVTTPLTQNAMRERENSTPRPLLITNINARKDAKRVGDMVFDPQNMCWLKVDTSTPTSDLRDNPMAGFDAMEDEDPFKNIPDLEDKKSTVGRVSDIRDDWLVGEEFDVGPEFIRRQREEEVRWQRKCGKWIGQSTRSRADLRWDLHMMVVPLKR

SEQ ID NO: 12791 - DNA, 4474 bp, Muscodor strobelii
  misc_feature: SGI EST ID NO. CUFF.30514.1
  misc_feature: Variant of the nucleotide sequence at SEQ ID NO 12789
gaaatttattgctgtaatctttcttggggagctttcgcacatatagagtagtggacctgcttgatggatggctcaagaagtattgagatttgaggaagctgcgagtctgtaatccgtgactgccaccaccgtactgccgcgactcaccgcacccagccctctcagaccagccacccaggccttaccagggcagtattccggcggcgcaaatcattttcgcccacttccaacacacacactggtctgtcgctcggtctccaaacctgttccagacttccaagtttccaaccatcaatcttcaaacacctgcattgtcacatcagacattccaatccaattgatcttctgtcgcagcgtttgtcagctacagttgcatcacacttccaacctgaacattctcgttttccgtctgcactctgattcgcactcgcgcgcttttgtctgcagccctgccacccctcatccactcactctcagctcaaagtcaccacccactttgcgcgttccgccaccgtgtccggaacactgtttcgtcactgtgccctgccacgcccaaccaccgctttctctcatgcgcacgaattgatgcacctggatcaattcgaccaacgcataccaccatatctgacggctaacattatagccctttgcaaagaccgtttctgccagttcctggtggttgacttggtcattgcgcgacgacctcttctcgagttacggccgaggaggatgcaactcggggtgaacagttgatctgtggaagtgggtgaattgcaggtattgagtagttacctgcatcgttgcgatcatcgtgcgcattatttccgctcatctgcgactgcatttcgattgttgccgtcgacatggagccactacgcctcaagccgcgcaagccggtcgaggatgtcgtcgagaattgggacgacgacgacttcatcattgacaatgatgaggaccttaccttccgcagccattcttctaccgccactgccaccacaaccactacgaacacgacaaactctgccaacccttccaccaccttcaataacttccagcgtcgcagcgccagtcgttcttcattccggtctgatcgagagtcgatccccggcgaggaacgccaagtccatttacctggtgacgacgagaaatctaccttgggtgccattgccgctgctgccaatgccggcattcccattcctaccaatgttccaccctcagctctagtgggcggatccatcaagcgactcggtggtcgcaagaccaagaaggtcgtccaagaagattgggacgacgatctggaacttccaactactggccaggctcttcgtttgaagagaaaggaggggatcattttccccgatgcgttgcgtcaagttagtaactcgacgaacccaagcccgtccaagaagagcgcttccagtattcctactgccattcctgccatcacgcaaatgctaccaccacgaacgacgcagcccaagtctcttggtgcacctatcaatttggccaagttcagagacacggatgacgacgacgacattttcgccgaccccgcggctaccatcaagccatccaaattacaagtcgtcaagtcaagaccgatttcacttatcacgcctcccacgccgtctccggccaagaagagcaacaaggccgtggtcgatgaggactttgaagccgatctagagcttccttcagacggaaagcttaagctatcaagcagaagagacattcccaagacgccatctcttcagactagtgacgacttcgactggggtgaaggcagcttgggtacacgctttggtggaaccaagcgagatgcgttctccaaccccagctcatccgtatcagccttgagcccgagtatcgctagctcaatcacagccgaaagcgaaggcgaagacgagcttttcgacggcctcgtacttcctattggacccttggacttcagcgagcgattgagaaccaggaagaagagtcggtctccagaacgctcggcaccagagtcacgtcagcaggacaaacgttctcgctcgcccaaagccaccttagcccaagccaaacgctctccatcacctaagacctcgtatccgcttggacagccaactcgcttttcccctcccccagtagcaacaaagcgacgttcccctcaacatgtatcaacccatcaggcttcgcgtggcggaaaggacgaagaggattttgcttctggtcttgagtttggcgatggcaacgttttccgctacgcaaaacctaccgctcatcgtaacatcaaggtgaaagaagcacgagccgccagccctactagacctaagactgcggtgaccatcacctttactaataagccagtaacctctaccaactctcgactcccccgacctctgatcagtcatgagcgatctcacacacaatcgtctttggagcccgtaccggagagcggaggtcccttgcaacagattcccatgcgaagatctcagtctcgtcttagcggccattcagcccattcctcgatctcgagcattcatacgcccaccacaccatcttcctcgcaaggcaacttcccttccactccgagacgaagagaattgggccaaaaagcctcgacaggagctctcagaaacgagcctaccacgactagtgctcaattgctgcgtctcaagcgctcactgcctgttatgcgcaatcctcaatcgccagccaaattacctgccacacggtctgataggcccacatcgcgtggagagtctcgcgcagaggtccagcgcgcgcagtcatcactgcgacccaaaacacctgttgaccgggctcgacccacccttgagaccaatgcagctcaggcacggaaaggtcaggcgccttttctgcccgcgggtgcatctcagtctcagtcccatcacgttaccgccagagcctcacgcgtgttccgacgccatgactcggaccaaggacctgagatcaggccactatcaagggcactctcgcgtaatgcgatgcgatcacctagtcctcgaagactcagacatgagaagtcgcttggtgaaccgacatggcaacagcttagtaagcctcgccgcgttcgtccctttggcgatggtcatgaattagatgccttcgacgatctacctacttcagtccatacagaatcacgtttcacaaagaacccgacaggcactagagtcaccattcgtaacaagaactaccagaatgtactcccagagcggaacactcctagccctgtttcgccatactctcccgcccgcactgactcgcagccccattttgcccgcgatactgctgctagccgtatggcacgtgaagccagtttggcccagcgagcacagcccacaggccctttagccaacgtgaccgctcaacgcgctccccgattgctggctcggagtaacctcaatcctcatcaagcgcacggcaatagccgatcaaagaaatccaaacagccagttcagttgaaaccccatttgatttccaacttgaacccggccaaggagaccaaggtcgtgaatggcatgacctataacccagcgacgttcagatgggaaggtaacgaaaacgattaccgtttgaacggcttcgatgtcccagcctcgtcacccgtgacgacacctctaactcagaatgcgatgcgcgaacgagagaactccacaccccgacccctcctcataaccaacatcaatgcgcgaaaggacgccaaacgagtaggagacatggtttttgaccctcagaacatgtgttggcttaaggtcgacacatccacaccaacaagcgacttacgtgacaaccctatggctggcttcgatgctatggaggacgaagatcctttcaagaacattccggatctcgaagacaagaagtctaccgttggccgtgtcagcgatatcagagatgattggctggttggcgaagaattcgacgtcggccccgaatttatacggcgacaacgcgaagaagaagtccgctggcaacgaaagtgcggcaagtggattggtcagagtactcgcagtcgagctgatttgcgatgggacctccacatgatggtcgttccgctgaagcgctaataagacgctcgatgcaaatgattacatgaattacgaatgacgacatttacgacgcatacctttggcgtttgatcccagagcaagccactaatttttaatgaagagggggacagaacggggagctttcaattcttgcttgtgttttttctgcttatggctttgcagctctgggaagcatggaggaatggaaaatgcatcaacatgagagacgggttgcatgaacgagctttgcttaatgacctggaacgcattcatgatagacttatgagaaacgatacttgacgattagaatggttgatgatcgtctctgaatagataacccaaggcgtgcatcagtggagcatcgggctataatgaggtcatcttcatagacaaaagagcttttgtttgctgtttacact

SEQ ID NO: 12792 - DNA, 1113 bp, Muscodor strobelii
  misc_feature: SGI cDNA ID NO. 564171
  misc_feature: Encodes the peptide sequence at SEQ ID NO 12793
atgaacgccctcgcggaagccttgggcatggctctaccgggttcggcagccattcctgcaccatacagagaacgtgctcaggccgcctacgcaactggtctacgaatcgttgatatggttcggcaagatatcaaacccagtgacatcatgacccgggaggcattcgagaatgccattgtggtcaacactgcaataggggggagtacgaacgcccctatccacttaaatgctatcgccaagcacgttggtgtccccttggacctcgatgattgggatcgtattgggtttgaaattccccttctactaaatatgatgccagcgggagaggttctaggagaagaatattatcgagcagggggactacttgcaattatcgccgaactcttagaggcgaacgcgctgccacacccggaagctctcaccgttaacgggaacaccattggtttcaacgcacaaaataagaagacttgggatagatatactattcgtccgttttccgatccattaaaaattaatgcaggtttcgtgcaccttaaagggacactgttcgacagtgcaataatgaaaacgtcagtcatcacggcggagtttcggaaaagtttcctcgagaatccggaggacccgaacgcattcgaaggcaaagtagcagttttcgacggcccggaagattaccaccgacgagtagagaccgctcccatagacgagcgcacgatactcatcatgcgtggtgccggtccactgggttatcctggtgcggccgaagtagtgaacggtgacggcaggcagagtggcacgagtggatcaccttcgattctaaatgcttcaccagaagcagctgatggtggcaacttggcgatcttgaaagatggagattacgtccgtgtagatatcgggagacgccgtgtcgatatcaaaatatcagatgatgagattattgcaaggagaaaggagctcgaggccaaggggggatatcatggaccacccagtgcaacaccgtggcaagatatctttcgtcgcgaggtcggtccgttaagtgaaggcatggtactaaagaacgcaccgaatttccaacgagtggcacaaaactaccctatgcctagagataaccattaa

SEQ ID NO: 12793 - protein, 370 aa, Muscodor strobelii
  misc_feature: SGI Peptide ID NO. 564171
  misc_feature (1)..(351): Pfam Id: PF00920 Pfam Desc: Dehydratase family
  misc_feature (1)..(257): Pfam Id: PF00920 Pfam Desc: Dehydratase family
  misc_feature (259)..(351): Pfam Id: PF00920 Pfam Desc: Dehydratase family
  misc_feature (1)..(370): NCBI GI: 238502641 Blast Desc: dihydroxy acid dehydratase, [Aspergillus flavus NRRL3357] gi|220691364|gb|EED47712.1| dihydroxy acid dehydratase, [Aspergillus flavus NRRL3357]
  misc_feature (1)..(370): NCBI GI: 145251369 Blast Desc: An15g06700 [Aspergillus niger] gi|134082730|emb|CAK42622.1| protein product [Aspergillus niger]
  misc_feature (1)..(370): NCBI GI: 169775973 Blast Desc: [Aspergillus oryzae RIB40] gi|83771188|dbj|BAE61320.1| protein product [Aspergillus oryzae]
  misc_feature (1)..(370): NCBI GI: 71002570 Blast Desc: dihydroxy acid dehydratase [Aspergillus fumigatus Af293] gi|66853604|gb|EAL93928.1| dihydroxy acid dehydratase, [Aspergillus fumigatus Af293] gi|159130021|gb|EDP55135.1| acid
  misc_feature (1)..(370): NCBI GI: 119482129 Blast Desc: dihydroxy acid dehydratase, [Neosartorya fischeri NRRL 181] gi|119409247|gb|EAW19196.1| dihydroxy acid dehydratase, [Neosartorya fischeri NRRL 181]
  misc_feature (1)..(370): NCBI GI: 67900742 Blast Desc: AN7358.2 [Aspergillus nidulans FGSC A4] gi|40742539|gb|EAA61729.1| AN7358.2 [Aspergillus nidulans FGSC A4] gi|259483286|tpe|CBF78550.1| TPA: dihydroxy-acid dehydratase
  misc_feature (1)..(370): NCBI GI: 242817556 Blast Desc: dihydroxy acid dehydratase, [Talaromyces stipitatus ATCC 10500] gi|218713444|gb|EED12868.1| dihydroxy acid dehydratase, [Talaromyces stipitatus ATCC 10500]
  misc_feature (1)..(370): NCBI GI: 115387979 Blast Desc: ATEG_02317 [Aspergillus terreus NIH2624] gi|114195579|gb|EAU37279.1| ATEG_02317 [Aspergillus terreus NIH2624]
  misc_feature (1)..(370): NCBI GI: 212530782 Blast Desc: dihydroxy acid dehydratase, [Penicillium marneffei ATCC 18224] gi|210074946|gb|EEA29033.1| dihydroxy acid dehydratase, [Penicillium marneffei ATCC 18224]
  misc_feature (1)..(370): NCBI GI: 121716800 Blast Desc: dihydroxy acid dehydratase, [Aspergillus clavatus NRRL 1] gi|119404070|gb|EAW14487.1| dihydroxy acid dehydratase, [Aspergillus clavatus NRRL 1]
  misc_feature (1)..(351): SWISSPROT Homolog: EC 4.2.1.9 Dihydroxy-acid dehydratase
MNALAEALGMALPGSAAIPAPYRERAQAAYATGLRIVDMVRQDIKPSDIMTREAFENAIVVNTAIGGSTNAPIHLNAIAKHVGVPLDLDDWDRIGFEIPLLLNMMPAGEVLGEEYYRAGGLLAIIAELLEANALPHPEALTVNGNTIGFNAQNKKTWDRYTIRPFSDPLKINAGFVHLKGTLFDSAIMKTSVITAEFRKSFLENPEDPNAFEGKVAVFDGPEDYHRRVETAPIDERTILIMRGAGPLGYPGAAEVVNGDGRQSGTSGSPSILNASPEAADGGNLAILKDGDYVRVDIGRRRVDIKISDDEIIARRKELEAKGGYHGPPSATPWQDIFRREVGPLSEGMVLKNAPNFQRVAQNYPMPRDNH

SEQ ID NO: 12794 - DNA, 1511 bp, Muscodor strobelii
  misc_feature: SGI EST ID NO. CUFF.30348.0
  misc_feature: Variant of the nucleotide sequence at SEQ ID NO 12792
agcggccggaacgccttcggttggtcattgtaataccatgggcacggcgtctacaatgaacgccctcgcggaagccttgggcatggctctaccgggttcggcagccattcctgcaccatacagagaacgtgctcaggccgcctacgcaactggtctacgaatcgttgatatggttcggcaagatatcaaacccagtgacatcatgacccgggaggcattcgagaatgccattgtggtcaacactgcaataggggggagtacgaacgcccctatccacttaaatgctatcgccaagcacgttggtgtccccttggacctcgatgattgggatcgtattgggtttgaaattccccttctactaaatatgatgccagcgggagaggttctaggagaagaatattatcgagcagggggactacttgcaattatcgccgaactcttagaggcgaacgcgctgccacacccggaagctctcaccgttaacgggaacaccattggtttcaacgcacaaaataagaagacttgggatagatatactattcgtccgttttccgatccattaaaaattaatgcaggtttcgtgcaccttaaagggacactgttcgacagtgcaataatgaaaacgtcagtcatcacggcggagtttcggaaaagtttcctcgagaatccggaggacccgaacgcattcgaaggcaaagtagcagttttcgacggcccggaagattaccaccgacgagtagagaccgctcccatagacgagcgcacgatactcatcatgcgtggtgccggtccactgggttatcctggtgcggccgaagtagtgaacggtatgtattaaacgatcccgcgcgagttattttttgaccgtgcttctaaaacaacgtgctaacctttttgtagtaggtgatccgaactatcagatatcagaacccagttctttgtcttgaagtccccggccgcgtagcaaaacatggtgaaaataactaacgcgttacctttctggctaccagatgcatgcgcccggccacttattgaagcaaggagtcggcgatctgccgtgcataggtgacggcaggcagagtggcacgagtggatcaccttcgattctaaatgcttcaccagaagcagctgatggtggcaacttggcgatcttgaaagatggagattacgtccgtgtagatatcgggagacgccgtgtcgatatcaaaatatcagatgatgagattattgcaaggagaaaggagctcgaggccaaggggggatatcatggaccacccagtgcaacaccgtggcaagatatctttcgtcgcgaggtcggtccgttaagtgaaggcatggtactaaagaacgcaccgaatttccaacgagtggcacaaaactaccctatgcctagagataaccattaaacttacatatagatgataatgaccacgctgcgaagccatggccgaaatagacatctcataaatccatccaggtaatcatcagtacaagtaatgattggacataac

SEQ ID NO: 12795 - DNA, 7794 bp, Muscodor strobelii
  misc_feature: SGI cDNA ID NO. 564172
  misc_feature: Elevated expression when VOC is produced
  misc_feature: Encodes the peptide sequence at SEQ ID NO 12796
atggctatgtcacagcaggaaatcgaggccatccttgccaaggatggcgccgcacccatcgccatcgtgggtgtttcaggcagattccccggagatgctacgaccccagacagattgtgggagatggtctccgaggcgagaagtgctctgaccgatgtgcccaaggagcgttacaacatcgatggattctaccaccccagtgccgaacgccagggaactacaagcacccgcaaaggtcacttcatctcttccgatgttggccttttcgatgctccgtttttcaagatctctgcacaggaggcccatgccatggacccccagcagagacttgctcttgaactctcatatgaggctttggaatcagctggcctgacaatgtctgacattgccaagtccaatatgggatgttacatggcaacttgtgtcagggactacgctgctatccgcgctatcgaccctgatgactacccccgttatgaagccaacggatctatgggtactgccatgatttccaaccgaatttcctggtacttcgacatcaagggaccgagtttgacgcttgacaccgcctgctcgtcatctttggtctgcttgcacttggctgtgcaaagcattcgcactggagagtccaaggcggctcttgttggtgccactaaccttattctggcaccacacacctccaaccatctaagcaccttatccttcttgtccaaggatggcaagtcgcaatcattcgaccacaaggccaacggatactcccgtggtgagggtgtgtccttcattgttgtcaagtctttggccgatgctctgcgggatggtgactgcatccgtgcggttgtccgaggaacctcggtgactcaggatggtcgcactcctggtatcaaccttccctctgcggaatctcaggaagagctgatccaggccgcgtacactaacgcaaaactgagcgccgaagagactacttacttcgaggctcacggtcccggtactcctgccggtgacccgcttgagacctccgctattgcaaaggttttcggcagctaccactcccccgactttcctttgtacgtcggatccgtcaaatccaacattggtcacctggaggctggtgccggtcttgcgggtctcacgaagactctctacgctcttgagaagggtcagatcccccctaacatttggtttgagcgagccaacccgaagattctgctaaaggagtggaatcttgcggttcccacggaacttctcccatggccaacaaacggactgcgtcgtgccagtatcaactcgttcggttatggtggtaccaatgcccactgtattctggatgacgcctatcactacctgaccagtcgtggactgattggtcgacacaacaccgcggccgtggtgccccgacctgtcatcatgcccgcccttatgtcgtctgagtctgagattcccacgtcgaccttcgcaaccagtgtctttaactccgaagtcgtctccgaggctgtgagtactcagggtaccaccacacccgtgtctgaaatcgacagcgttgaggaccttggagcgatcgcgtccaccccccagctgctcgtctggtcccaccatgagcagaacggtattgctagaaccgccaagcaactgcaggaatacctcgaggagaagaaggtccttgcaactgaggctgcctcgaaattgaagagcttggcatacaccttggctggcaagcgaacccgccacccatgggcttcattcgttgtcgcttctgatctcaatgaggtcgtacaggagttggagcaccctgccaagcacttgcgaccttcagagaacattgcctctgtatgggtattcacgggtcaaggtgctcaatggttcggtatgggtcgtgaacttctcgcataccaaacttaccgaacccgcatcgaagaggctgccgctcatctgaagtctcttggttgcgaatgggacctcgttgaggaacttggtaagagccaggctgactctcgcgtcaacgagccccagatcagccagcccgcatgtactgccgttcaggttggtctcgtcgaccttctcactgagtggggtgtcgctcccaccatcactattggccactccagtggtgaaatcggtgctgcttacgcgaagggcgctctctcttgtgaggctgcttggaccgtcgcctaccaccgtggtcgcctctccgcaagtctcaacattaccggtgccatgttggccgttgctcttggcgaggaaggtgttcgaccttttattgaccagtgcacctctgaccctaagccagtcgttgcttgtgtgaacagccccgagagtgtcactctgtctggcagctccgagggtattgatgaagtgttgaacatcatcggcagccaagcctgggcccgcaaactcttggtcaagaccccttatcatagtccattcatgcagaagctggccgagccttactacgaggctatgggtaccctcgcaggtggcgtcaactcctctgctcgcatgttctcgtccgttacgggcaaggaaattgataacgctgcgttgctgaaccctcaatactgggttgataacatggtcaactgtgtgcgtttcggaccagcccttagcgccgctctggatgaaccagtactctctggcaagcctctcatcctgatggaggttggacctcatggtgcgctccagggaccagtcaagcagatcatcaaggcccagaagactcagccttcagagatgaacctcttcagtcttctcactcgtaaggaggacgccatccgaactaccctcaagggtgtcggtatcttgtaccagaagggtcttcccgtcgatgttagcaaggccaatacgctcgactccaagaccgaatctccctccttcttggttgacctgccaccattctcttggaaccacaatactcgcttctggtacgagactgccatgtccatggcttacaagaaccgatcggagcccaagcacgatgttcttggcgcacgggacgtcttctctggcgaagctgagccagcatggcgcaactatctgcgcgcatccgagatcccatgggcccgtcaccacggtgttcaggggatgttcttgttctctgctgctggcttcctcaccatggttgttgaggctatgcgtcaaatctccgaacctggcaaggtcattgagggcatccaattccgggatgttttcccgggacctccaattgtgctcactgacaatgaggatgcccccgttgagacaaagcttcagctccgaaactggcgtctcgcttctcgatctctgactacctactggaaggagttcagcattgccagccgtactcgcgatggaacctggactcagcacagcactggtctcgtctcgatcaaatacgctgccgataaccacgcaaccagtttcgctgacgagcaggctgctgtcaacgagacctacaagaatgagtacgctcgcatccagaacaccaagctgaccacacacactggcgcagagttctactctaagtatgagaagctcggtatgcgctggggtgagaccttcaagactctcaaggagtcacgtgttgctggcaaggatgttgtcgctacgctggaggtccccgacaccgtatcgtggatgcctgctaatgttgagtcttcttatgtcattcaccctgccactctggatggtgtcttccacacactgctggctgccgaaggtgtcgagaagatcactgttcccaaatacattgagcgcatctacatctcggccaagcttcccactgatgccggatcgaaactccagggttatgcccagatccaggagaagtgggctgatggaaccaatggtaccgtcgttctttccgacgagaagtgggctgagcctctgctcatcttcgagggcttgaaatcgactgattacaactctggttctagcactgaggaggactctgagtcaaaggttaaggctgttcgcaagttgggtgcttacacaacctggcacgttgacattgagaactctcccgagaccctccgagagatcttgaccagcgctgtgaacaaggccccccaggtcccctactctgaggtttacgatctcgagtggtgtgcatacattgtctgcaagagaatggctcagcgtttcactgatgaagatgccaagcgcatggctcctcaccacctcatcttctacaactacatgaagaaccaggttgaacttgccaatgccagcgaacttccttgccagacacccgagtggttgtcttctagcaaagagactgaggatgaggttctgattcgggccgctgccactagtcttgagggtaagatgatggttcgtatcagcgacaacatcgagagcgtcctccttggtgaaattgagccctgggagcttatgaaccacgacaacgctctcaatgacatgtaccgctatggtctctctgatgagcgcactcctgctgtccagtgcgagtacatcaagcaattggctgccaagcgacctctccgtatcctcgagattggtgcgggtaccggttctgctaccagccgtatcttcgctgctcttggcgagaacattcaaggcaagctgaccaagtacacatacaccgatatctccggttccttcttcgctgaagccgccgaggaattcaaggagtaccgttcgttgatggacttcaaggtcctcaacgtcgaatccacgcctgaatcccaaggcttcgaagagggctcctacgatgttgtcgtcgctttccaggttctgcacgctacccactatctgagcgagactctcgccaacgcacgcaggctcctgaagcctggtggcaagcttattgctactgagttgacaagcaagatcggcagacgttctgctgtcttcggtctgctagctggctggtggctaggcgaggatgatgatcgccactttggtcctgaactctctgaggagggttgggatgcccgcctcaaggccgttggttacaatggtgctgacttctgctatcgcgatcgtgatgacatcggttggtcatcttcgcttgtggccgctaccaacccttacgtgcctgaggtttctcccatcaagactgtcactatcgtgacaggctctgacgagtctgcccaggctaagggcttggtctctgagctgaccaagaagctcaccagtgaaggcgctgtcgttgacaagaagacgctgtctgaggctgcttccgctgatctcaccaaggatcgcgtgatcgttactgctgaggtcgagaattccgttctcactaccatggatgagactgagtacagtgccattaagaacattttccatcactccgatggcaccctttggctcacccaaggtggttacactattgatagcagacgcccagctctgaacatgatcactggtctcgcccgcaccgttcgtggtgaagctcctgagattcgtcttgcaacactcgatctcgacccagatgtttcactcgactcccctgagaccacgaacaccgtgctcaaggtgctcactatccagggcgattcgaacaacaacgagttcgaattcgctgctcgcaagggtgccctgaacgttccccgtctcggaacagacgagaacttcagcagacgccagaagcctgacgaggatcatgaagacgccttgtcgctccagccactcaagcaggccaaccgcgcgctcaagcttggcatcaaagccactggtgagcttgacagcttcttcttcagcgacgatgccgagtaccagcaacctcttggcgattccgacatcgagattgaagtcaaggctgttggtctcgaccagttcgacatggttgtcgctgttggccagatctgggatgtcaacctgggtgttgagtgctccggtaccatcactcgtcttggcaaggacgtcaccgacttcgccgttggtgaccgcgtcctgactgttggcaacggatggtacaagacttacatccgaaatagccaggagaccttccagaagctgcccgagtctatgagcttcgaggagggtgcttccatgatgatctcttatggtaccgccgcttacagtatctacaacgtcgcccgcctcgaggctggcgaaaccattctgattcactctgctgctgatgttctcggccagggtgcgattcaaatggctcagcacatcggagccgaggtcctcgtcactgtctcatctgagactgagaaaaaccttctcaaagagaaatacaacattgccgatgaccacatcttcagcaacaaggatgctggtttcgtccagggtatcaagcgtattaccaagggcgagggtgttcaagttgtcatcaacaacctcaccggtgagctcttgcgccagacctggcactgcattgcacccttcggtcgcttcatcgagctcggtgttaaggatatcaaatccaacaccggtcttgacatggtgccgttcttgaacaacgccactttctctggtgtcaacatcctgcagatgtaccgcaagaacaagcgtgtcttcagcaagctcatggccgatgtcatgaagtaccacgctcagggtgttttcaagctcgcaccactcaacatcaagaagttctccgagattgccgatgctttccgtatgctgcagtcccgccgttaccagggcaaggttgtccttcaagctgttgaagatgacatggttcctgtcacccgtggcaagaaggctgaactcaccctttcgcccaatgctacctacttcattcccggtggtactggtggtctcggtcgcgccatgctcatctggatggccaagaagggtgccaagtactttgccatcgcctcccgctccggatccaagaaccccgaggtccaaaatgtcatcggcgagctcgcatctatgggtgttcagacccgtgtattcgcttgtgatgtcggcgacaaggctcagtgtgctgctattcttgaggagctccccaagtctggcttcccgccagtcaagggtgcagttgtccttgctatgaacgtccaggactccatgttcgagaccatgtctctggatgcctggaagggtgccatccgccccaagtacttcgctaccaccaacctacacgaattgctgcccaaggatcttgacttcttcatcacgttgtcctctgccgccggtcagatcggatcgatcgcgcaatccaactacaacgcaggcaacgtgtaccaagactctctcatgtaccaccgtcgccaacagggtctggctggtacttcgattgatcttggctggatgggagacattggtttcgtctctgagcagggtaaggtgccggagatcgtcgcctgcggtgctcctcagatcggctccgcccagctctgggctgtgctcgaggaggccatggccggtgaggtccgcaaccagcccatcctgggtctctccagcggtggtctcgtaaaggccaacggcttcgacgagccttactggttcaccgatgcccgttttggacctctccgcgtgttcgacaccgccagcctcaactctaccgctaagaagagcaacactggcaccgtcgacttcaaggctgtcctcggcgcatccaagacgatgcccgatgctaccaagatcgtctgcggtggtcttatggctaagctcgccaagggtctcatgatggagctcgaggatctcgacccatcccgccctatcaacacctacggtgtcgactcccttattgctgtcgacatccgtgcctgggcgctcaaggatctccagtccgttgtccacgtttctgagatcctcaagaaccagcccatgatcaacctcgctgagcacatcggatccaagtctaagttcttgcctgctgctctccagcctaaggcttaa

SEQ ID NO: 12796 - protein, 2597 aa, Muscodor strobelii
  misc_feature: SGI Peptide ID NO. 564172
  misc_feature (609)..(939): Pfam Id: PF00698 Pfam Desc: Acyl transferase domain
  misc_feature (2225)..(2392): Pfam Id: PF00106 Pfam Desc: short chain dehydrogenase
  misc_feature (2015)..(2163): Pfam Id: PF00107 Pfam Desc: Zinc-binding dehydrogenase
  misc_feature (18)..(269): Pfam Id: PF00109 Pfam Desc: Beta-ketoacyl synthase, N-terminal domain
  misc_feature (277)..(395): Pfam Id: PF02801 Pfam Desc: Beta-ketoacyl synthase, C-terminal domain
  misc_feature (2225)..(2405): Pfam Id: PF08659 Pfam Desc: KR domain
  misc_feature (1494)..(1601): Pfam Id: PF08241 Pfam Desc: Methyltransferase domain
  misc_feature (1494)..(1599): Pfam Id: PF08242 Pfam Desc: Methyltransferase domain
  misc_feature (1938)..(1962): Pfam Id: PF08240 Pfam Desc: Alcohol dehydrogenase GroES-like domain
  misc_feature (1)..(2597): NCBI GI: 64213728 Blast Desc: PKSX1 [Xylaria sp. BCC 1067]
  misc_feature (14)..(2589): NCBI GI: 121704114 Blast Desc: polyketide synthase, [Aspergillus clavatus NRRL 1] gi|119398465|gb|EAW08895.1| polyketide synthase, [Aspergillus clavatus NRRL 1]
  misc_feature (19)..(2589): NCBI GI: 57157400 Blast Desc: PKSN polyketide synthase for alternapyrone biosynthesis [Alternaria solani]
  misc_feature (19)..(2589): NCBI GI: 189196278 Blast Desc: mycocerosic acid synthase [Pyrenophora tritici-repentis Pt-1C-BFP] gi|187980356|gb|EDU46982.1| mycocerosic acid synthase [Pyrenophora tritici-repentis
  misc_feature (19)..(2589): NCBI GI: 242815029 Blast Desc: polyketide synthase, [Talaromyces stipitatus ATCC 10500] gi|218714828|gb|EED14251.1| polyketide synthase, [Talaromyces stipitatus ATCC 10500]
  misc_feature (19)..(2470): NCBI GI: 40787374 Blast Desc: polyketide synthase [Cochliobolus heterostrophus]
  misc_feature (15)..(2586): NCBI GI: 146723998 Blast Desc: iterative type I polyketide synthase [Solorina crocea]
  misc_feature (12)..(2589): NCBI GI: 242796603 Blast Desc: polyketide synthase, [Talaromyces stipitatus ATCC 10500] gi|218719421|gb|EED18841.1| polyketide synthase, [Talaromyces stipitatus ATCC 10500]
  misc_feature (11)..(2589): NCBI GI: 258578469 Blast Desc: UREG_02932 [Uncinocarpus reesii 1704] gi|237903682|gb|EEP78083.1| UREG_02932 [Uncinocarpus reesii 1704]
  misc_feature (19)..(2588): NCBI GI: 226288756 Blast Desc: acetolactate synthase catalytic subunit [Paracoccidioides brasiliensis Pb18]
  misc_feature (19)..(1799): SWISSPROT Homolog: EC 2.3.1.161 Lovastatin nonaketide synthase
  misc_feature: Useful for fungicidal and/or biocontrol applications
  misc_feature: Useful for introducing or modulating the production of volatile compounds
MAMSQQEIEAILAKDGAAPIAIVGVSGRFPGDATTPDRLWEMVSEARSALTDVPKERYNIDGFYHPSAERQGTTSTRKGHFISSDVGLFDAPFFKISAQEAHAMDPQQRLALELSYEALESAGLTMSDIAKSNMGCYMATCVRDYAAIRAIDPDDYPRYEANGSMGTAMISNRISWYFDIKGPSLTLDTACSSSLVCLHLAVQSIRTGESKAALVGATNLILAPHTSNHLSTLSFLSKDGKSQSFDHKANGYSRGEGVSFIVVKSLADALRDGDCIRAVVRGTSVTQDGRTPGINLPSAESQEELIQAAYTNAKLSAEETTYFEAHGPGTPAGDPLETSAIAKVFGSYHSPDFPLYVGSVKSNIGHLEAGAGLAGLTKTLYALEKGQIPPNIWFERANPKILLKEWNLAVPTELLPWPTNGLRRASINSFGYGGTNAHCILDDAYHYLTSRGLIGRHNTAAVVPRPVIMPALMSSESEIPTSTFATSVFNSEVVSEAVSTQGTTTPVSEIDSVEDLGAIASTPQLLVWSHHEQNGIARTAKQLQEYLEEKKVLATEAASKLKSLAYTLAGKRTRHPWASFVVASDLNEVVQELEHPAKHLRPSENIASVWVFTGQGAQWFGMGRELLAYQTYRTRIEEAAAHLKSLGCEWDLVEELGKSQADSRVNEPQISQPACTAVQVGLVDLLTEWGVAPTITIGHSSGEIGAAYAKGALSCEAAWTVAYHRGRLSASLNITGAMLAVALGEEGVRPFIDQCTSDPKPVVACVNSPESVTLSGSSEGIDEVLNIIGSQAWARKLLVKTPYHSPFMQKLAEPYYEAMGTLAGGVNSSARMFSSVTGKEIDNAALLNPQYWVDNMVNCVRFGPALSAALDEPVLSGKPLILMEVGPHGALQGPVKQIIKAQKTQPSEMNLFSLLTRKEDAIRTTLKGVGILYQKGLPVDVSKANTLDSKTESPSFLVDLPPFSWNHNTRFWYETAMSMAYKNRSEPKHDVLGARDVFSGEAEPAWRNYLRASEIPWARHHGVQGMFLFSAAGFLTMVVEAMRQISEPGKVIEGIQFRDVFPGPPIVLTDNEDAPVETKLQLRNWRLASRSLTTYWKEFSIASRTRDGTWTQHSTGLVSIKYAADNHATSFADEQAAVNETYKNEYARIQNTKLTTHTGAEFYSKYEKLGMRWGETFKTLKESRVAGKDVVATLEVPDTVSWMPANVESSYVIHPATLDGVFHTLLAAEGVEKITVPKYIERIYISAKLPTDAGSKLQGYAQIQEKWADGTNGTVVLSDEKWAEPLLIFEGLKSTDYNSGSSTEEDSESKVKAVRKLGAYTTWHVDIENSPETLREILTSAVNKAPQVPYSEVYDLEWCAYIVCKRMAQRFTDEDAKRMAPHHLIFYNYMKNQVELANASELPCQTPEWLSSSKETEDEVLIRAAATSLEGKMMVRISDNIESVLLGEIEPWELMNHDNALNDMYRYGLSDERTPAVQCEYIKQLAAKRPLRILEIGAGTGSATSRIFAALGENIQGKLTKYTYTDISGSFFAEAAEEFKEYRSLMDFKVLNVESTPESQGFEEGSYDVVVAFQVLHATHYLSETLANARRLLKPGGKLIATELTSKIGRRSAVFGLLAGWWLGEDDDRHFGPELSEEGWDARLKAVGYNGADFCYRDRDDIGWSSSLVAATNPYVPEVSPIKTVTIVTGSDESAQAKGLVSELTKKLTSEGAVVDKKTLSEAASADLTKDRVIVTAEVENSVLTTMDETEYSAIKNIFHHSDGTLWLTQGGYTIDSRRPALNMITGLARTVRGEAPEIRLATLDLDPDVSLDSPETTNTVLKVLTIQGDSNNNEFEFAARKGALNVPRLGTDENFSRRQKPDEDHEDALSLQPLKQANRALKLGIKATGELDSFFFSDDAEYQQPLGDSDIEIEVKAVGLDQFDMVVAVGQIWDVNLGVECSGTITRLGKDVTDFAVGDRVLTVGNGWYKTYIRNSQETFQKLPESMSFEEGASMMISYGTAAYSIYNVARLEAGETILIHSAADVLGQGAIQMAQHIGAEVLVTVSSETEKNLLKEKYNIADDHIFSNKDAGFVQGIKRITKGEGVQVVINNLTGELLRQTWHCIAPFGRFIELGVKDIKSNTGLDMVPFLNNATFSGVNILQMYRKNKRVFSKLMADVMKYHAQGVFKLAPLNIKKFSEIADAFRMLQSRRYQGKVVLQAVEDDMVPVTRGKKAELTLSPNATYFIPGGTGGLGRAMLIWMAKKGAKYFAIASRSGSKNPEVQNVIGELASMGVQTRVFACDVGDKAQCAAILEELPKSGFPPVKGAVVLAMNVQDSMFETMSLDAWKGAIRPKYFATTNLHELLPKDLDFFITLSSAAGQIGSIAQSNYNAGNVYQDSLMYHRRQQGLAGTSIDLGWMGDIGFVSEQGKVPEIVACGAPQIGSAQLWAVLEEAMAGEVRNQPILGLSSGGLVKANGFDEPYWFTDARFGPLRVFDTASLNSTAKKSNTGTVDFKAVLGASKTMPDATKIVCGGLMAKLAKGLMMELEDLDPSRPINTYGVDSLIAVDIRAWALKDLQSVVHVSEILKNQPMINLAEHIGSKSKFLPAALQPKA

SEQ ID NO: 12797 - DNA, 8694 bp, Muscodor strobelii
  misc_feature: SGI EST ID NO. CUFF.30762.0
  misc_feature: Variant of the nucleotide sequence at SEQ ID NO 12795
ctgcactagccatggatatgcatgctgatatgcagcatcgtgtcttggctcgaagcaccgtccctgatgcgccagacgggggactgatggagacgtctcctccatattcgacatcttgctttcgagttaggccttagcatagcacgtgtactctaatctcatgtacctcgcactacaggccccatatggcgacttgaatctcatgcgtccgccactgcctcgctgtctccgccttatcaagatgctgacttgactgctcggtcctggctaggtcactcgccgaccttgagattggcgtggggacatatcgacattctgttactcacctagttaggaccctgctcactcatccagcatatggtttctatataacactctcgagagcccgcatcatgcttcactttgcgcttctttattcctcatctttctttctttgtggtctttacgattaacgaatcttgcggagctttctccgttacaatagagttatagaatctatcttgttcaacacacgagggcaatcatacttgtccctctacgcaagctactgtcattcaacttccaaactatactgacagttaccgttgtatataccctcgagccaacgtataacacgcacatatactctcttgctcgcaaatagaacaatccagaaatggctatgtcacagcaggaaatcgaggccatccttgccaaggatggcgccgcacccatcgccatcgtgggtgtttcaggcagattccccggagatgctacgaccccagacagattgtgggagatggtctccgaggcgagaagtgctctgaccgatgtgcccaaggagcgttacaacatcgatggattctaccaccccagtgccgaacgccagggaactacaagcacccgcaaaggtcacttcatctcttccgatgttggccttttcgatgctccgtttttcaagatctctgcacaggaggcccatgccatggacccccagcagagacttgctcttgaactctcatatgaggctttggaatcagctggcctgacaatgtctgacattgccaagtccaatatgggatgttacatggcaacttgtgtcagggactacgctgctatccgcgctatcgaccctgatgactacccccgttatgaagccaacggatctatgggtactgccatgatttccaaccgaatttcctggtacttcgacatcaagggaccgagtttgacgcttgacaccgcctgctcgtcatctttggtctgcttgcacttggctgtgcaaagcattcgcactggagagtccaaggcggctcttgttggtgccactaaccttattctggcaccacacacctccaaccatctaagcaccttatccttcttgtccaaggatggcaagtcgcaatcattcgaccacaaggccaacggatactcccgtggtgagggtgtgtccttcattgttgtcaagtctttggccgatgctctgcgggatggtgactgcatccgtgcggttgtccgaggaacctcggtgactcaggatggtcgcactcctggtatcaaccttccctctgcggaatctcaggaagagctgatccaggccgcgtacactaacgcaaaactgagcgccgaagagactacttacttcgaggctcacggtcccggtactcctgccggtgacccgcttgagacctccgctattgcaaaggttttcggcagctaccactcccccgactttcctttgtacgtcggatccgtcaaatccaacattggtcacctggaggctggtgccggtcttgcgggtctcacgaagactctctacgctcttgagaagggtcagatcccccctaacatttggtttgagcgagccaacccgaagattctgctaaaggagtggaatcttgcggttcccacggaacttctcccatggccaacaaacggactgcgtcgtgccagtatcaactcgttcggttatggtggtaccaatgcccactgtattctggatgacgcctatcactacctgaccagtcgtggactgattggtcgacacaacaccgcggccgtggtgccccgacctgtcatcatgcccgcccttatgtcgtctgagtctgagattcccacgtcgaccttcgcaaccagtgtctttaactccgaagtcgtctccgaggctgtgagtactcagggtaccaccacacccgtgtctgaaatcgacagcgttgaggaccttggagcgatcgcgtccaccccccagctgctcgtctggtcccaccatgagcagaacggtattgctagaaccgccaagcaactgcaggaatacctcgaggagaagaaggtccttgcaactgaggctgcctcgaaattgaagagcttggcatacaccttggctggcaagcgaacccgccacccatgggcttcattcgttgtcgcttctgatctcaatgaggtcgtacaggagttggagcaccctgccaagcacttgcgaccttcagagaacattgcctctgtatgggtattcacgggtcaaggtgctcaatggttcggtatgggtcgtgaacttctcgcataccaaacttaccgaacccgcatcgaagaggctgccgctcatctgaagtctcttggttgcgaatgggacctcgttgaggaacttggtaagagccaggctgactctcgcgtcaacgagccccagatcagccagcccgcatgtactgccgttcaggttggtctcgtcgaccttctcactgagtggggtgtcgctcccaccatcactattggccactccagtggtgaaatcggtgctgcttacgcgaagggcgctctctcttgtgaggctgcttggaccgtcgcctaccaccgtggtcgcctctccgcaagtctcaacattaccggtgccatgttggccgttgctcttggcgaggaaggtgttcgaccttttattgaccagtgcacctctgaccctaagccagtcgttgcttgtgtgaacagccccgagagtgtcactctgtctggcagctccgagggtattgatgaagtgttgaacatcatcggcagccaagcctgggcccgcaaactcttggtcaagaccccttatcatagtccattcatgcagaagctggccgagccttactacgaggctatgggtaccctcgcaggtggcgtcaactcctctgctcgcatgttctcgtccgttacgggcaaggaaattgataacgctgcgttgctgaaccctcaatactgggttgataacatggtcaactgtgtgcgtttcggaccagcccttagcgccgctctggatgaaccagtactctctggcaagcctctcatcctgatggaggttggacctcatggtgcgctccagggaccagtcaagcagatcatcaaggcccagaagactcagccttcagagatgaacctcttcagtcttctcactcgtaaggaggacgccatccgaactaccctcaagggtgtcggtatcttgtaccagaagggtcttcccgtcgatgttagcaaggccaatacgctcgactccaagaccgaatctccctccttcttggttgacctgccaccattctcttggaaccacaatactcgcttctggtacgagactgccatgtccatggcttacaagaaccgatcggagcccaagcacgatgttcttggcgcacgggacgtcttctctggcgaagctgagccagcatggcgcaactatctgcgcgcatccgagatcccatgggcccgtcaccacggtgttcaggggatgttcttgttctctgctgctggcttcctcaccatggttgttgaggctatgcgtcaaatctccgaacctggcaaggtcattgagggcatccaattccgggatgttttcccgggacctccaattgtgctcactgacaatgaggatgcccccgttgagacaaagcttcagctccgaaactggcgtctcgcttctcgatctctgactacctactggaaggagttcagcattgccagccgtactcgcgatggaacctggactcagcacagcactggtctcgtctcgatcaaatacgctgccgataaccacgcaaccagtttcgctgacgagcaggctgctgtcaacgagacctacaagaatgagtacgctcgcatccagaacaccaagctgaccacacacactggcgcagagttctactctaagtatgagaagctcggtatgcgctggggtgagaccttcaagactctcaaggagtcacgtgttgctggcaaggatgttgtcgctacgctggaggtccccgacaccgtatcgtggatgcctgctaatgttgagtcttcttatgtcattcaccctgccactctggatggtgtcttccacacactgctggctgccgaaggtgtcgagaagatcactgttcccaaatacattgagcgcatctacatctcggccaagcttcccactgatgccggatcgaaactccagggttatgcccagatccaggagaagtgggctgatggaaccaatggtaccgtcgttctttccgacgagaagtgggctgagcctctgctcatcttcgagggcttgaaatcgactgattacaactctggttctagcactgaggaggactctgagtcaaaggttaaggctgttcgcaagttgggtgcttacacaacctggcacgttgacattgagaactctcccgagaccctccgagagatcttgaccagcgctgtgaacaaggccccccaggtcccctactctgaggtttacgatctcgagtggtgtgcatacattgtctgcaagagaatggctcagcgtttcactgatgaagatgccaagcgcatggctcctcaccacctcatcttctacaactacatgaagaaccaggttgaacttgccaatgccagcgaacttccttgccagacacccgagtggttgtcttctagcaaagagactgaggatgaggttctgattcgggccgctgccactagtcttgagggtaagatgatggttcgtatcagcgacaacatcgagagcgtcctccttggtgaaattgagccctgggagcttatgaaccacgacaacgctctcaatgacatgtaccgctatggtctctctgatgagcgcactcctgctgtccagtgcgagtacatcaagcaattggctgccaagcgacctctccgtatcctcgagattggtgcgggtaccggttctgctaccagccgtatcttcgctgctcttggcgagaacattcaaggcaagctgaccaagtacacatacaccgatatctccggttccttcttcgctgaagccgccgaggaattcaaggagtaccgttcgttgatggacttcaaggtcctcaacgtcgaatccacgcctgaatcccaaggcttcgaagagggctcctacgatgttgtcgtcgctttccaggttctgcacgctacccactatctgagcgagactctcgccaacgcacgcaggctcctgaagcctggtggcaagcttattgctactgagttgacaagcaagatcggcagacgttctgctgtcttcggtctgctagctggctggtggctaggcgaggatgatgatcgccactttggtcctgaactctctgaggagggttgggatgcccgcctcaaggccgttggttacaatggtgctgacttctgctatcgcgatcgtgatgacatcggttggtcatcttcgcttgtggccgctaccaacccttacgtgcctgaggtttctcccatcaagactgtcactatcgtgacaggctctgacgagtctgcccaggctaagggcttggtctctgagctgaccaagaagctcaccagtgaaggcgctgtcgttgacaagaagacgctgtctgaggctgcttccgctgatctcaccaaggatcgcgtgatcgttactgctgaggtcgagaattccgttctcactaccatggatgagactgagtacagtgccattaagaacattttccatcactccgatggcaccctttggctcacccaaggtggttacactattgatagcagacgcccagctctgaacatgatcactggtctcgcccgcaccgttcgtggtgaagctcctgagattcgtcttgcaacactcgatctcgacccagatgtttcactcgactcccctgagaccacgaacaccgtgctcaaggtgctcactatccagggcgattcgaacaacaacgagttcgaattcgctgctcgcaagggtgccctgaacgttccccgtctcggaacagacgagaacttcagcagacgccagaagcctgacgaggatcatgaagacgccttgtcgctccagccactcaagcaggccaaccgcgcgctcaagcttggcatcaaagccactggtgagcttgacagcttcttcttcagcgacgatgccgagtaccagcaacctcttggcgattccgacatcgagattgaagtcaaggctgttggtctcgaccagttcgacatggttgtcgctgttggccagatctgggatgtcaacctgggtgttgagtgctccggtaccatcactcgtcttggcaaggacgtcaccgacttcgccgttggtgaccgcgtcctgactgttggcaacggatggtacaagacttacatccgaaatagccaggagaccttccagaagctgcccgagtctatgagcttcgaggagggtgcttccatgatgatctcttatggtaccgccgcttacagtatctacaacgtcgcccgcctcgaggctggcgaaaccattctgattcactctgctgctgatgttctcggccagggtgcgattcaaatggctcagcacatcggagccgaggtcctcgtcactgtctcatctgagactgagaaaaaccttctcaaagagaaatacaacattgccgatgaccacatcttcagcaacaaggatgctggtttcgtccagggtatcaagcgtattaccaagggcgagggtgttcaagttgtcatcaacaacctcaccggtgagctcttgcgccagacctggcactgcattgcacccttcggtcgcttcatcgagctcggtgttaaggatatcaaatccaacaccggtcttgacatggtgccgttcttgaacaacgccactttctctggtgtcaacatcctgcagatgtaccgcaagaacaagcgtgtcttcagcaagctcatggccgatgtcatgaagtaccacgctcagggtgttttcaagctcgcaccactcaacatcaagaagttctccgagattgccgatgctttccgtatgctgcagtcccgccgttaccagggcaaggttgtccttcaagctgttgaagatgacatggttcctgtcacccgtggcaagaaggctgaactcaccctttcgcccaatgctacctacttcattcccggtggtactggtggtctcggtcgcgccatgctcatctggatggccaagaagggtgccaagtactttgccatcgcctcccgctccggatccaagaaccccgaggtccaaaatgtcatcggcgagctcgcatctatgggtgttcagacccgtgtattcgcttgtgatgtcggcgacaaggctcagtgtgctgctattcttgaggagctccccaagtctggcttcccgccagtcaagggtgcagttgtccttgctatgaacgtccaggactccatgttcgagaccatgtctctggatgcctggaagggtgccatccgccccaagtacttcgctaccaccaacctacacgaattgctgcccaaggatcttgacttcttcatcacgttgtcctctgccgccggtcagatcggatcgatcgcgcaatccaactacaacgcaggcaacgtgtaccaagactctctcatgtaccaccgtcgccaacagggtctggctggtacttcgattgatcttggctggatgggagacattggtttcgtctctgagcagggtaaggtgccggagatcgtcgcctgcggtgctcctcagatcggctccgcccagctctgggctgtgctcgaggaggccatggccggtgaggtccgcaaccagcccatcctgggtctctccagcggtggtctcgtaaaggccaacggcttcgacgagccttactggttcaccgatgcccgttttggacctctccgcgtgttcgacaccgccagcctcaactctaccgctaagaagagcaacactggcaccgtcgacttcaaggctgtcctcggcgcatccaagacgatgcccgatgctaccaagatcgtctgcggtggtcttatggctaagctcgccaagggtctcatgatggagctcgaggatctcgacccatcccgccctatcaacacctacggtgtcgactcccttattgctgtcgacatccgtgcctgggcgctcaaggatctccagtccgttgtccacgtttctgagatcctcaagaaccagcccatgatcaacctcgctgagcacatcggatccaagtctaagttcttgcctgctgctctccagcctaaggcttaaacaaacaaacgggaatcattaggagggaatacttatagatgattgataccccttcatgaatatgaagttgatgataatgtttttggattgggatttttaacattcacatcatgtagacactggatgtcttcactttgcatacgaaatttttggcgggagttttggagaagctgttacgaatttcctttgtcacactgcattagatagcgttgattttaaagtaaagaccacatttcaaaccaact

SEQ ID NO: 12798 - DNA, 2229 bp, Muscodor strobelii
  misc_feature: SGI cDNA ID NO. 564173
  misc_feature: Reduced expression when VOC is produced
  misc_feature: Encodes the peptide sequence at SEQ ID NO 12799
atgcttcgacaatcgctggctcgttcggcttggcggtccagccgcgctgccgtcaacgcaaagaggcctttttccgcaacaccacagcgcccggccgaagtcgagctcaccatcgatgggaaaaaggtgtcgatcgaagccggatcagccctcatccaagcttgcgagaaggcaggcgccacagtcccaagatattgctaccatgaaaaactcatgatcgccggtaactgccgtatgtgtctcgtcgaagtcgaacgcgcccccaaacccgtcgcctcgtgcgcatggcccgtccagcccggcatggtcgtcaagaccaactctcccctcacccacaaggcccgcgaaggtgtcatggagttcctgctcgccaaccaccccttggactgccccatctgcgatcagggtggcgagtgcgatctccaggatcagtccatgcgctacggtggcgataggggtcgattccacgagattggtggcaagcgagccgtggaggacaagaacatcggtcccctcatcaagacatctatgaatagatgtatacactgcacgagatgtattcgattcgcaaacgatgtcgccggtgcccccgagatgggctcatttggccgtggaaacgatatccagatcggcacgtacctcgaacagaacctcaactcggagatgtctggaaacgtcattgacctatgccccgttggtgccctcacctctaaaccctacgccttccgcgcccgtccatgggagctgaagaagaccgagtccatcgatgtccttgacggcctaggatctgccatccgcgtcgacagccgtggcctcgaggtcatgcgtgtccaaccccgcctcaacgacgatgtcaacgaggagtggatcaacgacaagacccgcttcgcctgcgacggtctcaagacgcaacgcctcaccatgcctcttgtccgaagagaaggcaagttcgagcccgcctcctgggaacaggctctgactgagattggcgccgtctaccgacaattggctcctggtgccaatgagttcaaggtcatcgccggtgagctgaccgaggtcgagtccctggtggctatgaaggacctcgccaacaagcttggttccgacaatctggccctcgacatgccttccggcaatcagcccatcgctcacggtgtcgatgtacgctcgaactacctgtttaactccaagatctgggccgttgaggatgtcgactgcctcctcctcgtgggtaccaaccctaggcatgaggctgccggcctcaacgcccgcattcgaaagcaatggctgcggtctgatctcgagatcggcgttgtcggcgagtcttttgagtccactttcgaatttgagcatcttggtaccgactacgccgccctcaagaaggccctcactggtcccttcggcaagaaactgcaggcagccaagaagcccatgatcgtcgttggttcaggtgttaccgatcacgccgatgccaaggcattctacgaacttatcggcggtttcgtcgataagaatgctgccaacttcttaaccgaggagcacaacggtttcaacatcctgcaacgcgctgcctcaagagcgggtgcttttgaggttggcttcacgacaccttctcctgctgtcgctgagactgcacccaagtttgtctggcttctcggtgccgacgaattcaacgaggcagacattccgaagaacgcttttgtcgtctaccagggccaccatggcgaccgcggtgcccagattgctgatattgttttgcctggagctgcttacacagagaaggcgggtacttacgtcaacacggaaggtcgtgtccagatgactcgtgccgctacctcattaccaggcgccgcccgtaccgactggaagattatccgcgccgtctccgagtttctcggcgctcctctcccttacgacgacgttgctcagttgcgggaaagattggttgagattagccctgccctcgctgcttacgacgttgttgaacccacaaccctgaagcagctcagcaaggtgcaactggtagaccagaataagggctctaaatctaccggcgcgcctctccagaaagttatccaggatttctatttcacagacgtcatctcaagaagttcgccgacgatggcacgttgctcagctgctaaagccacaggtgatccagatacgaatctgatggctccgggtatgactaacgataagcctatgggccaagttgcgtacggtgcatga

SEQ ID NO: 12799 - protein, 742 aa, Muscodor strobelii
  misc_feature: SGI Peptide ID NO. 564173
  misc_feature (36)..(100): Pfam Id: PF00111 Pfam Desc: 2Fe-2S iron-sulfur cluster binding domain
  misc_feature (659)..(711): Pfam Id: PF09326 Pfam Desc: Domain of function (DUF1982)
  misc_feature (305)..(631): Pfam Id: PF00384 Pfam Desc: Molybdopterin oxidoreductase
  misc_feature (1)..(742): NCBI GI: 116204673 Blast Desc: NADH-ubiquinone oxidoreductase 78 kDa subunit, mitochondrial precursor [Chaetomium globosum CBS 148.51] gi|88176348|gb|EAQ83816.1| NADH-ubiquinone oxidoreductase 78 kDa
  misc_feature (1)..(742): NCBI GI: 256732511 Blast Desc: [Nectria haematococca mpVI 77-13-4]
  misc_feature (1)..(742): NCBI GI: 14286142 Blast Desc: NDUS1_NEUCR RecName: Full=NADH-ubiquinone oxidoreductase 78 kDa subunit, mitochondrial; AltName: Full=Complex I-78kD; Short=CI-78kD; Flags: Precursor NADH 78K
  misc_feature (1)..(742): NCBI GI: 145608390 Blast Desc: NADH-ubiquinone oxidoreductase 78 kDa subunit, mitochondrial precursor [Magnaporthe grisea 70-15] gi|145015866|gb|EDK00356.1| NADH-ubiquinone oxidoreductase 78 kDa
  misc_feature (1)..(741): NCBI GI: 46121639 Blast Desc: NUAM_NEUCR NADH-ubiquinone oxidoreductase 78 kDa subunit, mitochondrial precursor (Complex I-78KD) (CI-78KD) [Gibberella zeae PH-1]
  misc_feature (1)..(742): NCBI GI: 556339 Blast Desc: NADH dehydrogenase subunit [Neurospora crassa]
  misc_feature (1)..(742): NCBI GI: 164428173 Blast Desc: NADH:ubiquinone oxidoreductase 78kD subunit [Neurospora crassa OR74A] gi|157072041|gb|EAA27952.2| NADH:ubiquinone oxidoreductase 78kD subunit [Neurospora crassa
  misc_feature (1)..(741): NCBI GI: 156063302 Blast Desc: NADH-ubiquinone oxidoreductase 78 kDa subunit, mitochondrial precursor [Sclerotinia sclerotiorum 1980] gi|154697103|gb|EDN96841.1| NADH-ubiquinone oxidoreductase 78 kDa
  misc_feature (1)..(742): NCBI GI: 3034 Blast Desc: NADH dehydrogenase (ubiquinone) 78 kDa subunit [Neurospora crassa]
  misc_feature (2)..(728): NCBI GI: 238839429 Blast Desc: NADH-ubiquinone oxidoreductase 78 kDa subunit [Microsporum canis CBS 113480]
  misc_feature (19)..(742): SWISSPROT Homolog: EC 1.6.5.3 NADH dehydrogenase (ubiquinone)
  misc_feature (19)..(742): SWISSPROT Homolog: EC 1.6.99.3 NADH dehydrogenase
  misc_feature: Useful for introducing or modulating the production of volatile compounds
MLRQSLARSAWRSSRAAVNAKRPFSATPQRPAEVELTIDGKKVSIEAGSALIQACEKAGATVPRYCYHEKLMIAGNCRMCLVEVERAPKPVASCAWPVQPGMVVKTNSPLTHKAREGVMEFLLANHPLDCPICDQGGECDLQDQSMRYGGDRGRFHEIGGKRAVEDKNIGPLIKTSMNRCIHCTRCIRFANDVAGAPEMGSFGRGNDIQIGTYLEQNLNSEMSGNVIDLCPVGALTSKPYAFRARPWELKKTESIDVLDGLGSAIRVDSRGLEVMRVQPRLNDDVNEEWINDKTRFACDGLKTQRLTMPLVRREGKFEPASWEQALTEIGAVYRQLAPGANEFKVIAGELTEVESLVAMKDLANKLGSDNLALDMPSGNQPIAHGVDVRSNYLFNSKIWAVEDVDCLLLVGTNPRHEAAGLNARIRKQWLRSDLEIGVVGESFESTFEFEHLGTDYAALKKALTGPFGKKLQAAKKPMIVVGSGVTDHADAKAFYELIGGFVDKNAANFLTEEHNGFNILQRAASRAGAFEVGFTTPSPAVAETAPKFVWLLGADEFNEADIPKNAFVVYQGHHGDRGAQIADIVLPGAAYTEKAGTYVNTEGRVQMTRAATSLPGAARTDWKIIRAVSEFLGAPLPYDDVAQLRERLVEISPALAAYDVVEPTTLKQLSKVQLVDQNKGSKSTGAPLQKVIQDFYFTDVISRSSPTMARCSAAKATGDPDTNLMAPGMTNDKPMGQVAYGA

SEQ ID NO: 12800 - DNA, 3973 bp, Muscodor strobelii
  misc_feature: SGI EST ID NO. CUFF.30771.0
  misc_feature: Variant of the nucleotide sequence at SEQ ID NO 12798
gtgaagcaacacccaggaaaagagagacgtcaacactatcaagccccgagtctcaattgacccgatccgcccccgtctgtgtgtccctctcccctctacctcacgcctccgtcgggacgacacgatgcttcgacaatcgctggctcgttcggcttggcggtccagccgcgctgccgtcaacgcaaagaggcctttttccgcaacaccacagcgcccggccgaagtcgagctcaccatcgatgggaaaaaggtgtcgatcgaagccggatcagccctcatccaagcttgcgagaaggcaggcgccacagtcccaagatattgctaccatgagttcgcattagctacctatcatcgatccgaaatgcccccgtaactgaccatattatccgtctagaaaactcatgatcgccggtaactgccgtatgtgtctcgtcgaagtcgaacgcgcccccaaacccgtcgcctcgtgcgcatggcccgtccagcccggcatggtcgtcaagaccaactctcccctcacccacaaggcccgcgaaggtgtcatggagttcctgctcgccaaccaccccttggactgccccatctgcgatcagggtggcgagtgcgatctccaggatcagtccatgcgctacggtggcgataggggtcgattccacgagattggtggcaagcgagccgtggaggacaagaacatcggtcccctcatcaagacatctatgaatagatgtatacactgcacgagatgtattcgattcgcaaacgatgtcgccggtgcccccgagatgggctcatttggccgtggaaacgatatccagatcggcacgtacctcgaacagaacctcaactcggagatgtctggaaacgtcattgacctatgccccgttggtgccctcacctctaaaccctacgccttccgcgcccgtccatgggagctgaagaagaccgagtccatcgatgtccttgacggcctaggatctgccatccgcgtcgacagccgtggcctcgaggtcatgcgtgtccaaccccgcctcaacgacgatgtcaacgaggagtggatcaacgacaagacccgcttcgcctgcgacggtctcaagacgcaacgcctcaccatgcctcttgtccgaagagaaggcaagttcgagcccgcctcctgggaacaggctctgactgagattggcgccgtctaccgacaattggctcctggtgccaatgagttcaaggtcatcgccggtgagctgaccgaggtcgagtccctggtggctatgaaggacctcgccaacaagcttggttccgacaatctggccctcgacatgccttccggcaatcagcccatcgctcacggtgtcgatgtacgctcgaactacctgtttaactccaagatctgggccgttgaggatgtcgactgcctcctcctcgtgggtaccaaccctaggcatgaggctgccggcctcaacgcccgcattcgaaagcaatggctgcggtctgatctcgagatcggcgttgtcggcgagtcttttgagtccactttcgaatttgagcatcttggtaccgactacgccgccctcaagaaggccctcactggtcccttcggcaagaaactgcaggcagccaagaagcccatgatcgtcgttggttcaggtgttaccgatcacgccgatgccaaggcattctacgaacttatcggcggtttcgtcgataagaatgctgccaacttcttaaccgaggagcacaacggtttcaacatcctgcaacgcgctgcctcaagagcgggtgcttttgaggttggcttcacgacaccttctcctgctgtcgctgagactgcacccaagtttgtctggcttctcggtgccgacgaattcaacgaggcagacattccgaagaacgcttttgtcgtctaccagggccaccatggcgaccgcggtgcccagattgctgatattgttttgcctggagctgcttacacagagaaggcgggtacttacgtcaacacggaaggtcgtgtccagatgactcgtgccgctacctcattaccaggcgccgcccgtaccgactggaagattatccgcgccgtctccgagtttctcggcgctcctctcccttacgacgacgttgctcagttgcgggaaagattggttgagattagccctgccctcgctgcttacgacgttgttgaacccacaaccctgaagcagctcagcaaggtgcaactggtagaccagaataagggctctaaatctaccggcgcgcctctccagaaagttatccaggatttctatttcacagacgtcatctcaagaagttcgccgacgatggcacgttgctcagctgctaaagccacaggtgatccagatacgaatctgatggctccgggtatgactaacgataagcctatgggccaagttgcgtacggtgcatgattccccaaaagagacaaaaaatgagtaataggtcacaattatttcaactgtgtcacaaaacaacaaaacaactatactatagaccccgcggcaaaccactcctgggttttcacttgtaccaaacctcaatccacagatggaagactacaggagaacgaagacaggtggttgtttttcccctttgttcgccgccgtggagagaaagagaggagatggaccgagtgatctagtcgtgtgctacatcatctagaaaggggtagcaaatgtacatatatcgcatgcatagtgcttcttgcttgaatcgagaagcgagagggttgaggaatagaagtccagaatcgtacatatctactatcatctaagcatgtggctatgaacaaaccccacgtgatatacgacttcgttattgcgttattgcagactgattagttcatagggcaaacattagtttgccctactacgcagccctttgagtagtcgcttgactatttgagattctcagccacgtctatgcggatcttaatcggagtatcatacgaaaaattcctccattaagtagccgtaactagtttctatctaaggattcagctccctttaaggcctcatctacgccttccttcagtttctgaagctgtttcatgagctttttgttctccaaggccatgattgctgctttcccccctgcttctttttttgataaggcgctgccccatcctagcacgaggttgttttcgcctaggccgctgtagaaggcctttacggtgtatagggggagaccggtgtttttgtccttttttgggttgccttcgtctctgtattcgattttgacaccttttgcaccgatggcttgtgatagttggactttgtgcggtagattggcctgcactggcgtggtgccggcagtggtaattccagtagcagtggtggtggtggtattggaagggagtttaggagggttccgcttgtattcatccagaatttcgcgcttgagaatcgtagccatgagcggtctgagaaaatccgtagtctgggaaagacctgaatcgctgctgaggatggaagccccgatatacgcctcgaagagatcccctaggaccttttttcgggattgcctagatgccacggtgccgtttgtgtgtttactgtggatgtcgaattccacgggaaacttggcctgttcgtttatgccgtatttgatggtgaagtcggccagagtgtcgttttttacgagtctttcgcgtaactgacttgattgccctggtgcgaggttggggaacgtctggtagatgagtgaggtggttattaggtagagataggcatcgcctatccactctagtcgctcgtagtctggctcgttgttgacgccggccacggctttgtgtgtgcgcgacgctttttctagaattgggtctgtgattgggggagggggggtaggatgccgtctgaggggatgtccacgggttcccattttgtgagggatgacggttgggggattagtagtgggcgtgagtggtgatgtgttttttgggctttgtgagccccctcgccattactcg

SEQ ID NO: 12801 - DNA, 1083 bp, Muscodor strobelii
  misc_feature: SGI cDNA ID NO. 564174
  misc_feature: Encodes the peptide sequence at SEQ ID NO 12802
atggcgaaacgctcgttcgacgacttctccgtcgcggcgccggacgtcagttaccatgccatcctcgatcatgcaaataacctcctcaaagccgcacaagctctcaaagacgaccttgagcgcttaggaaaacaccaggatgagcctgagaccaagcacatcgcctcaacactgatgctgcacaacgtccagatccagcctctagttcagtcgctttcaagcgctgaaaacaccatctcaggccggccgaaaaaagcgtcgcgcacacacaaagccgtggccggcgtcaacaacgagccagactacgagcgactagagtggataggcgatgcctatctctacctaataaccacctcactcatctaccagacgttccccaacctcgcaccagggcaatcaagtcagttacgcgaaagactcgtaaaaaacgacactctggccgacttcaccatcaaatacggcataaacgaacaggccaagtttcccgtggaattcgacatccacagtaaacacacaaacggcaccgtggcatctaggcaatcccgaaaaaaggtcctaggggatctcttcgaggcgtatatcggggcttccatcctcagcagcgattcaggtctttcccagactacggattttctcagaccgctcatggctacgattctcaagcgcgaaattctggatgaatacaagcggaaccctcctaaactcccttccaataccaccaccaccactgctactggaattaccactgccggcaccacgccagtgcaggccaatctaccgcacaaagtccaactatcacaagccatcggtgcaaaaggtgtcaaaatcgaatacagagacgaaggcaacccaaaaaaggacaaaaacaccggtctccccctatacaccgtaaaggccttctacagcggcctaggcgaaaacaacctcgtgctaggatggggcagcgccttatcaaaaaaagaagcaggggggaaagcagcaatcatggccttggagaacaaaaagctcatgaaacagcttcagaaactgaaggaaggcgtagatgaggccttaaagggagctgaatccttagatagaaactag

SEQ ID NO: 12802 - protein, 360 aa, Muscodor strobelii
  misc_feature: SGI Peptide ID NO. 564174
  misc_feature (103)..(202): Pfam Id: PF00636 Pfam Desc: RNase3 domain
  misc_feature (84)..(340): NCBI GI: 85083779 Blast Desc: NCU01762 [Neurospora crassa OR74A] gi|7800875|emb|CAB91233.1| related to Ribonuclease III [Neurospora crassa] gi|28918272|gb|EAA27949.1| [Neurospora crassa
  misc_feature (67)..(340): NCBI GI: 116204679 Blast Desc: CHGG_10223 [Chaetomium globosum CBS 148.51] gi|88176351|gb|EAQ83819.1| CHGG_10223 [Chaetomium globosum CBS 148.51]
  misc_feature (59)..(348): NCBI GI: 154319367 Blast Desc: BC1G_02635 [Botryotinia fuckeliana B05.10] gi|150857066|gb|EDN32258.1| BC1G_02635 [Botryotinia fuckeliana B05.10]
  misc_feature (84)..(344): NCBI GI: 39942154 Blast Desc: MGG_03157 [Magnaporthe grisea 70-15] gi|145015863|gb|EDK00353.1| MGG_03157 [Magnaporthe grisea 70-15]
  misc_feature (100)..(338): NCBI GI: 46121645 Blast Desc: FG05201.1 [Gibberella zeae PH-1]
  misc_feature (49)..(339): NCBI GI: 261356684 Blast Desc: ribonuclease [Verticillium albo-atrum VaMs.102]
  misc_feature (95)..(340): NCBI GI: 256732962 Blast Desc: NECHADRAFT_78781 [Nectria haematococca mpVI 77-13-4]
  misc_feature (31)..(360): NCBI GI: 212537955 Blast Desc: nucleolar RNAse III, [Penicillium marneffei ATCC 18224] gi|210068875|gb|EEA22966.1| nucleolar RNAse III, [Penicillium marneffei ATCC 18224]
  misc_feature (31)..(360): NCBI GI: 212537957 Blast Desc: nucleolar RNAse III, [Penicillium marneffei ATCC 18224] gi|210068876|gb|EEA22967.1| nucleolar RNAse III, [Penicillium marneffei ATCC 18224]
  misc_feature (93)..(360): NCBI GI: 242807890 Blast Desc: nucleolar RNAse III, [Talaromyces stipitatus ATCC 10500] gi|218715674|gb|EED15096.1| nucleolar RNAse III, [Talaromyces stipitatus ATCC 10500]
MAKRSFDDFSVAAPDVSYHAILDHANNLLKAAQALKDDLERLGKHQDEPETKHIASTLMLHNVQIQPLVQSLSSAENTISGRPKKASRTHKAVAGVNNEPDYERLEWIGDAYLYLITTSLIYQTFPNLAPGQSSQLRERLVKNDTLADFTIKYGINEQAKFPVEFDIHSKHTNGTVASRQSRKKVLGDLFEAYIGASILSSDSGLSQTTDFLRPLMATILKREILDEYKRNPPKLPSNTTTTTATGITTAGTTPVQANLPHKVQLSQAIGAKGVKIEYRDEGNPKKDKNTGLPLYTVKAFYSGLGENNLVLGWGSALSKKEAGGKAAIMALENKKLMKQLQKLKEGVDEALKGAESLDRN

SEQ ID NO: 12803 - DNA, 2096 bp, Muscodor strobelii
  misc_feature: SGI EST ID NO. CUFF.30772.2
  misc_feature: Variant of the nucleotide sequence at SEQ ID NO 12801
gagaaataggttaaaaatcaatacggctcattaatcggctctctattcggaagtcggtcctattctaccattcgcctagtggggctatgactaggtagctaaatggtagcaccaaagtcatcttgaataatttctatactcaatttgtatcctcaccaacaaacccatcaaaatggcgaaacgctcgttcgacgacttctccgtcgcggcgccggacgtcagttaccatgccatcctcgatcatgcaaataacctcctcaaagccgcacaagctctcaaagacgaccttgagcgcttaggaaaacaccaggatgagcctgagaccaagcacatcgcctcaacactgatgctgcacaacgtccagatccagcctctagttcagtcgctttcaagcgctgaaaacaccatctcaggccggccgagtaatggcgagggggctcacaaagcccaaaaaacacatcaccactcacgcccactactaatcccccaaccgtcatccctcacaaaatgggaacccgtggacatcccctcagacggcatcctaccccccctcccccaatcacagacccaattctagaaaaagcgtcgcgcacacacaaagccgtggccggcgtcaacaacgagccagactacgagcgactagagtggataggcgatgcctatctctacctaataaccacctcactcatctaccagacgttccccaacctcgcaccagggcaatcaagtcagttacgcgaaagactcgtaaaaaacgacactctggccgacttcaccatcaaatacggcataaacgaacaggccaagtttcccgtggaattcgacatccacagtaaacacacaaacggcaccgtggcatctaggcaatcccgaaaaaaggtcctaggggatctcttcgaggcgtatatcggggcttccatcctcagcagcgattcaggtctttcccagactacggattttctcagaccgctcatggctacgattctcaagcgcgaaattctggatgaatacaagcggaaccctcctaaactcccttccaataccaccaccaccactgctactggaattaccactgccggcaccacgccagtgcaggccaatctaccgcacaaagtccaactatcacaagccatcggtgcaaaaggtgtcaaaatcgaatacagagacgaaggcaacccaaaaaaggacaaaaacaccggtctccccctatacaccgtaaaggccttctacagcggcctaggcgaaaacaacctcgtgctaggatggggcagcgccttatcaaaaaaagaagcaggggggaaagcagcaatcatggccttggagaacaaaaagctcatgaaacagcttcagaaactgaaggaaggcgtagatgaggccttaaagggagctgaatccttagatagaaactagttacggctacttaatggaggaatttttcgtatgatactccgattaagatccgcatagacgtggctgagaatctcaaatagtcaagcgactactcaaagggctgcgtagtagggcaaactaatgtttgccctatgaactaatcagtctgcaataacgcaataacgaagtcgtatatcacgtggggtttgttcatagccacatgcttagatgatagtagatatgtacgattctggacttctattcctcaaccctctcgcttctcgattcaagcaagaagcactatgcatgcgatatatgtacatttgctacccctttctagatgatgtagcacacgactagatcactcggtccatctcctctctttctctccacggcggcgaacaaaggggaaaaacaaccacctgtcttcgttctcctgtagtcttccatctgtggattgaggtttggtacaagtgaaaacccaggagtggtttgccgcggggtctatagtatagttgttttgttgttttgtgacacagttgaaataattgtgacctattactcattttttgtctcttttggggaatcatgcaccgtacgcaacttggcccataggcttatcgttagtcatacccggagccatcagattcgtatctggatcacctgtggctttagcagctgagcaacgtgccatcgtcggcgaactg

SEQ ID NO: 12804 - DNA, 315 bp, Muscodor strobelii
  misc_feature: SGI cDNA ID NO. 564175
  misc_feature: Encodes the peptide sequence at SEQ ID NO 12805
atgtcggccgttccccgcgcccgtctgttggaccttatgaaggttcaatgccaaatcttctcgaccacatacaaccccgaaggaatacggatgggcaacaagatattacgacagagattgcgcggtccagcgttggccaactactaccctcctagggcaccgggtctcaaggagctggccaaagagttcaagtccctaaatctcgagttcatagacgaagttcaggacgacagagaagagcatctggcaggccggaaatcgcgcggcaaaggagcaccaaagaagaagagggttgcgacagagaagaagaaataa

SEQ ID NO: 12805 - protein, 104 aa, Muscodor strobelii
  misc_feature: SGI Peptide ID NO. 564175
  misc_feature (6)..(95): Pfam Id: PF08293 Pfam Desc: Mitochondrial ribosomal subunit S27
  misc_feature (3)..(103): NCBI GI: 242807869 Blast Desc: conserved [Talaromyces stipitatus ATCC 10500] gi|218715670|gb|EED15092.1| conserved [Talaromyces stipitatus ATCC 10500]
  misc_feature (3)..(103): NCBI GI: 212537959 Blast Desc: conserved [Penicillium marneffei ATCC 18224] gi|210068877|gb|EEA22968.1| conserved [Penicillium marneffei ATCC 18224]
  misc_feature (1)..(103): NCBI GI: 240109346 Blast Desc: mitochondral 37S ribosomal protein S27, [Coccidioides posadasii C735 delta SOWgp]
  misc_feature (3)..(104): NCBI GI: 154319369 Blast Desc: BC1G_02636 [Botryotinia fuckeliana B05.10] gi|150857067|gb|EDN32259.1| BC1G_02636 [Botryotinia fuckeliana B05.10]
  misc_feature (3)..(104): NCBI GI: 156063292 Blast Desc: SS1G_01762 [Sclerotinia sclerotiorum 1980] gi|154697098|gb|EDN96836.1| SS1G_01762 [Sclerotinia sclerotiorum 1980]
  misc_feature (3)..(103): NCBI GI: 226295028 Blast Desc: conserved [Paracoccidioides brasiliensis Pb18]
  misc_feature (3)..(104): NCBI GI: 171688700 Blast Desc: protein product [Podospora anserina] gi|170944312|emb|CAP70422.1| protein product [Podospora anserina]
  misc_feature (3)..(103): NCBI GI: 226284542 Blast Desc: conserved [Paracoccidioides brasiliensis Pb01]
  misc_feature (3)..(103): NCBI GI: 154276934 Blast Desc: [Ajellomyces capsulatus NAm1] gi|150414385|gb|EDN09750.1| [Ajellomyces capsulatus NAm1]
  misc_feature (3)..(97): NCBI GI: 256732512 Blast Desc: NECHADRAFT_78782 [Nectria haematococca mpVI 77-13-4]
MSAVPRARLLDLMKVQCQIFSTTYNPEGIRMGNKILRQRLRGPALANYYPPRAPGLKELAKEFKSLNLEFIDEVQDDREEHLAGRKSRGKGAPKKKRVATEKKK

SEQ ID NO: 12806 - DNA, 1111 bp, Muscodor strobelii
  misc_feature: SGI EST ID NO. CUFF.30583.1
  misc_feature: Variant of the nucleotide sequence at SEQ ID NO 12804
gccaacttcacgtcttgcgacgacaaccccaacccaacgttccacgcgacaatcgaaacggcagctcttcatctcgccaagatgtcggccgttccccgcgcccgtctgttggaccttatgaaggtaccacgagcgcctgctcctcagccctccgcgatcgactaaccgaccttccaggttcaatgccaaatcttctcgaccacatacaaccccgaaggaatacggatgggcaacaagatattacgacagagattgcgcggtccagcgttggccaactactaccctcctagggcaccgggtctcaaggagctggccaaagagttcaagtccctaaatctcgagttcatagacgaagttcaggacgacagagaagagcatctggcaggccggaaatcgcgcggcaaaggagcaccaaagaagaagagggttgcgacagagaagaagaaataaacggtttcgacgcggcgttacttgtatccttatgtataattacctcgatatccacgctgtatagagaaacaaagcgaacctccaagatacctcattttcctacgacggcttagatggataccatcttcacgcttgagtccatcacgtgatgtgaatctgaaacctatgcaagcatacgatcttgcggactacaactggacatcgttgctcggatgtgcttctgcggtgggagtaagtagcgaaatatctatggagcaacagaatgtcatacaacaatcggatggaatggcttttatatagggcatgcatcatcaattactttgggctggtcggagaaagtcaagagatactgagagctatcactaatgatgaaaacggagtagcagacagcccggcatacataaactgtattggtctgcagcttctgtgcaacccaaagctcagttgctagcatgctgtgactaggaaaggaagcaagagactttgataatagttgaatgtctggtttgcatgcagcattactactgaagttgtgagaaaatggcagagaagcaaaaacgagttctttcatccatcatatagagtcagcccctttactcattactcttcgtttctatcagcttgctttagtacagcttagctacgccaatgctttgtatca

SEQ ID NO: 12807 - DNA, 2391 bp, Muscodor strobelii
  misc_feature: SGI cDNA ID NO. 564176
  misc_feature: Encodes the peptide sequence at SEQ ID NO 12808
atggcatccaagacgcctcagatggacgagaacgtcaacacggctggcaaggaggatacctctgttgcccattcggataacgattcgtctcttctctcgaagcgacaaaccaaggctctttcgccctcgtcaatggccaatcagagctatcctgagcagacgaagctgagtcacgagtcggcggccccttccggtcccatcgatccgaatgccattgacagctacctggccagactctgtcgccagccttcggctcacgctggtaatattaccgcgttcgccgtcgacaacgccagccctatccccaagccagagcatggtgctacttgcaattcagtccctatgactccagctccagaggggtttggcactaccgctaccgctactcggcctgccagtgctacagtgcacgactccagcaccagcgccagtgatgaggaggtcatgcgtctcaagtatgagcttgcccaagctcataccagactctctcatcttgaccaccagctgtcccggcacgagcaggcccaatctcgcccaaccccgtctggccctgaccaatccgccaacccctctccagtcgagatggagttccccaacacgcagcttcctggacaaattgcagctcgctttcctccaatgcagtcactgaacactgctgtgcaacaccctacaacacgtgaaggaaccaccgcatggcctggctacgatgactcccgatccgataccagtgatgcaatgtcggccactggattcaaccgctctcgcaacatctggggtggtgcaagacagggcccgggtggctttgtcaccaacagtctcccccctccggaattgtcgcacaacggtcagtggaccggacgacattcgagccagggctaccaggacagtcccatgccctttgatccctcggttgtaggcaacttccgacccgaccgcctgacccccgatttcgacttgaccactcgtccacccggccgaaacggccgctatgatgtccggttcggtgtaccgggctttgctagtatcagtaccgcccagggttatggtggccaggccggatacggaggttacaattatcctcagcaacaatttgactctgcccccggtctgcctaccacctcacacaacggtatgggcaatggaaatggaatgtattccagctaccaaccacagccagtcggcactcctctttcacctttggccagcgagttcacttccaccatgacgaccaccggaggctcgaccaccgagggccagacatatctgcccactaccgagcccctcaactatcgtcgtctgctggatcgcaatgtcaactgtaactggaagtacatcgtcgacaagatcgtgtgcagcaatgatcaacaggcatccatcttccttcagcagaagctcaaggttggtaccccggatcagaagtatgagatcgttgaggcaattgtcgcgcaagcctatcctctcatgatcaatcgattcggcaacttcctggttcagcgatgctttgagcacggcacccctgagcaagtcatcaagattgccgaggccattcgaggctgcactctgaacctatctatggatccgttcggttgccacgttgtccagaaggcgttcgattcagtcccggaggattacaaagccattatggtccatgagttgcttcgtcgcatacccgagactgtcattcaccgctatgcttgccacgtctggcaaaagctcttcgagctgcgatggtccgagtctcctcctcagatcatgaaatacgtgaatgatgcgctctgcggtatgtggcacgaagttgctcttggcgagactggaagccttgttgttcagaacatcttcgagaactgtcttgaggaggacaagcgcccttgtatcgaggaagtcctcagcaacattgatattgtcgctcacggccagtttggaaactggtgcatccaacacatttgtgagcatggagctcccgcagatcgaagccgagctatcgatcatgtcatccgctatgccgcagaatacagcatggaccagtatgcctccaaggttgtcgagaaatgtctaaagatcggaggggtggagtttctggttcgctatctggaccgagtctgcgaaggtcgtatggatcgacctcgcatccccttgatcgacattgcaagcgaccagtacggtaactatctcatccagtggatcttgactcatgccaacccacagcaccgagacgtagttgccgctcatattcgcaagcatatagtgtcgcttcgtggatccaagtttggcagtcgggtaggcatgctttgcaccaacccggccattgccaccagacctggccctggagttggccccagcatgacccgcatgcccgccggccctcgctatggcggtcgcggctatcagtag

SEQ ID NO: 12808 - protein, 796 aa, Muscodor strobelii
  misc_feature: SGI Peptide ID NO. 564176
  misc_feature (479)..(513): Pfam Id: PF00806 Pfam Desc: Pumilio-family RNA binding repeat
  misc_feature (515)..(548): Pfam Id: PF00806 Pfam Desc: Pumilio-family RNA binding repeat
  misc_feature (112)..(784): NCBI GI: 121717586 Blast Desc: Pumilio-family RNA binding repeat protein [Aspergillus clavatus NRRL 1] gi|119404292|gb|EAW14668.1| Pumilio-family RNA binding repeat protein [Aspergillus clavatus NRRL 1]
  misc_feature (141)..(784): NCBI GI: 119498677 Blast Desc: Pumilio-family RNA binding repeat protein [Neosartorya fischeri NRRL 181] gi|119414260|gb|EAW24199.1| Pumilio-family RNA binding repeat protein [Neosartorya fischeri NRRL 181]
  misc_feature (67)..(787): NCBI GI: 212537931 Blast Desc: Pumilio-family RNA binding repeat domain protein [Penicillium marneffei ATCC 18224] gi|210068863|gb|EEA22954.1| Pumilio-family RNA binding repeat domain protein [Penicillium
  misc_feature (102)..(791): NCBI GI: 189194980 Blast Desc: pumilio-family RNA binding repeat domain containing protein [Pyrenophora tritici-repentis Pt-1C-BFP] gi|187979707|gb|EDU46333.1| pumilio-family RNA binding repeat
  misc_feature (393)..(778): NCBI GI: 169597655 Blast Desc: SNOG_01615 [Phaeosphaeria nodorum SN15] gi|160707565|gb|EAT91264.2| SNOG_01615 [Phaeosphaeria nodorum SN15]
  misc_feature (388)..(784): NCBI GI: 242807950 Blast Desc: Pumilio-family RNA binding repeat domain protein [Talaromyces stipitatus ATCC 10500] gi|218715687|gb|EED15109.1| Pumilio-family RNA binding repeat domain protein [Talaromyces
  misc_feature (53)..(784): NCBI GI: 225554658 Blast Desc: pumilio RNA binding protein [Ajellomyces capsulatus G186AR]
  misc_feature (147)..(745): NCBI GI: 225678606 Blast Desc: pumilio-family RNA binding repeat domain-containing protein [Paracoccidioides brasiliensis Pb03]
  misc_feature (54)..(793): NCBI GI: 238839426 Blast Desc: pumilio-family RNA binding repeat protein [Microsporum canis CBS 113480]
  misc_feature (41)..(792): NCBI GI: 164428167 Blast Desc: NCU01760 [Neurospora crassa OR74A] gi|16416090|emb|CAB91235.2| conserved [Neurospora crassa] gi|157072038|gb|EAA27947.2| conserved [Neurospora crassa OR74A]
MASKTPQMDENVNTAGKEDTSVAHSDNDSSLLSKRQTKALSPSSMANQSYPEQTKLSHESAAPSGPIDPNAIDSYLARLCRQPSAHAGNITAFAVDNASPIPKPEHGATCNSVPMTPAPEGFGTTATATRPASATVHDSSTSASDEEVMRLKYELAQAHTRLSHLDHQLSRHEQAQSRPTPSGPDQSANPSPVEMEFPNTQLPGQIAARFPPMQSLNTAVQHPTTREGTTAWPGYDDSRSDTSDAMSATGFNRSRNIWGGARQGPGGFVTNSLPPPELSHNGQWTGRHSSQGYQDSPMPFDPSVVGNFRPDRLTPDFDLTTRPPGRNGRYDVRFGVPGFASISTAQGYGGQAGYGGYNYPQQQFDSAPGLPTTSHNGMGNGNGMYSSYQPQPVGTPLSPLASEFTSTMTTTGGSTTEGQTYLPTTEPLNYRRLLDRNVNCNWKYIVDKIVCSNDQQASIFLQQKLKVGTPDQKYEIVEAIVAQAYPLMINRFGNFLVQRCFEHGTPEQVIKIAEAIRGCTLNLSMDPFGCHVVQKAFDSVPEDYKAIMVHELLRRIPETVIHRYACHVWQKLFELRWSESPPQIMKYVNDALCGMWHEVALGETGSLVVQNIFENCLEEDKRPCIEEVLSNIDIVAHGQFGNWCIQHICEHGAPADRSRAIDHVIRYAAEYSMDQYASKVVEKCLKIGGVEFLVRYLDRVCEGRMDRPRIPLIDIASDQYGNYLIQWILTHANPQHRDVVAAHIRKHIVSLRGSKFGSRVGMLCTNPAIATRPGPGVGPSMTRMPAGPRYGGRGYQ

SEQ ID NO: 12809 - DNA, 1296 bp, Muscodor strobelii
  misc_feature: SGI EST ID NO. CUFF.30413.0
  misc_feature: Variant of the nucleotide sequence at SEQ ID NO 12807
cgcccttgtatcgaggaagtcctcagcaacattgatattgtcgctcacggccagtttggaaactggtgcatccaacacatttgtgagcatggagctcccgcagatcgaagccgagctatcgatcatgtcatccgctatgccgcagaatacagcatggaccagtatgcctccaaggttgtcgagaaatgtctaaagatcggaggggtggagtttctggttcgctatctggaccgagtctgcgaaggtcgtatggatcgacctcgcatccccttgatcgacattgcaagcgaccagtacggtaactatctcatccagtggatcttgactcatgccaacccacagcaccgagacgtagttgccgctcatattcgcaagcatatagtgtcgcttcgtggatccaagtttggcagtcgggtaggcatgctttgcaccaacccggccattgccaccagacctggccctggagttggccccagcatgacccgcatgcccgccggccctcgctatggcggtcgcggctatcagtagtcgtttacctcaaccttgacaatgcttggcttctcagtaacgaatcttgatctgagcagcaccaagacgcatgagtgtttcacagtttcgcagtttttgatccgttgtcgcgaattcgcgcgacattggcgcttgtccttggccactggcgtgtactttgttttctccgctgtaacatttcttcgtttgtaatattcggctgccgaactggcagaacttcgacaaatttcggctggattgttgttcgacgatcaacatttgacaggtggcacagaaacatcatctggagcagacgatttacgaatcatacgtctatgacatcctacgcccagcaggctactgccttgcttgggtgctttggacacatcatttctatggattttgcgataacggcgtcaaaacagtaggaaaaccaccttgtcccagtccgagtttcgacacaagttcgccagcccggttgagggcagggaccaaatctccactcactaaaaggtgcatggcgtactgtctcatatagttgcgtggatgatttgtcaatctcaccgcgtagacattctgcaaagattaagatactctgtgttggtcgttggagaattcagactgtaggtttttcgttcgggatggagaaaataaaaactacggggaagagtgacgatcgagtaatcagtttcggacgtaatggagaagaaatggttccacgctcttgtatcttgtctgatgaaggcagtgttacataggccccagcttgtagtatgcagaaaagaaaaa

SEQ ID NO: 12810 - DNA, 882 bp, Muscodor strobelii
  misc_feature: SGI cDNA ID NO. 564177
  misc_feature: Encodes the peptide sequence at SEQ ID NO 12811
atggcggactcggttgatcgcgtgtttgtccacgcgcttaacaccgtgaagaagatcccgaaaaccggagcgtcgcggccaccgccgagcgacagactacgactctatggattatacaagcaggccatggaaggcgacgtggatggagtcatggagcggccaagaccaggggcaatcgctgaaggcaccgaactacagcgcgagaaggacaagtgggatgcttggaatgctcagacgggtctcagtcgcaccgaagctaagaggcggtacattgaggctctcatcgagactatgcatcgctatgccacaacaccagacgcgctagaattagtggccgagctcgaatttgtctggaaccagattaaaaacaacagcccctcgtcatcaaattcctcccctaaacggcagacatccataccagaacccagacgtttccaacagcccaagaacggaacagaaggacccatgaaagtactgagccccatgagcgaggacgacgcggcagaacagttccgagacgaggcaaacgacgaagaggatgcggtcggcgttggcgttcccgaaggcgaatacgtaaagaaaggcggccgttggtctagaaaggtcgaacaagcgcttgtcagattatctgccgaaatagcggcattacgtgaacagatcacaacagggagagagtggaggacgaagaaagacaagagtatatcgtcttggtttggatggatattctggctggttacgaaacatctcgccatcgatataacgatcctggctgttgtcttattgtggatgcggagacggaaggataggagacttgaggatcaggtcagagctatattgcgcgttatgcgcgagtatgcgaggaagatcctgccttcgaggtga

SEQ ID NO: 12811 - protein, 293 aa, Muscodor strobelii
  misc_feature: SGI Peptide ID NO. 564177
  misc_feature (5)..(102): Pfam Id: PF00887 Pfam Desc: Acyl CoA binding protein
  misc_feature (67)..(102): Pfam Id: PF00887 Pfam Desc: Acyl CoA binding protein
  misc_feature (1)..(293): NCBI GI: 261356683 Blast Desc: conserved [Verticillium albo-atrum VaMs.102]
  misc_feature (1)..(293): NCBI GI: 116204677 Blast Desc: CHGG_10222 [Chaetomium globosum CBS 148.51] gi|88176350|gb|EAQ83818.1| CHGG_10222 [Chaetomium globosum CBS 148.51]
  misc_feature (1)..(293): NCBI GI: 256732961 Blast Desc: NECHADRAFT_92531 [Nectria haematococca mpVI 77-13-4]
  misc_feature (1)..(293): NCBI GI: 164428171 Blast Desc: NCU01763 [Neurospora crassa OR74A] gi|16416089|emb|CAB91232.2| related to endozepine [Neurospora crassa] gi|157072040|gb|EAA27950.2| conserved [Neurospora crassa
  misc_feature (6)..(293): NCBI GI: 154319365 Blast Desc: BC1G_02634 [Botryotinia fuckeliana B05.10] gi|150857065|gb|EDN32257.1| BC1G_02634 [Botryotinia fuckeliana B05.10]
  misc_feature (1)..(293): NCBI GI: 46121643 Blast Desc: FG05200.1 [Gibberella zeae PH-1]
  misc_feature (43)..(293): NCBI GI: 145608386 Blast Desc: MGG_03156 [Magnaporthe grisea 70-15] gi|145015864|gb|EDK00354.1| MGG_03156 [Magnaporthe grisea 70-15]
  misc_feature (1)..(216): NCBI GI: 156063296 Blast Desc: SS1G_01764 [Sclerotinia sclerotiorum 1980] gi|154697100|gb|EDN96838.1| SS1G_01764 [Sclerotinia sclerotiorum 1980]
  misc_feature (1)..(278): NCBI GI: 240109790 Blast Desc: Acyl CoA binding family protein [Coccidioides posadasii C735 delta SOWgp]
  misc_feature (1)..(278): NCBI GI: 119184144 Blast Desc: CIMG_06904 [Coccidioides immitis RS]
MADSVDRVFVHALNTVKKIPKTGASRPPPSDRLRLYGLYKQAMEGDVDGVMERPRPGAIAEGTELQREKDKWDAWNAQTGLSRTEAKRRYIEALIETMHRYATTPDALELVAELEFVWNQIKNNSPSSSNSSPKRQTSIPEPRRFQQPKNGTEGPMKVLSPMSEDDAAEQFRDEANDEEDAVGVGVPEGEYVKKGGRWSRKVEQALVRLSAEIAALREQITTGREWRTKKDKSISSWFGWIFWLVTKHLAIDITILAVVLLWMRRRKDRRLEDQVRAILRVMREYARKILPSR

SEQ ID NO: 12812 - DNA, 1767 bp, Muscodor strobelii
  misc_feature: SGI EST ID NO. CUFF.30423.0
  misc_feature: Variant of the nucleotide sequence at SEQ ID NO 12810
cagacaactgcgagccttgcatttgaacatgatatctcaacatcttatctctattctctccacctagaccgttagacatctcccgagacggcatcaaaacgaccgtttgaaactccaagtacctgatgaactgcgacgaggaatgaattagcgatcacttttgctttctcgcgatacagaccctccttgccctattctacgcggttatgacgtccttgtgatacggcacaaacacaactccaccgaacaatcaggcttcaaagctcgagagcgaaccacgaatcgaacaatctcgaccgcaacccgatattcacacgggaaattagtcactcgatttgcggggggttgatcaggaatcatcaagattgttcctgaggattgtggtatcgctctataagtctgcggtccggcatggcggactcggttgatcgcgtgtttgtccacgcgcttaacaccgtgaagaagatcccgaaaaccggagcgtcgcggccaccgccgagcgacagactacgactctatggattatacaagcaggccatggaaggcgacgtggatggagtcatggagcggccaagaccaggggcaatcgctgaaggcaccgaactacagcgcgagaaggacaagtgggatgcttggaatgctcagacgggtctcagtcgcaccgaagctaagaggcggtacattgaggctctcatcgagactatgcatcgctatgccacaacaccagacgcgctagaattagtggccgagctcgaatttgtctggaaccagattaaaaacaacagcccctcgtcatcaaattcctcccctaaacggcagacatccataccagaacccagacgtttccaacagcccaagaacggaacagaaggacccatgaaagtactgagccccatgagcgaggacgacgcggcagaacagttccgagacgaggcaaacgacgaagaggatgcggtcggcgttggcgttcccgaaggcgaatacgtaaagaaaggcggccgttggtctagaaaggtcgaacaagcgcttgtcagattatctgccgaaatagcggcattacgtgaacagatcacaacagggagagagtggaggacgaagaaagacaagagtatatcgtcttggtttggatggatattctggctggttacgaaacatctcgccatcgatataacgatcctggctgttgtcttattgtggatgcggagacggaaggataggagacttgaggatcaggtcagagctatattgcgcgttatgcgcgagtatgcgaggaagatcctgccttcgaggtgatgaatgcctgatcatggtcctctttaagcctcgttgacctcacgagctctagacgaaccagtccggatgggtcgcaaactacaactcactctcatagctcgactgagaagcgcggttccactacagcaccggagggagtccaattgattgtcgccttgagagataaggtggctcagtgtaaatacgcggcctgttataccccctcattcttgaggcacgatgctactttatatggcgaggtaccggggtggctcttgcctcttcgcgtcgaagcagatttagagtcgtacagacaggctagacggacagtcgcggggatgatgcgcggaaagcatctcaaggtggctctaggtcattgagcttggatatgcaagcttgtttgtatataacccctatccgagtcttcggagttattctggatagacgactctgataaaaatgaaaaaatctctggaacaccagcctgagactgga

SEQ ID NO: 12813 - DNA, 618 bp, Muscodor strobelii
  misc_feature: SGI cDNA ID NO. 564178
  misc_feature: Encodes the peptide sequence at SEQ ID NO 12814
atgcctatcgactactcaaagtgggacaacatcgacacggactctgagggcgatggaagaacgtcaccagctccttcttccgtgactttaacagaagatgagcccctcgacaaggacaccgatgagagtaattcgcacgaaggcaaaggcgaggcagatgttgccgccgagggtgtcgcgcctgccaagcacaaagcagtcagggcagtccacataggaaccatgtcaattggcgagtatcccatattcgccgaggcagcctacaaagacggtaaacttcccaagtttgacgatacacgagatggggttcgcctggtagatgcagatgggcaggagcattaccacttcatccctaccacgtggcttctctaccccggggtcatcgttgaaatcaagaagtatctctacggcgtcgaggtcgagtggcagtctgagatcggagaggtgcgagctgagattgcacgagacaagtggtacaacttcaacaatggacaacttgacgtcgctatcgtgggatatctactaggcaagggagttactggtccgacatttgatgccattactaggttcgtgtttcgatcctgggtggaaccatcatcagtgcaaagagacgaatag

SEQ ID NO: 12814 - protein, 205 aa, Muscodor strobelii
  misc_feature: SGI Peptide ID NO. 564178
MPIDYSKWDNIDTDSEGDGRTSPAPSSVTLTEDEPLDKDTDESNSHEGKGEADVAAEGVAPAKHKAVRAVHIGTMSIGEYPIFAEAAYKDGKLPKFDDTRDGVRLVDADGQEHYHFIPTTWLLYPGVIVEIKKYLYGVEVEWQSEIGEVRAEIARDKWYNFNNGQLDVAIVGYLLGKGVTGPTFDAITRFVFRSWVEPSSVQRDE

SEQ ID NO: 12815 - DNA, 500 bp, Muscodor strobelii
  misc_feature: SGI EST ID NO. CUFF.30429.0
  misc_feature: Variant of the nucleotide sequence at SEQ ID NO 12813
ttgaaatcaagaagtatctctacggcgtcgaggtcgagtggcagtctgagatcggagaggtgcgagctgagattgcacgagacaagtggtacaacttcaacaatggacaacttgacgtcgctatcgtgggatatctactaggcaagggagttactggtccgacatttgatgccattactaggttcgtgtttcgatcctgggtggaaccatcatcagtgcaaagagacgaatagtgattgttttacatatacacaatccacatctcaggtacgattgtattgatgagccccttgattcctaagacttgtatcctaacagtggacagctgcaagtcaccaactaaggtgccacaaaccagatattcatccccgagagttgatcaagaggaatctgaaagattataaacgatgcaatcgatttgaagagatttcggggcgcgcgatggatttcgtttatacttctagtcatcatttaacaataacgatttgtcacaaagtggc

SEQ ID NO: 12816 - DNA, 1752 bp, Muscodor strobelii
  misc_feature: SGI cDNA ID NO. 564179
  misc_feature: Encodes the peptide sequence at SEQ ID NO 12817
atgcccaatccttctcgtttcagcggcagcccaccaagtcatcatcaagattccagtagctcgagtggggagattcggcttaatttcggcccagatgacggccgtgaagcttcggcacgttctatcagtacatacactcacaatgcgcgtggcttcgatcacgcaccagtgaaacgactcgctaaagatagtcgtggcggcgatcacaaagaggagaacgtatcaggtggtgtcgaagcgtcctctaaagacgatacccaggaaatcccgacatccccagcatctagacattcgtcccccaaatccgagagcgatgagcctagaacttctgaagatgcgtccaatccggctcttagcgatatcaaaaaagcctatcagtcatcgcaggattcatctacacggttcaatatttcatattttgtttctagccataggccgcaagacgatgaacactcaagagctagtcagcgggctagcagcgacacgactgattcagacatcgactggatgtcggattccttcgaagagatgcctcaaatcggcgcggatcaccctctattctcgctaaaagacgattttctgcgcattgtcctgaatgcctatgatcagagcactagagagcgagggaacaatgagactggtcgcgggaccgataattacacaagcggcagcggacctggagacgggcaacaggaaggctccggtcgtacggagaagaggaaacgaactcaatcttccaatggtggttcgggcggcgatgaccagtcgccttcgcctttgaggaacaaaggggagaagacgcgggctgaaaacacaagacgacagttacttctcgcttgtcctttcatgaagagagatcctattcatcaccgaagctgtatccgatacaagttgaagagaatccgcgatgtgaagcaacacgtgaataggtgtcacgtattggcaccatactgtccgcgctgttatgcgactttttcagatgaagacgaacgagacgcacacatcagatccaacgcgtgcgaggaacgaccccttcagcagccaactgggattacggcgaagcaaaagcgtctcctcggtcagagagtgccttcgaagctgacagaagagcagcagtggtttaccgtcttcgacattatcttcccgggtgaaccacggccgaaatcgccatacgtcgatcagggactatcgaaggagctttgcaattttcgtgactatctacaggtagaaggcccccgtcttctaatggattttcttcgcgacagagatattgaattgtctatcgactcgtctcaaggcgagagacatgccgcggtgatgatacacagcgctctggccgatggtctgcaccagctttcagaaagatgggagcgcaaaaacaaaaatttccagcgacttaggaacagcgaacataatcaaaaccaaaccacagctgaatacacatgggagccctcaatgccaaccccggtgattgagtccgaatctataagcaatgtggtgcctgagaacgcgaatgcgtgtgcccctgaggaaacgcagctggttcagacggcacaatcagatgacgatgagatgtttgccaaagaatcaggattcttaccacaactagatagtcaccagcaaagtttcccaaccttcgaagatatctttcccagccaggtggacccagccaattggaatctggagtatggatggagcatggggatgttcgatttgccggcaccagacagtggtgtggtttccggtgtatga

SEQ ID NO: 12817 - protein, 583 aa, Muscodor strobelii
  misc_feature: SGI Peptide ID NO. 564179
  misc_feature (241)..(456): NCBI GI: 171680950 Blast Desc: protein product [Podospora anserina] gi|170940433|emb|CAP65660.1| protein product [Podospora anserina]
  misc_feature (229)..(415): NCBI GI: 171676844 Blast Desc: protein product [Podospora anserina] gi|170936489|emb|CAP61149.1| protein product [Podospora anserina]
  misc_feature (279)..(434): NCBI GI: 171691262 Blast Desc: protein product [Podospora anserina] gi|170945579|emb|CAP71692.1| protein product [Podospora anserina]
  misc_feature (278)..(424): NCBI GI: 256720685 Blast Desc: expressed protein [Nectria haematococca mpVI 77-13-4]
  misc_feature (240)..(422): NCBI GI: 256734879 Blast Desc: [Nectria haematococca mpVI 77-13-4]
  misc_feature (267)..(422): NCBI GI: 256722819 Blast Desc: [Nectria haematococca mpVI 77-13-4]
  misc_feature (278)..(419): NCBI GI: 171691260 Blast Desc: protein product [Podospora anserina] gi|170945578|emb|CAP71691.1| protein product [Podospora anserina]
  misc_feature (279)..(424): NCBI GI: 256720885 Blast Desc: [Nectria haematococca mpVI 77-13-4]
  misc_feature (277)..(434): NCBI GI: 256722882 Blast Desc: [Nectria haematococca mpVI 77-13-4]
  misc_feature (218)..(396): NCBI GI: 169598500 Blast Desc: SNOG_02054 [Phaeosphaeria nodorum SN15] gi|111069146|gb|EAT90266.1| SNOG_02054 [Phaeosphaeria nodorum SN15]
MPNPSRFSGSPPSHHQDSSSSSGEIRLNFGPDDGREASARSISTYTHNARGFDHAPVKRLAKDSRGGDHKEENVSGGVEASSKDDTQEIPTSPASRHSSPKSESDEPRTSEDASNPALSDIKKAYQSSQDSSTRFNISYFVSSHRPQDDEHSRASQRASSDTTDSDIDWMSDSFEEMPQIGADHPLFSLKDDFLRIVLNAYDQSTRERGNNETGRGTDNYTSGSGPGDGQQEGSGRTEKRKRTQSSNGGSGGDDQSPSPLRNKGEKTRAENTRRQLLLACPFMKRDPIHHRSCIRYKLKRIRDVKQHVNRCHVLAPYCPRCYATFSDEDERDAHIRSNACEERPLQQPTGITAKQKRLLGQRVPSKLTEEQQWFTVFDIIFPGEPRPKSPYVDQGLSKELCNFRDYLQVEGPRLLMDFLRDRDIELSIDSSQGERHAAVMIHSALADGLHQLSERWERKNKNFQRLRNSEHNQNQTTAEYTWEPSMPTPVIESESISNVVPENANACAPEETQLVQTAQSDDDEMFAKESGFLPQLDSHQQSFPTFEDIFPSQVDPANWNLEYGWSMGMFDLPAPDSGVVSGV

SEQ ID NO: 12818 - DNA, 2593 bp, Muscodor strobelii
  misc_feature: SGI EST ID NO. CUFF.30432.0
  misc_feature: Variant of the nucleotide sequence at SEQ ID NO 12816
tatggatttagtgtagtagcatcatgcttcgtaatagcaagctttatatagcagacataatgatacaagatatgcagtcagccgacggatgtggtgatttgctcgtgtctaaatggcgaagtagaaggcttggcggccgcaagctgagagcacaacggtgctcatgtgaattttgccccgagagcacgcatatttcatagcttttgtttaattctcatgatacccataacggctcacttctaattttcgtttctcagttgctacttttatctaaaggccggaactggctgttactgcgacgtccgatacttcatcctaagaagtgccgtatcttcttggcgcggatcgccttcacttttcattctcgtctactatcagcgcggtcacttgttcagcactggttcctagctttccgacccaaatctttaggcgattttatttgcgctcggataaagccaactcgcacataatgcccaatccttctcgtttcagcggcagcccaccaagtcatcatcaagattccagtagctcgagtggggagattcggcttaatttcggcccagatgacggccgtgaagcttcggcacgttctatcagtacatacactcacaatgcgcgtggcttcgatcacgcaccagtgaaacgactcgctaaagatagtcgtggcggcgatcacaaagaggagaacgtatcaggtggtgtcgaagcgtcctctaaagacgatacccaggaaatcccgacatccccagcatctagacattcgtcccccaaatccgagagcgatgagcctagaacttctgaagatgcgtccaatccggctcttagcgatatcaaaaaagcctatcagtcatcgcaggattcatctacacggttcaatatttcatattttgtttctagccataggccgcaagacgatgaacactcaagagctagtcagcgggctagcagcgacacgactgattcagacatcgactggatgtcggattccttcgaagagatgcctcaaatcggcgcggatcaccctctattctcgctaaaagacgattttctgcgcattgtcctgaatgcctatgatcagagcactagagagcgagggaacaatgagactggtcgcgggaccgataattacacaagcggcagcggacctggagacgggcaacaggaaggctccggtcgtacggagaagaggaaacgaactcaatcttccaatggtggttcgggcggcgatgaccagtcgccttcgcctttgaggaacaaaggggagaagacgcgggctgaaaacacaagacgacagttacttctcgcttgtcctttcatgaagagagatcctattcatcaccgaagctgtatccgatacaagttgaagagaatccgcgatgtgaagcaacacgtgaataggtgtcacgtattggcaccatactgtccgcgctgttatgcgactttttcagatgaagacgaacgagacgcacacatcagatccaacgcgtgcgaggaacgaccccttcagcagccaactgggattacggcgaagcaaaagcgtctcctcggtcagagagtgccttcgaagctgacagaagagcagcagtggtttaccgtcttcgacattatcttcccgggtgaaccacggccgaaatcgccatacgtcgatcagggactatcgaaggagctttgcaattttcgtgactatctacaggtagaaggcccccgtcttctaatggattttcttcgcgacagagatattgaattgtctatcgactcgtctcaaggcgagagacatgccgcggtgatgatacacagcgctctggccgatggtctgcaccagctttcagaaagatgggagcgcaaaaacaaaaatttccagcgacttaggaacagcgaacataatcaaaaccaaaccacagctgaatacacatgggagccctcaatgccaaccccggtgattgagtccgaatctataagcaatgtggtgcctgagaacgcgaatgcgtgtgcccctgaggaaacgcagctggttcagacggcacaatcagatgacgatgagatgtttgccaaagaatcaggattcttaccacaactagatagtcaccagcaaagtttcccaaccttcgaagatatctttcccagccaggtggacccagccaattggaatctggagtatggatggagcatggggatgttcgatttgccggcaccagacagtggtgtggtttccggtgtatgaaacatcttacggtatataccatggcacacacaatggattaggcaacatttttggtcgccagaaaattggaatcgaaatatagcccttcaacactactgctacgcacatctgggttgggcggtaacgcagatcactagccactgtcacttaccattctcttattcacttaggaacaaatcatacgataggagaccaagttagaagccatcaagtacggaatggattgttttgtagtgaattgagttgtattactaggcctgctaaaagaacaactatctatgaagacagccgagaatcgtctcacggaggtgagataggtgatcgtggaagcttatggaagtgctatagacgcttatgtgggaagagtaataa

SEQ ID NO: 12819 - DNA, 1593 bp, Muscodor strobelii
  misc_feature: SGI cDNA ID NO. 564180
  misc_feature: Encodes the peptide sequence at SEQ ID NO 12820
atgtcgtaccgtgtcgcagcccccgatgagtatcttgccatcactggcatgaacatcaaaactgttctcatcacaaaagctgcttgggttttcccattccaacgatgcaagcgattttcagtccagcctcatgactatgctatgaacctccaggcgatgacgaaggagaagctccagtttctattgcctgtcgtctttactatcggacccgatgtgaatgcccgaggtgccaatgctagaaatgtaaaacatgccccggccccggcgggtgccaatgctcaagagcatgtcaacgacgaggatcgcggcgatgctttgatgaaatatgcgatgctcttggccgatgcttccgagaagaaacagggcactcaataccttgacaacatcgtaaaaggtattatcgaaggcgagactcgtgttctggtttcaagcatgactatggaagagatcttcactgagagagaggagttcaaacgccgaatcttccaaaacattcagggcgagttgaaccaattcggacttaaaatttacaacgccaacgtcaaggagctcaaagatgccgagggctcaagctacttcgtgtctctctcgcagcgcgcacacgagggcgctatcaaccaagctcgcattgacgtcgccgacgctcaacttcgaggtaatgttggtgaggcagacagacgtggccaacaggagcgccaaatctccaagatcaacgcagatacggctgtccaaaagaccgatcgtgacattgaacgggcagcagctgaagccaacctggccactcagaagaccaacctcaacagagatgttgagatcgctcgcattcaggccacgcgtgcaacagagtcgcgcgacgaagacttgaagaaggatgtagagatcaagcgtgctggggctgagctcgaacgcctccgtgcttcagatgtcgtgaaagccaccatcaagcgtgaggcgacgcagcaagccgccgatgctaaagcctacgaaattgaggctgaagccaaagccaagttcgagcaagcaactaaactcacagatgctaccgcatacaaaacgaagatcgaggccgagtcgcaagcgctcgcagactacacccgtacgaccagacagacggatgctgctgcttacaagacaaagatggacgctgacgcatggaaccatgccgccatcaagaacgcggaggcgaacttgcaaaagaagctgaaggaagccgagggtattacagcgatggccgaggcatacgctaagatgagcaatgcatttggcggtcctgataactttttgcggtacatgatgatcgagaagggaacttacgtcgagcttgccaacgcgaacgcgaaggccgtaaacggcatgcagcccaagatcagtgtgtggaacacaggagcagaggctggatctgggagtaatggaagcggtgcagggcaagattctgcgtctaccatgcgcaacgtctatcaacttcttccacccctgatgtcaacgattcatgatcaaacaggcatcactttgccagaatggcaattcggccgtcttccgaacaacgaggtggcgcgtcgtgacaccgggcaccaggtcaacggcaagaagtag

SEQ ID NO: 12820 - protein, 530 aa, Muscodor strobelii
  misc_feature: SGI Peptide ID NO. 564180
  misc_feature (3)..(232): Pfam Id: PF01145 Pfam Desc: SPFH domain / Band 7 family
  misc_feature (2)..(512): NCBI GI: 116206064 Blast Desc: CHGG_02325 [Chaetomium globosum CBS 148.51] gi|88182922|gb|EAQ90390.1| CHGG_02325 [Chaetomium globosum CBS 148.51]
  misc_feature (1)..(530): NCBI GI: 46109646 Blast Desc: FG01705.1 [Gibberella zeae PH-1]
  misc_feature (1)..(529): NCBI GI: 256730694 Blast Desc: [Nectria haematococca mpVI 77-13-4]
  misc_feature (2)..(512): NCBI GI: 171678751 Blast Desc: protein product [Podospora anserina] gi|170937445|emb|CAP62103.1| protein product [Podospora anserina]
  misc_feature (1)..(518): NCBI GI: 39974037 Blast Desc: MGG_00835 [Magnaporthe grisea 70-15] gi|145018225|gb|EDK02504.1| MGG_00835 [Magnaporthe grisea 70-15]
  misc_feature (2)..(530): NCBI GI: 85092561 Blast Desc: NCU05899 [Neurospora crassa OR74A] gi|28920885|gb|EAA30221.1| NCU05899 [Neurospora crassa OR74A]
  misc_feature (1)..(512): NCBI GI: 156034312 Blast Desc: SS1G_13459 [Sclerotinia sclerotiorum 1980] gi|154698862|gb|EDN98600.1| SS1G_13459 [Sclerotinia sclerotiorum 1980]
  misc_feature (11)..(529): NCBI GI: 154310927 Blast Desc: BC1G_06442 [Botryotinia fuckeliana B05.10] gi|150851241|gb|EDN26434.1| BC1G_06442 [Botryotinia fuckeliana B05.10]
  misc_feature (1)..(518): NCBI GI: 119193008 Blast Desc: CIMG_00881 [Coccidioides immitis RS] gi|240105878|gb|EER24071.1| flotillin-1, [Coccidioides posadasii C735 delta SOWgp]
  misc_feature (1)..(516): NCBI GI: 154274237 Blast Desc: conserved [Ajellomyces capsulatus NAm1] gi|150415578|gb|EDN10931.1| conserved [Ajellomyces capsulatus NAm1]
MSYRVAAPDEYLAITGMNIKTVLITKAAWVFPFQRCKRFSVQPHDYAMNLQAMTKEKLQFLLPVVFTIGPDVNARGANARNVKHAPAPAGANAQEHVNDEDRGDALMKYAMLLADASEKKQGTQYLDNIVKGIIEGETRVLVSSMTMEEIFTEREEFKRRIFQNIQGELNQFGLKIYNANVKELKDAEGSSYFVSLSQRAHEGAINQARIDVADAQLRGNVGEADRRGQQERQISKINADTAVQKTDRDIERAAAEANLATQKTNLNRDVEIARIQATRATESRDEDLKKDVEIKRAGAELERLRASDVVKATIKREATQQAADAKAYEIEAEAKAKFEQATKLTDATAYKTKIEAESQALADYTRTTRQTDAAAYKTKMDADAWNHAAIKNAEANLQKKLKEAEGITAMAEAYAKMSNAFGGPDNFLRYMMIEKGTYVELANANAKAVNGMQPKISVWNTGAEAGSGSNGSGAGQDSASTMRNVYQLLPPLMSTIHDQTGITLPEWQFGRLPNNEVARRDTGHQVNGKK

SEQ ID NO: 12821 - DNA, 2319 bp, Muscodor strobelii
  misc_feature: SGI EST ID NO. CUFF.30466.0
  misc_feature: Variant of the nucleotide sequence at SEQ ID NO 12819
gtcctttgtgccaagggcgactgctcctccccctgtgccacccacaggtagatactcatttcaggttggatcgtaccatacctagcttagagtttaaatcgtctctttgaagaacgtagtggcagtgctaaggaaaccatcaccggacgatcaaagaggcaaggagctatcggacacatgcatattgctacttaaccttgatgatggcatcctcccatatatataaatcacttctccccactcctctatatttttcgaaattctgtcttgtcacctttggtgcccatatatcatctctactatagaggagtagatatccaacagacaactcgactaggcgtttgcataagacatccgcgcaagctttggcacacatttggactgtactcatcggtatcttgcttgtcactatcacatcatatacaacgatactatctcgccgtcaagatgtcgtaccgtgtcgcagcccccgatgagtatcttgccatcactggcatgaacatcaaaactgttctcatcacaaaagctgcttgggttttcccattccaacgatgcaagcgattttcagtccagcctcatgactatgctatgaacctccaggcgatgacgaaggagaagctccagtttctattgcctgtcgtctttactatcggacccgatgtgaatgcccgaggtgccaatgctagaaatgtaaaacatgccccggccccggcgggtgccaatgctcaagagcatgtcaacgacgaggatcgcggcgatgctttgatgaaatatgcgatgctcttggccgatgcttccgagaagaaacagggcactcaataccttgacaacatcgtaaaaggtattatcgaaggcgagactcgtgttctggtttcaagcatgactatggaagagatcttcactgagagagaggagttcaaacgccgaatcttccaaaacattcagggcgagttgaaccaattcggacttaaaatttacaacgccaacgtcaaggagctcaaagatgccgagggctcaagctacttcgtgtctctctcgcagcgcgcacacgagggcgctatcaaccaagctcgcattgacgtcgccgacgctcaacttcgaggtaatgttggtgaggcagacagacgtggccaacaggagcgccaaatctccaagatcaacgcagatacggctgtccaaaagaccgatcgtgacattgaacgggcagcagctgaagccaacctggccactcagaagaccaacctcaacagagatgttgagatcgctcgcattcaggccacgcgtgcaacagagtcgcgcgacgaagacttgaagaaggatgtagagatcaagcgtgctggggctgagctcgaacgcctccgtgcttcagatgtcgtgaaagccaccatcaagcgtgaggcgacgcagcaagccgccgatgctaaagcctacgaaattgaggctgaagccaaagccaagttcgagcaagcaactaaactcacagatgctaccgcatacaaaacgaagatcgaggccgagtcgcaagcgctcgcagactacacccgtacgaccagacagacggatgctgctgcttacaagacaaagatggacgctgacgcatggaaccatgccgccatcaagaacgcggaggcgaacttgcaaaagaagctgaaggaagccgagggtattacagcgatggccgaggcatacgctaagatgagcaatgcatttggcggtcctgataactttttgcggtacatgatgatcgagaagggaacttacgtcgagcttgccaacgcgaacgcgaaggccgtaaacggcatgcagcccaagatcagtgtgtggaacacaggagcagaggctggatctgggagtaatggaagcggtgcagggcaagattctgcgtctaccatgcgcaacgtctatcaacttcttccacccctgatgtcaacgattcatgatcaaacaggcatcactttgccagaatggcaattcggccgtcttccgaacaacgaggtggcgcgtcgtgacaccgggcaccaggtcaacggcaagaagtagtcttgacgcagaaatcatttccgattggagataaacatgtttctttgtactttgatattccttgaactccgaggtctttgcctcttcctgataccactttgcggggatggcgttagggggttggtaaacaggtcacatcaccagacaaatatccacactctgtagcagttatagagcaatcctttatgtcaaaacttcttccgctgatgtacgcttaaatattgagcctctttatgaccaatgaatgatatgccagatgcattaggtatggcatctccc

SEQ ID NO: 12822 - DNA, 1692 bp, Muscodor strobelii
  misc_feature: SGI cDNA ID NO. 564181
  misc_feature: Encodes the peptide sequence at SEQ ID NO 12823
atgcatatttcacgcgccattgtgctagctacggccttcgctggcaaggcattatgttatcctggtcgaaatgctagcggagaaaagtgtttaccagtcgttgatttaggctacgagttgcaccgtgctctcgagtataactcaacaaccgacacctacgtattctccaatatacattatgctcaagcacccacaggagatctacgttggcgagctcctctccctcctttgacgaatcggtcctctgtacaagatggttctcaatatggcgcccccaggtgtccgcaaggaacaccgctatggcaggccgatgctttcattccaatccggaaatactcacagggtgcaccgtttactctgaagtcttgggaagatgatatagcaaactcatcaccgccccctggttacttagaacaccagaatgataacgcatctgaagactgtttgttcctcgacgtctatgttcctggacaggcattcaaaaaggcagcttcaaactccgagtttgaagggattccagttttagtttggatacatggtggtgggtacgcattcggttcaaaaagcggtgacgcacaaccgatctacaatccaggaggacttatggaggcagctaaacaggccaacgacgaaggcttcatatttgtgcccttgaactacaggctcggagctctcggatttcttgctggccccgaggtcagtagcgatggagatcttaacgccgggcttttagaccagcgccttgcgttggagtgggttcaggacaaaatacatctatttggcggtgattcgaagcgtgtgactgtcatcggcgaatcagcgggtggcggtagcattatatctcacttactgtcctccggagacgcgcctctattttcacagctaattgctcaaagcccagcttatattccaacaggcgctcctaccgcaggagcttatgaagggttcctggatactctcggtgtgaagactctcgcggaagctcgacagcctggtctcgatgtgattggagccaatgccgctttcatcggaagcgcgccaccgacaacatatctgtttgcgcctgtgggtgacgacaagacggctccagcagattttggaaaagctttcagaagtggctctttcagcaaggacgtcaagatgatggtggctcacaactctttcgagggaggtttcttctatgataccaatgtgacgaacgaagcggatttccgtgcttggattccaagatccattcccgggctatcggcggcggacgtgaaccacctcgccgaaaatctctatcctccggtttttgatgggtctttgggatacgtcgaccagaaaacaagacaaggagccctctggggtgaagctgtcatcgattgtgttatgtggctcacatccgaagggtctagtggaaacaaattcgcttatgagtttgatgtctctccaggtcttcatacacaggatttgagatattcgttcgatgacttcagcagtcaggtaccggcgccaatcgctaaaaaggcgctccaacaggccattgcgacatttatcgtcaacggcacacctacgatcgatagctcctcgaacctggtcttccctcagtgggattcaaaccaagaactcgtcaagataaccagtaatggagcagaggtatccagcgtacagttgaacgcgacaagatgtgattggtggtatccagcataa

SEQ ID NO: 12823 - protein, 563 aa, Muscodor strobelii
  misc_feature: SGI Peptide ID NO. 564181
  misc_feature (10)..(560): Pfam Id: PF00135 Pfam Desc: Carboxylesterase
  misc_feature (53)..(299): Pfam Id: PF00135 Pfam Desc: Carboxylesterase
  misc_feature (352)..(425): Pfam Id: PF00135 Pfam Desc: Carboxylesterase
  misc_feature (31)..(538): NCBI GI: 256727193 Blast Desc: NECHADRAFT_76924 [Nectria haematococca mpVI 77-13-4]
  misc_feature (30)..(474): NCBI GI: 116194041 Blast Desc: CHGG_06738 [Chaetomium globosum CBS 148.51] gi|88182651|gb|EAQ90119.1| CHGG_06738 [Chaetomium globosum CBS 148.51]
  misc_feature (7)..(563): NCBI GI: 189200859 Blast Desc: acetylcholinesterase precursor [Pyrenophora tritici-repentis Pt-1C-BFP] gi|187983865|gb|EDU49353.1| acetylcholinesterase precursor [Pyrenophora tritici-repentis
  misc_feature (31)..(560): NCBI GI: 255946670 Blast Desc: Pc22g00570 [Penicillium chrysogenum Wisconsin 54-1255] gi|211591119|emb|CAP97345.1| Pc22g00570 [Penicillium chrysogenum Wisconsin 54-1255]
  misc_feature (31)..(560): NCBI GI: 119485943 Blast Desc: carboxylesterase family protein [Neosartorya fischeri NRRL 181] gi|119410470|gb|EAW20417.1| carboxylesterase family protein [Neosartorya fischeri NRRL 181]
  misc_feature (1)..(560): NCBI GI: 154294375 Blast Desc: BC1G_13960 [Botryotinia fuckeliana B05.10] gi|150844799|gb|EDN19992.1| BC1G_13960 [Botryotinia fuckeliana B05.10]
  misc_feature (31)..(563): NCBI GI: 156039433 Blast Desc: SS1G_11853 [Sclerotinia sclerotiorum 1980] gi|154697590|gb|EDN97328.1| SS1G_11853 [Sclerotinia sclerotiorum 1980]
  misc_feature (31)..(560): NCBI GI: 237625986 Blast Desc: carboxylesterase family protein [Penicillium griseofulvum]
  misc_feature (31)..(560): NCBI GI: 121710936 Blast Desc: carboxylesterase family protein [Aspergillus clavatus NRRL 1] gi|119401234|gb|EAW11658.1| carboxylesterase family protein [Aspergillus clavatus NRRL 1]
  misc_feature (31)..(561): NCBI GI: 145240591 Blast Desc: An08g08290 [Aspergillus niger] gi|134077465|emb|CAK40030.1| protein product [Aspergillus niger]
  misc_feature (55)..(423): SWISSPROT Homolog: EC 3.1.1.3 Triacylglycerol lipase
MHISRAIVLATAFAGKALCYPGRNASGEKCLPVVDLGYELHRALEYNSTTDTYVFSNIHYAQAPTGDLRWRAPLPPLTNRSSVQDGSQYGAPRCPQGTPLWQADAFIPIRKYSQGAPFTLKSWEDDIANSSPPPGYLEHQNDNASEDCLFLDVYVPGQAFKKAASNSEFEGIPVLVWIHGGGYAFGSKSGDAQPIYNPGGLMEAAKQANDEGFIFVPLNYRLGALGFLAGPEVSSDGDLNAGLLDQRLALEWVQDKIHLFGGDSKRVTVIGESAGGGSIISHLLSSGDAPLFSQLIAQSPAYIPTGAPTAGAYEGFLDTLGVKTLAEARQPGLDVIGANAAFIGSAPPTTYLFAPVGDDKTAPADFGKAFRSGSFSKDVKMMVAHNSFEGGFFYDTNVTNEADFRAWIPRSIPGLSAADVNHLAENLYPPVFDGSLGYVDQKTRQGALWGEAVIDCVMWLTSEGSSGNKFAYEFDVSPGLHTQDLRYSFDDFSSQVPAPIAKKALQQAIATFIVNGTPTIDSSSNLVFPQWDSNQELVKITSNGAEVSSVQLNATRCDWWYPA

SEQ ID NO: 12824 - DNA, 310 bp, Muscodor strobelii
  misc_feature: SGI EST ID NO. CUFF.30462.0
  misc_feature: Variant of the nucleotide sequence at SEQ ID NO 12822
aagacaaggagccctctggggtgaagctgtcatcgattgtgttatgtggctcacatccgaagggtctagtggaaacaaattcgcttatgagtttgatgtctctccaggtcttcatacacaggatttgagatattcgttcgatgacttcagcagtcaggtaccggcgccaatcgctaaaaaggcgctccaacaggccattgcgacatttatcgtcaacggcacacctacgatcgatagctcctcgaacctggtcttccctcagtgggattcaaaccaagaactcgtcaagataaccagtaatggagcagag

SEQ ID NO: 12825 - DNA, 1170 bp, Muscodor strobelii
  misc_feature: SGI cDNA ID NO. 564182
  misc_feature: Encodes the peptide sequence at SEQ ID NO 12826
atggcgctcgacaactactaccacaacaagatcgaggcgatgaagcttgagattctcaagggccaggcagtactacgccgtctcgaagcccagcgcaacgactacaactccagagtccgcttattacgtgaagagctaggtctgctgcaacagcccggttcctatgtcggcgaggtcgtcaaggtcatgggcacaaagaaggtgctcgtcaaggtacatcctgaaggcaaatacgtcgtcgacgtctccgatgccgtcgacatagcaaagctcacagtcggcaagcgcgtaaccctgctctccgactcctacaagctcgagaagatcctcccctcctccgtcgaccccctcgtctccctcatgatggtcgagaaggtgcccgacagcacatacgacatgatcggcggtctcgaccagcagatcaaggagattaaggaagtcatcgagctcggcctcaagcacccggagctcttcgagtctctcggaatcgcacagcccaagggtgtcctgctctacggcccgccaggcacgggaaagacgctactcgccagagctgtagcgcatcacacagactgcaagttcatccgcgtatccggttccgaactggtgcagaagtacatcggtgaaggttcccgtatggtccgcgagctattcgtcatggcccgtgagcatgcgccttcaatcatatttatggacgagatcgactctattggttcttcacgtgtcgagggttcgtccggtggagattccgaagtccagcgaaccatgctggagcttctcaaccagctcgacggtttcgagcctacgaaaaacatcaaagtcatcatggccacgaatcgtctcgatattttagaccctgccctcctcagacccggtcgtatcgaccgcaagatcgagttcccaccgccgtccgtcgaggcccgcgccgacatcctgcgtatccacagccgcaagatgaacctcactcgtggcatcaatctcaccaagattgcagagaagatgaacggatgctccggtgctgagctcaagggtgtatgcacggagtctggtatgtatgcgttacgtgagcggagagttcatgtcacgcaggaggactttgaactggccacagccaaaatcctaaacaagcacgacgacaaagaggtgtctctacagaaattctggaagtag

SEQ ID NO: 12826 - protein, 389 aa, Muscodor strobelii
  misc_feature: SGI Peptide ID NO. 564182
  misc_feature (168)..(355): Pfam Id: PF00004 Pfam Desc: ATPase family associated with various cellular activities (AAA)
  misc_feature (168)..(303): Pfam Id: PF07728 Pfam Desc: ATPase family associated with various cellular activities (AAA)
  misc_feature (169)..(197): Pfam Id: PF07726 Pfam Desc: ATPase family associated with various cellular activities (AAA)
  misc_feature (168)..(194): Pfam Id: PF07728 Pfam Desc: ATPase family associated with various cellular activities (AAA)
  misc_feature (1)..(389): NCBI GI: 154292987 Blast Desc: 26S protease regulatory subunit 8 [Botryotinia fuckeliana B05.10] gi|150845667|gb|EDN20860.1| 26S protease regulatory subunit 8 [Botryotinia fuckeliana B05.10]
  misc_feature (1)..(389): NCBI GI: 212535936 Blast Desc: proteasome regulatory particle subunit Rpt6, [Penicillium marneffei ATCC 18224] gi|210070523|gb|EEA24613.1| proteasome regulatory particle subunit Rpt6, [Penicillium ATCC
  misc_feature (1)..(389): NCBI GI: 154273042 Blast Desc: 26S protease regulatory subunit 8 [Ajellomyces capsulatus NAm1] gi|150415885|gb|EDN11229.1| 26S protease regulatory subunit 8 [Ajellomyces capsulatus NAm1]
  misc_feature (1)..(389): NCBI GI: 225555079 Blast Desc: 26S protease regulatory subunit [Ajellomyces capsulatus G186AR] gi|240281287|gb|EER44790.1| 26S protease regulatory subunit 8 [Ajellomyces capsulatus H143]
  misc_feature (1)..(389): NCBI GI: 261188087 Blast Desc: 26S protease regulatory subunit 8 [Ajellomyces dermatitidis SLH14081] gi|239593335|gb|EEQ75916.1| 26S protease regulatory subunit 8 [Ajellomyces dermatitidis SLH14081] 26S 8
  misc_feature (1)..(389): NCBI GI: 189204256 Blast Desc: 26S protease regulatory subunit 8 [Pyrenophora tritici-repentis Pt-1C-BFP] gi|187985562|gb|EDU51050.1| 26S protease regulatory subunit 8 [Pyrenophora tritici-repentis
  misc_feature (1)..(389): NCBI GI: 169599382 Blast Desc: SNOG_02510 [Phaeosphaeria nodorum SN15] gi|160704593|gb|EAT90722.2| SNOG_02510 [Phaeosphaeria nodorum SN15]
  misc_feature (1)..(389): NCBI GI: 156063050 Blast Desc: SS1G_01641 [Sclerotinia sclerotiorum 1980] gi|154696977|gb|EDN96715.1| SS1G_01641 [Sclerotinia sclerotiorum 1980]
  misc_feature (1)..(389): NCBI GI: 169784139 Blast Desc: [Aspergillus oryzae RIB40] gi|238508808|ref|XP_002385587.1| proteasome regulatory particle subunit Rpt6, [Aspergillus flavus NRRL3357] protein product Rpt6,
  misc_feature (1)..(389): NCBI GI: 115388861 Blast Desc: 26S protease regulatory subunit 8 [Aspergillus terreus NIH2624] gi|114196020|gb|EAU37720.1| 26S protease regulatory subunit 8 [Aspergillus terreus NIH2624]
  misc_feature (131)..(386): SWISSPROT Homolog: EC 3.6.1.3 Adenosinetriphosphatase
MALDNYYHNKIEAMKLEILKGQAVLRRLEAQRNDYNSRVRLLREELGLLQQPGSYVGEVVKVMGTKKVLVKVHPEGKYVVDVSDAVDIAKLTVGKRVTLLSDSYKLEKILPSSVDPLVSLMMVEKVPDSTYDMIGGLDQQIKEIKEVIELGLKHPELFESLGIAQPKGVLLYGPPGTGKTLLARAVAHHTDCKFIRVSGSELVQKYIGEGSRMVRELFVMAREHAPSIIFMDEIDSIGSSRVEGSSGGDSEVQRTMLELLNQLDGFEPTKNIKVIMATNRLDILDPALLRPGRIDRKIEFPPPSVEARADILRIHSRKMNLTRGINLTKIAEKMNGCSGAELKGVCTESGMYALRERRVHVTQEDFELATAKILNKHDDKEVSLQKFWK

SEQ ID NO: 12827 - DNA, 1899 bp, Muscodor strobelii
  misc_feature: SGI EST ID NO. CUFF.30788.0
  misc_feature: Variant of the nucleotide sequence at SEQ ID NO 12825
ggcagagctgtacaacaggtgctgtggacgaacaggtgaatgcagtgacggaacgcgtcgtcttctctgcctgtagaccctgcgctccttcttcgcgcctcctaccctgcagtacagatagaagatccatcgacgaggggccagtgttcggccagtgctgctgccgctattgctgtagtggggcaaagcactggaagctggacctcacagctcattgagatccctgcccaaggctgccgtccggttacctaagcctcatcatcgctgtcgccaatccgaacttcgattcgattccgcatcgctgtttggcatcaacctttacctcacgtctacgccccgccaattcccgacgacaacaccccctccagtgtcacttcatacatagaagactcacccactagacacatacaccccgacatacgaaactacaccccaagaagcaacgtctccggccgggagacacccttcgcagccatggcgctcgacaactactaccacaacaagatcgaggcgatgaagcttgagattctcaagggccaggcagtactacgccgtctcgaagcccagcgcaacgactacaactccagagtccgcttattacgtgaagagctaggtctgctgcaacagcccggttcctatgtcggcgaggtcgtcaaggtcatgggcacaaagaaggtgctcgtcaaggtacatcctgaaggcaaatacgtcgtcgacgtctccgatgccgtcgacatagcaaagctcacagtcggcaagcgcgtaaccctgctctccgactcctacaagctcgagaagatcctcccctcctccgtcgaccccctcgtctccctcatgatggtcgagaaggtgcccgacagcacatacgacatgatcggcggtctcgaccagcagatcaaggagattaaggaagtcatcgagctcggcctcaagcacccggagctcttcgagtctctcggaatcgcacagcccaagggtgtcctgctctacggcccgccaggcacgggaaagacgctactcgccagagctgtagcgcatcacacagactgcaagttcatccgcgtatccggttccgaactggtgcagaagtacatcggtgaaggttcccgtatggtccgcgagctattcgtcatggcccgtgagcatgcgccttcaatcatatttatggacgagatcgactctattggttcttcacgtgtcgagggttcgtccggtggagattccgaagtccagcgaaccatgctggagcttctcaaccagctcgacggtttcgagcctacgaaaaacatcaaagtcatcatggccacgaatcgtctcgatattttagaccctgccctcctcagacccggtcgtatcgaccgcaagatcgagttcccaccgccgtccgtcgaggcccgcgccgacatcctgcgtatccacagccgcaagatgaacctcactcgtggcatcaatctcaccaagattgcagagaagatgaacggatgctccggtgctgagctcaagggtgtatgcacggagtctggtatgtatgcgttacgtgagcggagagttcatgtcacgcaggaggactttgaactggccacagccaaaatcctaaacaagcacgacgacaaagaggtgtctctacagaaattctggaagtagacgtgtgcttatgctatggtgtggtggaggtgggaagggaaatgcattgggtcattgcgatttattacaacgcgcgcatccaccaactgctatgtggcgaatagaggaaatggagttgctgcggcttgggattgcatggtgtacaataaaagcatgagaaccaaatcaacccaatatggacttttagtgacggcacatatagagagtgatacttggtagatgacttttcccgttcatgctaggcgaaggttagct

SEQ ID NO: 12828 - DNA, 3393 bp, Muscodor strobelii
  misc_feature: SGI cDNA ID NO. 564183
  misc_feature: Encodes the peptide sequence at SEQ ID NO 12829
atggagccgtcctcgcaggactcaacctggtcggcgaaccagtcccccaccgacacacgtcgcccgccgagcagacgtgacgcgagagacgaactcgtccccgagagctaccagtccaccgagaccgtccggaggagacccgatctgtcatcctatggcactctgcagaccccacctccaccgtccgcctctgcctactttggcgaacactccgcccatgaccgttcccacacgcgcactgccatccagcaagtgcgctcccctctgctaggtcccgaccgcggcagacagcgtccccgaaagcctcccatggcccgccgcacctcttccagcacccaggctccccacaggggcgagatcttctccaccgacgacgacataggcgaggtcgaaagcgatgtgcagggccgccagcagtccttctcaggcgagtcctcgacgagaccgcctgctagtatgcgcaggcggaccatggctccccctactttgtcccgtgttcagtcagctcgcagcacgggacccgaggacgacggaatagaggaacgtctcgacgaggacgaagaccctcttgccggtagccaagccgttaccgagggggatgcgcaggaagagggcgagggcgaaaatatgctcgaagacgatgacgacgatgtcagtgatgctgagagtttcaccctgaaagatcgccagcaggccatcaacgagacacatccatttggtatcaggatctggaagcctgcgctgtacaagaaggaccgatcggtgcagaagacggcagaggtcgacatccattcttcgcccggtggccgggttagtaactggctgctcttcttcaacatcttgtggacgttgcttttcggctggtggatggcctcctttgctgccctcggtgctgctgtctgcttcatctttgccgccgcccccagcgggagagaatacgggagggtgctctggggcttggcaggctacttattttatccttttggcaaattcgttcgtctcgagcaggacgaagcctatctagaggaagatcaaggcgagggccgaagtatcagcgagtacgaacagtggcagagcggcgacttggagtacggacgattgttctttggcccggagtcgcgaaatcgatccattgttggtcgctcccgtagaagcatcgactcggagcccagcgagacggatagcctgctggggcgctcagctcgtcatgatcacctccctgtagaagagacgggtggccgacaactcaagcggcgtctgttcggccgcggagagtggaacattggacgagtcatcttcttcgtcgtcttttggggtctcatcactccttccctactcatcgtgtctgcgatctgttttttcttggtgttctggatccctatgggtaaagtcaccaaccttctctttgatcacttaaggagacatccgttggcactgtctttcgagtccgatataacgattgccagagcttcggatatgcctcactcctccatccttctctgcacgtaccgcgctgttggctccaagtactggaagtacactgtagatggaaccaacatcttcctcatcaatttgatggctgtcgtgatctttgtcatctttgactggctcgtacttgaaggtgttcttcatatcgacaacttcctgacatctccaggatttttgttcattgctggcttgttttccatcattcctctagcctacttcatcgggcaggcagtggcatccatctcagctcagtcttctatgggcttgggtgccgctatcaatgctctcttttctaccatcgtggaagtcttcctctactgtgtcgcactcaaggagggtaagggtcagttggtggagggcagcatcatcggaagtatatttgctggtatactcttcctgcccggtctttccatgtgctttggcgcgatcaagcgcaagacacagcgcttcaacgccagatcagccggtgttacatcaaccatgctcttattcgcaaccgtggcggcgtttgggccaacgttattttaccaaatctacggaactcacgagctacgatgtcagagttgtaccgattacgccgataacgccgagcgagactgtcgtcgatgctactactcccagaagccggctttagatgatcgattctacgtcgaagccgttcgtcccttttgttacatggccgccattctcctgttctgctcctatattataggtctgtggtttacattgaggactcatgccgctgttatttggaattctgaagtcgacgagaagaagcatgaggaacagcctcacgccattcccttggccgatgggcgtagcattgcagacgctagtggtgctgatatccagagcagtgtgctatacaaacgtatcctcggccagtctttgaaacaagttggtctaccaggagatcctgcatctcgacaccactcacgacaaccgtcagctttaggttcagttccaccgaacggttccgctcagacaccgcatatggttcccccgaagaacagcggaagtggatcggagaccattcgtgcacacgtccagatcccgggcttttcggatgccgagaacaacaatcttcttcggggtgtgacagaactcgcggcgactgcggctgctattgccacccgcgacgcccgactaccccgtcgcatttctcatcaaccttccaatgtgggcggcagtgtctcagctgccagaccagctccgatgagaacagggactttccccgagccggaagacttggcagaacaggcacaagctggccatggaggacacgatgccccgaattggagccgagtgaagagttccgtcatcttaatgggtgccacagtcctctacgctatcgtagctgagattttggtcgacaccgtagacgttgtactagacaactatgccattgatccgaagttcttgggcataaccctttttgcccttgtccccaacaccaccgagtttctgaatgccatctccttcgccatgaacggcaacattgcattatcaatggagatcggatccgcatacgcgctacaagtgtgtctcctccaaatcccagctcttgtcctgttctccgccatctaccccatccagccggtaggagacgcggaccccattcattggaccttcagtctactgtttccacagtgggacatggtaactgtgatcctttgcgtgttcctactgagctacatgtatggcgagggaaagagcaattatttcaaaggtagtatattgatactgacgtatctggtcgttgtggtcggcttctattactcgagtttcacggaaggatttgcagacctgggcatgagtcgatttgatacgctggggagcaacggagagtggaagacttataaaagcattggacgaggagctaatgctgtaaggtttgaggtttga

SEQ ID NO: 12829 - protein, 1130 aa, Muscodor strobelii
  misc_feature: SGI Peptide ID NO. 564183
  misc_feature (276)..(335): Pfam Id: PF03733 Pfam Desc: Domain of function (DUF307)
  misc_feature (943)..(1087): Pfam Id: PF01699 Pfam Desc: Sodium/calcium exchanger protein
  misc_feature (561)..(738): Pfam Id: PF01699 Pfam Desc: Sodium/calcium exchanger protein
  misc_feature (561)..(666): Pfam Id: PF01699 Pfam Desc: Sodium/calcium exchanger protein
  misc_feature (1)..(1130): NCBI GI: 256730745 Blast Desc: NECHADRAFT_65123 [Nectria haematococca mpVI 77-13-4]
  misc_feature (7)..(1128): NCBI GI: 39951477 Blast Desc: MGG_01381 [Magnaporthe grisea 70-15] gi|145020793|gb|EDK04922.1| MGG_01381 [Magnaporthe grisea 70-15]
  misc_feature (1)..(1128): NCBI GI: 171683754 Blast Desc: protein product [Podospora anserina] gi|170941837|emb|CAP67490.1| protein product [Podospora anserina]
  misc_feature (11)..(1128): NCBI GI: 46109448 Blast Desc: FG01606.1 [Gibberella zeae PH-1]
  misc_feature (15)..(1128): NCBI GI: 85068349 Blast Desc: NCU05360 [Neurospora crassa OR74A] gi|11544693|emb|CAB91302.2| conserved [Neurospora crassa] gi|28925028|gb|EAA34115.1| NCU05360 [Neurospora crassa OR74A]
  misc_feature (103)..(1128): NCBI GI: 116200305 Blast Desc: CHGG_08308 [Chaetomium globosum CBS 148.51] gi|88179587|gb|EAQ87055.1| CHGG_08308 [Chaetomium globosum CBS 148.51]
  misc_feature (81)..(1129): NCBI GI: 154292989 Blast Desc: calcium permease [Botryotinia fuckeliana B05.10] gi|150845668|gb|EDN20861.1| calcium permease [Botryotinia fuckeliana B05.10]
  misc_feature (98)..(1108): NCBI GI: 70982249 Blast Desc: calcium permease family membrane transporter [Aspergillus fumigatus Af293] gi|66844276|gb|EAL84615.1| calcium permease family membrane transporter [Aspergillus fumigatus
  misc_feature (98)..(1128): NCBI GI: 119486696 Blast Desc: calcium permease family membrane transporter [Neosartorya fischeri NRRL 181] gi|119410491|gb|EAW20437.1| calcium permease family membrane transporter [Neosartorya NRRL
  misc_feature (17)..(1125): NCBI GI: 225681372 Blast Desc: conserved [Paracoccidioides brasiliensis Pb03]
MEPSSQDSTWSANQSPTDTRRPPSRRDARDELVPESYQSTETVRRRPDLSSYGTLQTPPPPSASAYFGEHSAHDRSHTRTAIQQVRSPLLGPDRGRQRPRKPPMARRTSSSTQAPHRGEIFSTDDDIGEVESDVQGRQQSFSGESSTRPPASMRRRTMAPPTLSRVQSARSTGPEDDGIEERLDEDEDPLAGSQAVTEGDAQEEGEGENMLEDDDDDVSDAESFTLKDRQQAINETHPFGIRIWKPALYKKDRSVQKTAEVDIHSSPGGRVSNWLLFFNILWTLLFGWWMASFAALGAAVCFIFAAAPSGREYGRVLWGLAGYLFYPFGKFVRLEQDEAYLEEDQGEGRSISEYEQWQSGDLEYGRLFFGPESRNRSIVGRSRRSIDSEPSETDSLLGRSARHDHLPVEETGGRQLKRRLFGRGEWNIGRVIFFVVFWGLITPSLLIVSAICFFLVFWIPMGKVTNLLFDHLRRHPLALSFESDITIARASDMPHSSILLCTYRAVGSKYWKYTVDGTNIFLINLMAVVIFVIFDWLVLEGVLHIDNFLTSPGFLFIAGLFSIIPLAYFIGQAVASISAQSSMGLGAAINALFSTIVEVFLYCVALKEGKGQLVEGSIIGSIFAGILFLPGLSMCFGAIKRKTQRFNARSAGVTSTMLLFATVAAFGPTLFYQIYGTHELRCQSCTDYADNAERDCRRCYYSQKPALDDRFYVEAVRPFCYMAAILLFCSYIIGLWFTLRTHAAVIWNSEVDEKKHEEQPHAIPLADGRSIADASGADIQSSVLYKRILGQSLKQVGLPGDPASRHHSRQPSALGSVPPNGSAQTPHMVPPKNSGSGSETIRAHVQIPGFSDAENNNLLRGVTELAATAAAIATRDARLPRRISHQPSNVGGSVSAARPAPMRTGTFPEPEDLAEQAQAGHGGHDAPNWSRVKSSVILMGATVLYAIVAEILVDTVDVVLDNYAIDPKFLGITLFALVPNTTEFLNAISFAMNGNIALSMEIGSAYALQVCLLQIPALVLFSAIYPIQPVGDADPIHWTFSLLFPQWDMVTVILCVFLLSYMYGEGKSNYFKGSILILTYLVVVVGFYYSSFTEGFADLGMSRFDTLGSNGEWKTYKSIGRGANAVRFEV

SEQ ID NO: 12830 - DNA, 4877 bp, Muscodor strobelii
  misc_feature: SGI EST ID NO. CUFF.31083.0
  misc_feature: Variant of the nucleotide sequence at SEQ ID NO 12828
cgacaaggatccttgagtctaacttggaagctaaaatatggcagaaatatggatgctgccggtagctatcacttaagcactcgacttttacccgcactatctggattcccaatctcacgttgctctctgttggcatctcctttctacagagtctcacaatctccaattcgaccttccatacccactgtgtttatagcccttcacaccgctatgcagaactggctatgctgatcgggcgatcgtctgcgtatgcatacgtaccgtgaaatgatatattagggcttcgtggagggaccggcttgacgccttggctagcaggcaggcttagcagggatgcactacggtgtccactataatttcatcacggggcgccatcacgactcaacttggaggtgacctcgtgctgtcttggttggagtggaggaactcctcaaacgccgaaacatctctaccagagtcaaggcagcccaagatgttgcaagccttgccgtgggatagctgttgctgtaaatcaacgtattagagtatgaacgaggaataatttacggatgaactgtatactgcgcagccataatacagcatctgcagcagtacagcacagtgtctaaccctggcttatcaggcccctccgtcgtcgtcgctacctatcagtgaaacaactgggagctgtggatatggtcatgcattgtttatgttgtttgcacatcagtctgtaatcgagcaagcgtcctggccgggctgcatgcctccatcgccatctccgcaccaccatcgacactgctcactcttccgacgatagcataatacgccgttgctaccggagcacggcatctctcgagatacacaaatcaagtctcatctcatcctacatacctcttcttccctcacgctgccataggactcgagttctgcctgaatgtctacctaacctacccacgcagcttctaatttgaggatttcaacatcaacaataacaacagcaactgcattggccttttctccgtctcaacgctccacctgcatccccgtgctcgctgtgtttcaccgtttgaattaatttccctacggccctaagctgccaactagtctgttctgtacataccacaccatcttacaagcaaggacgagagagacacgacatcgacgacgcagtttgcccatgtgttttgtctcacaaacccgtaacggctttcccatgcagtcgtaaaccatcgtcatcagtgccaccaacgacgccgccaccatggagccgtcctcgcaggactcaacctggtcggcgaaccagtcccccaccgacacacgtcgcccgccgagcagacgtgacgcgagagacgaactcgtccccgagagctaccagtccaccgagaccgtccggaggagacccgatctgtcatcctatggcactctgcagaccccacctccaccgtccgcctctgcctactttggcgaacactccgcccatgaccgttcccacacgcgcactgccatccagcaagtgcgctcccctctgctaggtcccgaccgcggcagacagcgtccccgaaagcctcccatggcccgccgcacctcttccagcacccaggctccccacaggggcgagatcttctccaccgacgacgacataggcgaggtcgaaagcgatgtgcagggccgccagcagtccttctcaggcgagtcctcgacgagaccgcctgctagtatgcgcaggcggaccatggctccccctactttgtcccgtgttcagtcagctcgcagcacgggacccgaggacgacggaatagaggaacgtctcgacgaggacgaagaccctcttgccggtagccaagccgttaccgagggggatgcgcaggaagagggcgagggcgaaaatatgctcgaagacgatgacgacgatgtcagtgatgctgagagtttcaccctgaaagatcgccagcaggccatcaacgagacacatccatttggtatcaggatctggaagcctgcgctgtacaagaaggaccgatcggtgcagaagacggcagaggtcgacatccattcttcgcccggtggccgggttagtaactggctgctcttcttcaacatcttgtggacgttgcttttcggctggtggatggcctcctttgctgccctcggtgctgctgtctgcttcatctttgccgccgcccccagcgggagagaatacgggagggtgctctggggcttggcaggctacttattttatccttttggcaaattcgttcgtctcgagcaggacgaagcctatctagaggaagatcaaggcgagggccgaagtatcagcgagtacgaacagtggcagagcggcgacttggagtacggacgattgttctttggcccggagtcgcgaaatcgatccattgttggtcgctcccgtagaagcatcgactcggagcccagcgagacggatagcctgctggggcgctcagctcgtcatgatcacctccctgtagaagagacgggtggccgacaactcaagcggcgtctgttcggccgcggagagtggaacattggacgagtcatcttcttcgtcgtcttttggggtctcatcactccttccctactcatcgtgtctgcgatctgttttttcttggtgttctggatccctatgggtaaagtcaccaaccttctctttgatcacttaaggagacatccgttggcactgtctttcgagtccgatataacgattgccagagcttcggatatgcctcactcctccatccttctctgcacgtaccgcgctgttggctccaagtactggaagtacactgtagatggaaccaacatcttcctcatcaatttgatggctgtcgtgatctttgtcatctttgactggctcgtacttgaaggtgttcttcatatcgacaacttcctgacatctccaggatttttgttcattgctggcttgttttccatcattcctctagcctacttcatcgggcaggcagtggcatccatctcagctcagtcttctatgggcttgggtgccgctatcaatgctctcttttctaccatcgtggaagtcttcctctactgtgtcgcactcaaggagggtaagggtcagttggtggagggcagcatcatcggaagtatatttgctggtatactcttcctgcccggtctttccatgtgctttggcgcgatcaagcgcaagacacagcgcttcaacgccagatcagccggtgttacatcaaccatgctcttattcgcaaccgtggcggcgtttgggccaacgttattttaccaaatctacggaactcacgagctacgatgtcagagttgtaccgattacgccgataacgccgagcgagactgtcgtcgatgctactactcccagaagccggctttagatgatcgattctacgtcgaagccgttcgtcccttttgttacatggccgccattctcctgttctgctcctatattataggtctgtggtttacattgaggactcatgccgctgttatttggaattctgaagtcgacgagaagaagcatgaggaacagcctcacgccattcccttggccgatgggcgtagcattgcagacgctagtggtgctgatatccagagcagtgtgctatacaaacgtatcctcggccagtctttgaaacaagttggtctaccaggagatcctgcatctcgacaccactcacgacaaccgtcagctttaggttcagttccaccgaacggttccgctcagacaccgcatatggttcccccgaagaacagcggaagtggatcggagaccattcgtgcacacgtccagatcccgggcttttcggatgccgagaacaacaatcttcttcggggtgtgacagaactcgcggcgactgcggctgctattgccacccgcgacgcccgactaccccgtcgcatttctcatcaaccttccaatgtgggcggcagtgtctcagctgccagaccagctccgatgagaacagggactttccccgagccggaagacttggcagaacaggcacaagctggccatggaggacacgatgccccgaattggagccgagtgaagagttccgtcatcttaatgggtgccacagtcctctacgctatcgtagctgagattttggtcgacaccgtagacgttgtactagacaactatgccattgatccgaagttcttgggcataaccctttttgcccttgtccccaacaccaccgagtttctgaatgccatctccttcgccatgaacggcaacattgcattatcaatggagatcggatccgcatacgcgctacaagtgtgtctcctccaaatcccagctcttgtcctgttctccgccatctaccccatccagccggtaggagacgcggaccccattcattggaccttcagtctactgtttccacagtgggacatggtaactgtgatcctttgcgtgttcctactgagctacatgtatggcgagggaaagagcaattatttcaaaggtagtatattgatactgacgtatctggtcgttgtggtcggcttctattactcgagtttcacggaaggatttgcagacctgggcatgagtcgatttgatacgctggggagcaacggagagtggaagacttataaaagcattggacgaggagctaatgctgtaaggtttgaggtttgaggaatataaaattggcgaggagtgagatggggaagggtggccgtggacgttgacattttgtccttttcaagcattattagcatagtcacacggtgttcatcggccggagtagggagtaggcatggtttcttttgctatggtcatgtctagagtatctaatcgaagaaacattgtttgatatgccttcactcctgttgtttaatatcacgtatctcagggcgtagggatgaagggtctatga

SEQ ID NO: 12831 - DNA, 945 bp, Muscodor strobelii
  misc_feature: SGI cDNA ID NO. 564184
  misc_feature: Encodes the peptide sequence at SEQ ID NO 12832
atggatgtatcagagctcctccgtcagataaacgggccttacacaggcaccaacttcgccacgccattacaccatcaggtgccctcatctcgaacacctgaggtccttgggttcgaagccccttttgtagccgttatcacaggctgcagcaagggcatcggacgctcatccgcgcaagtattcgctcgtgccggagctactggtctaatcttgacagcacgcaccctctccaccgaactagaagaaaccaaagccctctgtctcgccgcagcatctaacaaagatctcaaaatttcgcttctcgccgcccacgcaggcgaagaatcatccgcagaagcaatccggtccgtcatcgaaacagagcacaacggccgtttggatatcctagtcaacaatgccggactagtatcaaccaacgaaagcgcctccaagaaactcacagagatcgaatcttcacagatccgcatcccgtttgaaacaaactacctcggccgcttcctcaccatgcgtgccttgattccgttgctcctcaaaacgggagaagatgagaagccaggggcaaagatggtgataaacataacgtcgatctgctcacacttcacgaactacgcagcgctcggcttcaacgtctcggaagtcgcttctaacagacttaccgagatcgcggcggagatgtatagagacgagggattgctgtgttatagtctgcatcccgggtttgttatgacgaaccccccgccgggggtcagggatagtcccgggtttatgagcgaggcgggtgatagtccggagttgtgtgggagctttatgctttggttaataagggagaggcctgaatggttgaatggcaggtatttgagtgcgcagtgggatgttggggcgttggaggggaggagagaggagattgaggccggggataaactgaaggggaggatggttgtttga

SEQ ID NO: 12832 - protein, 314 aa, Muscodor strobelii
  misc_feature: SGI Peptide ID NO. 564184
  misc_feature (42)..(222): Pfam Id: PF00106 Pfam Desc: short chain dehydrogenase
  misc_feature (42)..(136): Pfam Id: PF00106 Pfam Desc: short chain dehydrogenase
  misc_feature (46)..(314): NCBI GI: 212533777 Blast Desc: oxidoreductase, short chain dehydrogenase/reductase family, [Penicillium marneffei ATCC 18224] gi|210072409|gb|EEA26498.1| oxidoreductase, short chain family,
  misc_feature (14)..(314): NCBI GI: 115399610 Blast Desc: [Aspergillus terreus NIH2624] gi|114192268|gb|EAU33968.1| [Aspergillus terreus NIH2624]
  misc_feature (46)..(314): NCBI GI: 168830921 Blast Desc: CtnE [Monascus aurantiacus]
  misc_feature (45)..(314): NCBI GI: 242778830 Blast Desc: oxidoreductase, short chain dehydrogenase/reductase family, [Talaromyces stipitatus ATCC 10500] gi|218722937|gb|EED22355.1| oxidoreductase, short chain family,
  misc_feature (45)..(314): NCBI GI: 212529264 Blast Desc: conserved [Penicillium marneffei ATCC 18224] gi|210074187|gb|EEA28274.1| conserved [Penicillium marneffei ATCC 18224]
  misc_feature (7)..(312): NCBI GI: 154322737 Blast Desc: BC1G_00711 [Botryotinia fuckeliana B05.10] gi|150848045|gb|EDN23238.1| BC1G_00711 [Botryotinia fuckeliana B05.10]
  misc_feature (16)..(313): NCBI GI: 156056737 Blast Desc: SS1G_04099 [Sclerotinia sclerotiorum 1980] gi|154701885|gb|EDO01624.1| SS1G_04099 [Sclerotinia sclerotiorum 1980]
  misc_feature (14)..(314): NCBI GI: 212538937 Blast Desc: oxidoreductase ucpA, [Penicillium marneffei ATCC 18224] gi|210069366|gb|EEA23457.1| oxidoreductase ucpA, [Penicillium marneffei ATCC 18224]
  misc_feature (45)..(314): NCBI GI: 256723291 Blast Desc: NECHADRAFT_97166 [Nectria haematococca mpVI 77-13-4]
  misc_feature (24)..(314): NCBI GI: 171680478 Blast Desc: protein product [Podospora anserina] gi|170939866|emb|CAP65092.1| protein product [Podospora anserina]
  misc_feature (43)..(286): SWISSPROT Homolog: EC 1.1.1.268 2-(R)-hydroxypropyl-CoM dehydrogenase
MDVSELLRQINGPYTGTNFATPLHHQVPSSRTPEVLGFEAPFVAVITGCSKGIGRSSAQVFARAGATGLILTARTLSTELEETKALCLAAASNKDLKISLLAAHAGEESSAEAIRSVIETEHNGRLDILVNNAGLVSTNESASKKLTEIESSQIRIPFETNYLGRFLTMRALIPLLLKTGEDEKPGAKMVINITSICSHFTNYAALGFNVSEVASNRLTEIAAEMYRDEGLLCYSLHPGFVMTNPPPGVRDSPGFMSEAGDSPELCGSFMLWLIRERPEWLNGRYLSAQWDVGALEGRREEIEAGDKLKGRMVV

SEQ ID NO: 12833 - DNA, 2823 bp, Muscodor strobelii
  misc_feature: SGI cDNA ID NO. 564185
  misc_feature: Reduced expression when VOC is produced
  misc_feature: Encodes the peptide sequence at SEQ ID NO 12834
atgaagacttccacgcgaccgccgcttggctcgtcgcattctgttcacgggtctcttccccgtcactcacaatcaaatatgcagtctttccgctccaacaggtcatctactccccttgcctcacctcgcatgcctcactcggtcggtcagacctaccccccggcggtcaaagtgtctcctattgtgaatgcggacgcgcgaacgcccagtcccaactattttggtctcagtatggacaaacatggagatctgggagattcttcagaggctccgcataacaactggagccctccgacctcctcggtcaagtcctttggtgctgctatccccaaatctatgccgctcgatgcgaacccggaattcgaggcctttcgacgccagatcgatgctaacaaatctgctaatggtggttttaatttgagcaactcgtactttgctccaggccccgcggcttcgcggccacgtcccccacgccgatccacaaaccacagcgatgccgcccacgatagttccacgctcaaaccacctccgagcatgaaatcacgcgatctgcccggaagtcgcgcagacggtgatttgaatagccctcatgattcagcttacgtatcgtcagactccaaacgaaattctgaagcctcactccatgcgccgttcttcagtggcatgcctcgatttgaatcgcctaagcaaacggattctccattagattcgattaacagaacgacaatgctcaaagctgaagatcgccagtcaagactctcattaccttgtactacgcctgacacaattgtcaaggggacccagccgaggtcggaaacgttaccgccaggacctgatgggcagtctcttagtttgttattacccagtgaactgaaagatatgcttcaagagagcccagaaagcgaatatcttcttctcgacctacgagtcgcaacactttactcgaactcgcggatccgtagtgccctgaatctctgtatccccacgactctgttaaagcgtgctacgtacagtttggacaagcttgagaaaacgctgcagaccgaagaggaccaggccaaatttagcgaatgggccgatgtggagcatcttatcctatatgatggtgcctctgctgaaaagcgtgacgccgtatcctcgacgaacatgtttaagaagtttatgaacgaaggtttctctggccacgcgtggttgctgaagggtgggtttaatgctttcgctgccgcgtacccgagctgcattgaccaccagtcaacggctgagcgaggaggtacttctgtcgccggacctcaaggtggtcggcctagctttgctcctgtcattggtggtgtatccctgccctctactactaataacgtgaatcccttcttcagcaatatacggcagaacatggatttggcggacggtgtcggccaaatggacatatctgtaccctcaaatctcgactttgacatcctgccacgttggctcggggaggcagcaaagactacggatcacgggaagaaggtttccgatcgatttctcaacattgagaagagtgaacaatctcgcatgcgtgaagcttactctgctttcaatcaacccattgctactcaatcaaacccggacaaagtgcaactatgtggtgttgaaaagggggtcaagaatcgatataaagatattctcccatttgcgcatgcccgcgtgcgcttgaggaagaacgaagcaggggcttgcgattatatcaatgcgagccatatacaagcttctcggagccataaacgatacatagctgctcaaggcccgctgccggccacattcgaggatttttggtctgtcatctgggaccaggatgttcgcgtcgtggtcatgctaacggccgagcatgagggtgggcagcttaaatgccacccttattggcgcggacgagactttggccccatccagttaagacctctatccgagaaaaaggtttcccttgatatggacaagcacaaatctaatacaaacactgtgtcaactgccgccaacggttcggagtctggtcgtcggcgtgctaatactacaacgactctggatgtctcttctgccagtgcttcatcgaagccagcgcaaagtgacgagcatgttgtgataatccgaaaattcgcattgtcccactctgcccatcctttcgctcccatacgcgagataacccacctccattacccctcatggccggatttcggcgctcccgcaaaaccatcgcacctgttagctctagtagagctagccaatgtaatgcaaagggcagccctccctcttgacgcctcagccgttgccgcttctgctgccgcagagcatccggctactatgagttggtatgacgaaccggagtctgatgcagcagcgcgtcccatgctcgtccactgttctgccggttgcggtcgcaccggaacattttgcactgttgacagcgttattgatatgctgaagagacagcgacttgcatctatagcgaagaagcatcgtacagacacggaaggtgatgtgatcatggacgatggatcattatcgccggattccgaagggcgcaagaaagctagacacgctgagaacttcaccactcctccaggttcgatccgtggtgtcgaagccggctgggtcggcgacacagctctcgatcttgtgtccgcaacagttgaagatttcagaaagcaaagactcagcatggttcaaagccttcgacaattcgtcctttgttatgaaagcatcgttgagtgggtctcacggcttcaagaaagaaacaacagcaacacccccagaactaggcatcgtagtgggagtcttcaaggaccgcgatga

SEQ ID NO: 12834 - protein, 940 aa, Muscodor strobelii
  misc_feature: SGI Peptide ID NO. 564185
  misc_feature (287)..(409): Pfam Id: PF00581 Pfam Desc: Rhodanese-like domain
  misc_feature (545)..(913): Pfam Id: PF00102 Pfam Desc: Protein-tyrosine phosphatase
  misc_feature (545)..(633): Pfam Id: PF00102 Pfam Desc: Protein-tyrosine phosphatase
  misc_feature (704)..(827): Pfam Id: PF00102 Pfam Desc: Protein-tyrosine phosphatase
  misc_feature (883)..(913): Pfam Id: PF00102 Pfam Desc: Protein-tyrosine phosphatase
  misc_feature (22)..(921): NCBI GI: 256730537 Blast Desc: NECHADRAFT_89680 [Nectria haematococca mpVI 77-13-4]
  misc_feature (1)..(938): NCBI GI: 145613776 Blast Desc: MGG_01376 [Magnaporthe grisea 70-15] gi|145020798|gb|EDK04927.1| MGG_01376 [Magnaporthe grisea 70-15]
  misc_feature (22)..(923): NCBI GI: 11544694 Blast Desc: related to protein-tyrosine-phosphatase [Neurospora crassa]
  misc_feature (20)..(920): NCBI GI: 171683750 Blast Desc: protein product [Podospora anserina] gi|170941835|emb|CAP67488.1| protein product [Podospora anserina]
  misc_feature (22)..(936): NCBI GI: 116200301 Blast Desc: CHGG_08306 [Chaetomium globosum CBS 148.51] gi|88179585|gb|EAQ87053.1| CHGG_08306 [Chaetomium globosum CBS 148.51]
  misc_feature (246)..(940): NCBI GI: 261356968 Blast Desc: tyrosine-protein phosphatase non-receptor [Verticillium albo-atrum VaMs.102]
  misc_feature (40)..(936): NCBI GI: 154308779 Blast Desc: BC1G_07812 [Botryotinia fuckeliana B05.10] gi|150852763|gb|EDN27955.1| BC1G_07812 [Botryotinia fuckeliana B05.10]
  misc_feature (68)..(915): NCBI GI: 169598596 Blast Desc: SNOG_02104 [Phaeosphaeria nodorum SN15] gi|160704429|gb|EAT90316.2| SNOG_02104 [Phaeosphaeria nodorum SN15]
  misc_feature (43)..(809): NCBI GI: 156050549 Blast Desc: SS1G_07862 [Sclerotinia sclerotiorum 1980] gi|154692262|gb|EDN92000.1| SS1G_07862 [Sclerotinia sclerotiorum 1980]
  misc_feature (8)..(915): NCBI GI: 189204426 Blast Desc: tyrosine-protein phosphatase non-receptor type 6 [Pyrenophora tritici-repentis Pt-1C-BFP] gi|187985647|gb|EDU51135.1| tyrosine-protein phosphatase type 6
  misc_feature (270)..(911): SWISSPROT Homolog: EC 3.1.3.48 Protein-tyrosine-phosphatase
  misc_feature: Useful for introducing or modulating the production of volatile compounds
MKTSTRPPLGSSHSVHGSLPRHSQSNMQSFRSNRSSTPLASPRMPHSVGQTYPPAVKVSPIVNADARTPSPNYFGLSMDKHGDLGDSSEAPHNNWSPPTSSVKSFGAAIPKSMPLDANPEFEAFRRQIDANKSANGGFNLSNSYFAPGPAASRPRPPRRSTNHSDAAHDSSTLKPPPSMKSRDLPGSRADGDLNSPHDSAYVSSDSKRNSEASLHAPFFSGMPRFESPKQTDSPLDSINRTTMLKAEDRQSRLSLPCTTPDTIVKGTQPRSETLPPGPDGQSLSLLLPSELKDMLQESPESEYLLLDLRVATLYSNSRIRSALNLCIPTTLLKRATYSLDKLEKTLQTEEDQAKFSEWADVEHLILYDGASAEKRDAVSSTNMFKKFMNEGFSGHAWLLKGGFNAFAAAYPSCIDHQSTAERGGTSVAGPQGGRPSFAPVIGGVSLPSTTNNVNPFFSNIRQNMDLADGVGQMDISVPSNLDFDILPRWLGEAAKTTDHGKKVSDRFLNIEKSEQSRMREAYSAFNQPIATQSNPDKVQLCGVEKGVKNRYKDILPFAHARVRLRKNEAGACDYINASHIQASRSHKRYIAAQGPLPATFEDFWSVIWDQDVRVVVMLTAEHEGGQLKCHPYWRGRDFGPIQLRPLSEKKVSLDMDKHKSNTNTVSTAANGSESGRRRANTTTTLDVSSASASSKPAQSDEHVVIIRKFALSHSAHPFAPIREITHLHYPSWPDFGAPAKPSHLLALVELANVMQRAALPLDASAVAASAAAEHPATMSWYDEPESDAAARPMLVHCSAGCGRTGTFCTVDSVIDMLKRQRLASIAKKHRTDTEGDVIMDDGSLSPDSEGRKKARHAENFTTPPGSIRGVEAGWVGDTALDLVSATVEDFRKQRLSMVQSLRQFVLCYESIVEWVSRLQERNNSNTPRTRHRSGSLQGPR

SEQ ID NO: 12835 - DNA, 4875 bp, Muscodor strobelii
  misc_feature: SGI EST ID NO. CUFF.31061.1
  misc_feature: Variant of the nucleotide sequence at SEQ ID NO 12833
ctgacatgaaccgccaagccggtggaatatggcatttcgtaatttcgtctggtctcttctcccattaaaccccagcaaacccgatttactatgatcgtaaattacagcccccgtttgccagcaaataaagtgaatgccacttttgacatctatctactaataaccggttcaccgaacggagcaagagactaaagccgcctgcttggcctggcaggagtcacatctagtaaaaaagatcgccctgcagagccctggtctgcaacgtgagcaaccaccaaaatccagggactccctcgcttcttgacctctctcggcatagcgtcatcgtaccgcggatcattacctcacacgacatccgttcaagggtccagaccctccagaccctccataccgcatccattctgcgtccacttctgcccacaggcgcacttttccccgtaggtgccctctcctgtcctcggtacctacgcttgcctcgacgtgggcaaataggtcgggttatgggcgaaaggcactcccaaattgagaccgagaattgagtaactcgacattgtctatgtcttttggggggtgcttcgtttctctgttgtaatcgtacaccaaagcgtccccttgcgatacctagtagacccccctcacccactcctgaattcaaccagtcgtacgatttgaaatcatcgtcatcccctatataccctgagtttctcgagattatcacggctctttaaacagtctccgattacattcgttcttctgtatcacacacattggaaagagagagcgatctaccacggccgccctgtccgccacctcaacttccatcacgccaacgcctcccattcgtgctaaaaattagccacattagcacttacagattcgtagcgatcatctctgtctgctgtccacaggatacatcccgcacacacaattctacacaccacacccaccgagggccccttgatcctaaaaagctgtaaggcacagggacagcccgaacagtggccccgtcttcgttcccctcttcgcgctgatcccgacttctaaagcaaaaagagaaagagcattgataggcaaagctgaatcctcttttattcttattgttcctttccccattctcaagacgccccttccccatcgttcctgctgtgcatcgttgtcgcgccgtgagcgtaacgtcgttgaataaaaagcagtgcacgagcctgcgcttcgactgacgatcagaacctatgtggaataacagcaagtccttctcatcagcttctcgagtgcaatcagatggtgaacaaccatcagagtctcctcttctctgcacccaattcatccgatctattcagacaatgtctagtctttagtaaatttgcgttactgtcggcctttgcttggaatacgaactggatatcgataacggacgccactgcctgatcagcacacctacacaacgccagcaacgacgtcatatctgacgatggcacctgaggcgacgagaaacagcgaccgttcatcgactacacatcatttcaccatgaagacttccacgcgaccgccgcttggctcgtcgcattctgttcacgggtctcttccccgtcactcacaatcaaatatgcagtctttccgctccaacaggtcatctactccccttgcctcacctcgcatgcctcactcggtcggtcagacctaccccccggcggtcaaagtgtctcctattgtgaatgcggacgcgcgaacgcccagtcccaactattttggtctcagtatggacaaacatggagatctgggagattcttcagaggctccgcataacaactggagccctccgacctcctcggtcaagtcctttggtgctgctatccccaaatctatgccgctcgatgcgaacccggaattcgaggcctttcgacgccagatcgatgctaacaaatctgctaatggtggttttaatttgagcaactcgtactttgctccaggccccgcggcttcgcggccacgtcccccacgccgatccacaaaccacagcgatgccgcccacgatagttccacgctcaaaccacctccgagcatgaaatcacgcgatctgcccggaagtcgcgcagacggtgatttgaatagccctcatgattcagcttacgtatcgtcagactccaaacgaaattctgaagcctcactccatgcgccgttcttcagtggcatgcctcgatttgaatcgcctaagcaaacggattctccattagattcgattaacagaacgacaatgctcaaagctgaagatcgccagtcaagactctcattaccttgtactacgcctgacacaattgtcaaggggacccagccgaggtcggaaacgttaccgccaggacctgatgggcagtctcttagtttgttattacccagtgaactgaaagatatgcttcaagagagcccagaaagcgaatatcttcttctcgacctacgagtcgcaacactttactcgaactcgcggatccgtagtgccctgaatctctgtatccccacgactctgttaaagcgtgctacgtacagtttggacaagcttgagaaaacgctgcagaccgaagaggaccaggccaaatttagcgaatgggccgatgtggagcatcttatcctatatgatggtgcctctgctgaaaagcgtgacgccgtatcctcgacgaacatgtttaagaagtttatgaacgaaggtttctctggccacgcgtggttgctgaagggtgggtttaatgctttcgctgccgcgtacccgagctgcattgaccaccagtcaacggctgagcgaggaggtacttctgtcgccggacctcaaggtggtcggcctagctttgctcctgtcattggtggtgtatccctgccctctactactaataacgtgaatcccttcttcagcaatatacggcagaacatggatttggcggacggtgtcggccaaatggacatatctgtaccctcaaatctcgactttgacatcctgccacgttggctcggggaggcagcaaagactacggatcacgggaagaaggtttccgatcgatttctcaacattgagaagagtgaacaatctcgcatgcgtgaagcttactctgctttcaatcaacccattgctactcaatcaaacccggacaaagtgcaactatgtggtgttgaaaagggggtcaagaatcgatataaagatattctcccatttgcgcatgcccgcgtgcgcttgaggaagaacgaagcaggggcttgcgattatatcaatgcgagccatatacaagcttctcggagccataaacgatacatagctgctcaaggcccgctgccggccacattcgaggatttttggtctgtcatctgggaccaggatgttcgcgtcgtggtcatgctaacggccgagcatgagggtgggcagcttaaatgccacccttattggcgcggacgagactttggccccatccagttaagacctctatccgagaaaaaggtttcccttgatatggacaagcacaaatctaatacaaacactgtgtcaactgccgccaacggttcggagtctggtcgtcggcgtgctaatactacaacgactctggatgtctcttctgccagtgcttcatcgaagccagcgcaaagtgacgagcatgttgtgataatccgaaaattcgcattgtcccactctgcccatcctttcgctcccatacgcgagataacccacctccattacccctcatggccggatttcggcgctcccgcaaaaccatcgcacctgttagctctagtagagctagccaatgtaatgcaaagggcagccctccctcttgacgcctcagccgttgccgcttctgctgccgcagagcatccggctactatgagttggtatgacgaaccggagtctgatgcagcagcgcgtcccatgctcgtccactgttctgccggttgcggtcgcaccggaacattttgcactgttgacagcgttattgatatgctgaagagacagcgacttgcatctatagcgaagaagcatcgtacagacacggaaggtgatgtgatcatggacgatggatcattatcgccggattccgaagggcgcaagaaagctagacacgctgagaacttcaccactcctccaggttcgatccgtggtgtcgaagccggctgggtcggcgacacagctctcgatcttgtgtccgcaacagttgaagatttcagaaagcaaagactcagcatggttcaaagccttcgacaattcgtcctttgttatgaaagcatcgttgagtgggtctcacggcttcaagaaagaaacaacagcaacacccccagaactaggcatcgtagtgggagtcttcaaggaccgcgatgatacacgcgtatttcgtgcatcagctagacatcaagcgaattttggtcagctctttgaaataaggcgaacgaaacgctggccaatatgtccaggatcagattgcattggcaaatatgtgagacggtcaggtgtacaaccggagaagccattctattctgctgttaagtattggccaacactttattttccatggaagcaggagttcaggcgaattcgggcgctcagggctttactcagatcaaagtagtggcgttttaaggcgttgcggcgcagaacaaggatcttatatgaatagacgaataacatggtatagggctgcacagaggctgttgtaaagcattatatactacacataccggaggcttaaggagcattttcggcgggttgccgggtatacataggatacaggaataaggaagtgaccttgtgaggttaattttccatctcgatgaaagagtaacaatgcctctcaataacgaaagtgttacaaaaatccaaaaccagaagtatcccactcatcatttgat

SEQ ID NO: 12836 - DNA, 1137 bp, Muscodor strobelii
  misc_feature: SGI cDNA ID NO. 564186
  misc_feature: Encodes the peptide sequence at SEQ ID NO 12837
atgtcgggtaattcaagcactcagggtcctccagctcaagacccgcagcggtcagatgagttcgaacaaacaaataaagacgctgcacagcgaagacaggctaagggaatgcttcattacatgtatgacacgccctgggtagatcagagatggatgcgcttcgaagaggggggatttaagaactttgttaagggagtgataatcagaggatatgaactatacccgaagtttgttaagagagagatactcagacgatatgaatcatacccgacatttcggtatgaaccagttccccatttcgaactgcgaacagacggagatggccgcatcccgctactaccactgctccatgatactgaacgttttgttgagttcaacaacagcgaagagctagctaaatcagcacaggagttactgaaaggattcccctcggacgctttcacacggccgcccccaatattcgaaatagtgcggggacaggcggaagttgattctatcgtggaatgcttgatgtatcctattcagaagcccaatcattggggtgcacataatgtgtatctgctggccaaggcgcccacccagcaaccgcccactgagatgcttttggcttgggacaagtatcttgagtttaggtcccacgaccgtcatgatagagaagctagagcacaatatctgaatctaatggaagctcaatgtcgggtttggcgattcaatagcttcaggatggagtttctaaagcgttgggacgcctgggtcgaagaacaaagcccagagatacagaagcagggcaagcgtgtcgttgtcagaggccgctacttccttgattcagcaattcattatgagatggtacacgacccatggcactacgttggtggagtcacccaatatgggacttctccgctccagcagtattgccggctgatggaggatgtcgcaaagcaggagtggaaaacgcagagacaaattgcagaagccttggtgcttcaaaatccgactgcgtttcctaaaatgtgggacgcgtctacctctatcatgtggccggagaccgtacacccttcagacattccgaatgacgacagtaaggaagcatgggatgcatataaagcagagttgcgcgcatccggccgtgatagatag

SEQ ID NO: 12837 - protein, 378 aa, Muscodor strobelii
  misc_feature: SGI Peptide ID NO. 564186
MSGNSSTQGPPAQDPQRSDEFEQTNKDAAQRRQAKGMLHYMYDTPWVDQRWMRFEEGGFKNFVKGVIIRGYELYPKFVKREILRRYESYPTFRYEPVPHFELRTDGDGRIPLLPLLHDTERFVEFNNSEELAKSAQELLKGFPSDAFTRPPPIFEIVRGQAEVDSIVECLMYPIQKPNHWGAHNVYLLAKAPTQQPPTEMLLAWDKYLEFRSHDRHDREARAQYLNLMEAQCRVWRFNSFRMEFLKRWDAWVEEQSPEIQKQGKRVVVRGRYFLDSAIHYEMVHDPWHYVGGVTQYGTSPLQQYCRLMEDVAKQEWKTQRQIAEALVLQNPTAFPKMWDASTSIMWPETVHPSDIPNDDSKEAWDAYKAELRASGRDR

SEQ ID NO: 12838 - DNA, 280 bp, Muscodor strobelii
  misc_feature: SGI EST ID NO. CUFF.30502.0
  misc_feature: Variant of the nucleotide sequence at SEQ ID NO 12836
gagatacagaagcagggcaagcgtgtcgttgtcagaggccgctacttccttgattcagcaattcattatgagatggtacacgacccatggcactacgttggtggagtcacccaatatgggacttctccgctccagcagtattgccggctgatggaggatgtcgcaaagcaggagtggaaaacgcagagacaaattgcagaagccttggtgcttcaaaatccgactgcgtttcctaaaatgtgggacgcgtctacctctatcatgtggccggagaccgtac

SEQ ID NO: 12839 - DNA, 381 bp, Muscodor strobelii
  misc_feature: SGI cDNA ID NO. 564187
  misc_feature: Encodes the peptide sequence at SEQ ID NO 12840
atgtctgtccaagtttccacagcccccggtgcccttgtggccctcggtcttggtgtaggcgacgttgccagcctcatcgcgctggggaaacgtgttgggaattggtggacagctcaaagcggagatcgagagttgttgagccttctagacgaagacgaaaacagtgttgttgctcgccgaggtctgttggatgtcatggcgttcaacgcaagatggcgcaaaagcattagccttctcgcgaatgggcgccccttgcgtcttgaccaaaaacaaatcggacaggtcctgcacgacactgagaaacttgtacagcacatgtcgttgttcacaggaaccatgcctattacatactgtcttgctatcaatgctaagaccaagtaa

SEQ ID NO: 12840 - protein, 126 aa, Muscodor strobelii
  misc_feature: SGI Peptide ID NO. 564187
MSVQVSTAPGALVALGLGVGDVASLIALGKRVGNWWTAQSGDRELLSLLDEDENSVVARRGLLDVMAFNARWRKSISLLANGRPLRLDQKQIGQVLHDTEKLVQHMSLFTGTMPITYCLAINAKTK

SEQ ID NO: 12841 - DNA, 3533 bp, Muscodor strobelii
  misc_feature: SGI EST ID NO. CUFF.30520.0
  misc_feature: Variant of the nucleotide sequence at SEQ ID NO 12839
cgggcgtagagaaagcagtgcactgcctgtttagcagtcgctcttattcgtcaggataacatcctagaacactaatctgcaagccacgccacgattgagtgggagttgtagactcactggaggcggggtattattgtgcatatcctgaatgcgtcagtcctcggtatacaagagcatacaattgacttgtatctgcctcagtgagaagaaaatggaatctacccactcatttttgtatcttgtgcacgcgcggccctaagcgtcgaaactaacgtttaattaaacataccatatcatattttccgggctatagtgtttgtctcgggtcctcaactgatatgtctgtccaagtttccacagcccccggtgcccttgtggccctcggtcttggtgtaggcgacgttgccagcctcatcgcgctggggaaacgtgttgggaattggtggacagctcaaagcggagatcgagagttgttgagccttctagacgaagacgaaaacagtgttgttgctcgccgaggtctgttggatgtcatggcgttcaacgcaagatggcgcaaaagcattagccttctcgcgaatgggcgccccttgcgtcttgaccaaaaacaaatcggacaggtcctgcacgacactgagaaacttgtacagcacatgtcgttgttcacaggaaccatggtctgtcttgtggccgtcctagaccagttcgccaataacgaaatcgttcacagcctattacatactgtcttgctatcaatgctaagaccaagtaatgagggagaagagataattcgctcgcaatacaagtctcgcatcaatgcatggagatcgacgtcctgcctccgcggcttaaatcttgctgctcaagaatgcagattaagattaatcgatcaacagagcatcctccctggccatgtcccgttttcagaatcgaaacatgtagaagaatttctggtgtggctgttgatgtcaaatgactctcgcttcacaacaagttcttccgatgtggcgggaatcgcagcgtgtttatgctctttgggaatggatataattgatgtccaagggcttggattcgcagaatcggccgaaggtaactgtgcggtaatatactctacaactcaatttctgcatggaaacctgtcaccggtgtggaagagtactgttatcatgagagatctatcaacgacggttccgcttgatcatccttgggaaagtatcagcgcgtttcccatcagtatggaagcccagaatagctgtcgagtggcgtggaaaaaaggcaaagaagtcgcacgtgctgtgaagatctgtattcaagggggcggggacgtaactgacgcaacgttcttctctctgcttagaagggaggtacaatatgcacttatcgatgtgggaagcgccgttgatagaagttcggctgagatctactcactcgcccaaaaatttggtcttgtgatgaatgcagagcttctggaaggactagagcaaagcatcgggcatatgcctacagaaaccctcacttggcttcaacttaccagcatagggaatgatgccattcgggaccgttcacagccctttggcgagcagatcatacattctcatatcagtgatcctgatatgaatgaccaaaacaggattgaggcattctgcatttttcagtcgttctttctgggtaactactatgaagtattccataggattgtcgacacatcaaccctaacgtgcaaagtcgtggagggatgctgggcatttcggtcttccgaactcttccagtgtgtggaggagcttatcaatacaacacacatgtccacggattctgtcggcaactcactggagacgagagcccacatgaagttgctttcgaggcaacatcttcttcagttgctacttaagttattcctaggagattccagcaacataccgaccgaacgaatgagcttcggaagtttcagcaatatgccgtcaaccgacggcgacgaaagatcaaggaaagggtgcattggtgtaataggaaagcgcactatcttgattaacagcctcttgggcaaatgttcctctcccagtgaaatcggtggtttcacgatccttgatgtcgacacaagtggaatacctcgcgatcatagtggtttcgtcagaccgggatcagctccgattatggcggaagtacagttgatcgaaagtataggggaggcagttcttgatatcaaggaggataaacctgatcaagatgtcgaatttggcatcgaagctgattgggattgcgaccctgatacagcgctggtgtgtgtgagatataaaggtcgtcgagtcgcaacccttttgccgtcagcaacagattacgagttctgcaaaggcttcgttccgccaatatcaaacgagggaaccgatggccgtcaaagaccaactctcaactacggcaagagcgttacgctagcagacatcatgaaaccctcagtgaaacttccgctcatgataaatgtcgacgcctcggtcatattccaagccctagactgtccgaagcttagatacactggcgttgccttatataccgggtcaagcttctgctcatgcaagatcgcgaccgattctgtggaagccgcgaaagaaaaggccgtatcgatagggagtgggaaaacgaccggcttgaaaaagccgacacttataattgccggacttacaattggttcgaagtttgatcatccagttgtcacgaaatggagtaattttgacttgtatgaagtcaacaagtaagtaaatctgaggaggacagacctcaaaaaggtttgcctaggataggatgtacgtctatagtcgtggttcacggaaagatttccaaattcgaaccgtaacatcttgaccaagcttgcgatccgcgaggccaagtacaggccgacccaaatctggctccaacatcgaggagctatcagtcagctcgatatcgaatctgcgcaacagaatagctacaaatgccatggtctcacgtttagcaatatgatgacctggacacatcgtcttgccgccaccaaaaggtcgccagctggggcccttggtaagcttatctgcacgaccttcgaatctttcaggacgaaaactaccaacgtccggtccaaacacctcttcgttgaagtgtaggagtcggtagggcacgaggatgcggttgcccttgcgtaaaaggcggccaccgatcacagtgtcctgagtgataattcgagcggaagccgagttcgaactcagtctgagcgtctcataccagatctgctcgagcttgggacaatgatcgtggatatactttacgtcgctgattgtttcgccttggaatgccggtgcggtttctgcgcggatctccgcgataagcgagggattgtgtaggacgtgatagagtagccaaaaagcggctttacgtgtatttgtactcacgctggcggttcagatcagcattgattatagggtaaagacgaagcatgatatcggccgagtaacttacacccaatacacagtcgccatgaaaagcgccatgttctgccgattaattcctag

SEQ ID NO: 12842 - DNA, 1053 bp, Muscodor strobelii
  misc_feature: SGI cDNA ID NO. 564188
  misc_feature: Encodes the peptide sequence at SEQ ID NO 12843
atgacccaaccagcggctggcaggaagggcacaattctcattacaggagctaatggcggtctcggatgcgctatcacatctgagatcttatcatcgccggaactcaggaggtaccatggcctttacgttgttcgcaacaagttgtcttcggcggcattagccaacacgctcaaatcagcaactgataactatacctatgacattgtacagcttgatctatcagtacttgacaatgttcgggatgttgcacgagatataaatgctcgggtcgcaagcagagctatccccccacttcgtgcacttatactggctactggctatatggacctgggtagtgcgtctatgacgtccgagggattcgagacggcgttcgtatcgaacttcttgggtcattggcttctgagtctcatgttgcttcaaagcattgacccaacggggggacggatagtcgtggtaagcagccacgcctacgatgtcaaacacgtcttacacaagcttgaccactactacgaggacgagaaatggcacatgtttttccatgatgccaacatagatgccgttgcatacggcacgtggagcaggaacgaagatgatccgcttccgcgtcgagctggagttagacgctacggtgtcgccaagatgtgcgctgtcatgatggtgggtgaacttcaacgtcgacttgatcaagatcctgctcttgcacatgtttcggttgttggtattgacccgggctgtatgggaaacactggtctctgccgacgtggaaactggtttacacgtaatgttatgttccccatccttgtgcctgcattaacacctctttccatgtggtataaccccaatggcatatttcgcactcctcaaaaatcaagcaaagacatcttagaggcagcatttggagccgatgattcggtgaaagggaggtatctaaacggatcagaacttcaagatgtggtgcccgaggccgcagactctgagaaaatattgatggtatggagggacagtgtgcgttatgctaaactgaccaacgctgatacatgccttgctttttga

SEQ ID NO: 12843 - protein, 350 aa, Muscodor strobelii
  misc_feature: SGI Peptide ID NO. 564188
  misc_feature (9)..(348): NCBI GI: 212528992 Blast Desc: short-chain dehydrogenase, [Penicillium marneffei ATCC 18224] gi|210074051|gb|EEA28138.1| short-chain dehydrogenase, [Penicillium marneffei ATCC 18224]
  misc_feature (9)..(348): NCBI GI: 242764805 Blast Desc: short-chain dehydrogenase, [Talaromyces stipitatus ATCC 10500] gi|218724042|gb|EED23459.1| short-chain dehydrogenase, [Talaromyces stipitatus ATCC 10500]
  misc_feature (9)..(348): NCBI GI: 39942728 Blast Desc: MGG_03444 [Magnaporthe grisea 70-15] gi|145010010|gb|EDJ94666.1| MGG_03444 [Magnaporthe grisea 70-15]
  misc_feature (9)..(349): NCBI GI: 242765007 Blast Desc: short-chain dehydrogenase, [Talaromyces stipitatus ATCC 10500] gi|218724083|gb|EED23500.1| short-chain dehydrogenase, [Talaromyces stipitatus ATCC 10500]
  misc_feature (9)..(349): NCBI GI: 212538423 Blast Desc: short-chain dehydrogenase, [Penicillium marneffei ATCC 18224] gi|210069109|gb|EEA23200.1| short-chain dehydrogenase, [Penicillium marneffei ATCC 18224]
  misc_feature (9)..(349): NCBI GI: 238840352 Blast Desc: conserved [Microsporum canis CBS 113480]
  misc_feature (9)..(348): NCBI GI: 46108216 Blast Desc: FG00990.1 [Gibberella zeae PH-1]
  misc_feature (27)..(348): NCBI GI: 154323033 Blast Desc: BC1G_00859 [Botryotinia fuckeliana B05.10] gi|150848193|gb|EDN23386.1| BC1G_00859 [Botryotinia fuckeliana B05.10]
  misc_feature (6)..(348): NCBI GI: 256735183 Blast Desc: NECHADRAFT_74766 [Nectria haematococca mpVI 77-13-4]
  misc_feature (10)..(349): NCBI GI: 238842886 Blast Desc: oxidoreductase [Microsporum canis CBS 113480]
  misc_feature (8)..(341): SWISSPROT Homolog: EC 1.3.1.33 Protochlorophyllide reductase
MTQPAAGRKGTILITGANGGLGCAITSEILSSPELRRYHGLYVVRNKLSSAALANTLKSATDNYTYDIVQLDLSVLDNVRDVARDINARVASRAIPPLRALILATGYMDLGSASMTSEGFETAFVSNFLGHWLLSLMLLQSIDPTGGRIVVVSSHAYDVKHVLHKLDHYYEDEKWHMFFHDANIDAVAYGTWSRNEDDPLPRRAGVRRYGVAKMCAVMMVGELQRRLDQDPALAHVSVVGIDPGCMGNTGLCRRGNWFTRNVMFPILVPALTPLSMWYNPNGIFRTPQKSSKDILEAAFGADDSVKGRYLNGSELQDVVPEAADSEKILMVWRDSVRYAKLTNADTCLAF

SEQ ID NO: 12844 - DNA, 1418 bp, Muscodor strobelii
  misc_feature: SGI EST ID NO. CUFF.30527.0
  misc_feature: Variant of the nucleotide sequence at SEQ ID NO 12842
ccaagctgaatgtatttggccccttgtcggcgctggtgttacccctgaaagcagttcatgcatcccttggtgtctctctccacgccgttatgccacataacaccctagcccctccgccgtttacttgggggctgaaatgcaatatactggcattttacccgttggggcgcttactaagtatagacgtatgtcgttaaaattaccagagccccctttcagtatagtttcttctatatcccatccgcttgcgatagaactcaataatcgcggtctcgaaccctgaccaatatgacccaaccagcggctggcaggaagggcacaattctcattacaggagctaatggcggtctcggatgcgctatcacatctgagatcttatcatcgccggaactcaggaggtaccatggcctttacgttgttcgcaacaagttgtcttcggcggcattagccaacacgctcaaatcagcaactgataactatacctatgacattgtacagcttgatctatcagtacttgacaatgttcgggatgttgcacgagatataaatgctcgggtcgcaagcagagctatccccccacttcgtgcacttatactggctactggctatatggacctgggtagtgcgtctatgacgtccgagggattcgagacggcgttcgtatcgaacttcttgggtcattggcttctgagtctcatgttgcttcaaagcattgacccaacggggggacggatagtcgtggtaagcagccacgcctacgatgtcaaacacgtcttacacaagcttgaccactactacgaggacgagaaatggcacatgtttttccatgatgccaacatagatgccgttgcatacggcacgtggagcaggaacgaagatgatccgcttccgcgtcgagctggagttagacgctacggtgtcgccaagatgtgcgctgtcatgatggtgggtgaacttcaacgtcgacttgatcaagatcctgctcttgcacatgtttcggttgttggtattgacccgggctgtatgggaaacactggtctctgccgacgtggaaactggtttacacgtaatgttatgttccccatccttgtgcctgcattaacacctctttccatgtggtataaccccaatggcatatttcgcactcctcaaaaatcaagcaaagacatcttagaggcagcatttggagccgatgattcggtgaaagggaggtatctaaacggatcagaacttcaagatgtggtgcccgaggccgcagactctgagaaaatattgatggtatggagggacagtgtgcgttatgctaaactgaccaacgctgatacatgccttgctttttgaaaatacttccataaactgcactagctatgaggaatacaaaacaacatacgataatgtcttgctctaatggtgttcga

SEQ ID NO: 12845 - DNA, 1203 bp, Muscodor strobelii
  misc_feature: SGI cDNA ID NO. 564189
  misc_feature: Encodes the peptide sequence at SEQ ID NO 12846
atggatccggcggttgacctttgtgctgtccctggctcaccgccgccaaataaccagacaataccaaatctcaccaatccagtgtcgctccaaaccacaacaatatccgtgtcggctgttttgcttgctttgacttttggatttgtggccggacgtatatggatcaacagacataagccaaagcgatcagattattgtaccataatcgccttggttatccactccaccagtgttggtgctgtgattgctctgagcaagttcaatagacaccaatgggacataccggcctgctggttcgacgcctcttacctgaagcttctctacgttcaggtgttaactttcggcatcacacttctgttctcgaaagcctccatattcctactataccttgaacttttcggcgttgatcgtcctctacgtttcgccatatacgtcgggctaaccttgaacaccttaatgtgcctgctatatttcccacttgctagctattacgacgcgccacctccgggaaagccgtgggaatatctcttcacacattctggtttccatgcgcttgtcccttggggaatcttcaccggaagcttcaatgttgctctggatatatatatctttattctgccactgcgtacgatctctggcttgaacctctcattctccaagcgccttcaactcttggctgttttcggcacagcgcttgtgggtgtaacggccagcgtggttgcgttggtatatcggataaagcttttacagaaccccacggacagcacatggaaccagggtcccgtctccatcgctagtgtggctgaagatagcatcgcgctcattgtcgcctcagcacctgcgtttgcacagtttctacgagtacatgtctcggggtcacgcatctgggttgggatccaatcgaatataagatatctgacccgtggcagtagaggctcgtccaactctcgttccattaggctaccagatctacctaccttcggctctccaaacgcgcctgatttacgtaggaataggaaggatccatatgatcttagggacacggctcttcttgagtccgccgcgaatatgcgcgatcctacaggcgatcatgagcctcgggcgagcagccagtctcaaccattaggaggaggcattatgaagactgtggacttgcatcaggaaacgcataagaagccggtttcaaccgagcatttagtataa

SEQ ID NO: 12846 - protein, 400 aa, Muscodor strobelii
  misc_feature: SGI Peptide ID NO. 564189
  misc_feature (3)..(400): NCBI GI: 242764820 Blast Desc: TSTA_068860 [Talaromyces stipitatus ATCC 10500] gi|218724045|gb|EED23462.1| TSTA_068860 [Talaromyces stipitatus ATCC 10500]
  misc_feature (5)..(370): NCBI GI: 212538419 Blast Desc: PMAA_097870 [Penicillium marneffei ATCC 18224] gi|210069107|gb|EEA23198.1| PMAA_097870 [Penicillium marneffei ATCC 18224]
  misc_feature (6)..(370): NCBI GI: 242764997 Blast Desc: conserved [Talaromyces stipitatus ATCC 10500] gi|218724081|gb|EED23498.1| conserved [Talaromyces stipitatus ATCC 10500]
  misc_feature (1)..(391): NCBI GI: 119481749 Blast Desc: NFIA_089630 [Neosartorya fischeri NRRL 181] gi|119409057|gb|EAW19006.1| conserved [Neosartorya fischeri NRRL 181]
  misc_feature (1)..(394): NCBI GI: 71002194 Blast Desc: AFUA_2G14450 [Aspergillus fumigatus Af293] gi|66853416|gb|EAL93740.1| AFUA_2G14450 [Aspergillus fumigatus Af293] gi|159129833|gb|EDP54947.1| AFUB_030070 [Aspergillus
  misc_feature (29)..(375): NCBI GI: 238845707 Blast Desc: conserved [Microsporum canis CBS 113480]
  misc_feature (6)..(370): NCBI GI: 242784837 Blast Desc: conserved [Talaromyces stipitatus ATCC 10500] gi|218720621|gb|EED20040.1| conserved [Talaromyces stipitatus ATCC 10500]
  misc_feature (12)..(308): NCBI GI: 154304111 Blast Desc: BC1G_09691 [Botryotinia fuckeliana B05.10] gi|150854326|gb|EDN29518.1| BC1G_09691 [Botryotinia fuckeliana B05.10]
  misc_feature (5)..(375): NCBI GI: 171678517 Blast Desc: protein product [Podospora anserina] gi|170937328|emb|CAP61986.1| protein product [Podospora anserina]
  misc_feature (6)..(341): NCBI GI: 238840889 Blast Desc: conserved [Microsporum canis CBS 113480]
MDPAVDLCAVPGSPPPNNQTIPNLTNPVSLQTTTISVSAVLLALTFGFVAGRIWINRHKPKRSDYCTIIALVIHSTSVGAVIALSKFNRHQWDIPACWFDASYLKLLYVQVLTFGITLLFSKASIFLLYLELFGVDRPLRFAIYVGLTLNTLMCLLYFPLASYYDAPPPGKPWEYLFTHSGFHALVPWGIFTGSFNVALDIYIFILPLRTISGLNLSFSKRLQLLAVFGTALVGVTASVVALVYRIKLLQNPTDSTWNQGPVSIASVAEDSIALIVASAPAFAQFLRVHVSGSRIWVGIQSNIRYLTRGSRGSSNSRSIRLPDLPTFGSPNAPDLRRNRKDPYDLRDTALLESAANMRDPTGDHEPRASSQSQPLGGGIMKTVDLHQETHKKPVSTEHLV

SEQ ID NO: 12847 - DNA, 1570 bp, Muscodor strobelii
  misc_feature: SGI EST ID NO. CUFF.30602.0
  misc_feature: Variant of the nucleotide sequence at SEQ ID NO 12845
gccggacgtatatggatcaacagacataagccaaagcgatcagattattgtaccataatcgccttggttatccactccaccagtgttggtgctgtgattgctctgagcaagttcaatagacaccaatgggacataccggcctgctggttcgacgcctcttacctgaagcttctctacgttcaggtgttaactttcggcatcacacttctgttctcgaaagcctccatattcctactataccttgaacttttcggcgttgatcgtcctctacgtttcgccatatacgtcgggctaaccttgaacaccttaatgtgcctgctatatttcccacttgctagctattacgacgcgccacctccgggaaagccgtgggaatatctcttcacacattctggtttccatgcgcttgtcccttggggaatcttcaccggaagcttcaatgttgctctggatatatatatctttattctgccactgcgtacgatctctggcttgaacctctcattctccaagcgccttcaactcttggctgttttcggcacagcgcttgtgtaagccgcctcatctgtgtgtctggtttctcatcatgttctaatgaattcaggggtgtaacggccagcgtggttgcgttggtatatcggataaagcttttacagaaccccacggacagcacatggaaccagggtcccgtctccatcgctaggtaagggcagacattcatccttgacgttcttttttcgggtactgatttttcgattacagtgtggctgaagatagcatcgcgctcattgtcgcctcagcacctgcgtttgcacagtttctacgagtacatgtctcggggtcacgcatctgggttgggatccaatcgaatataagatatctgacccgtggcagtagaggctcgtccaactctcgttccattaggctaccagatctacctaccttcggctctccaaacgcgcctgatttacgtaggaataggaaggatccatatgatcttagggacacggctcttcttgagtccgccgcgaatatgcgcgatcctacaggcgatcatgagcctcgggcgagcagccagtctcaaccattaggaggaggcattatgaagactgtggacttgcatcaggaaacgcataagaagccggtttcaaccgagcatttagtataatggagtagtacaatagttctatcacgaaggaaccataatggaacgtaacgtgctcaataaaccttctataaatggtaccttgtgaagcattttgcattgtattgctttgcactagcgtaaagcacttttccccttcttcactttgcatttttagtagctacgtcgcatagaattcgcccatatgcctgttttccgtgggtcgacctcgtacaacggttgcatcgaacgaaaacctcaataaccttggagtgacgcgcactaactgatagataccgacatactagtcccaaagatgtgattcacgtgcctctcgcttctgctcgctaccatgcccaacagtcttcagatcggataacatactatcagggaggtactggctggatgatgtgtgcggagttattc

SEQ ID NO: 12848 - DNA, 1323 bp, Muscodor strobelii
  misc_feature: SGI cDNA ID NO. 564190
  misc_feature: Encodes the peptide sequence at SEQ ID NO 12849
atgcccgaaaaaggggttgcggcttacattgcggacgactcgggtccctcatccaagccctttcctggtagtcaagtgcctccagccaaacgagttgactacctgctccacaaggcattcaatcaagcgtggacagggggccccctttcttcagcttctcgacgttttatgaacatattgagtactgaagtagactctcttagattatcaaacgagtggacgaaaacagacaacttcttcaagttcttcggaaaagtcgtgagcaattcagtgacggaaagcatttttggcccgtccctgctgcagctcaatccaagcatcatcgaagacgcatgggaatttgatgaggtgcttccctggttgtttagatgcataccatcgtttttgtaccctcatccccacaggttgaggaaaaggttatcgaagcagattcttcggtggtatgcgtacgcacgccagtggttcactgatgacagcatctattcggacggggacggagatccgttttggggctcaggaatcgtcaggcaacttcagcgagagttgttgaagagtggagacaaggggtttatcgacgatgagtgctttgcagctcatgatatggggttaatctggggttcaaattcgaacgttattgctgcagccatgttagcagcatgccatgtgttccaagacaaagctctattaaagcgtgtccggcgcgaagttgacacgaactttccccaaccattctcattggaggatttagatcacaagcaattgtttcagctaccacttctgtcatcgatatactcggagatcctgcggctttacgtggacgtcatgttggtcttcagctcgcctcacgttgatgttcctcttggaaggtggtgcttgccaaaaggcgaaaaggcattgatcagcacgtcgatcgcgcataaggacgacagtatctggaacacatatcacggacagcatccactggacagcttttgggctgaaagattcgtcgttgaccccgcagatccagacagcggaccactacgaccggaactcaaggtcaacgacaagagtaaggaaaaaggacagccgtattactctacccaaggactggatggagtatggattccttttggaggtggaccttcgatgtgtcctggcagattcttggctaagatgattgttatgtccacatgcgctttgcttgtcagtagatttgatattgaagttttagaagattcaattgaaacgtcgcctttgagatttggcctaggcgtgagcaaacctgcgaggcctataggagcgcgggtcagagccagacggcaacagcgtcctgccgaataa

SEQ ID NO: 12849 - protein, 440 aa, Muscodor strobelii
  misc_feature: SGI Peptide ID NO. 564190
  misc_feature (368)..(430): Pfam Id: PF00067 Pfam Desc: Cytochrome P450
  misc_feature (1)..(439): NCBI GI: 242764799 Blast Desc: conserved [Talaromyces stipitatus ATCC 10500] gi|218724041|gb|EED23458.1| conserved [Talaromyces stipitatus ATCC 10500]
  misc_feature (1)..(433): NCBI GI: 212528994 Blast Desc: Pfs, NACHT and Ankyrin domain protein [Penicillium marneffei ATCC 18224] gi|210074052|gb|EEA28139.1| Pfs, NACHT and Ankyrin domain protein [Penicillium marneffei ATCC 18224]
  misc_feature (1)..(433): NCBI GI: 189195766 Blast Desc: conserved [Pyrenophora tritici-repentis Pt-1C-BFP] gi|187980100|gb|EDU46726.1| conserved [Pyrenophora tritici-repentis Pt-1C-BFP]
  misc_feature (1)..(431): NCBI GI: 145246720 Blast Desc: An12g05400 [Aspergillus niger] gi|134080330|emb|CAK46252.1| protein product [Aspergillus niger]
  misc_feature (1)..(433): NCBI GI: 242813620 Blast Desc: conserved [Talaromyces stipitatus ATCC 10500] gi|218714542|gb|EED13965.1| conserved [Talaromyces stipitatus ATCC 10500]
  misc_feature (1)..(433): NCBI GI: 242813615 Blast Desc: conserved [Talaromyces stipitatus ATCC 10500] gi|218714541|gb|EED13964.1| conserved [Talaromyces stipitatus ATCC 10500]
  misc_feature (1)..(434): NCBI GI: 169785174 Blast Desc: [Aspergillus oryzae RIB40] gi|83775795|dbj|BAE65915.1| protein product [Aspergillus oryzae]
  misc_feature (1)..(373): NCBI GI: 238507576 Blast Desc: conserved [Aspergillus flavus NRRL3357] gi|220688508|gb|EED44860.1| conserved [Aspergillus flavus NRRL3357]
  misc_feature (2)..(436): NCBI GI: 256724156 Blast Desc: NECHADRAFT_51576 [Nectria haematococca mpVI 77-13-4]
  misc_feature (2)..(433): NCBI GI: 156062376 Blast Desc: SS1G_01304 [Sclerotinia sclerotiorum 1980] gi|154696640|gb|EDN96378.1| SS1G_01304 [Sclerotinia sclerotiorum 1980]
  misc_feature (17)..(426): SWISSPROT Homolog: EC 1.14.13.17 Cholesterol 7-alpha-monooxygenase
MPEKGVAAYIADDSGPSSKPFPGSQVPPAKRVDYLLHKAFNQAWTGGPLSSASRRFMNILSTEVDSLRLSNEWTKTDNFFKFFGKVVSNSVTESIFGPSLLQLNPSIIEDAWEFDEVLPWLFRCIPSFLYPHPHRLRKRLSKQILRWYAYARQWFTDDSIYSDGDGDPFWGSGIVRQLQRELLKSGDKGFIDDECFAAHDMGLIWGSNSNVIAAAMLAACHVFQDKALLKRVRREVDTNFPQPFSLEDLDHKQLFQLPLLSSIYSEILRLYVDVMLVFSSPHVDVPLGRWCLPKGEKALISTSIAHKDDSIWNTYHGQHPLDSFWAERFVVDPADPDSGPLRPELKVNDKSKEKGQPYYSTQGLDGVWIPFGGGPSMCPGRFLAKMIVMSTCALLVSRFDIEVLEDSIETSPLRFGLGVSKPARPIGARVRARRQQRPAE

SEQ ID NO: 12850 - DNA, 560 bp, Muscodor strobelii
  misc_feature: SGI EST ID NO. CUFF.30541.0
  misc_feature: Variant of the nucleotide sequence at SEQ ID NO 12848
cgtcgatcgcgcataaggacgacagtatctggaacacatatcacggacagcatccactggacagcttttgggctgaaagattcgtcgttgaccccgcagatccagacagcggaccactacgaccggaactcaaggtcaacgacaagagtaaggaaaaaggacagccgtattactctacccaaggactggatggagtatggattccttttggagaagcccatggctaacccttaaacaggtggaccttcgatgtgtcctggcagattcttggctaagatgattgttatgtccacatgcgctttgcttgtcagtagatttgatattgaagttttagaagattcaattgaaacgtcgcctttgagatttggcctaggcgtgagcaaacctgcgaggcctataggagcgcgggtcagagccagacggcaacagcgtcctgccgaataagagaaaagggggtaaagaatagttaaaaaatcaaattggctagatatatacatagagtttgcagattcatagtgtttagtccttatctaaaatgcctacgaaatgcttcagtatcc

SEQ ID NO: 12851 - DNA, 2790 bp, Muscodor strobelii
  misc_feature: SGI cDNA ID NO. 564191
  misc_feature: Encodes the peptide sequence at SEQ ID NO 12852
atggaacccatatattgtgcagcaccctcgccgtcagaccccgacgacatagtatatccggggtccgacgaggagctaagccggtatgaaaaggtcaaaaaacgcttacgctatgaacagcaaggctgccgctacctggatggcaagccactgaaaatcctatctgcctcgttgcgcggtcccttcgataaagcctccggctggcagaatccatggctacctaaacagcactctcaacccaccgaatctagctccgcggtccaagacaagatcggctgtctagaagagtcctcatcgtctagcgaggacgaaaccatatcagactcggacgactcgatggactgccaagtaccgagccccgatagacatgatgatctggaaattccccctaatccggcgagctcggaaaggcgggttcatattgaagcatgggcagaagacattcgtcagagcagtctagagaaagacgaattctgggcaccaaagcaaagtgtctcgaatcgaaacccgtcccctaccaaacgtccagcccagctggactggcttaaaaccagatttgcgaagaagacgaagacgtcatctccgagcacaggcgcagtttcaacgcctacgcctacattacctccccttccccggcaacgaagaccaatgaaagaaagtgtcctcacaaggctgccatcaagtaggagctttgagttgacgaccccgtcgtctagtaacgatgaaggtcgtaactcgcctcagaagaatgcagctgaggacgacgaagcagattgcccaggatcccacgcacagctccagggagagcaacatgcaattggcgactcaatcaaagcagagatggaatttcaaagctatgcggatgatagcttttgctaccgagctcggcagccaagagaaaacacgcccccgatcatatccagcacagacgatgcccggcacctaacgcagacagagactcccgtatccggtcacttggaggatgcggtcatgtcctcacctcattcggacgctggaaggtcagataaaggagaaaccagagtgatatctgatgaggatcaaggatcaggcagggtaatgccgatggtatcatcgttgtccacaagtgtcaaccccctgagcatggaacccgatgctcttgaagctcataagggggataccgcctgtgaactctcggaaaacaatgccttattgcagcaaccagttcaaactacggacacttccgactctcttgcccatttcgacgccgtatcggctttgggatcactccctgcaggtgaagacatattagaggatcccgaaattgaagctcgggctcacctacccgtgccacaaactgtatttgaagttaaatataatatgaactcggatcaaattatcccggccgaactcatgccagtgcccatgacgacaccactcattgatgacgagtcaaccctaataggggacgccatggaagaggaggagcttgactcaaaatgcgacaaggatatcgtgaagaggattgaggatggcagttcatcaccattatcttccctggcagaatttgacagtccgtctgcggaactcgaatatgctacttgggagagtggaagcagtcctgaaacgaatgcatctcaatgcgattcgcagggtaaaggaaacacggatatatcgatcgatcatattgcgagacgtaacggatcagccgagcagcaaagcgataaagaaagcggtgatatgattctccagaacactgatttttctatgataccaagagctcaatcaccagcgtcgccagagccatcgccagccatccggccatctcagcaaagcccctggacccaggaggctgtcagattccccacgctcctcatgaccgaagccaatgtttctgcgcaagaaaatgaggtctcgcagacctcatccgcaggaatttctcaccagttggttttggggaaccaaatatcgccacccattcaccatgcgataccggctctctcgcctgcggaacatctgtttattaactccgttctctctggagagcaggctactgcgggaacaacgcgtgactctctccccactcccgttattcagaacgcccggcagactacccccgaagcagagattacgattaaatccttcgcacacttcaatttcccctcgcctcagcagacgtatgtttgccccagcgcttctacttctcgtagcattttagccagcggcaaacgctccagcattcagggaagcgcgaggtcgaacagacgcgtctcctttgcacctctgccggatgaagaaggagcggagagtggcaatcagctgatagagaagccgcttcgagcttgctctcctccaccgttggaggcggtcgatcttgacgccgaggatattgatggtaggtatctcaaccactttgacaccatgaatcgtcgcctgaagggggaagcgcctgcgcctcaactcggtttccaacaacgccttcttcctttctcgcaggatctacctcaaagcccctctatcggcgcgtatgcggaagccttccaagaagccgatgcactacaacccgatgaccggaacgaggaacatgagagcagagaagccgacgcgaaacagccacaatccccatggcaacaccaaagccaggaagttgatgccgtcgctgaagtaatgggaaatctcgatcagttcttagatgtctggacagtggatggagaaatcgataaacaccgggcacaacttgatgatgggccagcggtaaataatcgatttgatacagatgtggacttgctaaacgaatctgggatatggtag

SEQ ID NO: 12852 - protein, 929 aa, Muscodor strobelii
  misc_feature: SGI Peptide ID NO. 564191
  misc_feature (4)..(192): NCBI GI: 256730515 Blast Desc: NECHADRAFT_29772 [Nectria haematococca mpVI 77-13-4]
  misc_feature (2)..(192): NCBI GI: 261357215 Blast Desc: [Verticillium albo-atrum VaMs.102]
  misc_feature (4)..(203): NCBI GI: 46109528 Blast Desc: FG01646.1 [Gibberella zeae PH-1]
  misc_feature (2)..(75): NCBI GI: 116200139 Blast Desc: CHGG_08225 [Chaetomium globosum CBS 148.51] gi|88179504|gb|EAQ86972.1| CHGG_08225 [Chaetomium globosum CBS 148.51]
  misc_feature (2)..(158): NCBI GI: 85081958 Blast Desc: NCU03544 [Neurospora crassa OR74A] gi|18376055|emb|CAD21061.1| [Neurospora crassa] gi|28917901|gb|EAA27587.1| [Neurospora crassa OR74A]
  misc_feature (4)..(72): NCBI GI: 171690084 Blast Desc: protein product [Podospora anserina] gi|170944997|emb|CAP71108.1| protein product [Podospora anserina]
  misc_feature (601)..(896): NCBI GI: 256730515 Blast Desc: NECHADRAFT_29772 [Nectria haematococca mpVI 77-13-4]
  misc_feature (13)..(113): NCBI GI: 242819079 Blast Desc: conserved [Talaromyces stipitatus ATCC 10500] gi|218713706|gb|EED13130.1| conserved [Talaromyces stipitatus ATCC 10500]
  misc_feature (4)..(80): NCBI GI: 115388309 Blast Desc: [Aspergillus terreus NIH2624] gi|114195744|gb|EAU37444.1| [Aspergillus terreus NIH2624]
  misc_feature (10)..(83): NCBI GI: 212530306 Blast Desc: conserved [Penicillium marneffei ATCC 18224] gi|210074708|gb|EEA28795.1| conserved [Penicillium marneffei ATCC 18224]
MEPIYCAAPSPSDPDDIVYPGSDEELSRYEKVKKRLRYEQQGCRYLDGKPLKILSASLRGPFDKASGWQNPWLPKQHSQPTESSSAVQDKIGCLEESSSSSEDETISDSDDSMDCQVPSPDRHDDLEIPPNPASSERRVHIEAWAEDIRQSSLEKDEFWAPKQSVSNRNPSPTKRPAQLDWLKTRFAKKTKTSSPSTGAVSTPTPTLPPLPRQRRPMKESVLTRLPSSRSFELTTPSSSNDEGRNSPQKNAAEDDEADCPGSHAQLQGEQHAIGDSIKAEMEFQSYADDSFCYRARQPRENTPPIISSTDDARHLTQTETPVSGHLEDAVMSSPHSDAGRSDKGETRVISDEDQGSGRVMPMVSSLSTSVNPLSMEPDALEAHKGDTACELSENNALLQQPVQTTDTSDSLAHFDAVSALGSLPAGEDILEDPEIEARAHLPVPQTVFEVKYNMNSDQIIPAELMPVPMTTPLIDDESTLIGDAMEEEELDSKCDKDIVKRIEDGSSSPLSSLAEFDSPSAELEYATWESGSSPETNASQCDSQGKGNTDISIDHIARRNGSAEQQSDKESGDMILQNTDFSMIPRAQSPASPEPSPAIRPSQQSPWTQEAVRFPTLLMTEANVSAQENEVSQTSSAGISHQLVLGNQISPPIHHAIPALSPAEHLFINSVLSGEQATAGTTRDSLPTPVIQNARQTTPEAEITIKSFAHFNFPSPQQTYVCPSASTSRSILASGKRSSIQGSARSNRRVSFAPLPDEEGAESGNQLIEKPLRACSPPPLEAVDLDAEDIDGRYLNHFDTMNRRLKGEAPAPQLGFQQRLLPFSQDLPQSPSIGAYAEAFQEADALQPDDRNEEHESREADAKQPQSPWQHQSQEVDAVAEVMGNLDQFLDVWTVDGEIDKHRAQLDDGPAVNNRFDTDVDLLNESGIW

SEQ ID NO: 12853 - DNA, 3388 bp, Muscodor strobelii
  misc_feature: SGI EST ID NO. CUFF.30544.0
  misc_feature: Variant of the nucleotide sequence at SEQ ID NO 12851
cgcgtctgtcccttctctctttgcgcaggaatgtgcctgtaaatggcttttcagaagtgacagtggagcccatccaaccccaacccagcagactcctgcctgctcttcacatggaattattgcatgttggttccaagtaaaggtcgattatgtagtgaaatctccctgaacctaccttggtccgtactccgtaccttttcccttcacactcactgtcttgcccgccgcccatggccgctccccaccattcttgattgcgccaggcgtcccttgtacgcctacattacttgtctcttatttcccagacactacgcaaagccatctgcatcgatccggtccttggcgccgtgttcagactccttctgcagccatgcaatatggatgacgccgcgatcgatgacgccctgtggaggcgacacaaattcggcatggaacccatatattgtgcagcaccctcgccgtcagaccccgacgacatagtatatccggggtccgacgaggagctaagccggtatgaaaaggtcaaaaaacgcttacgctatgaacagcaaggctgccgctacctggatggcaagccactgaaaatcctatctgcctcgttgcgcggtcccttcgataaagcctccggctggcagaatccatggctacctaaacagcactctcaacccaccgaatctagctccgcggtccaagacaagatcggctgtctagaagagtcctcatcgtctagcgaggacgaaaccatatcagactcggacgactcgatggactgccaagtaccgagccccgatagacatgatgatctggaaattccccctaatccggcgagctcggaaaggcgggttcatattgaagcatgggcagaagacattcgtcagagcagtctagagaaagacgaattctgggcaccaaagcaaagtgtctcgaatcgaaacccgtcccctaccaaacgtccagcccagctggactggcttaaaaccagatttgcgaagaagacgaagacgtcatctccgagcacaggcgcagtttcaacgcctacgcctacattacctccccttccccggcaacgaagaccaatgaaagaaagtgtcctcacaaggctgccatcaagtaggagctttgagttgacgaccccgtcgtctagtaacgatgaaggtcgtaactcgcctcagaagaatgcagctgaggacgacgaagcagattgcccaggatcccacgcacagctccagggagagcaacatgcaattggcgactcaatcaaagcagagatggaatttcaaagctatgcggatgatagcttttgctaccgagctcggcagccaagagaaaacacgcccccgatcatatccagcacagacgatgcccggcacctaacgcagacagagactcccgtatccggtcacttggaggatgcggtcatgtcctcacctcattcggacgctggaaggtcagataaaggagaaaccagagtgatatctgatgaggatcaaggatcaggcagggtaatgccgatggtatcatcgttgtccacaagtgtcaaccccctgagcatggaacccgatgctcttgaagctcataagggggataccgcctgtgaactctcggaaaacaatgccttattgcagcaaccagttcaaactacggacacttccgactctcttgcccatttcgacgccgtatcggctttgggatcactccctgcaggtgaagacatattagaggatcccgaaattgaagctcgggctcacctacccgtgccacaaactgtatttgaagttaaatataatatgaactcggatcaaattatcccggccgaactcatgccagtgcccatgacgacaccactcattgatgacgagtcaaccctaataggggacgccatggaagaggaggagcttgactcaaaatgcgacaaggatatcgtgaagaggattgaggatggcagttcatcaccattatcttccctggcagaatttgacagtccgtctgcggaactcgaatatgctacttgggagagtggaagcagtcctgaaacgaatgcatctcaatgcgattcgcagggtaaaggaaacacggatatatcgatcgatcatattgcgagacgtaacggatcagccgagcagcaaagcgataaagaaagcggtgatatgattctccagaacactgatttttctatgataccaagagctcaatcaccagcgtcgccagagccatcgccagccatccggccatctcagcaaagcccctggacccaggaggctgtcagattccccacgctcctcatgaccgaagccaatgtttctgcgcaagaaaatgaggtctcgcagacctcatccgcaggaatttctcaccagttggttttggggaaccaaatatcgccacccattcaccatgcgataccggctctctcgcctgcggaacatctgtttattaactccgttctctctggagagcaggctactgcgggaacaacgcgtgactctctccccactcccgttattcagaacgcccggcagactacccccgaagcagagattacgattaaatccttcgcacacttcaatttcccctcgcctcagcagacgtatgtttgccccagcgcttctacttctcgtagcattttagccagcggcaaacgctccagcattcagggaagcgcgaggtcgaacagacgcgtctcctttgcacctctgccggatgaagaaggagcggagagtggcaatcagctgatagagaagccgcttcgagcttgctctcctccaccgttggaggcggtcgatcttgacgccgaggatattgatggtaggtatctcaaccactttgacaccatgaatcgtcgcctgaagggggaagcgcctgcgcctcaactcggtttccaacaacgccttcttcctttctcgcaggatctacctcaaagcccctctatcggcgcgtatgcggaagccttccaagaagccgatgcactacaacccgatgaccggaacgaggaacatgagagcagagaagccgacgcgaaacagccacaatccccatggcaacaccaaagccaggaagttgatgccgtcgctgaagtaatgggaaatctcgatcagttcttagatgtctggacagtggatggagaaatcgataaacaccgggcacaacttgatgatgggccagcggtaaataatcgatttgatacagatgtggacttgctaaacgaatctgggatatggtagatgggtggtgtttcaggagcatttgatacccgtgctgaattagctttgcattttcatggagtttttgaacctggtctatattgactgggggtagatgagaatatgcttatacatgaatgatattataagagactgatgttattgagctaaaatgaatgagaatgttggca

SEQ ID NO: 12854 - DNA, 5295 bp, Muscodor strobelii
  misc_feature: SGI cDNA ID NO. 564192
  misc_feature: Encodes the peptide sequence at SEQ ID NO 12855
atggcccacgcgtggctcgattccctctcggaggattgggtgtcgcaacccagatccgagaactcccaactcagcttacaagcagattcaccgcacacctcacataaagcactgccgccgcggctcagccccaatattccaccacattctaagaacatacctcttcggtcgagtcggataccgcgcttcaaccctgcagctcctggagagaggcgacaccagcaacagcagcttgttctctccagtagccccaacgcgcttagcgagcggagtgcaaatgaaatcaacatcaagagctctcgtccccttggcccctcgaaactctcggaagaattcaaacccaaccgctcaggacgccccttgagccggtctgtgtcagcatcatccgccgccggctcggtcgtacacaactcggttataatacagagcaagtcgcagagcgcatcgccccccaagggcagaggaagcataccggaatggaagaagagactggtcttgggcgaactggactatggcgaatccaaagatttgttcacctccgcagggacaggactcgaaaacatcttccggccaccgctaccgcccgatgaccctcccgacgctgaagaccatgatgccgaagaagagcaagagagcgctcacaacgagacaacattaccctcgagccctcccctttactcgcgataccgcgagcctagcgtagaagaaagcgacgaagccagtggccctgatgagggtactcaagatcaacccgagcttcccaaaaaggcgaaatttaggcgggtagaaaatggcggcatccgaggatctagtgaactgggcactgtagccgaagaggaggagtcaatggcagaagaggagtcgcagttcctcgaagccgccggaagctccatcatgtcgcttcggaaagtgcagcaaaaggaggattcgcggaaaacgagcggccagagtatgataaaaaatgaggatttcagtcctatccttatcggccgtcataccttggatggcaaagttgcctttgcacctatggaattgcctgcgcatcagcttcggaagaagctcgagaatctccgcagacaccaaatgatattggaccccaacccggccagtgatggctccggcgcggcgcccgttattgatgggactgacaattttgaaaatactgaagactatgccaaaaatggagggttcctcaacgtgagacgaggaggatactcagcagagggctcatttcgccatcggccattgagccccccgatcagcacagatatatcagagctacacccagagtcatcgcttcaggcaagcacacccaagcaattcgcgaccattagaaccgaacggttcgcctcagcaggaaaccgagatagactagcatcaccacccagtcccagcttgcccccagcgcctcatcctagccctgagaagcgccgtctgcctactaatgttcatggagcaagccctttgaagttatttggtggcaagaaaccaaatcaactcagttatggccacaacgaggtctttggggcaatcaacagtttcggggctggcaaattggacaactatgagtttgattcggacatgtccttaagctctgccgccgcctcacgtgcagaagagaaagagaatgtaaccccagcacagattcgagttccttcgggccagtccctaaaattcgaaatacatgaagatgtatcagccgagggagggtcaattgttgtgcgacggaacagagggaagtcgaaccgttcggtctcatctggacaatacctgcgggggtccaagtcattagatggcttgcacactcagcctttccatgccatggatggacctcaatctgtaccaagtgcaagatccacaagagatagccatgaagcgaagcggccccggacatcgccgtcgaaagatcctacgccaaaaaggcgcaggacactccataaatccgatgttgcctacggtcttgagcacaaccatattttgatggaaactgtacagtcatcgcattacactatgcagacagccatttcaaaggagcatagtcacgtccaccatgctgagctgaatttgttcccaaatgcaaatggcttctcggccagtccaacaccacatactaagcctcaatcttctccccagaatgatagagcacccttggccgagcttgacatctccgcccgagcgaagatcgagacgggtgcccaaccgcaggtggttgacggttcccgtaagtcctcgatgaagacacaggacttttacgatgctgccgaagagatcatggcaatgatcagaaataaagcacggcctaaatcggcattatcgagtgtggaagaatcagaattagaaagcacagctcgcccaactgatggagagcccagtattacggaagactcctttcaggaatcaacgaaggatgcattcttaaggcctcctagtcgagatggacgccctctaccgaagatgccaacgagacaggaggatccagatctggtggaccagctcaagaaatacgaagaacacagcgatgtggatgataatttggccgaatctatacgatccatgcgtctcaacagaaggcttgaagaacctcacactattggccgtcagcctgaagaagatgatttgacgggtcctccgacgatgaattcccaggtcgagagcgatattatcagcgacatcgcaaatgtaaaaatttctcgcaatcctgatattcgagaacctaaggacaggggacccgatgttgcatcacacaacagccgttcgtctgggacgtcgactgcgcgctcgataccaagcggttcatcccaaaggtctgattcgaggcgtctcatagcaccagatgtggtgtcgcagctcatcggtactcaggtcggcaacatggtgtttgacgaagacaaaaaaatgtggcaaaaggtaagagcaccaaggccgaaggcaaattttcttccctcggaagatagcgaagacgacccgtttgccagtattccagacttaacagtaaacatgtccgtggagaagaagaacttggatcaagccatgggcttaaatcgagaaagtctattatcgttcttggagggggatgagtcgcagatgaacagaattgcggaaatgactgcatcgacgcgagaccctgatgccgattccgacatcgaggagcatcccctcgaaactcccgtagaagaagacaaagagatcgagcaagaaatgagcctgcacgaagatcgaatacaaaaagcgaccccatcgcgtcgcagaaacctgacaatccagttctcttctccgattgcatccattatccaggatgtcgctcacaaggattcaaacaataccagccaagaaagcgagccaagccatgaacatccagtgcgtcatccaacagctgactccctcagaagagggcgccatattcgagtcgagaggtcggtgagcgctgctgcagcgaaatcaaaatctcgaagcaggtctcgggggcttccacgaagtctgtctgctgaaccacagcctttcataccacggccagtttcgcgaattgatgagcaagatgaggattccatcgctgatcgcgctgaatgcaccgatctaagtccagccggtctgcacgcagagagtgcaattgtacaaatacaggaagaacccgtagaaggtgcagacttgagtgtcgccataaagacaccggcacgaaatggagcagcagatgtgttggcaacacccataattcaccagaacgtcggcaatttatcccttacgcccttgtctgagttcactatccaccaagcagataaatcatgcgccttggaagtcagctacatagtgggcaacaaatacgttgtgactggcgatgggtcgaagaaggtcatgtctaaggcagtacgggacctagttgagaagatcacggaagtcgagccctacgagccagagtgggaatcaatgcgcgaactcaacatcagcgacaaacatttggattcactccatatgctcgaccagttctgcactcaagttgtcacactggacgtttccaacaattcaatctctcacctggacggcgttccccagtgtgtacgcaatttgcagatgacaaacaaccttctttccgagctgactgcttggcgacacctgatgaaccttcaatatgtggatgtctccaacaaccagatcaagagcttgcacgctttgaaagaccttgtccatctccgaagccttcgcgcagacaacaaccaaatcaccagtctagatggtatcaagttccacgacagcttggaggtccttagagttaggaacaatcttataacctctgttgatctcgatggcaccaagttacagcgactagtagagctggatctggagaacaaccagataagctcattcgagaactgcgaccagctcagttgcctcgcaaccctcaacttgcaaaacaatcgtttggaaagccttagcctcccaagaaacgtgtgtctaactggcttgcgacaactcaagatctcggacaatgagtggaaagccttcgatctgactgtgacacctgcattacgtcttctatatgctgatcgcaacagaattacgacgatcacaggattgcagtgttgtcgccgtcttgactctctgtcgctccgtgaacaaaaaggcgacgaggttctcgatacttcgttcctcaattatgcatgtgaggttcgaaagctattcttatccgggaacagaatcacaggcttcaatcccacaagagacttcctcaatttacagtatcttgagcttgcaaactgtggactacaatctctgatccctgagctgggacaaatgttgccgaatctacgggttctgaacataaacttcaatgcaatcgaaaatctcgatccattatgttgtattccccgactgaagcgcctcttcgccgcgggcaaccaactcactgagtccggcctcgttgcgaactctttagcccatctgccccatctcacacgcttagatttgcgagacaatggcatgacgctcggcttctaccctccgatacagacccatattccagatccagacgccaaacagccagattcctttacactccctgatgcggacgtgcatcgttatgagaagttcgcgaaacgcaaagatcttcgcacgagaatgcgaaaaaggatctacgacctggtgctcatcggcagattaccgcagttgaagatgttggatggtctccccaccatgtctgacattgggtcgaaacgggacgatgtctgggaggccttggtagagacaggcattgttgggtcagagcagaaagacgatgaagcctcggacgaaagctcgcgttag

SEQ ID NO: 12855 - protein, 1764 aa, Muscodor strobelii
  misc_feature: SGI Peptide ID NO. 564192
  misc_feature (1)..(1752): NCBI GI: 256730729 Blast Desc: NECHADRAFT_29779 [Nectria haematococca mpVI 77-13-4]
  misc_feature (1)..(1759): NCBI GI: 46109526 Blast Desc: FG01645.1 [Gibberella zeae PH-1]
  misc_feature (1)..(1764): NCBI GI: 116200137 Blast Desc: CHGG_08224 [Chaetomium globosum CBS 148.51] gi|88179503|gb|EAQ86971.1| CHGG_08224 [Chaetomium globosum CBS 148.51]
  misc_feature (1)..(1764): NCBI GI: 39968605 Blast Desc: MGG_02395 [Magnaporthe grisea 70-15] gi|145014009|gb|EDJ98650.1| MGG_02395 [Magnaporthe grisea 70-15]
  misc_feature (1)..(1749): NCBI GI: 85081963 Blast Desc: NCU03545 [Neurospora crassa OR74A] gi|18376054|emb|CAD21060.1| conserved [Neurospora crassa] gi|28917902|gb|EAA27588.1| NCU03545 [Neurospora crassa OR74A]
  misc_feature (699)..(1757): NCBI GI: 261357213 Blast Desc: conserved leucine-rich repeat protein [Verticillium albo-atrum VaMs.102]
  misc_feature (1)..(1754): NCBI GI: 154314068 Blast Desc: BC1G_04977 [Botryotinia fuckeliana B05.10] gi|150849123|gb|EDN24316.1| BC1G_04977 [Botryotinia fuckeliana B05.10]
  misc_feature (699)..(1749): NCBI GI: 171690014 Blast Desc: protein product [Podospora anserina] gi|170944962|emb|CAP71073.1| protein product [Podospora anserina]
  misc_feature (5)..(1749): NCBI GI: 119471417 Blast Desc: conserved leucine-rich repeat protein [Neosartorya fischeri NRRL 181] gi|119406317|gb|EAW16268.1| conserved leucine-rich repeat protein [Neosartorya fischeri NRRL 181]
  misc_feature (5)..(1749): NCBI GI: 115388307 Blast Desc: conserved [Aspergillus terreus NIH2624] gi|114195743|gb|EAU37443.1| conserved [Aspergillus terreus NIH2624]
MAHAWLDSLSEDWVSQPRSENSQLSLQADSPHTSHKALPPRLSPNIPPHSKNIPLRSSRIPRFNPAAPGERRHQQQQLVLSSSPNALSERSANEINIKSSRPLGPSKLSEEFKPNRSGRPLSRSVSASSAAGSVVHNSVIIQSKSQSASPPKGRGSIPEWKKRLVLGELDYGESKDLFTSAGTGLENIFRPPLPPDDPPDAEDHDAEEEQESAHNETTLPSSPPLYSRYREPSVEESDEASGPDEGTQDQPELPKKAKFRRVENGGIRGSSELGTVAEEEESMAEEESQFLEAAGSSIMSLRKVQQKEDSRKTSGQSMIKNEDFSPILIGRHTLDGKVAFAPMELPAHQLRKKLENLRRHQMILDPNPASDGSGAAPVIDGTDNFENTEDYAKNGGFLNVRRGGYSAEGSFRHRPLSPPISTDISELHPESSLQASTPKQFATIRTERFASAGNRDRLASPPSPSLPPAPHPSPEKRRLPTNVHGASPLKLFGGKKPNQLSYGHNEVFGAINSFGAGKLDNYEFDSDMSLSSAAASRAEEKENVTPAQIRVPSGQSLKFEIHEDVSAEGGSIVVRRNRGKSNRSVSSGQYLRGSKSLDGLHTQPFHAMDGPQSVPSARSTRDSHEAKRPRTSPSKDPTPKRRRTLHKSDVAYGLEHNHILMETVQSSHYTMQTAISKEHSHVHHAELNLFPNANGFSASPTPHTKPQSSPQNDRAPLAELDISARAKIETGAQPQVVDGSRKSSMKTQDFYDAAEEIMAMIRNKARPKSALSSVEESELESTARPTDGEPSITEDSFQESTKDAFLRPPSRDGRPLPKMPTRQEDPDLVDQLKKYEEHSDVDDNLAESIRSMRLNRRLEEPHTIGRQPEEDDLTGPPTMNSQVESDIISDIANVKISRNPDIREPKDRGPDVASHNSRSSGTSTARSIPSGSSQRSDSRRLIAPDVVSQLIGTQVGNMVFDEDKKMWQKVRAPRPKANFLPSEDSEDDPFASIPDLTVNMSVEKKNLDQAMGLNRESLLSFLEGDESQMNRIAEMTASTRDPDADSDIEEHPLETPVEEDKEIEQEMSLHEDRIQKATPSRRRNLTIQFSSPIASIIQDVAHKDSNNTSQESEPSHEHPVRHPTADSLRRGRHIRVERSVSAAAAKSKSRSRSRGLPRSLSAEPQPFIPRPVSRIDEQDEDSIADRAECTDLSPAGLHAESAIVQIQEEPVEGADLSVAIKTPARNGAADVLATPIIHQNVGNLSLTPLSEFTIHQADKSCALEVSYIVGNKYVVTGDGSKKVMSKAVRDLVEKITEVEPYEPEWESMRELNISDKHLDSLHMLDQFCTQVVTLDVSNNSISHLDGVPQCVRNLQMTNNLLSELTAWRHLMNLQYVDVSNNQIKSLHALKDLVHLRSLRADNNQITSLDGIKFHDSLEVLRVRNNLITSVDLDGTKLQRLVELDLENNQISSFENCDQLSCLATLNLQNNRLESLSLPRNVCLTGLRQLKISDNEWKAFDLTVTPALRLLYADRNRITTITGLQCCRRLDSLSLREQKGDEVLDTSFLNYACEVRKLFLSGNRITGFNPTRDFLNLQYLELANCGLQSLIPELGQMLPNLRVLNINFNAIENLDPLCCIPRLKRLFAAGNQLTESGLVANSLAHLPHLTRLDLRDNGMTLGFYPPIQTHIPDPDAKQPDSFTLPDADVHRYEKFAKRKDLRTRMRKRIYDLVLIGRLPQLKMLDGLPTMSDIGSKRDDVWEALVETGIVGSEQKDDEASDESSR

SEQ ID NO: 12856 - DNA, 2510 bp, Muscodor strobelii
  misc_feature: SGI EST ID NO. CUFF.30553.0
  misc_feature: Variant of the nucleotide sequence at SEQ ID NO 12854
agatcatggcaatgatcagaaataaagcacggcctaaatcggcattatcgagtgtggaagaatcagaattagaaagcacagctcgcccaactgatggagagcccagtattacggaagactcctttcaggaatcaacgaaggatgcattcttaaggcctcctagtcgagatggacgccctctaccgaagatgccaacgagacaggaggatccagatctggtggaccagctcaagaaatacgaagaacacagcgatgtggatgataatttggccgaatctatacgatccatgcgtctcaacagaaggcttgaagaacctcacactattggccgtcagcctgaagaagatgatttgacgggtcctccgacgatgaattcccaggtcgagagcgatattatcagcgacatcgcaaatgtaaaaatttctcgcaatcctgatattcgagaacctaaggacaggggacccgatgttgcatcacacaacagccgttcgtctgggacgtcgactgcgcgctcgataccaagcggttcatcccaaaggtctgattcgaggcgtctcatagcaccagatgtggtgtcgcagctcatcggtactcaggtcggcaacatggtgtttgacgaagacaaaaaaatgtggcaaaaggtaagagcaccaaggccgaaggcaaattttcttccctcggaagatagcgaagacgacccgtttgccagtattccagacttaacagtaaacatgtccgtggagaagaagaacttggatcaagccatgggcttaaatcgagaaagtctattatcgttcttggagggggatgagtcgcagatgaacagaattgcggaaatgactgcatcgacgcgagaccctgatgccgattccgacatcgaggagcatcccctcgaaactcccgtagaagaagacaaagagatcgagcaagaaatgagcctgcacgaagatcgaatacaaaaagcgaccccatcgcgtcgcagaaacctgacaatccagttctcttctccgattgcatccattatccaggatgtcgctcacaaggattcaaacaataccagccaagaaagcgagccaagccatgaacatccagtgcgtcatccaacagctgactccctcagaagagggcgccatattcgagtcgagaggtcggtgagcgctgctgcagcgaaatcaaaatctcgaagcaggtctcgggggcttccacgaagtctgtctgctgaaccacagcctttcataccacggccagtttcgcgaattgatgagcaagatgaggattccatcgctgatcgcgctgaatgcaccgatctaagtccagccggtctgcacgcagagagtgcaattgtacaaatacaggaagaacccgtagaaggtgcagacttgagtgtcgccataaagacaccggcacgaaatggagcagcagatgtgttggcaacacccataattcaccagaacgtcggcaatttatcccttacgcccttgtctgagttcactatccaccaagcagataaatcatgcgccttggaagtcagctacatagtgggcaacaaatacgttgtgactggcgatgggtcgaagaaggtcatgtctaaggcagtacgggacctagttgagaagatcacggaagtcgagccctacgagccagagtgggaatcaatgcgcgaactcaacatcagcgacaaacatttggattcactccatatgctcgaccagttctgcactcaagttgtcacactggacgtttccaacaattcaatctctcacctggacggcgttccccagtgtgtacgcaatttgcagatgacaaacaaccttctttccgagctgactgcttggcgacacctgatgaaccttcaatatgtggatgtctccaacaaccagatcaagagcttgcacgctttgaaagaccttgtccatctccgaagccttcgcgcagacaacaaccaaatcaccagtctagatggtatcaagttccacgacagcttggaggtccttagagttaggaacaatcttataacctctgttgatctcgatggcaccaagttacagcgactagtagagctggatctggagaacaaccagataagctcattcgagaactgcgaccagctcagttgcctcgcaaccctcaacttgcaaaacaatcgtttggaaagccttagcctcccaagaaacgtgtgtctaactggcttgcgacaactcaagatctcggacaatgagtggaaagccttcgatctgactgtgacacctgcattacgtcttctatatgctgatcgcaacagaattacgacgatcacaggattgcagtgttgtcgccgtcttgactctctgtcgctccgtgaacaaaaaggcgacgaggttctcgatacttcgttcctcaattatgcatgtgaggttcgaaagctattcttatccgggaacagaatcacaggcttcaatcccacaagagacttcctcaatttacagtatcttgagcttgcaaactgtggactacaatctctgatccctgag

SEQ ID NO: 12857 - DNA, 3720 bp, Muscodor strobelii
  misc_feature: SGI cDNA ID NO. 564193
  misc_feature: Reduced expression when VOC is produced
  misc_feature: Encodes the peptide sequence at SEQ ID NO 12858
atggattctcaatcccaatcccactcccaacctccaacacttccaccgtcgccacaacgcccgcaccagtttgctaccagtaacgctccctcgctgcctgccgtcccctccaggaccgccaacagcaccccgatatcctccccaggcctcttcagcccctccaatcctcgtccccatgtcttcccgccgcactccgcctccgaggcttccacgccggccgtagctgccgtcagtccctttctgcacccgctgcaaggcttcaaagtgcgagaaacgcacaaggcgcttgtagatcttgacttgatgacggggcgcaaggtgatcaaccagtacgaggtcttggaagagctgggtcgtggggtccatggcaaagtcaagctggcgaggagtttggaaactggtgaaagtgttgctatcaaaatcataccgcgattctccaagaagcgccgccttggcaagattcacgcctcgccccaggacaagacgaaacgagagattgccatcctgaagaagatccgccacccaaacgtcgtggctctgctcgagttcatcgacgatcccgagctgaagaagatctacatggtccttgagcacgttgagctgggcgaagtcatatggcgcaagaaaggcattcccagcatctgcaacatcgagaggcgaagggtcgagaaggagatgcacggcgagtctagcactgaggaggaagaacgctacctggccattctagagaggcgacagcagatcaacgagctgaagcgcgctaagatgatggaggcgcagagggggcccgaggacttctggagtatcgagtatggtgccgccaacgaggacgatgtcgagtctcaggcacggtcgtacggtagagacggagaccacacagcacagccatcgactgcccactcgtacacctcacggtcggcctccagggcaccctcgagggcagcctccatcacccgctcgagccgttctgtattgtcgcgttctcggtccaataccccctacgcctccgagtttgacctggcctccttggacgtcgacttggagagcgaaatcgaaacccctggtccgctgcgttctcagcccggatcggcggcggccttggaggggaccatgtacggtgcctacgtggaggacgccatgttccgtggtcgatcacctagtatggccgactccatcatctcgcacatgtcatctgtcgatttcaattcgcaaccacacgatccattttcagatgacttctcctatgtcccctgcttgaccctcgaagaggcccgcgccactttcacagataccgttcttggcttagagtacttgcactacgaaggcgtcgtgcatcgagatatcaagcccgccaatctcttatggacaaaggatcatagggtcaaaatctcggattttggtgtttcttatttcggccgtcccattcgcgaaggcgagcctgacgaccttgtctccgagtcagaggcacgggatttcgatgacgatttagaacttgctaaaaccgtcggcaccccggcattctttgcgccagagctgtgctacaccgactgtgacgaaaaacagcccagaatctccggccaaatcgacgtatggtccttgggtgtcactctgtactgtctcgtcttcgctcgtatacccttcatggccgaggacgaataccaaatgttcaagaagattgcaaaagaagatgtgtatatccctcgccgacgccttcgccctgcggaccctcaccatgaacccacgacaacttcgttatacaaatccgtcaatagtgcatcgtatcgggatgacaattcactagcctatgaagagattgacgacgatctatacgatcttcttcggaaaatgctcacaaaaaatccagacaagcgcatccgactgagagatgtgaagcgtcatcaatgggtcaatggcggcgcccctaccattggctgggtcgacgatactgacccatcacacatatttgatgggcgtagaattgaagttgatgagaatgatatcacgagtgccgtggtcccgctcacgtttctcgagagagcacgttcggctgtcaaaaaagcagtaggcaaggtgatacatccgagaacggaaaaatccgaaagtcgaaccagaaggcgagctacgagtagcgtggacggtgatcagcctccaagtgccacctctcttgcccgtagaaagagtctgcggcccgacgattatttcgcaaatgccagagaaagtgaccatcccttatcacagagcgtcagtgcaacacctgatgattctccgagagaagaagatgctgggttttctccccaagaaccaactcccgttggcacagaacacactcgcgacgctaattcttacctgactgccctgcttaggccagagcctacgctctcgctgccaacgagcactcataacaagccccaaggctatcaacggcacgagagagtccactccgctgtgccatccagcggcccatttctggcactaacccatgctcgagaatcatacacgacaccaggaagtcccagtgttgaaggtccaatagatgcaaccccattcccgttgccaaatctggccactgggatacaaccagaagacgagccaacccgctccaaatccgtcgatcgtgggttatttgccaacgaagacaaacgggccgagcccactgtcggcgtaagcaccgccatagccccaggcagtatagaactgcccagtcgccctttatctgtagaccccattcgtacctctggtgggcgactactctcctctccccttttctatgctcccaggttaggcaactcataccaacatgggcaaccaaattccgaccctagtatgcacgaaaagcattttgctcggaccagtcttcagcacaggcccacgacgtctcatcatcggccaagatcaccgcctagagtggacaatttcttgccattccataacttgaaagaccctttagagcgatcagtcggatttcgcgacaagcctgaaggggaaaagttccgtagtcgagagcagctcctgtctttccaaaggagagcttcggtgtcacactatcctaccttgcccagcaaagggtatgctctagaggatagaagccctccctctagagtcgataccgccgacactattgcaaccctcgcttccacatccactggagctgtcatgacacccttgactagtccaagtgaagtagcaagcccgctgagtgctggaaacatgcacagccagaacaactcgcagactttccattctgatccttcgctgcctgcattgctaagtggtgccagctctgtctctgctgatgcagaaggcgatttcctcttgatgcccggatcactggagcgtccttcatttattgacacgacggattcgctgactccaccagccctgaggaaagaacctctcgaggggttccctatgacttccgatgaacatgatcagcatagccaccatcggcatgattacgatcaatttcagactgttattcttgctggagccccgttgggagctagcacgtctgggaactcgcaacttaaaactgatgaagacgatgacggtagcgacagtgacgaaggactcacaatggccaagcccaagaacaagaaatggcctactcctagggaccttccgcgtgcatcttcgaccgaacgcatgatgcaccccagaagacgagacacacaaacaagcttcgggagcactgatactgccaagaaggtggcttatcattaa

SEQ ID NO: 12858 - protein, 1239 aa, Muscodor strobelii
  misc_feature: SGI Peptide ID NO. 564193
  misc_feature (111)..(636): Pfam Id: PF00069 Pfam Desc: Protein kinase domain
  misc_feature (418)..(636): Pfam Id: PF00069 Pfam Desc: Protein kinase domain
  misc_feature (111)..(203): Pfam Id: PF00069 Pfam Desc: Protein kinase domain
  misc_feature (111)..(202): Pfam Id: PF07714 Pfam Desc: Protein tyrosine kinase
  misc_feature (38)..(1239): NCBI GI: 261357227 Blast Desc: serine/threonine-protein kinase ssp1 [Verticillium albo-atrum VaMs.102]
  misc_feature (27)..(1236): NCBI GI: 256730513 Blast Desc: NECHADRAFT_30239 [Nectria haematococca mpVI 77-13-4]
  misc_feature (9)..(1198): NCBI GI: 116200101 Blast Desc: CHGG_08206 [Chaetomium globosum CBS 148.51] gi|88179485|gb|EAQ86953.1| CHGG_08206 [Chaetomium globosum CBS 148.51]
  misc_feature (15)..(1236): NCBI GI: 171690040 Blast Desc: protein product [Podospora anserina] gi|170944975|emb|CAP71086.1| protein product [Podospora anserina]
  misc_feature (30)..(1237): NCBI GI: 85081876 Blast Desc: NCU03523 [Neurospora crassa OR74A] gi|9368589|emb|CAB98249.1| related to protein kinase PAK1 [Neurospora crassa] gi|28917880|gb|EAA27566.1| conserved crassa
  misc_feature (35)..(1239): NCBI GI: 145605601 Blast Desc: MGG_07003 [Magnaporthe grisea 70-15] gi|145013416|gb|EDJ98057.1| MGG_07003 [Magnaporthe grisea 70-15]
  misc_feature (35)..(1237): NCBI GI: 156043857 Blast Desc: SS1G_10932 [Sclerotinia sclerotiorum 1980] gi|154695319|gb|EDN95057.1| SS1G_10932 [Sclerotinia sclerotiorum 1980]
  misc_feature (50)..(1237): NCBI GI: 154297741 Blast Desc: BC1G_12282 [Botryotinia fuckeliana B05.10] gi|150858411|gb|EDN33603.1| BC1G_12282 [Botryotinia fuckeliana B05.10]
  misc_feature (37)..(752): NCBI GI: 119496399 Blast Desc: serine/threonine protein kinase, [Neosartorya fischeri NRRL 181] gi|119413135|gb|EAW23076.1| serine/threonine protein kinase, [Neosartorya fischeri NRRL 181]
  misc_feature (37)..(752): NCBI GI: 159130915 Blast Desc: serine/threonine protein kinase, [Aspergillus fumigatus A1163]
  misc_feature: Useful for introducing or modulating the production of volatile compounds
MDSQSQSHSQPPTLPPSPQRPHQFATSNAPSLPAVPSRTANSTPISSPGLFSPSNPRPHVFPPHSASEASTPAVAAVSPFLHPLQGFKVRETHKALVDLDLMTGRKVINQYEVLEELGRGVHGKVKLARSLETGESVAIKIIPRFSKKRRLGKIHASPQDKTKREIAILKKIRHPNVVALLEFIDDPELKKIYMVLEHVELGEVIWRKKGIPSICNIERRRVEKEMHGESSTEEEERYLAILERRQQINELKRAKMMEAQRGPEDFWSIEYGAANEDDVESQARSYGRDGDHTAQPSTAHSYTSRSASRAPSRAASITRSSRSVLSRSRSNTPYASEFDLASLDVDLESEIETPGPLRSQPGSAAALEGTMYGAYVEDAMFRGRSPSMADSIISHMSSVDFNSQPHDPFSDDFSYVPCLTLEEARATFTDTVLGLEYLHYEGVVHRDIKPANLLWTKDHRVKISDFGVSYFGRPIREGEPDDLVSESEARDFDDDLELAKTVGTPAFFAPELCYTDCDEKQPRISGQIDVWSLGVTLYCLVFARIPFMAEDEYQMFKKIAKEDVYIPRRRLRPADPHHEPTTTSLYKSVNSASYRDDNSLAYEEIDDDLYDLLRKMLTKNPDKRIRLRDVKRHQWVNGGAPTIGWVDDTDPSHIFDGRRIEVDENDITSAVVPLTFLERARSAVKKAVGKVIHPRTEKSESRTRRRATSSVDGDQPPSATSLARRKSLRPDDYFANARESDHPLSQSVSATPDDSPREEDAGFSPQEPTPVGTEHTRDANSYLTALLRPEPTLSLPTSTHNKPQGYQRHERVHSAVPSSGPFLALTHARESYTTPGSPSVEGPIDATPFPLPNLATGIQPEDEPTRSKSVDRGLFANEDKRAEPTVGVSTAIAPGSIELPSRPLSVDPIRTSGGRLLSSPLFYAPRLGNSYQHGQPNSDPSMHEKHFARTSLQHRPTTSHHRPRSPPRVDNFLPFHNLKDPLERSVGFRDKPEGEKFRSREQLLSFQRRASVSHYPTLPSKGYALEDRSPPSRVDTADTIATLASTSTGAVMTPLTSPSEVASPLSAGNMHSQNNSQTFHSDPSLPALLSGASSVSADAEGDFLLMPGSLERPSFIDTTDSLTPPALRKEPLEGFPMTSDEHDQHSHHRHDYDQFQTVILAGAPLGASTSGNSQLKTDEDDDGSDSDEGLTMAKPKNKKWPTPRDLPRASSTERMMHPRRRDTQTSFGSTDTAKKVAYH

SEQ ID NO: 12859 - DNA, 5084 bp, Muscodor strobelii
  misc_feature: SGI EST ID NO. CUFF.31275.1
  misc_feature: Variant of the nucleotide sequence at SEQ ID NO 12857
gaggatggggccgagagggaggtacctggtcgaaagtacatggttgaaatgtgttgggtgtgaagtaggttaccaggtactgtgcggcgctcagtgctgcgaggccggtactggagcaggcaagaggagcgaaagacgacctgaggttcattcattgagcccgtggatccaacccatccagcccaccatgagcaacggaccatatcccccaaaccttccgccactattgccagtccacgccttacctcacatctctgtcgacgctatcactactggacgttttctgctctctgccatacctcatctacctcgatatcagcacctgtattgcgcgcgttattgcgacatccaaccgactctaccgatcttagcgactgtactctacttcctttattattcacgcttccataccgttccatcaccgctcgtctatccgcgcaacgaccccaccgacagacagccagagccggtcgacacaacaccccaacagacctgcctccgctagctgcctcggacggcgccgtctctcaaccgtccgactttgttttttgggtaacctgctctcgattcctctccgcaatggctgtctgagcctcgacgcgcatcgattgcggcgacatgcttcggccgcaccacagaatgacgactgccaccaccaccaacccgccgacctttgaacaaccaccactcccccatcgctaccaccaccaccaccaccactaccactaccatggattctcaatcccaatcccactcccaacctccaacacttccaccgtcgccacaacgcccgcaccagtttgctaccagtaacgctccctcgctgcctgccgtcccctccaggaccgccaacagcaccccgatatcctccccaggcctcttcagcccctccaatcctcgtccccatgtcttcccgccgcactccgcctccgaggcttccacgccggccgtagctgccgtcagtccctttctgcacccgctgcaaggcttcaaagtgcgagaaacgcacaaggcgcttgtagatcttgacttgatgacggggcgcaaggtgatcaaccagtacgaggtcttggaagagctgggtcgtggggtccatggcaaagtcaagctggcgaggagtttggaaactggtgaaagtgttgctatcaaaatcataccgcgattctccaagaagcgccgccttggcaagattcacgcctcgccccaggacaagacgaaacgagagattgccatcctgaagaagatccgccacccaaacgtcgtggctctgctcgagttcatcgacgatcccgagctgaagaagatctacatggtccttgagcacgttgagctgggcgaagtcatatggcgcaagaaaggcattcccagcatctgcaacatcgagaggcgaagggtcgagaaggagatgcacggcgagtctagcactgaggaggaagaacgctacctggccattctagagaggcgacagcagatcaacgagctgaagcgcgctaagatgatggaggcgcagagggggcccgaggacttctggagtatcgagtatggtgccgccaacgaggacgatgtcgagtctcaggcacggtcgtacggtagagacggagaccacacagcacagccatcgactgcccactcgtacacctcacggtcggcctccagggcaccctcgagggcagcctccatcacccgctcgagccgttctgtattgtcgcgttctcggtccaataccccctacgcctccgagtttgacctggcctccttggacgtcgacttggagagcgaaatcgaaacccctggtccgctgcgttctcagcccggatcggcggcggccttggaggggaccatgtacggtgcctacgtggaggacgccatgttccgtggtcgatcacctagtatggccgactccatcatctcgcacatgtcatctgtcgatttcaattcgcaaccacacgatccattttcagatgacttctcctatgtcccctgcttgaccctcgaagaggcccgcgccactttcacagataccgttcttggcttagagtacttgcactacgaaggcgtcgtgcatcgagatatcaagcccgccaatctcttatggacaaaggatcatagggtcaaaatctcggattttggtgtttcttatttcggccgtcccattcgcgaaggcgagcctgacgaccttgtctccgagtcagaggcacgggatttcgatgacgatttagaacttgctaaaaccgtcggcaccccggcattctttgcgccagagctgtgctacaccgactgtgacgaaaaacagcccagaatctccggccaaatcgacgtatggtccttgggtgtcactctgtactgtctcgtcttcgctcgtatacccttcatggccgaggacgaataccaaatgttcaagaagattgcaaaagaagatgtgtatatccctcgccgacgccttcgccctgcggaccctcaccatgaacccacgacaacttcgttatacaaatccgtcaatagtgcatcgtatcgggatgacaattcactagcctatgaagagattgacgacgatctatacgatcttcttcggaaaatgctcacaaaaaatccagacaagcgcatccgactgagagatgtgaagcgtcatcaatgggtcaatggcggcgcccctaccattggctgggtcgacgatactgacccatcacacatatttgatgggcgtagaattgaagttgatgagaatgatatcacgagtgccgtggtcccgctcacgtttctcgagagagcacgttcggctgtcaaaaaagcagtaggcaaggtgatacatccgagaacggaaaaatccgaaagtcgaaccagaaggcgagctacgagtagcgtggacggtgatcagcctccaagtgccacctctcttgcccgtagaaagagtctgcggcccgacgattatttcgcaaatgccagagaaagtgaccatcccttatcacagagcgtcagtgcaacacctgatgattctccgagagaagaagatgctgggttttctccccaagaaccaactcccgttggcacagaacacactcgcgacgctaattcttacctgactgccctgcttaggccagagcctacgctctcgctgccaacgagcactcataacaagccccaaggctatcaacggcacgagagagtccactccgctgtgccatccagcggcccatttctggcactaacccatgctcgagaatcatacacgacaccaggaagtcccagtgttgaaggtccaatagatgcaaccccattcccgttgccaaatctggccactgggatacaaccagaagacgagccaacccgctccaaatccgtcgatcgtgggttatttgccaacgaagacaaacgggccgagcccactgtcggcgtaagcaccgccatagccccaggcagtatagaactgcccagtcgccctttatctgtagaccccattcgtacctctggtgggcgactactctcctctccccttttctatgctcccaggttaggcaactcataccaacatgggcaaccaaattccgaccctagtatgcacgaaaagcattttgctcggaccagtcttcagcacaggcccacgacgtctcatcatcggccaagatcaccgcctagagtggacaatttcttgccattccataacttgaaagaccctttagagcgatcagtcggatttcgcgacaagcctgaaggggaaaagttccgtagtcgagagcagctcctgtctttccaaaggagagcttcggtgtcacactatcctaccttgcccagcaaagggtatgctctagaggatagaagccctccctctagagtcgataccgccgacactattgcaaccctcgcttccacatccactggagctgtcatgacacccttgactagtccaagtgaagtagcaagcccgctgagtgctggaaacatgcacagccagaacaactcgcagactttccattctgatccttcgctgcctgcattgctaagtggtgccagctctgtctctgctgatgcagaaggcgatttcctcttgatgcccggatcactggagcgtccttcatttattgacacgacggattcgctgactccaccagccctgaggaaagaacctctcgaggggttccctatgacttccgatgaacatgatcagcatagccaccatcggcatgattacgatcaatttcagactgttattcttgctggagccccgttgggagctagcacgtctgggaactcgcaacttaaaactgatgaagacgatgacggtagcgacagtgacgaaggactcacaatggccaagcccaagaacaagaaatggcctactcctagggaccttccgcgtgcatcttcgaccgaacgcatgatgcaccccagaagacgagacacacaaacaagcttcgggagcactgatactgccaagaaggtggcttatcattaatgcagaacacagtcagctgtttatcggagacggaacactgggatgatataacatgagaaatgcgacaagaaatggcagcaaacaaggtcactgcgtgaactaagatcatgcctggatatgaatcacgcttcccgaaaggaacgtatctcaatgaacacgacgagatatctttctatgagtcaatacacggtggatgacgggacttctctatttctcatatcatcttcctccgaagctgtaatcgacacatttcgaacattgaaggaatactgggactggagtttctcttttcctattgggaggcacgccactgtcatcggtggccatctgtctatgaacgatttactcgttcatctcgcattgaaggagcaaaaggctgcatttcgggtttcggacgggcggcaagcattttgtaaccaaatttattgtagtcgtggccatttgattacacggatagagaaccataatgttggagcgtgcgtgcatgctatcggagttattttattagagtattacctacctacctacctgccaacatacttattctcccagctcaatatcactgaattcgatatttttgtcctgcatgtgctgcgctttcgcgattgagattgagacgggatttgttgctggg

SEQ ID NO: 12860 - DNA, 1647 bp, Muscodor strobelii
  misc_feature: SGI cDNA ID NO. 564194
  misc_feature: Encodes the peptide sequence at SEQ ID NO 12861
atgtctgaagcaacagagaaacacagtgccaccgaaaactcgcaaacccgaaatccggacaaggaagatggcacttcaacgagtatgcatggcggcgagccagagacatacgctgctataatggcaacaaatgcacccgatcctcgcggccccggctacataaaattatatctcctagctttaaccatattcctgtgctccacgatgagcggttatgacagctctttgatgtcatcaatcaatgctctgcctaattacactgagtattttggactaccggagtctggcaatgcttccactggtatagtcttcgcgatctttcagattggtcaaattgcgggtgctctctttgtgttcttgattgattggtacggtagactatggcatatatggatcggatgtgttggcgtcattattgggactatcgttactggcacggcaacgaatttatcgacttttattggaggtagattcttactgtctttctttgctactctgactatcacggctgcgcccttgtatcttgtcgagatttccccggcggcctatagaggaacaattgccggaacctataacaccttctattacgttggatctatcttagcgacgtcttctgtgtatgcatggctgacgtttcttagtcatgagtacctagcagaccaaggtgatctcgactggcgcatacccatttggcttcaagcagtctgtcccggcatcgtcatcttccttgtcaagttcttcccggagtcacctcgatatctcattctcatcgataaacatgaggaagcccggcagatcattgtcaagtaccataccaatggcgaccctgatcatcctctggtggacttacagatgaaagagatgcttcatagtgtccaagggcttcccaaagcagcatggaaggatctttttgacttacgcgtgctcgtagagtcgaagtctagtcgatatagattgatgctcaacatggttttctcctggtttgctcaatttagcgggaacaatatcatatcgtactatctcccgattatgctcaatgcgatcggtgtcactgataccaataccaagctccaattaaatatagtttattctgtcattggttgggtcttctctactgctggcgctcgtttccatgatgtcgtcggccggcgtaaaatgctaatgggcagcacggctgctatgacgatctgcctttccctggtagcggctgggtcggccggcaagattgagtataacaatgatgccgcagcgactttggcaattgtttttatctttgcttttggcgctgtgttttctgcaggctacactcctatgcagccagtctaccctgcggaagttgtgtcaaatcgaatgcgagcgaaggctatggggacatacaagattacggccggggctgctggtttcttgaatacatttgttgggcctattgccttgtccagcatcgggtattggttttatgtcttctttgtgttttgggacacatttgaattcgccttcatgtacttcttcttcgtcgagaccaagggcttgactctcgaggagttagatgttattttcgaagcggataatccgcgtaaagcaagcatccaggcaaagaaacttcagaatgcttatcaggcacattccgaggataagattactgcatag

SEQ ID NO: 12861 - protein, 548 aa, Muscodor strobelii
  misc_feature: SGI Peptide ID NO. 564194
  misc_feature (63)..(471): Pfam Id: PF07690 Pfam Desc: Major Facilitator Superfamily
  misc_feature (59)..(519): Pfam Id: PF00083 Pfam Desc: Sugar (and other) transporter
  misc_feature (56)..(203): Pfam Id: PF07690 Pfam Desc: Major Facilitator Superfamily
  misc_feature (36)..(536): NCBI GI: 256721240 Blast Desc: NECHADRAFT_34798 [Nectria haematococca mpVI 77-13-4]
  misc_feature (69)..(545): NCBI GI: 261359456 Blast Desc: lactose permease [Verticillium albo-atrum VaMs.102]
  misc_feature (112)..(546): NCBI GI: 115443414 Blast Desc: conserved [Aspergillus terreus NIH2624] gi|114188383|gb|EAU30083.1| conserved [Aspergillus terreus NIH2624]
  misc_feature (8)..(536): NCBI GI: 169766606 Blast Desc: [Aspergillus oryzae RIB40] gi|83765629|dbj|BAE55772.1| protein product [Aspergillus oryzae]
  misc_feature (9)..(481): NCBI GI: 238483349 Blast Desc: sugar transporter, [Aspergillus flavus NRRL3357] gi|220700963|gb|EED57301.1| sugar transporter, [Aspergillus flavus NRRL3357]
  misc_feature (13)..(543): NCBI GI: 169595736 Blast Desc: SNOG_00611 [Phaeosphaeria nodorum SN15] gi|160701149|gb|EAT92106.2| SNOG_00611 [Phaeosphaeria nodorum SN15]
  misc_feature (54)..(541): NCBI GI: 50428023 Blast Desc: DEHA0G26367g [Debaryomyces hansenii CBS767] gi|49658294|emb|CAG91143.1| DEHA2G24882p [Debaryomyces hansenii]
  misc_feature (1)..(485): NCBI GI: 46117390 Blast Desc: FG04537.1 [Gibberella zeae PH-1]
  misc_feature (51)..(530): NCBI GI: 50304487 Blast Desc: LACP_KLULA [Kluyveromyces lactis] gi|125935|sp|P07921.1|LACP_KLULA RecName: Full=Lactose permease gi|2857|emb|CAA30053.1| protein product [Kluyveromyces lactis]
  misc_feature (198)..(534): NCBI GI: 240273919 Blast Desc: lactose permease [Ajellomyces capsulatus H143]
MSEATEKHSATENSQTRNPDKEDGTSTSMHGGEPETYAAIMATNAPDPRGPGYIKLYLLALTIFLCSTMSGYDSSLMSSINALPNYTEYFGLPESGNASTGIVFAIFQIGQIAGALFVFLIDWYGRLWHIWIGCVGVIIGTIVTGTATNLSTFIGGRFLLSFFATLTITAAPLYLVEISPAAYRGTIAGTYNTFYYVGSILATSSVYAWLTFLSHEYLADQGDLDWRIPIWLQAVCPGIVIFLVKFFPESPRYLILIDKHEEARQIIVKYHTNGDPDHPLVDLQMKEMLHSVQGLPKAAWKDLFDLRVLVESKSSRYRLMLNMVFSWFAQFSGNNIISYYLPIMLNAIGVTDTNTKLQLNIVYSVIGWVFSTAGARFHDVVGRRKMLMGSTAAMTICLSLVAAGSAGKIEYNNDAAATLAIVFIFAFGAVFSAGYTPMQPVYPAEVVSNRMRAKAMGTYKITAGAAGFLNTFVGPIALSSIGYWFYVFFVFWDTFEFAFMYFFFVETKGLTLEELDVIFEADNPRKASIQAKKLQNAYQAHSEDKITA

SEQ ID NO: 12862 - DNA, 1413 bp, Muscodor strobelii
  misc_feature: SGI EST ID NO. CUFF.30590.0
  misc_feature: Variant of the nucleotide sequence at SEQ ID NO 12860
acagcggcttctagtaagagagatttgcacgttgattaagtggcgccagcaaaagagaaacaagcattcggctgtaactggagcgccatattgtgcgtttatgtgatacaagctgacgtttcttagtcatgagtacctagcagaccaaggtgatctcgactggcgcatacccatttggcttcaagcagtctgtcccggcatcgtcatcttccttgtcaagttcttcccggagtcacctcgatatctcattctcatcgataaacatgaggaagcccggcagatcattgtcaagtaccataccaatggcgaccctgatcatcctctggtggacttacagatgaaagagatgcttcatagtgtccaagggcttcccaaagcagcatggaaggatctttttgacttacgcgtgctcgtagagtcgaagtctagtcgatatagattgatgctcaacatggttttctcctggtttgctcaatttagcgggaacaatatcatatcgtactatctcccgattatgctcaatgcgatcggtgtcactgataccaataccaagctccaattaaatatagtttattctgtcattggttgggtcttctctactgctggcgctcgtttccatgatgtcgtcggccggcgtaaaatgctaatgggcagcacggctgctatgacgatctgcctttccctggtagcggctgggtcggccggcaagattgagtataacaatgatgccgcagcgactttggcaattgtttttatctttgcttttggcgctgtgttttctgcaggctacactcctatgcagccagtctaccctgcggaagttgtgtcaaatcgaatgcgagcgaaggctatggggacatacaagattacggccggggctgctggtttcttgaatacatttgttgggcctattgccttgtccagcatcgggtattggttttatgtcttctttgtgttttgggacacatttgaattcgccttcatgtacttcttcttcgtcgagaccaagggcttgactctcgaggagttagatgttattttcgaagcggataatccgcgtaaagcaagcatccaggcaaagaaacttcagaatgcttatcaggcacattccgaggataagattactgcatagatgtcgattgccatgacatagaagtgttggggctatacccaactatggagtattcccgcaggcagcatcaacttgacgacgatcgatcttagagggccattccattgcgtggtctgcatgcaagaagtgttttacaagatacaaatagggcgtctacgaacacacaagcgtaacgtcagaaatagatttggtagagctcttccgtctactccactccccaaacagcgtaaattttagccatttaccacacatatccaaaatgaatgttcactctatcagca

SEQ ID NO: 12863 - DNA, 1623 bp, Muscodor strobelii
  misc_feature: SGI cDNA ID NO. 564195
  misc_feature: Encodes the peptide sequence at SEQ ID NO 12864
atgtctgaagcaacagagaaacacagtgccaccgaaaactcgcaaacccgaaatccggacaaggaagatggcacttcaacgagtatgcatggcggcgagccagagacatacgctgctataatggcaacaaatgcacccgatcctcgcggccccggctacataaaattatatctcctagctttaaccatattcctgtgctccacgatgagcggttatgacagctctttgatgtcatcaatcaatgctctgcctaattacactgagtattttggactaccggagtctggcaatgcttccactggtatagtcttcgcgatctttcagattggtcaaattgcgggtgctctctttgtgttcttgattgattggtacggtagactatggcatatatggatcggatgtgttggcgtcattattgggactatcgttactggcacggcaacgaatttatcgacttttattggaggtagattcttactgtctttctttgctactctgactatcacggctgcgcccttgtatcttgtcgagatttccccggcggcctatagaggaacaattgccggaacctataacaccttctattacgttggatctatcttagcgacgtcttctgttcatgagtacctagcagaccaaggtgatctcgactggcgcatacccatttggcttcaagcagtctgtcccggcatcgtcatcttccttgtcaagttcttcccggagtcacctcgatatctcattctcatcgataaacatgaggaagcccggcagatcattgtcaagtaccataccaatggcgaccctgatcatcctctggtggacttacagatgaaagagatgcttcatagtgtccaagggcttcccaaagcagcatggaaggatctttttgacttacgcgtgctcgtagagtcgaagtctagtcgatatagattgatgctcaacatggttttctcctggtttgctcaatttagcgggaacaatatcatatcgtactatctcccgattatgctcaatgcgatcggtgtcactgataccaataccaagctccaattaaatatagtttattctgtcattggttgggtcttctctactgctggcgctcgtttccatgatgtcgtcggccggcgtaaaatgctaatgggcagcacggctgctatgacgatctgcctttccctggtagcggctgggtcggccggcaagattgagtataacaatgatgccgcagcgactttggcaattgtttttatctttgcttttggcgctgtgttttctgcaggctacactcctatgcagccagtctaccctgcggaagttgtgtcaaatcgaatgcgagcgaaggctatggggacatacaagattacggccggggctgctggtttcttgaatacatttgttgggcctattgccttgtccagcatcgggtattggttttatgtcttctttgtgttttgggacacatttgaattcgccttcatgtacttcttcttcgtcgagaccaagggcttgactctcgaggagttagatgttattttcgaagcggataatccgcgtaaagcaagcatccaggcaaagaaacttcagaatgcttatcaggcacattccgaggataagattactgcatag

SEQ ID NO: 12864 - protein, 540 aa, Muscodor strobelii
  misc_feature: SGI Peptide ID NO. 564195
  misc_feature (63)..(463): Pfam Id: PF07690 Pfam Desc: Major Facilitator Superfamily
  misc_feature (59)..(511): Pfam Id: PF00083 Pfam Desc: Sugar (and other) transporter
  misc_feature (36)..(528): NCBI GI: 256721240 Blast Desc: NECHADRAFT_34798 [Nectria haematococca mpVI 77-13-4]
  misc_feature (69)..(537): NCBI GI: 261359456 Blast Desc: lactose permease [Verticillium albo-atrum VaMs.102]
  misc_feature (112)..(538): NCBI GI: 115443414 Blast Desc: conserved [Aspergillus terreus NIH2624] gi|114188383|gb|EAU30083.1| conserved [Aspergillus terreus NIH2624]
  misc_feature (8)..(528): NCBI GI: 169766606 Blast Desc: [Aspergillus oryzae RIB40] gi|83765629|dbj|BAE55772.1| protein product [Aspergillus oryzae]
  misc_feature (9)..(473): NCBI GI: 238483349 Blast Desc: sugar transporter, [Aspergillus flavus NRRL3357] gi|220700963|gb|EED57301.1| sugar transporter, [Aspergillus flavus NRRL3357]
  misc_feature (13)..(535): NCBI GI: 169595736 Blast Desc: SNOG_00611 [Phaeosphaeria nodorum SN15] gi|160701149|gb|EAT92106.2| SNOG_00611 [Phaeosphaeria nodorum SN15]
  misc_feature (54)..(533): NCBI GI: 50428023 Blast Desc: DEHA0G26367g [Debaryomyces hansenii CBS767] gi|49658294|emb|CAG91143.1| DEHA2G24882p [Debaryomyces hansenii]
  misc_feature (1)..(477): NCBI GI: 46117390 Blast Desc: FG04537.1 [Gibberella zeae PH-1]
  misc_feature (51)..(522): NCBI GI: 50304487 Blast Desc: LACP_KLULA [Kluyveromyces lactis] gi|125935|sp|P07921.1|LACP_KLULA RecName: Full=Lactose permease gi|2857|emb|CAA30053.1| protein product [Kluyveromyces lactis]
  misc_feature (2)..(521): NCBI GI: 126133170 Blast Desc: Lactose permease [Pichia stipitis CBS 6054] gi|126094935|gb|ABN65081.1| Lactose permease [Pichia stipitis CBS 6054]
MSEATEKHSATENSQTRNPDKEDGTSTSMHGGEPETYAAIMATNAPDPRGPGYIKLYLLALTIFLCSTMSGYDSSLMSSINALPNYTEYFGLPESGNASTGIVFAIFQIGQIAGALFVFLIDWYGRLWHIWIGCVGVIIGTIVTGTATNLSTFIGGRFLLSFFATLTITAAPLYLVEISPAAYRGTIAGTYNTFYYVGSILATSSVHEYLADQGDLDWRIPIWLQAVCPGIVIFLVKFFPESPRYLILIDKHEEARQIIVKYHTNGDPDHPLVDLQMKEMLHSVQGLPKAAWKDLFDLRVLVESKSSRYRLMLNMVFSWFAQFSGNNIISYYLPIMLNAIGVTDTNTKLQLNIVYSVIGWVFSTAGARFHDVVGRRKMLMGSTAAMTICLSLVAAGSAGKIEYNNDAAATLAIVFIFAFGAVFSAGYTPMQPVYPAEVVSNRMRAKAMGTYKITAGAAGFLNTFVGPIALSSIGYWFYVFFVFWDTFEFAFMYFFFVETKGLTLEELDVIFEADNPRKASIQAKKLQNAYQAHSEDKITA

SEQ ID NO: 12865 - DNA, 1413 bp, Muscodor strobelii; identical to SEQ ID NO: 12862
  misc_feature: SGI EST ID NO. CUFF.30590.0
  misc_feature: Variant of the nucleotide sequence at SEQ ID NO 12863

SEQ ID NO: 12866 - DNA, 1557 bp, Muscodor strobelii
  misc_feature: SGI cDNA ID NO. 564196
  misc_feature: Encodes the peptide sequence at SEQ ID NO 12867
atggcttctcgctcaagctttctcgacatgcctcgagaattacgagatatgatctatcgatactatgtcaccgtcgatcaaggttatgtttacaacttccagtcaaataggctgcagactgccgacggccagccaatcgacctcgcccttatgctgacatgtcgccttgtagctagcgaattgagaggcgtcgctctgggtaccaacaccgtcacgttcgcggcttcagctaccttctcacccgagatgcgcatggcggcccatcgctttcacgaatattcccacatattaccattacttgaagctggtatgctctgcggcattaggcctcttcttactgctactccagaacttgcatatgatgccgctcgaaagtacccagagattactccttttcttgatcagatgatggtgacggagccgcgcctgaacctctcggacgagggccacgggttgtgcccttggagctttctcagacagcggcgaagcttaccattaccgtttgcgtatagacaagctgttcgccagatcctgcgaaacgcggcaacccacgatctacaccgtttccgcgaggaagcccgcaaagggtttcaaacaaagctcacccgtgaagatttatttccggtcctaagtctccacgaggtctatcctccttggactattcctatcgacgctaatcttgatgacatgattgagactttagctgtacctcccgataattggaatcgcgaacaatttgcagacgccgaagcttgggaagaaagagaacggtcgagatggtattattcggcagcagctacggccgttcgctttctaagctcactagagctcaatgtgcgccttcagatgcgaaatcttgtcctatgcgaggatcgtgccgccgttgcacacccagaaatgcatgtccagggacttattccgttttgccgcgagaacaagcgacttcgcatcgcgcgccacgttgacctgctaaacggcattattttgtcgtcacatggtggttcaagcgctagtatgttgaagactgagtttcttttaacggccgagaatattagtggatccgtcgccctctggctggcggaagctcgggcgttgacatcagccggaatgcctatcggtagcttttccttagttattcaaggtgatgaacgctgcgccgaactattccggtgtatcatccgaaaagatgccgcctatcaagaagcttacgacgaagcaatttttcgccaactactgccgtctccttcgggataccgaagattccgctataagccatttgtttcagagggctttcctcaagaaatgcgcaagatcaatgctaatgctgacgcattgattcgttgtagtttcgatgccggtgaaccatgggacatcgaaccgatgatcgaccagcgccgtttgtggaactgggaccagtgggaggaagattcgcaacactatagtcctgattatgtaggagcgacacattggctcggtgggcatcctattctggatcaagaactctggttcgatgtcctgcgcgaacacgtcctcatggaccgagtatcaggaacatga

SEQ ID NO: 12867 - protein, 518 aa, Muscodor strobelii
  misc_feature: SGI Peptide ID NO. 564196
  misc_feature (5)..(475): NCBI GI: 256729016 Blast Desc: NECHADRAFT_79869 [Nectria haematococca mpVI 77-13-4]
  misc_feature (4)..(476): NCBI GI: 256728246 Blast Desc: NECHADRAFT_87838 [Nectria haematococca mpVI 77-13-4]
  misc_feature (5)..(485): NCBI GI: 256721320 Blast Desc: NECHADRAFT_87025 [Nectria haematococca mpVI 77-13-4]
  misc_feature (4)..(450): NCBI GI: 169613873 Blast Desc: SNOG_10070 [Phaeosphaeria nodorum SN15] gi|111061285|gb|EAT82405.1| SNOG_10070 [Phaeosphaeria nodorum SN15]
  misc_feature (5)..(407): NCBI GI: 189199878 Blast Desc: PTRG_05943 [Pyrenophora tritici-repentis Pt-1C-BFP] gi|187983375|gb|EDU48863.1| PTRG_05943 [Pyrenophora tritici-repentis Pt-1C-BFP]
  misc_feature (1)..(461): NCBI GI: 189191392 Blast Desc: [Pyrenophora tritici-repentis Pt-1C-BFP] gi|187973641|gb|EDU41140.1| [Pyrenophora tritici-repentis Pt-1C-BFP]
  misc_feature (175)..(476): NCBI GI: 189188098 Blast Desc: conserved [Pyrenophora tritici-repentis Pt-1C-BFP] gi|187971994|gb|EDU39493.1| conserved [Pyrenophora tritici-repentis Pt-1C-BFP]
  misc_feature (215)..(457): NCBI GI: 256725493 Blast Desc: NECHADRAFT_25596 [Nectria haematococca mpVI 77-13-4]
  misc_feature (216)..(469): NCBI GI: 189199968 Blast Desc: conserved [Pyrenophora tritici-repentis Pt-1C-BFP] gi|187983420|gb|EDU48908.1| conserved [Pyrenophora tritici-repentis Pt-1C-BFP]
  misc_feature (255)..(464): NCBI GI: 256731230 Blast Desc: NECHADRAFT_85259 [Nectria haematococca mpVI 77-13-4]
MASRSSFLDMPRELRDMIYRYYVTVDQGYVYNFQSNRLQTADGQPIDLALMLTCRLVASELRGVALGTNTVTFAASATFSPEMRMAAHRFHEYSHILPLLEAGMLCGIRPLLTATPELAYDAARKYPEITPFLDQMMVTEPRLNLSDEGHGLCPWSFLRQRRSLPLPFAYRQAVRQILRNAATHDLHRFREEARKGFQTKLTREDLFPVLSLHEVYPPWTIPIDANLDDMIETLAVPPDNWNREQFADAEAWEERERSRWYYSAAATAVRFLSSLELNVRLQMRNLVLCEDRAAVAHPEMHVQGLIPFCRENKRLRIARHVDLLNGIILSSHGGSSASMLKTEFLLTAENISGSVALWLAEARALTSAGMPIGSFSLVIQGDERCAELFRCIIRKDAAYQEAYDEAIFRQLLPSPSGYRRFRYKPFVSEGFPQEMRKINANADALIRCSFDAGEPWDIEPMIDQRRLWNWDQWEEDSQHYSPDYVGATHWLGGHPILDQELWFDVLREHVLMDRVSGT

SEQ ID NO: 12868 - DNA, 2170 bp, Muscodor strobelii
  misc_feature: SGI EST ID NO. CUFF.30628.1
  misc_feature: Variant of the nucleotide sequence at SEQ ID NO 12866
caaatacctacatataagtacctaatctcatgagtaccgcttctgcatcattattccttccttcgaacatcaacatggcttctcgctcaagctttctcgacatgcctcgagaattacgagatatgatctatcgatactatgtcaccgtcgatcaaggttatgtttacaacttccagtcaaataggctgcagactgccgacggccagccaatcgacctcgcccttatgctgacatgtcgccttgtagctagcgaattgagaggcgtcgctctgggtaccaacaccgtcacgttcgcggcttcagctaccttctcacccgagatgcgcatggcggcccatcgctttcacgaatattcccacatattaccattacttgaagctggtatgctctgcggcattaggcctcttcttactgctactccagaacttgcatatgatgccgctcgaaagtacccagagattactccttttcttgatcagatgatggtgacggagccgcgcctgaacctctcggacgagggccacgggttgtgcccttggagctttctcagacagcggcgaagcttaccattaccgtttgcgtatagacaagctgttcgccagatcctgcgaaacgcggcaacccacgatctacaccgtttccgcgaggaagcccgcaaagggtttcaaacaaagctcacccgtgaagatttatttccggtcctaagtctccacgaggtctatcctccttggactattcctatcgacgctaatcttgatgacatgattgagactttagctgtacctcccgataattggaatcgcgaacaatttgcagacgccgaagcttgggaagaaagagaacggtcgagatggtattattcggcagcagctacggccgttcgctttctaagctcactagagctcaatgtgcgccttcagatgcgaaatcttgtcctatgcgaggatcgtgccgccgttgcacacccagaaatgcatgtccagggacttattccgttttgccgcgagaacaagcgacttcgcatcgcgcgccacgttgacctgctaaacggcattattttgtcgtcacatggtggttcaagcgctagtatgttgaagactgagtttcttttaacggccgagaatattagtggatccgtcgccctctggctggcggaagctcgggcgttgacatcagccggaatgcctatcggtagcttttccttagttattcaaggtgatgaacgctgcgccgaactattccggtgtatcatccgaaaagatgccgcctatcaagaagcttacgacgaagcaatttttcgccaactactgccgtctccttcgggataccgaagattccgctataagccatttgtttcagagggctttcctcaagaaatgcgcaagatcaatgctaatgctgacgcattgattcgttgtagtttcgatgccggtgaaccatgggacatcgaaccgatgatcgaccagcgccgtttgtggaactgggaccagtgggaggaagattcgcaacactatagtcctgattatgtaggagcgacacattggctcggtgggcatcctattctggatcaagaactctggttcgatgtcctgcgcgaacacgtcctcatggaccgagtatcaggaacatgatcacgagtagccccactcacgtccgggtagcaagagtcagctcatgggttggcccataatcaggcgttcgcttccaaataccagtattggtggacatgcatctatgtgataagtactaaccgtcttctctttatcattgctgcctgaagctacgtcgtccattttaccggtcgagtgagccgagtaacggagcccggatgtattcgaaccgcttggtgccttacgcgcgacctcacgaaatgtgataaatcgaggagagcatcctgaacttgctgctctgcaaaggttgctccaacatgcgacaggtttgagatagtccttgatgttcattctacgtatatgataaggaacagcgcaatcatacagcaatacgactggatgcattgatagctatcacatcaagcatatccaacgttcctccttcatattagagtataccttgtcagttgaaatagaaaaatgataaaaaacagtacgaatgtctaagaagctattgatgaggctggcttacgtgcatttttactgtcatttgatctgct

SEQ ID NO: 12869 - DNA, 2787 bp, Muscodor strobelii
  misc_feature: SGI cDNA ID NO. 564198
  misc_feature: Encodes the peptide sequence at SEQ ID NO 12870
atgactgataccccacgctctgactctggtgctagtggacctctgcatgagggccgtcttgttgccaggcatttgcaattggtctcagcagctttgcaaagaagcgagaatcgcgtccagaagttgttgtcagagcaagaaacatgggactctcctacagacaaggctgccctacggagagccctcgtgtgtgcggcagggaatggcaacctccgtatcgtgcgcctccttctccaggcgaaggccgacataaatagtgatgggggaagagaggtgtctccattgttcaaggcaattgagggccggcagcccaaggtggcccttgagttactgcttcatggcgctgatccaaattggtgtcgccctcgagatggtatatctgggctatttcttgcctgtcttcacgcgttggaagatgtggtagaagcactgctcaaggctggcgcgaatcccaacgcacgcgatagagaagggcagacgcctctatcgtacactgttgcacagaaacctaggacatgggagttctcgcccgggcgggagcctggaaagtgggtttttgtcgagttgggcgagtggagaaatgggcgatactacatcctgcagtctggttcaagccgaagatgtgggagttggaagacattcgaaatattgatgaaatgcggtgccgatattaacgcacgcgacaactatggaaaaacagcattgctcagggctgcttcaaataatcaccgacaagccgtcgagtttcttcttcaacaacgagccgacatctcagcgcgaaacagtcgaggcctgactgcactgtatctggctgctgaaaaaaatcacatcgacgtggtcaacgcgttgctaagctatggcgcggatccccgggtggttgctgatggaggatggacgccgctccaccccgcagctcgatggggctatacagacgtcgtaagagttttgcttcaagcaggagcttcagtcaatgcacagttatccaacgggatgacgccattgcattgggcagcgatgaacggacacgaggagatcgtgaagctccttctgaccataccgcagattgaccttgatatcaaggatagtttcaacaggacaccgatgctttgtgccgcatcaacaggtcacacagatattgctctgcttctgtcacctattcgggcagctcacaggctttcgcctttcgccttagcagcatgtaaaggatttgaagccatgattgttgattttggagacttccggaaaagacgattacgccataatcattccgtctacgaccttctgtacggctggaacaacgagaaaaatgagcctagtattccactttcctcgagaaaagtgaagtaccagccaaaactccggtggattcatctccctgctaataatgtcatatggatcgaaactctgcttgcaaaattgctggctgaaggaggttaccgagcacctttgccagattcacaggcaccttcactagaagcggaaggacaacccaatgcgcgagaagatggaccggccgagccgatggcatcaggcggcatggtcctttttggcgggggatatcctcaagctactcaagattcctcgccatatgctgcattgattcatggctatctaaagaataagcggcctctacatgtccggaggactttggatcagtatcaatatacccacgtcgacaactccatgaccatttcgtcaagagatgaagaccaagtagtcgagcgatggcttgaaacacctcttgtggagctgcttatggtagaccaattatggctctatataatcggagaagatatagtcatctcttgttttgcagggcggtgggagcagcctaatctagaccccttagacgtgcggtccgccatcttagacgctcttaatagtgatcaacacatcacatcaaactatcatctagctacactgatacttagtcactgctgtaatatctttgactctcaagcggaccaaagcacgcattttctaaaggtgtttgaagccgagaccaagaggctgactgagcgtcagacgcgactcctggaacaatttactaacatatcgttgaggtcgaaaatgtggatacgtgacgctagttggaatcaaggtcttctgctgcccggtacacaggaaggggacctggattacgtcctcaacacgctttcacaactcagcgaggaatcatatatgttctatggggcggaccgcatccgcaatgaactgactggaatcgaagatattgttagcacgcaattctcaatcctacaggagttccagtcactcgtcacagaagaaattagtcagcggggaagtgataagtctggtacatctctacagctcaagacacgatggcgcgccttggagacacgtattgctgctcgattgaaagagatcaagaggatgagcaaacgcgcggatgacacccactcaagcttacggtccttgcttgacctgaagcagatgcagtctaacgcgctcgaggccaaatttgctcgcagccaggctataacgacgtctaagcagggtcaagcaatcctcgtattcactattgtaacgattgtctttcttccattgtccttcatcgccacgcttttcaccatcgacgtttccgagtggccgacacccttaacattctcctatatcgctaaatatacgtttggcattggactagcgattgcaaccccgctgataatcattgcgatgaaggccggcgacgttaatgttacgctgaggggatttttattgagtgcgggtttggtgcaagatcggcgccgagcggtctacaggctctga

SEQ ID NO: 12870 - protein, 928 aa, Muscodor strobelii
  misc_feature: SGI Peptide ID NO. 564198
  misc_feature (329)..(362): Pfam Id: PF00023 Pfam Desc: Ankyrin repeat
  misc_feature (296)..(328): Pfam Id: PF00023 Pfam Desc: Ankyrin repeat
  misc_feature (263)..(295): Pfam Id: PF00023 Pfam Desc: Ankyrin repeat
  misc_feature (230)..(262): Pfam Id: PF00023 Pfam Desc: Ankyrin repeat
  misc_feature (124)..(156): Pfam Id: PF00023 Pfam Desc: Ankyrin repeat
  misc_feature (157)..(229): Pfam Id: PF00023 Pfam Desc: Ankyrin repeat
  misc_feature (23)..(480): NCBI GI: 145602854 Blast Desc: MGG_04781 [Magnaporthe grisea 70-15] gi|145011220|gb|EDJ95876.1| MGG_04781 [Magnaporthe grisea 70-15]
  misc_feature (520)..(904): NCBI GI: 70996130 Blast Desc: ankyrin repeat protein [Aspergillus fumigatus Af293] gi|66850455|gb|EAL90782.1| ankyrin repeat protein [Aspergillus fumigatus Af293] gi|159131573|gb|EDP56686.1| ankyrin repeat
  misc_feature (521)..(904): NCBI GI: 119495022 Blast Desc: ankyrin repeat protein [Neosartorya fischeri NRRL 181] gi|119412469|gb|EAW22410.1| ankyrin repeat protein [Neosartorya fischeri NRRL 181]
  misc_feature (533)..(923): NCBI GI: 145602854 Blast Desc: MGG_04781 [Magnaporthe grisea 70-15] gi|145011220|gb|EDJ95876.1| MGG_04781 [Magnaporthe grisea 70-15]
  misc_feature (521)..(904): NCBI GI: 169783090 Blast Desc: [Aspergillus oryzae RIB40] gi|83774751|dbj|BAE64874.1| protein product [Aspergillus oryzae]
  misc_feature (521)..(904): NCBI GI: 238492835 Blast Desc: ankyrin repeat protein [Aspergillus flavus NRRL3357] gi|220696148|gb|EED52490.1| ankyrin repeat protein [Aspergillus flavus NRRL3357]
  misc_feature (521)..(909): NCBI GI: 121701093 Blast Desc: ankyrin repeat protein [Aspergillus clavatus NRRL 1] gi|119396954|gb|EAW07385.1| ankyrin repeat protein [Aspergillus clavatus NRRL 1]
  misc_feature (544)..(909): NCBI GI: 255941688 Blast Desc: Pc16g13140 [Penicillium chrysogenum Wisconsin 54-1255] gi|211586236|emb|CAP93984.1| Pc16g13140 [Penicillium chrysogenum Wisconsin 54-1255]
  misc_feature (544)..(909): NCBI GI: 212531615 Blast Desc: ankyrin repeat protein [Penicillium marneffei ATCC 18224] gi|210071328|gb|EEA25417.1| ankyrin repeat protein [Penicillium marneffei ATCC 18224]
  misc_feature (519)..(904): NCBI GI: 145230782 Blast Desc: An01g12480 [Aspergillus niger] gi|134055776|emb|CAK37300.1| protein product [Aspergillus niger]
MTDTPRSDSGASGPLHEGRLVARHLQLVSAALQRSENRVQKLLSEQETWDSPTDKAALRRALVCAAGNGNLRIVRLLLQAKADINSDGGREVSPLFKAIEGRQPKVALELLLHGADPNWCRPRDGISGLFLACLHALEDVVEALLKAGANPNARDREGQTPLSYTVAQKPRTWEFSPGREPGKWVFVELGEWRNGRYYILQSGSSRRCGSWKTFEILMKCGADINARDNYGKTALLRAASNNHRQAVEFLLQQRADISARNSRGLTALYLAAEKNHIDVVNALLSYGADPRVVADGGWTPLHPAARWGYTDVVRVLLQAGASVNAQLSNGMTPLHWAAMNGHEEIVKLLLTIPQIDLDIKDSFNRTPMLCAASTGHTDIALLLSPIRAAHRLSPFALAACKGFEAMIVDFGDFRKRRLRHNHSVYDLLYGWNNEKNEPSIPLSSRKVKYQPKLRWIHLPANNVIWIETLLAKLLAEGGYRAPLPDSQAPSLEAEGQPNAREDGPAEPMASGGMVLFGGGYPQATQDSSPYAALIHGYLKNKRPLHVRRTLDQYQYTHVDNSMTISSRDEDQVVERWLETPLVELLMVDQLWLYIIGEDIVISCFAGRWEQPNLDPLDVRSAILDALNSDQHITSNYHLATLILSHCCNIFDSQADQSTHFLKVFEAETKRLTERQTRLLEQFTNISLRSKMWIRDASWNQGLLLPGTQEGDLDYVLNTLSQLSEESYMFYGADRIRNELTGIEDIVSTQFSILQEFQSLVTEEISQRGSDKSGTSLQLKTRWRALETRIAARLKEIKRMSKRADDTHSSLRSLLDLKQMQSNALEAKFARSQAITTSKQGQAILVFTIVTIVFLPLSFIATLFTIDVSEWPTPLTFSYIAKYTFGIGLAIATPLIIIAMKAGDVNVTLRGFLLSAGLVQDRRRAVYRL

SEQ ID NO: 12871 - DNA, 1370 bp, Muscodor strobelii
  misc_feature: SGI EST ID NO. CUFF.30623.0
  misc_feature: Variant of the nucleotide sequence at SEQ ID NO 12869
ccgacataaatagtgatgggggaagagaggtgtctccattgttcaaggcaattgagggccggcagcccaaggtggcccttgagttactgcttcatggcgctgatccaaattggtgtcgccctcgagatggtatatctgggctatttcttgcctgtcttcacgcgttggaagatgtggtagaagcactgctcaaggctggcgcgaatcccaacgcacgcgatagagaagggcagacgcctctatcgtacactgttgcacagaaacctaggacatgggagttctcgcccgggcgggagcctggaaagtgggtttttgtcgagttgggcgagtggagaaatgggcgatactacatcctgcagtctggttcaagccgaagatgtgggagttggaagacattcgaaatattgatgaaatgcggtgccgatattaacgcacgcgacaactatggaaaaacagcattgctcagggctgcttcaaataatcaccgacaagccgtcgagtttcttcttcaacaacgagccgacatctcagcgcgaaacagtcgaggcctgactgcactgtatctggctgctgaaaaaaatcacatcgacgtggtcaacgcgttgctaagctatggcgcggatccccgggtggttgctgatggaggatggacgccgctccaccccgcagctcgatggggctatacagacgtcgtaagagttttgcttcaagcaggagcttcagtcaatgcacagttatccaacgggatgacgccattgcattgggcagcgatgaacggacacgaggagatcgtgaagctccttctgaccataccgcagattgaccttgatatcaaggatagtttcaacaggacaccgatgctttgtgccgcatcaacaggtcacacagatattgctctgcttctgtcacctattcgggcagctcacaggctttcgcctttcgccttagcagcatgtaaaggatttgaagccatgattgttgattttggagacttccggaaaagacgattacgccataatcattccgtctacgaccttctgtacggctggaacaacgagaaaaatgagcctagtattccactttcctcgagaaaagtgaagtaccagccaaaactccggtggattcatctccctgctaataatgtcatatggatcgaagtatgtatctgagatgatcacattgcccccattggcgacttaatgccgacatgatcgtagactctgcttgcaaaattgctggctgaaggaggttaccgaggtatagaatcttacagatctatcaccgaatcgcttgatcaacgacggagtccgtcaaatttgagtctctctatgagatcgtcttgccagcgaatcattgcacctcaatcaagt

SEQ ID NO: 12872 - DNA, 1110 bp, Muscodor strobelii
  misc_feature: SGI cDNA ID NO. 564199
  misc_feature: Elevated expression when VOC is produced
  misc_feature: Encodes the peptide sequence at SEQ ID NO 12873
atggctcccgagacgcgcggtgtcggtccaacattcttagagctacctctggagctcttattgttgatttgggactatctgggcatagatgatgccttcgctttacgtcttgtatgccgagaacttgcatctaggctctttgagcctttttgcaaagagttctttaccgagcaacgattttctatttcttactacagcctaaatgtactcctcgacataacgaagcgtccggatttgacgaaatggatgaagcatctgaccatcgggctcgatcgcttcgacagcgccgatgcactgccaagggttatcgaagactgggctcatctggcaccctctgctagagctacctcggacgccaggtaccacaagctcgaggcactcaaccaagagcagaattttcttctcaacagcggcaaattccagcttatgatgagtcaggctctcgtggcaatacccggcctggagggcttagtcttgcgagaccgtaacgtcccaaagaaattggaacgatcgggagcaaatccactgctcacaagcttcggcgcaaaacgtatttttcgagaaacgggctgtgatttcactggagacatacccaacgcacatctcggtacgcatgatgataggtttgttgacagtgtctttctgtccacgctccttgcattagttcaggggcaatcgaagatcgattcgttgatggtagacatacaaaaagataatcttggtttatcaagttcggcattttccttaccagaatccttcctcgcggacatctgccctatactatcgaagttacaatctctccacctgtccgtcagtatcactcgctctgcacttggcagctactcggaccgatcacaaagctttcttcgctggcaaacgcatcagttggcttcgtttctccacaaagcaccaaatcttgctgcaatctgcatacagtgtaaggaacagggccacttccctcaggaaattatcagagcgcttgcaaatatgcttgacccacccgagattatagagcagcactcagccgacctgcttgaccggccaaagaatcatcttgtaagtgcaggaaacctcctcatcactgtgtaccaaagaaaaataagcaactaa

SEQ ID NO: 12873 - protein, 369 aa, Muscodor strobelii
  misc_feature: SGI Peptide ID NO. 564199
  misc_feature (10)..(57): Pfam Id: PF00646 Pfam Desc: F-box domain
  misc_feature (8)..(324): NCBI GI: 116198663 Blast Desc: CHGG_07487 [Chaetomium globosum CBS 148.51] gi|88178766|gb|EAQ86234.1| CHGG_07487 [Chaetomium globosum CBS 148.51]
  misc_feature (11)..(347): NCBI GI: 169598890 Blast Desc: SNOG_02254 [Phaeosphaeria nodorum SN15] gi|111069346|gb|EAT90466.1| SNOG_02254 [Phaeosphaeria nodorum SN15]
  misc_feature (14)..(273): NCBI GI: 171693403 Blast Desc: protein product [Podospora anserina] gi|170946650|emb|CAP73453.1| protein product [Podospora anserina]
  misc_feature (8)..(274): NCBI GI: 256731552 Blast Desc: NECHADRAFT_49371 [Nectria haematococca mpVI 77-13-4]
  misc_feature (14)..(273): NCBI GI: 46123091 Blast Desc: FG05923.1 [Gibberella zeae PH-1]
  misc_feature (15)..(333): NCBI GI: 85104200 Blast Desc: NCU01081 [Neurospora crassa OR74A] gi|18376194|emb|CAD21310.1| [Neurospora crassa] gi|28923241|gb|EAA32457.1| [Neurospora crassa OR74A]
  misc_feature (11)..(336): NCBI GI: 189209143 Blast Desc: conserved [Pyrenophora tritici-repentis Pt-1C-BFP] gi|187976997|gb|EDU43623.1| conserved [Pyrenophora tritici-repentis Pt-1C-BFP]
  misc_feature (11)..(275): NCBI GI: 261357962 Blast Desc: conserved [Verticillium albo-atrum VaMs.102]
  misc_feature (10)..(282): NCBI GI: 145611534 Blast Desc: MGG_11603 [Magnaporthe grisea 70-15] gi|145018807|gb|EDK03086.1| MGG_11603 [Magnaporthe grisea 70-15]
  misc_feature (10)..(101): NCBI GI: 145611536 Blast Desc: MGG_11604 [Magnaporthe grisea 70-15] gi|145018808|gb|EDK03087.1| MGG_11604 [Magnaporthe grisea 70-15]
  misc_feature: Useful for introducing or modulating the production of volatile compounds
MAPETRGVGPTFLELPLELLLLIWDYLGIDDAFALRLVCRELASRLFEPFCKEFFTEQRFSISYYSLNVLLDITKRPDLTKWMKHLTIGLDRFDSADALPRVIEDWAHLAPSARATSDARYHKLEALNQEQNFLLNSGKFQLMMSQALVAIPGLEGLVLRDRNVPKKLERSGANPLLTSFGAKRIFRETGCDFTGDIPNAHLGTHDDRFVDSVFLSTLLALVQGQSKIDSLMVDIQKDNLGLSSSAFSLPESFLADICPILSKLQSLHLSVSITRSALGSYSDRSQSFLRWQTHQLASFLHKAPNLAAICIQCKEQGHFPQEIIRALANMLDPPEIIEQHSADLLDRPKNHLVSAGNLLITVYQRKISN

SEQ ID NO: 12874 - DNA, 4050 bp, Muscodor strobelii
  misc_feature: SGI EST ID NO. CUFF.30669.1
  misc_feature: Variant of the nucleotide sequence at SEQ ID NO 12872
ggcgaatatgcttcgatagtcgcttccaatgtttttgatctgctgggacataccactcgaagccctgcatcattgtctgtgagcacgagagtgttagtaagtcactctgctgtattgccctcttaaaatgggttaccatgttctctggcgttggtttctcagccattttgacgatctactccatccaaatctagaatgtctacaaataaagaaacgcgtatgtaagagccgtcactccaccacagcataaaagacgcgggcaaagacggcattttgaaggacagcgatgaacatttcttatcagtagtatgattatgaactaggcataattaagttgcgaaaagcacaaggcactagcttgctagcgggtcgttgaaactcgattatcagcgtcgatggcgatttggcttgcgcacgaagttcaaatcaaggcacagacgacgctgcgttggtctagacttgccccgtggtggagataggaaaactgctacggcacgccggtaccaggtaggcagacgtttccaagttgaaaatgccaatgtgccatcgtacatgtatcagctgcctggctgcgtggaatccgatgaacctctcgtcaaatgggaaacattgagttgggagaagaggctcgtgaaataaaagtactctcaacataaagatctagcagggtacagttgggcgacgtgtgacgtcaattgccctcgggcgccatgtttaggtatggccaagccgttgaatctagacctaggaatggctcgcacttgtcacatacctctctcatgatacaagccagcggtgtcacagaagatatctccacgtcgacaatcgcgaatatgggatgaaaagacgacactcgcatagggcccagggggttggaatgcggggcttggcaccaggcagattcgagtaccttgattgtgggatgttgcatcgaagccgaagatcacccctgaacgctcctcgccttggcttcgtagctgggccactcaaatttattaggggtctgtgctcctgttgaaggacggtacagcctagcaagtatttcccatagtcccgaatgaaagcaaactcagcacagcatcatgagcgtcgaagagtcgaattccggaacgagtcggaagccatggggccatcgcttttagaaatcaccatactctggaatttggagtcctgtgggtaagcgcatatgtccaacggtagggccgaggcgatctgctatatatcgtgacacccacctccggcgtcccagctagcaaatcacaaagtgcaattctctgttggctcccgaaacacattgcgtcttccactcacggcccggacagcactgcccagcttgaactatttgggtaggccagagatatgcagcctcttatattcttttggaggaaccaacagtgtcgagatcggggccattcatgtgacggtctgccttctcgcttgcccaacaaatcttaacttgtataacgggctcgaatcgcaggcttacaacattggacaactgggaaaatcaaagtcgatttcatcatggagaacgtcagcgggagaacgagggttcggttcactgttgcactcctgacattccatcgggccaaccattctcgccccagttgcaatgctgttaggtcgcaattacgagccctctcatgtcgtgtcgtctagatataagcccctaggtaatttaacattcttactctgtggttcgttgcacttcattccatagacgaagtatcactcagtgaatgccgaaaacttactaataagcgccgcttcgcacgacacggtcagcgatccatacgagaagaagaaatccatctaaccgcaccttagagaaagcaatcaagcaagctacctaacccatgcttaccatggactcggatacaggggcaagttcttagctcggcacgcaacagctgctgggaaattcgggtcatacaagcacgaactcgccttgcaggcaaattggcgccttgtgaatcactcctgggcaggttaggttgccaccgagtcagatccgataacagccacaactcgtcacatcgatctcatttgctaaggccatccaattcgtcagggggagccacacggcctacattgcattatccctttccaagccccttgttttgttatatccgccttgggccgccttcctgatggctcccgagacgcgcggtgtcggtccaacattcttagagctacctctggagctcttattgttgatttgggactatctgggcatagatgatgccttcgctttacgtcttgtatgccgagaacttgcatctaggctctttgagcctttttgcaaagagttctttaccgagcaacgattttctatttcttactacagcctaaatgtactcctcgacataacgaagcgtccggatttgacgaaatggatgaagcatctgaccatcgggctcgatcgcttcgacagcgccgatgcactgccaagggttatcgaagactgggctcatctggcaccctctgctagagctacctcggacgccaggtaccacaagctcgaggcactcaaccaagagcagaattttcttctcaacagcggcaaattccagcttatgatgagtcaggctctcgtggcaatacccggcctggagggcttagtcttgcgagaccgtaacgtcccaaagaaattggaacgatcgggagcaaatccactgctcacaagcttcggcgcaaaacgtatttttcgagaaacgggctgtgatttcactggagacatacccaacgcacatctcggtacgcatgatgataggtttgttgacagtgtctttctgtccacgctccttgcattagttcaggggcaatcgaagatcgattcgttgatggtagacatacaaaaagataatcttggtttatcaagttcggcattttccttaccagaatccttcctcgcggacatctgccctatactatcgaagttacaatctctccacctgtccgtcagtatcactcgctctgcacttggcagctactcggaccgatcacaaagctttcttcgctggcaaacgcatcagttggcttcgtttctccacaaagcaccaaatcttgctgcaatctgcatacagtgtaaggaacagggccacttccctcaggaaattatcagagcgcttgcaaatatgcttgacccacccgagattatagagcagcactcagccgacctgcttgaccggccaaagaatcatctttatcgcgatattagtaccatctaccatggccagccaccccgattccattttttgaaagaattagagcttgagaacatgacaacctcgatcgaacccatgttacgagttttaaagtctctggcagggaccttgcgacgactgacattgcgcaaagtagcgctttgtgtgtcggaacgcgatgatgagcttgataatgactatagacaacctaatgcgtggagtacactattccagcatatgcttcacccgctcgagcttagactagattacttggaactcgcttccttagagcaccatacaacgacatgttcgaacagaaacaacggccaccctgttgctttcctaccttcggcactaggtgagcagtcagggccgggcaacggtctgctgcacacctggtcacacgatgggagttctgttgaggtcgaaagttttttgaaagagttggagacgaagacaatgatattatgcagtagatgcaagcagagaaatccggggtatagatcagtagaggagatactagagttgtgagatttgatagactacttgaacgcattagttgctctccactgggtggacttaaacctttgtgttgtcaggttcggtacataacatttacgttcgcctcttacaattttaggtgtgtgaagttctttcaaaagtcccacagaagtaggcagttggatgggatagacgattgcttttctctcctcggatgttcgttattattcttgtccggaaaagatacactgcagagttaaggtcagaacttcacatatttgctatattggtcataaactggtgatcaaaagagtgtgatgatttattagtaatacagtctatc

SEQ ID NO: 12875 - DNA, 1593 bp, Muscodor strobelii
  misc_feature: SGI cDNA ID NO. 564200
  misc_feature: Elevated expression when VOC is produced
  misc_feature: Encodes the peptide sequence at SEQ ID NO 12876
atggctgagaaaccaacgccagagaacatggtaacccattttaagagggcaatacagcagagtgacttactaacactctcgtgctcacagacaatgatgcagggcttcgagtggtatgtcccagcagatcaaaaacattggaagcgactatcgaagcatattcgccagctgaaaacctggggaatagacaatgtctggatccctccggcctgcaaaggctcctcaatcgaaggtaacggctacgacatctatgatctttacgatctaggcgaattcgatcaaaaagggtccgtaggaacgaaatggggcaccttcgaggaacttcaacatctctgcgacgaggcaaagaaaaacggagtcggtctgtacttcgatgcagtgctcaaccaccgctttgcagctgatcgcaaagagaaatgtcaggcaatcgaagtggatccggaagaccgtaacaaggaggtctcggatcaatacgaaatcgaggcttgggttggctatgatttccctggaagagggggcaagtacagcaagcagaaataccactggtatcacttcagcggtgtcgattacaacgcgcgggaccaaaagactgctatttacaagatcatgggtgacaagtcaacgggttgggctgaagatggcgatgtcgatgacgaaaagggaaattatgacttcctcatgggttctgatctagactattctcatcccgaagtcgaagccgacgttctcgcctggggccgttggctcgcccaaatcgtgcctcttaagggcatccgcttcgacgccatcaagcattacagtgaagaattcctgcgcaagttcataaacacattggacgaaacattcggcgagggctggttcttcgtcggcgagttctggaaagatagtcttgaagatatggaacaatatctcgatcggatggggaggaagttctcgctgtttgatgcaccgttggtatataatttcagtagcatcagtcagacttctgatgcagacttgaggaaggtatttgatgatacgttggtcgcttgtgcgcctgtcaatgccgttacacttgtaatgaatcacgacacccagccttatcaagttctcgaagccccaatcgcagattggttcaaacctctagcttacagcctaattctcctccgtaattcaggctatccatgtgttttctatggcgacctgtatggcatgaagtgcgaaaaccccatcgcgcctatgaacggcggcagcgtgctccctaaactcatgcttgcgcgaaaactatacgcatacgggaagcaggccgattacttcgacttcgcgacatgtctcgggtgggtacgctacgggacatgggaccgacctttcggatgtgctaccataatttccaacgccggcccgggagagaagcgcatgcatgtcggtgagatgcacgccggtgaagtctggacagacgtcctcggttggagcgaccgcgaagtcacgattggtgaggacggcttcggcgtcttcgtatgtggacagacgagtgtcagtgttttcgtgaaccgcgatgcttcagacagagacagatttgccaaccaatttgatcacaatatctacggtgaataa

SEQ ID NO: 12876 - protein, 530 aa, Muscodor strobelii
  misc_feature: SGI Peptide ID NO. 564200
  misc_feature (30)..(420): Pfam Id: PF00128 Pfam Desc: Alpha amylase, catalytic domain
  misc_feature (30)..(398): Pfam Id: PF00128 Pfam Desc: Alpha amylase, catalytic domain
  misc_feature (3)..(530): NCBI GI: 261357244 Blast Desc: alpha-amylase [Verticillium albo-atrum VaMs.102]
  misc_feature (4)..(530): NCBI GI: 39942414 Blast Desc: MGG_03287 [Magnaporthe grisea 70-15] gi|145015708|gb|EDK00198.1| MGG_03287 [Magnaporthe grisea 70-15]
  misc_feature (4)..(530): NCBI GI: 154320355 Blast Desc: BC1G_02158 [Botryotinia fuckeliana B05.10] gi|150854897|gb|EDN30089.1| BC1G_02158 [Botryotinia fuckeliana B05.10]
  misc_feature (4)..(528): NCBI GI: 171689684 Blast Desc: protein product [Podospora anserina] gi|170944804|emb|CAP70916.1| protein product [Podospora anserina]
  misc_feature (5)..(528): NCBI GI: 156043996 Blast Desc: SS1G_10101 [Sclerotinia sclerotiorum 1980] gi|154694490|gb|EDN94228.1| SS1G_10101 [Sclerotinia sclerotiorum 1980]
  misc_feature (31)..(529): NCBI GI: 38524267 Blast Desc: related to alpha-amylase [Neurospora crassa]
  misc_feature (31)..(529): NCBI GI: 164422883 Blast Desc: NCU09486 [Neurospora crassa OR74A] gi|157069861|gb|EAA33974.2| conserved [Neurospora crassa OR74A]
  misc_feature (3)..(530): NCBI GI: 189208346 Blast Desc: glucan 1,4-alpha-maltohexaosidase precursor [Pyrenophora tritici-repentis Pt-1C-BFP] gi|187976599|gb|EDU43225.1| glucan 1,4-alpha-maltohexaosidase
  misc_feature (3)..(530): NCBI GI: 169598140 Blast Desc: SNOG_01869 [Phaeosphaeria nodorum SN15] gi|111068961|gb|EAT90081.1| SNOG_01869 [Phaeosphaeria nodorum SN15]
  misc_feature (29)..(528): NCBI GI: 239612735 Blast Desc: alpha-(1,4)-amylase [Ajellomyces dermatitidis ER-3]
  misc_feature (28)..(511): SWISSPROT Homolog: EC 3.2.1.98 Glucan 1,4-alpha-maltohexaosidase
  misc_feature: Useful for introducing or modulating the production of volatile compounds
MAEKPTPENMVTHFKRAIQQSDLLTLSCSQTMMQGFEWYVPADQKHWKRLSKHIRQLKTWGIDNVWIPPACKGSSIEGNGYDIYDLYDLGEFDQKGSVGTKWGTFEELQHLCDEAKKNGVGLYFDAVLNHRFAADRKEKCQAIEVDPEDRNKEVSDQYEIEAWVGYDFPGRGGKYSKQKYHWYHFSGVDYNARDQKTAIYKIMGDKSTGWAEDGDVDDEKGNYDFLMGSDLDYSHPEVEADVLAWGRWLAQIVPLKGIRFDAIKHYSEEFLRKFINTLDETFGEGWFFVGEFWKDSLEDMEQYLDRMGRKFSLFDAPLVYNFSSISQTSDADLRKVFDDTLVACAPVNAVTLVMNHDTQPYQVLEAPIADWFKPLAYSLILLRNSGYPCVFYGDLYGMKCENPIAPMNGGSVLPKLMLARKLYAYGKQADYFDFATCLGWVRYGTWDRPFGCATIISNAGPGEKRMHVGEMHAGEVWTDVLGWSDREVTIGEDGFGVFVCGQTSVSVFVNRDASDRDRFANQFDHNIYGE

SEQ ID NO: 12877 - DNA, 7262 bp, Muscodor strobelii
  misc_feature: SGI EST ID NO. CUFF.30668.0
  misc_feature: Variant of the nucleotide sequence at SEQ ID NO 12875
gatagactgtattactaataaatcatcacactcttttgatcaccagtttatgaccaatatagcaaatatgtgaagttctgaccttaactctgcagtgtatcttttccggacaagaataataacgaacatccgaggagagaaaagcaatcgtctatcccatccaactgcctacttctgtgggacttttgaaagaacttcacacacctaaaattgtaagaggcgaacgtaaatgttatgtaccgaacctgacaacacaaaggtttaagtccacccagtggagagcaactaatgcgttcaagtagtctatcaaatctcacaactctagtatctcctctactgatctataccccggatttctctgcttgcatctactgcataatatcattgtcttcgtctccaactctttcaaaaaactttcgacctcaacagaactcccatcgtgtgaccaggtgtgcagcagaccgttgcccggccctgactgctcacctagtgccgaaggtaggaaagcaacagggtggccgttgtttctgttcgaacatgtcgttgtatggtgctctaaggaagcgagttccaagtaatctagtctaagctcgagcgggtgaagcatatgctggaatagtgtactccacgcattaggttgtctatagtcattatcaagctcatcatcgcgttccgacacacaaagcgctactttgcgcaatgtcagtcgtcgcaaggtccctgccagagactttaaaactcgtaacatgggttcgatcgaggttgtcatgttctcaagctctaattctttcaaaaaatggaatcggggtggctggccatggtagatggtactaatatcgcgatactttaagcgcgttagttgcttatttttctttggtacacagtgatgaggaggtttcctgcacttacaagatgattctttggccggtcaagcaggtcggctgagtgctgctctataatctcgggtgggtcaagcatatttgcaagcgctctgataatttcctgagggaagtggccctgttccttacactgtatgcagattgcagcaagatttggtgctttgtggagaaacgaagccaactgatgcgtttgccagcgaagaaagctttgtgatcggtccgagtagctgccaagtgcagagcgagtgatactgacggacaggtggagagattgtaacttcgatagtatagggcagatgtccgcgaggaaggattctggtaaggaaaatgccgaacttgataaaccaagattatctttttgtatgtctaccatcaacgaatcgatcttcgattgcccctgaactaatgcaaggagcgtggacagaaagacactgtcaacaaacctatcatcatgcgtaccgagatgtgcgttgggtatgtctccagtgaaatcacagcccgtttctcgaaaaatacgttttgcgccgaagcttgtgagcagtggatttgctcccgatcgttccaatttctttgggacgttacggtctcgcaagactaagccctccaggccgggtattgccacgagagcctgactcatcataagctggaatttgccgctgttgagaagaaaattctgctcttggttgagtgcctcgagcttgtggtacctggcgtccgaggtagctctagcagagggtgccagatgagcccagtcttcgataacccttggcagtgcatcggcgctgtcgaagcgatcgagcccgatggtcagatgcttcatccatttcgtcaaatccggacgcttcgttatgtcgaggagtacatttaggctgtagtaagaaatagaaaatcgttgctcggtaaagaactctttgcaaaaaggctcaaagagcctagatgcaagttctcggcatacaagacgtaaagcgaaggcatcatctatgcccagatagtcccaaatcaacaataagagctccagaggtagctctaagaatgttggaccgacaccgcgcgtctcgggagccatcaggaaggcggcccaaggcggatataacaaaacaaggggcttggaaagggataatgcaatgtaggccgtgtggctccccctgacgaattggatggccttagcaaatgagatcgatgtgacgagttgtggctgttatcggatctgactcggtggcaacctaacctgcccaggagtgattcacaaggcgccaatttgcctgcaaggcgagttcgtgcttgtatgacccgaatttcccagcagctgttgcgtgccgagctaagaacttgcccctgtatccgagtccatggtaagcatgggttaggtagcttgcttgattgctttctctaaggtgcggttagatggatttcttcttctcgtatggatcgctgaccgtgtcgtgcgaagcggcgcttattagtaagttttcggcattcactgagtgatacttcgtctatggaatgaagtgcaacgaaccacagagtaagaatgttaaattacctaggggcttatatctagacgacacgacatgagagggctcgtaattgcgacctaacagcattgcaactggggcgagaatggttggcccgatggaatgtcaggagtgcaacagtgaaccgaaccctcgttctcccgctgacgttctccatgatgaaatcgactttgattttcccagttgtccaatgttgtaagcctgcgattcgagcccgttatacaagttaagatttgttgggcaagcgagaaggcagaccgtcacatgaatggccccgatctcgacactgttggttcctccaaaagaatataagaggctgcatatctctggcctacccaaatagttcaagctgggcagtgctgtccgggccgtgagtggaagacgcaatgtgtttcgggagccaacagagaattgcactttgtgatttgctagctgggacgccggaggtgggtgtcacgatatatagcagatcgcctcggccctaccgttggacatatgcgcttacccacaggactccaaattccagagtatggtgatttctaaaagcgatggccccatggcttccgactcgttccggaattcgactcttcgacgctcatgatgctgtgctgagtttgctttcattcgggactatgggaaatacttgctaggctgtaccgtccttcaacaggagcacagacccctaataaatttgagtggcccagctacgaagccaaggcgaggagcgttcaggggtgatcttcggcttcgatgcaacatcccacaatcaaggtactcgaatctgcctggtgccaagccccgcattccaaccccctgggccctatgcgagtgtcgtcttttcatcccatattcgcgattgtcgacgtggagatatcttctgtgacaccgctggcttgtatcatgagagaggtatgtgacaagtgcgagccattcctaggtctagattcaacggcttggccatacctaaacatggcgcccgagggcaattgacgtcacacgtcgcccaactgtaccctgctagatctttatgttgagagtacttttatttcacgagcctcttctcccaactcaatgtttcccatttgacgagaggttcatcggattccacgcagccaggcagctgatacatgtacgatggcacattggcattttcaacttggaaacgtctgcctacctggtaccggcgtgccgtagcagttttcctatctccaccacggggcaagtctagaccaacgcagcgtcgtctgtgccttgatttgaacttcgtgcgcaagccaaatcgccatcgacgctgataatcgagtttcaacgacccgctagcaagctagtgccttgtgcttttcgcaacttaattatgcctagttcataatcatactactgataagaaatgttcatcgctgtccttcaaaatgccgtctttgcccgcgtcttttatgctgtggtggagtgacggctcttacatacgcgtttctttatttgtagacattctagatttggatggagtagatcgtcaaaatggctgagaaaccaacgccagagaacatgacaatgatgcagggcttcgagtggtatgtcccagcagatcaaaaacattggaagcgactatcgaagcatattcgccagctgaaaacctggggaatagacaatgtctggatccctccggcctgcaaaggctcctcaatcgaaggtaacggctacgacatctatgatctttacgatctaggcgaattcgatcaaaaagggtccgtaggaacgaaatggggcaccttcgaggaacttcaacatctctgcgacgaggcaaagaaaaacggagtcggtctgtacttcgatgcagtgctcaaccaccgctttgcagctgatcgcaaagagaaatgtcaggcaatcgaagtggatccggaagaccgtaacaaggaggtctcggatcaatacgaaatcgaggcttgggttggctatgatttccctggaagagggggcaagtacagcaagcagaaataccactggtatcacttcagcggtgtcgattacaacgcgcgggaccaaaagactgctatttacaagatcatgggtgacaagtcaacgggttgggctgaagatggcgatgtcgatgacgaaaagggaaattatgacttcctcatgggttctgatctagactattctcatcccgaagtcgaagccgacgttctcgcctggggccgttggctcgcccaaatcgtgcctcttaagggcatccgcttcgacgccatcaagcattacagtgaagaattcctgcgcaagttcataaacacattggacgaaacattcggcgagggctggttcttcgtcggcgagttctggaaagatagtcttgaagatatggaacaatatctcgatcggatggggaggaagttctcgctgtttgatgcaccgttggtatataatttcagtagcatcagtcagacttctgatgcagacttgaggaaggtatttgatgatacgttggtcgcttgtgcgcctgtcaatgccgttacacttgtaatgaatcacgacacccagccttatcaagttctcgaagccccaatcgcagattggttcaaacctctagcttacagcctaattctcctccgtaattcaggctatccatgtgttttctatggcgacctgtatggcatgaagtgcgaaaaccccatcgcgcctatgaacggcggcagcgtgctccctaaactcatgcttgcgcgaaaactatacgcatacgggaagcaggccgattacttcgacttcgcgacatgtctcgggtgggtacgctacgggacatgggaccgacctttcggatgtgctaccataatttccaacgccggcccgggagagaagcgcatgcatgtcggtgagatgcacgccggtgaagtctggacagacgtcctcggttggagcgaccgcgaagtcacgattggtgaggacggcttcggcgtcttcgtatgtggacagacgagtgtcagtgttttcgtgaaccgcgatgcttcagacagagacagatttgccaaccaatttgatcacaatatctacggtgaataaggattggtgataaatttgacatgtatataatcatatataacttggatattccagcccgtggagtgcttagacaacacggacaaattcgttatctgcaccccttgctggttagacaataaatttatttacgtatatgtatttgattgttattcgttcttttcattatgcttcgatcataccaagccctcagtgctcattctatggacagccagagaggtagcggccccgtcatgtaatctcaggcgtacttgatgaacatttcagtcttcttctgacgcgcttgccctgctttattcaggacctccgcatgatcaacatcatgagtcggaccagctttcataatcgcgtcacgcgcccactgaccccgaggacgcatcaccgccttaaatggtttgggtagagtaacgaaaccttcggtacaatccatgtcattaacattgtacctcttgcccgtagaatcgtccacaactccagcttcaacgtcaaaagcccactgaagatcagccgattagtaatttcagtttgtgaagaacgaatgccaccgtctcaatgacttactagtatcctcgccatctgcaaaaacagttgcgagcgggcgatatgtcgaccagtgcagatccttcggccgaagccgaatccaggactgggaatatccttcaaggctttgacatcctgtccacatgcatcaatctgcgggctctcaaacatgtctttattggctagccatctctcgggattaaagtcgtcaggttttggaccaaaagttgattcatcacgtccaatggcgtagtggttcccgatcactattgagttcactggtatgtagaaccccatgtacgtatcctcttttttggcgaaatgcggcacaccgccaacgacgactggccgccaacgcattgtctcattgacgatagcgtcaatgtatgccagctgcgggcggtctctatagtcgggaagcctattctggccgacgaccttatcgagcagcgcctgagccttgggtacccaccgtgaaccgcatgtaatccaagcgacgatgaaccagtccaggacgacggtagacgtatcgagaccagcgtcagccagaatccccagatcgaaagcaagctcctcgatacccatatctttgccctcttgggaattcctcatgtgctttgaaaagttccatcccctactcttgaggccccgctccaaattaccgacatgtagtgcgcgttcaagctcatagagctcctctgcttcttgtttccagggcgccaggatcttaggaagatagttgagccaggtgaaagtatcgaccaagtacgcaccaacttgacctgtcctcgcgaactcagcttgtacgcggtggccgtccagaagttctttctcgtagcccgtcttgaggcgaaagccgtagttgacgcagtatatgaaactagccatggcccgctcaaagtggtgatggaaatccacgcccctctcgccgaactcgtcatactcgtgcaaaacgtcccataggagctgtcgtgactcgagatcctgaataggctggtagctctccgcagctttgatggtcaagagtggttgctccatccgttggtggagcttgtatgtggcatcgtaaggccgaaggagcatatgcatacccttagtgactagctcgccagccataaccatgcgcggacggtccgagtattgaccactacggcggttgaggagatcttgagcggcttgattggaagataacacaatgagcggctgtccggccatgtcgaaatgcatgataggtccatattgc

SEQ ID NO: 12878 - DNA, 1512 bp, Muscodor strobelii
  misc_feature: SGI cDNA ID NO. 564201
  misc_feature: Encodes the peptide sequence at SEQ ID NO 12879
atggctgagaaaccaacgccagagaacatgacaatgatgcagggcttcgagtggtatgtcccagcagatcaaaaacattggaagcgactatcgaagcatattcgccagctgaaaacctggggaatagacaatgtctggatccctccggcctgcaaaggctcctcaatcgaaggtaacggctacgacatctatgatctttacgatctaggcgaattcgatcaaaaagggtccgtaggaacgaaatggggcaccttcgaggaacttcaacatctctgcgacgaggcaaagaaaaacggagtcggtctgtacttcgatgcagtgctcaaccaccgctttgcagctgatcgcaaagagaaatgtcaggcaatcgaagtggatccggaagaccgtaacaaggaggtctcggatcaatacgaaatcgaggcttgggttggctatgatttccctggaagagggggcaagtacagcaagcagaaataccactggtatcacttcagcggtgtcgattacaacgcgcgggaccaaaagactgctatttacaagatcatgggtgacaagtcaacgggttgggctgaagatggcgatgtcgatgacgaaaagggaaattatgacttcctcatgggttctgatctagactattctcatcccgaagtcgaagccgacgttctcgcctggggccgttggctcgcccaaatcgtgcctcttaagggcatccgcttcgacgccatcaagcattacagtgaagaattcctgcgcaagttcataaacacattggacgaaacattcggcgagggctggttcttcgtcggcgagttctggaaagatagtcttgaagatatggaacaatatctcgatcggatggggaggaagttctcgctgtttgatgcaccgttggtatataatttcagtagcatcagtcagacttctgatgcagacttgaggaaggtatttgatgatacgttggtcgcttgtgcgcctgtcaatgccgttacacttgtaatgaatcacgacacccagccttatcaagttctcgaagccccaatcgcagattggttcaaacctctagcttacagcctaattctcctccgtaattcaggctatccatgtgttttctatggcgacctgtatggcatgaagtgcgaaaaccccatcgcgcctatgaacggcggcagcgtgctccctaaactcatgcttgcgcgaaaactatacgcatacgggaagcaggccgattacttcgacttcgcgacatgtctcgggtgggtacgctacgggacatgggaccgacctttcggatgtgctaccataatttccaacgccggcccgggagagaagcgcatgcatgtcggtgagatgcacgccggtgaagtctggacagacgtcctcggttggagcgaccgcgaagtcacgattggtgaggacggcttcggcgtcttcgtatgtggacagacgagtgtcagtgttttcgtgaaccgcgatgcttcagacagagacagatttgccaaccaattgtga

SEQ ID NO: 12879 - protein, 503 aa, Muscodor strobelii
  misc_feature: SGI Peptide ID NO. 564201
  misc_feature (10)..(400): Pfam Id: PF00128 Pfam Desc: Alpha amylase, catalytic domain
  misc_feature (10)..(378): Pfam Id: PF00128 Pfam Desc: Alpha amylase, catalytic domain
  misc_feature (3)..(503): NCBI GI: 261357244 Blast Desc: alpha-amylase [Verticillium albo-atrum VaMs.102]
  misc_feature (4)..(503): NCBI GI: 39942414 Blast Desc: MGG_03287 [Magnaporthe grisea 70-15] gi|145015708|gb|EDK00198.1| MGG_03287 [Magnaporthe grisea 70-15]
  misc_feature (4)..(500): NCBI GI: 154320355 Blast Desc: BC1G_02158 [Botryotinia fuckeliana B05.10] gi|150854897|gb|EDN30089.1| BC1G_02158 [Botryotinia fuckeliana B05.10]
  misc_feature (4)..(503): NCBI GI: 171689684 Blast Desc: protein product [Podospora anserina] gi|170944804|emb|CAP70916.1| protein product [Podospora anserina]
  misc_feature (5)..(500): NCBI GI: 156043996 Blast Desc: SS1G_10101 [Sclerotinia sclerotiorum 1980] gi|154694490|gb|EDN94228.1| SS1G_10101 [Sclerotinia sclerotiorum 1980]
  misc_feature (3)..(503): NCBI GI: 38524267 Blast Desc: related to alpha-amylase [Neurospora crassa]
  misc_feature (3)..(503): NCBI GI: 164422883 Blast Desc: NCU09486 [Neurospora crassa OR74A] gi|157069861|gb|EAA33974.2| conserved [Neurospora crassa OR74A]
  misc_feature (3)..(503): NCBI GI: 189208346 Blast Desc: glucan 1,4-alpha-maltohexaosidase precursor [Pyrenophora tritici-repentis Pt-1C-BFP] gi|187976599|gb|EDU43225.1| glucan 1,4-alpha-maltohexaosidase
  misc_feature (3)..(499): NCBI GI: 169598140 Blast Desc: SNOG_01869 [Phaeosphaeria nodorum SN15] gi|111068961|gb|EAT90081.1| SNOG_01869 [Phaeosphaeria nodorum SN15]
  misc_feature (8)..(501): NCBI GI: 239612735 Blast Desc: alpha-(1,4)-amylase [Ajellomyces dermatitidis ER-3]
  misc_feature (9)..(491): SWISSPROT Homolog: EC 3.2.1.98 Glucan 1,4-alpha-maltohexaosidase
MAEKPTPENMTMMQGFEWYVPADQKHWKRLSKHIRQLKTWGIDNVWIPPACKGSSIEGNGYDIYDLYDLGEFDQKGSVGTKWGTFEELQHLCDEAKKNGVGLYFDAVLNHRFAADRKEKCQAIEVDPEDRNKEVSDQYEIEAWVGYDFPGRGGKYSKQKYHWYHFSGVDYNARDQKTAIYKIMGDKSTGWAEDGDVDDEKGNYDFLMGSDLDYSHPEVEADVLAWGRWLAQIVPLKGIRFDAIKHYSEEFLRKFINTLDETFGEGWFFVGEFWKDSLEDMEQYLDRMGRKFSLFDAPLVYNFSSISQTSDADLRKVFDDTLVACAPVNAVTLVMNHDTQPYQVLEAPIADWFKPLAYSLILLRNSGYPCVFYGDLYGMKCENPIAPMNGGSVLPKLMLARKLYAYGKQADYFDFATCLGWVRYGTWDRPFGCATIISNAGPGEKRMHVGEMHAGEVWTDVLGWSDREVTIGEDGFGVFVCGQTSVSVFVNRDASDRDRFANQL

SEQ ID NO: 12880 - DNA, 7262 bp, Muscodor strobelii; identical to SEQ ID NO: 12877
  misc_feature: SGI EST ID NO. CUFF.30668.0
  misc_feature: Variant of the nucleotide sequence at SEQ ID NO 12878

SEQ ID NO: 12881 - DNA, 1638 bp, Muscodor strobelii
  misc_feature: SGI cDNA ID NO. 564202
  misc_feature: Elevated expression when VOC is produced
  misc_feature: Encodes the peptide sequence at SEQ ID NO 12882
atgtctattgatttcaaaactatcgcgttaagcatcggagtgctcatactctgtagaatcatattcaaagcagtccgacggtactctcgcaatcttcctcctggtcctcggcctctaccattgattggaaatgtgcatcagctaccaaaaagtttacaaaagcaatatggacctatcatgcatttcgacatggccggacagccgctcattgtgttatcttccaatcaagccgctcaagatctcctcaaccgccgtagtggtcaatactcggaccgtccgcgcatggttatggctggcgagctagtcactaagggtatgcatatgctccttcggccttacgatgccacatacaagctccaccaacggatggagcaaccactcttgaccatcaaagctgcggagagctaccagcctattcaggatctcgagtcacgacagctcctatgggacgttttgcacgagtatgacgagttcggcgagaggggcgtggatttccatcaccactttgagcgggccatggctagtttcatatactgcgtcaactacggctttcgcctcaagacgggctacgagaaagaacttctggacggccaccgcgtacaagctgagttcgcgaggacaggtcaagttggtgcgtacttggtcgatactttcacctggctcaactatcttcctaagatcctggcgccctggaaacaagaagcagaggagctctatgagcttgaacgcgcactacatgtcggtaatttggagcggggcctcaagagtaggggatggaacttttcaaagcacatgaggaattcccaagagggcaaagatatgggtatcgaggagcttgctttcgatctggggattctggctgacgctggtctcgatacgtctaccgtcgtcctggactggttcatcgtcgcttggattacatgcggttcacggtgggtacccaaggctcaggcgctgctcgataaggtcgtcggccagaataggcttcccgactatagagaccgcccgcagctggcatacattgacgctatcgtcaatgagacaatgcgttggcggccagtcgtcgttggcggtgtgccgcatttcgccaaaaaagaggatacgtacatggggttctacataccagtgaactcaatagtgatcgggaaccactacgccattggacgtgatgaatcaacttttggtccaaaacctgacgactttaatcccgagagatggctagccaataaagacatgtttgagagcccgcagattgatgcatgtggacaggatgtcaaagccttgaaggatattcccagtcctggattcggcttcggccgaaggatctgcactggtcgacatatcgcccgctcgcaactgtttttgcagatggcgaggatactatgggcttttgacgttgaagctggagttgtggacgattctacgggcaagaggtacaatgttaatgacatggattgtaccgaaggtttcgttactctacccaaaccatttaaggcggtgatgcgtcctcggggtcagtgggcgcgtgacgcgattatgaaagctggtccgactcatgatgttgatcatgcggaggtcctgaataaagcagggcaagcgcgtcagaagaagactgaaatgttcatcaagtacgcctga

SEQ ID NO: 12882 - protein, 545 aa, Muscodor strobelii
  misc_feature: SGI Peptide ID NO. 564202
  misc_feature (33)..(501): Pfam Id: PF00067 Pfam Desc: Cytochrome P450
  misc_feature (320)..(501): Pfam Id: PF00067 Pfam Desc: Cytochrome P450
  misc_feature (33)..(196): Pfam Id: PF00067 Pfam Desc: Cytochrome P450
  misc_feature (26)..(535): NCBI GI: 67900824 Blast Desc: AN7399.2 [Aspergillus nidulans FGSC A4] gi|40742580|gb|EAA61770.1| AN7399.2 [Aspergillus nidulans FGSC A4] gi|259483239|tpe|CBF78459.1| TPA: cytochrome P450, (Eurofung)
  misc_feature (41)..(536): NCBI GI: 256720770 Blast Desc: [Nectria haematococca mpVI 77-13-4]
  misc_feature (4)..(537): NCBI GI: 116202375 Blast Desc: CHGG_09072 [Chaetomium globosum CBS 148.51] gi|88177590|gb|EAQ85058.1| CHGG_09072 [Chaetomium globosum CBS 148.51]
  misc_feature (40)..(532): NCBI GI: 171677518 Blast Desc: protein product [Podospora anserina] gi|170936827|emb|CAP61485.1| protein product [Podospora anserina]
  misc_feature (7)..(543): NCBI GI: 242817207 Blast Desc: cytochrome P450, [Talaromyces stipitatus ATCC 10500] gi|218713372|gb|EED12796.1| cytochrome P450, [Talaromyces stipitatus ATCC 10500]
  misc_feature (8)..(542): NCBI GI: 212538699 Blast Desc: O-methylsterigmatocystin oxidoreductase, [Penicillium marneffei ATCC 18224] gi|210069247|gb|EEA23338.1| O-methylsterigmatocystin oxidoreductase, [Penicillium marneffei
  misc_feature (7)..(498): NCBI GI: 115386938 Blast Desc: [Aspergillus terreus NIH2624] gi|114191008|gb|EAU32708.1| [Aspergillus terreus NIH2624]
  misc_feature (30)..(512): NCBI GI: 121704467 Blast Desc: Cytochrome P450 oxidoreductase, [Aspergillus clavatus NRRL 1] gi|119398642|gb|EAW09071.1| Cytochrome P450 oxidoreductase, [Aspergillus clavatus NRRL 1]
  misc_feature (30)..(537): NCBI GI: 145254379 Blast Desc: An18g01480 [Aspergillus niger] gi|134084188|emb|CAK47221.1| protein product [Aspergillus niger]
  misc_feature (41)..(531): NCBI GI: 242773291 Blast Desc: cytochrome P450, [Talaromyces stipitatus ATCC 10500] gi|218721829|gb|EED21247.1| cytochrome P450, [Talaromyces stipitatus ATCC 10500]
  misc_feature (46)..(513): SWISSPROT Homolog: EC 1.14.99.9 Steroid 17-alpha-monooxygenase
  misc_feature: Useful for introducing or modulating the production of volatile compounds
MSIDFKTIALSIGVLILCRIIFKAVRRYSRNLPPGPRPLPLIGNVHQLPKSLQKQYGPIMHFDMAGQPLIVLSSNQAAQDLLNRRSGQYSDRPRMVMAGELVTKGMHMLLRPYDATYKLHQRMEQPLLTIKAAESYQPIQDLESRQLLWDVLHEYDEFGERGVDFHHHFERAMASFIYCVNYGFRLKTGYEKELLDGHRVQAEFARTGQVGAYLVDTFTWLNYLPKILAPWKQEAEELYELERALHVGNLERGLKSRGWNFSKHMRNSQEGKDMGIEELAFDLGILADAGLDTSTVVLDWFIVAWITCGSRWVPKAQALLDKVVGQNRLPDYRDRPQLAYIDAIVNETMRWRPVVVGGVPHFAKKEDTYMGFYIPVNSIVIGNHYAIGRDESTFGPKPDDFNPERWLANKDMFESPQIDACGQDVKALKDIPSPGFGFGRRICTGRHIARSQLFLQMARILWAFDVEAGVVDDSTGKRYNVNDMDCTEGFVTLPKPFKAVMRPRGQWARDAIMKAGPTHDVDHAEVLNKAGQARQKKTEMFIKYA

SEQ ID NO: 12883 - DNA, 1714 bp, Muscodor strobelii
  misc_feature: SGI EST ID NO. CUFF.30669.3
  misc_feature: Variant of the nucleotide sequence at SEQ ID NO 12881
gacctatcatgcatttcgacatggccggacagccgctcattgtgttatcttccaatcaagccgctcaagatctcctcaaccgccgtagtggtcaatactcggaccgtccgcgcatggttatggctggcgagctagtcactaagggtatgcatatgctccttcggccttacgatgccacatacaagctccaccaacggatggagcaaccactcttgaccatcaaagctgcggagagctaccagcctattcaggatctcgagtcacgacagctcctatgggacgttttgcacgagtatgacgagttcggcgagaggggcgtggatttccatcaccactttgagcgggccatggctagtttcatatactgcgtcaactacggctttcgcctcaagacgggctacgagaaagaacttctggacggccaccgcgtacaagctgagttcgcgaggacaggtcaagttggtgcgtacttggtcgatactttcacctggctcaactatcttcctaagatcctggcgccctggaaacaagaagcagaggagctctatgagcttgaacgcgcactacatgtcggtaatttggagcggggcctcaagagtaggggatggaacttttcaaagcacatgaggaattcccaagagggcaaagatatgggtatcgaggagcttgctttcgatctggggattctggctgacgctggtctcgatacgtctaccgtcgtcctggactggttcatcgtcgcttggattacatgcggttcacggtgggtacccaaggctcaggcgctgctcgataaggtcgtcggccagaataggcttcccgactatagagaccgcccgcagctggcatacattgacgctatcgtcaatgagacaatgcgttggcggccagtcgtcgttggcggtgtgccgcatttcgccaaaaaagaggatacgtacatggggttctacataccagtgaactcaatagtgatcgggaaccactacgccattggacgtgatgaatcaacttttggtccaaaacctgacgactttaatcccgagagatggctagccaataaagacatgtttgagagcccgcagattgatgcatgtggacaggatgtcaaagccttgaaggatattcccagtcctggattcggcttcggccgaaggatctgcactggtcgacatatcgcccgctcgcaactgtttttgcagatggcgaggatactatgggcttttgacgttgaagctggagttgtggacgattctacgggcaagaggtacaatgttaatgacatggattgtaccgaaggtttcgttactctacccaaaccatttaaggcggtgatgcgtcctcggggtcagtgggcgcgtgacgcgattatgaaagctggtccgactcatgatgttgatcatgcggaggtcctgaataaagcagggcaagcgcgtcagaagaagactgaaatgttcatcaagtacgcctgagattacatgacggggccgctacctctctggctgtccatagaatgagcactgagggcttggtatgatcgaagcataatgaaaagaacgaataacaatcaaatacatatacgtaaataaatttattgtctaaccagcaaggggtgcagataacgaatttgtccgtgttgtctaagcactccacgggctggaatatccaagttatatatgattatatacatgtcaaatttatcaccaatccttattca

SEQ ID NO: 12884 - DNA, 960 bp, Muscodor strobelii
  misc_feature: SGI cDNA ID NO. 564203
  misc_feature: Elevated expression when VOC is produced
  misc_feature: Encodes the peptide sequence at SEQ ID NO 12885
atgaagttcgctacttggacaaggattgccttgattggccttgttgtctcctctaatgctcagaatatgccagagtgtgccgcgggctgtctcgcgacgtatgttccacgatcatcatgcaaagctgatgactttgattgcatttgtgccgatacggatcttctggagagtgtgggaacctgcacaatagaagcctgtacaattattgaaggactagctgcgaagaacgctacaattacgctttgtgatataccggctcgggataatagcctcacagcacccattgcgactgcggtaactggcggtttggcacttttggccgtaatcggcaggtgtggtaatagttttctggccaaagagttcacctgggctgatttctgtgctgtccttgctctgctcagctctgtaccaatggatgtatacgagttcttcatgagacgcgatggtatgggcaaagacatatggaccttgactcctgaacaaatcacatccgtacttaagtcaacctgggtcgtgcaagtcagttacatacccgccatcatcctcactaagatttgtatcgtgtgcttctacatgcgtatattcgacgctgtagagaaattcatgataatttgctacatcaccatcgcttactgcgtttgcttcttgatatcgactttcttggctcagatatttggatgttctcctatttcgcaagcgtggactggctggtcgggtcagacgccagggacttgtttcgacacgaatgctttctggtgggctcattcagccctgaatatcgccaccgacctctggatcatggctctcccagtctcacagattcgtaaattacaaatgagtctgaaaagaaaaatctacctgagcctaatgtttagcgtaggtataataatcaccatcattagcatcattcgtttctccggtctcataacatactcaacgacctcgaaccctacttgttag

SEQ ID NO: 12885 - protein, 319 aa, Muscodor strobelii
  misc_feature: SGI Peptide ID NO. 564203
  misc_feature (19)..(83): Pfam Id: PF05730 Pfam Desc: CFEM domain
  misc_feature (30)..(318): NCBI GI: 256720582 Blast Desc: NECHADRAFT_49855 [Nectria haematococca mpVI 77-13-4]
  misc_feature (20)..(297): NCBI GI: 116202373 Blast Desc: CHGG_09071 [Chaetomium globosum CBS 148.51] gi|88177589|gb|EAQ85057.1| CHGG_09071 [Chaetomium globosum CBS 148.51]
  misc_feature (11)..(318): NCBI GI: 145603992 Blast Desc: MGG_10473 [Magnaporthe grisea 70-15] gi|145012102|gb|EDJ96758.1| MGG_10473 [Magnaporthe grisea 70-15]
  misc_feature (1)..(318): NCBI GI: 212533903 Blast Desc: integral membrane protein [Penicillium marneffei ATCC 18224] gi|210072472|gb|EEA26561.1| integral membrane protein [Penicillium marneffei ATCC 18224]
  misc_feature (17)..(318): NCBI GI: 256719870 Blast Desc: NECHADRAFT_56726 [Nectria haematococca mpVI 77-13-4]
  misc_feature (81)..(318): NCBI GI: 67900826 Blast Desc: AN7400.2 [Aspergillus nidulans FGSC A4] gi|40742581|gb|EAA61771.1| AN7400.2 [Aspergillus nidulans FGSC A4] gi|259483238|tpe|CBF78457.1| TPA: conserved [Aspergillus FGSC
  misc_feature (22)..(318): NCBI GI: 242791742 Blast Desc: integral membrane protein, [Talaromyces stipitatus ATCC 10500] gi|218718403|gb|EED17823.1| integral membrane protein, [Talaromyces stipitatus ATCC 10500]
  misc_feature (22)..(309): NCBI GI: 46122887 Blast Desc: FG05821.1 [Gibberella zeae PH-1]
  misc_feature (10)..(318): NCBI GI: 212530872 Blast Desc: conserved [Penicillium marneffei ATCC 18224] gi|210074991|gb|EEA29078.1| conserved [Penicillium marneffei ATCC 18224]
  misc_feature (22)..(318): NCBI GI: 67538938 Blast Desc: AN5639.2 [Aspergillus nidulans FGSC A4] gi|40743542|gb|EAA62732.1| AN5639.2 [Aspergillus nidulans FGSC A4] gi|259484892|tpe|CBF81501.1| TPA: integral membrane protein,
  misc_feature: Useful for introducing or modulating the production of volatile compounds
MKFATWTRIALIGLVVSSNAQNMPECAAGCLATYVPRSSCKADDFDCICADTDLLESVGTCTIEACTIIEGLAAKNATITLCDIPARDNSLTAPIATAVTGGLALLAVIGRCGNSFLAKEFTWADFCAVLALLSSVPMDVYEFFMRRDGMGKDIWTLTPEQITSVLKSTWVVQVSYIPAIILTKICIVCFYMRIFDAVEKFMIICYITIAYCVCFLISTFLAQIFGCSPISQAWTGWSGQTPGTCFDTNAFWWAHSALNIATDLWIMALPVSQIRKLQMSLKRKIYLSLMFSVGIIITIISIIRFSGLITYSTTSNPTC

SEQ ID NO: 12886 - DNA, 1585 bp, Muscodor strobelii
  misc_feature: SGI EST ID NO. CUFF.30635.0
  misc_feature: Variant of the nucleotide sequence at SEQ ID NO 12884
cagattcgaagttttagttctagccttggccatgaagttcgctacttggacaaggattgccttgattggccttgttgtctcctctaatgctcagaatatgccagagtgcgggctgtctcgcgacgtatgttccacgatcatcatgcaaagctgatgactttgattgcatttgtgccgatacggatcttctggagagtgtgggaacctgcacaatagaagcctgtacaattattgaaggactagctgcgaagaacgctacaattacgctttgtgatataccggctcgggataatagcctcacagcacccattgcgactgcggtaactggcggtttggcacttttggccgtaatcggcaggtgtggtaatagttttctggccaaagagttcacctgggctgatttctgtgctgtccttgctctgctcagctctgtaccaatggatgtatacgagttcttcatgagacgcgatggtatgggcaaagacatatggaccttgactcctgaacaaatcacatccgtacttaagtcaacctgggtcgtgcaagtcagttacatacccgccatcatcctcactaagatttgtatcgtgtgcttctacatgcgtatattcgacgctgtagagaaattcatgataatttgctacatcaccatcgcttactgcgtttgcttcttgatatcgactttcttggctcagatatttggatgttctcctatttcgcaagcgtggactggctggtcgggtcagacgccagggacttgtttcgacacgaatgctttctggtgggctcattcagccctgaatatcgccaccgacctctggatcatggctctcccagtctcacagattcgtaaattacaaatgagtctgaaaagaaaaatctacctgagcctaatgtttagcgtaggtataatgtgagttgcccctttcccatcccttcatgctatagcagcatgctaaggataacagaatcaccatcattagcatcattcgtttctccggtctcataacatactcaacgacctcgaaccctacttataataatgttgcagttacgacattcagcgtgattgaatgtaacctatccatagtatgttgctgcatgccaacattgctggcattatatcgtcgacttttctctatgcccgtcaacacaacaagtcacagcaacagtagcggcgatagcaatagcgcggtttctcaaccacgtcgcggtattcagaagagtattgaaacatcagtttcttcgacaccgaaagattctgattacatcatgcttatagagagtcgtggttcattaagagacaaatggtagcaagacttactctatttagatgagcaaatgtggtcatggcacagtgggcgaagaagcgatatgccttcagagtgaaatattattcatcaaatagagacatagaatctagaagatattggcgcagaaattccgctcgaaatatgacccttgagaagaggagcccctcatgaggtacttactttgacatttccatttccgccttgcaagtaagcccctagcctatctataacagttaagcgccggatcgaaagtggcctacagtcaatagtgt

SEQ ID NO: 12887 - DNA, 960 bp, Muscodor strobelii
  misc_feature: SGI cDNA ID NO. 564204
  misc_feature: Encodes the peptide sequence at SEQ ID NO 12888
atgaagttcgctacttggacaaggattgccttgattggccttgttgtctcctctaatgctcagaatatgccagagtgtgccgcgggctgtctcgcgacgtatgttccacgatcatcatgcaaagctgatgactttgattgcatttgtgccgatacggatcttctggagagtgtgggaacctgcacaatagaagcctgtacaattattgaaggactagctgcgaagaacgctacaattacgctttgtgatataccggctcgggataatagcctcacagcacccattgcgactgcggtaactggcggtttggcacttttggccgtaatcggcaggtgtggtaatagttttctggccaaagagttcacctgggctgatttctgtgctgtccttgctctggtacgtacctactcgaatgacgctaaccagaggaaagtgagacgcgatggtatgggcaaagacatatggaccttgactcctgaacaaatcacatccgtacttaagtcaacctgggtcgtgcaagtcagttacatacccgccatcatcctcactaagatttgtatcgtgtgcttctacatgcgtatattcgacgctgtagagaaattcatgataatttgctacatcaccatcgcttactgcgtttgcttcttgatatcgactttcttggctcagatatttggatgttctcctatttcgcaagcgtggactggctggtcgggtcagacgccagggacttgtttcgacacgaatgctttctggtgggctcattcagccctgaatatcgccaccgacctctggatcatggctctcccagtctcacagattcgtaaattacaaatgagtctgaaaagaaaaatctacctgagcctaatgtttagcgtaggtataataatcaccatcattagcatcattcgtttctccggtctcataacatactcaacgacctcgaaccctacttgttag

SEQ ID NO: 12888 - protein, 319 aa, Muscodor strobelii
  misc_feature: SGI Peptide ID NO. 564204
  misc_feature (19)..(83): Pfam Id: PF05730 Pfam Desc: CFEM domain
  misc_feature (30)..(318): NCBI GI: 256720582 Blast Desc: NECHADRAFT_49855 [Nectria haematococca mpVI 77-13-4]
  misc_feature (20)..(297): NCBI GI: 116202373 Blast Desc: CHGG_09071 [Chaetomium globosum CBS 148.51] gi|88177589|gb|EAQ85057.1| CHGG_09071 [Chaetomium globosum CBS 148.51]
  misc_feature (11)..(318): NCBI GI: 145603992 Blast Desc: MGG_10473 [Magnaporthe grisea 70-15] gi|145012102|gb|EDJ96758.1| MGG_10473 [Magnaporthe grisea 70-15]
  misc_feature (1)..(318): NCBI GI: 212533903 Blast Desc: integral membrane protein [Penicillium marneffei ATCC 18224] gi|210072472|gb|EEA26561.1| integral membrane protein [Penicillium marneffei ATCC 18224]
  misc_feature (81)..(318): NCBI GI: 67900826 Blast Desc: AN7400.2 [Aspergillus nidulans FGSC A4] gi|40742581|gb|EAA61771.1| AN7400.2 [Aspergillus nidulans FGSC A4] gi|259483238|tpe|CBF78457.1| TPA: conserved [Aspergillus FGSC
  misc_feature (22)..(318): NCBI GI: 242791742 Blast Desc: integral membrane protein, [Talaromyces stipitatus ATCC 10500] gi|218718403|gb|EED17823.1| integral membrane protein, [Talaromyces stipitatus ATCC 10500]
  misc_feature (17)..(318): NCBI GI: 256719870 Blast Desc: NECHADRAFT_56726 [Nectria haematococca mpVI 77-13-4]
  misc_feature (22)..(318): NCBI GI: 67538938 Blast Desc: AN5639.2 [Aspergillus nidulans FGSC A4] gi|40743542|gb|EAA62732.1| AN5639.2 [Aspergillus nidulans FGSC A4] gi|259484892|tpe|CBF81501.1| TPA: integral membrane protein,
  misc_feature (22)..(318): NCBI GI: 256728628 Blast Desc: NECHADRAFT_50557 [Nectria haematococca mpVI 77-13-4]
  misc_feature (21)..(318): NCBI GI: 242817318 Blast Desc: conserved [Talaromyces stipitatus ATCC 10500] gi|218713396|gb|EED12820.1| conserved [Talaromyces stipitatus ATCC 10500]
MKFATWTRIALIGLVVSSNAQNMPECAAGCLATYVPRSSCKADDFDCICADTDLLESVGTCTIEACTIIEGLAAKNATITLCDIPARDNSLTAPIATAVTGGLALLAVIGRCGNSFLAKEFTWADFCAVLALVRTYSNDANQRKVRRDGMGKDIWTLTPEQITSVLKSTWVVQVSYIPAIILTKICIVCFYMRIFDAVEKFMIICYITIAYCVCFLISTFLAQIFGCSPISQAWTGWSGQTPGTCFDTNAFWWAHSALNIATDLWIMALPVSQIRKLQMSLKRKIYLSLMFSVGIIITIISIIRFSGLITYSTTSNPTC

SEQ ID NO: 12889 - DNA, 1585 bp, Muscodor strobelii; identical to SEQ ID NO: 12886
  misc_feature: SGI EST ID NO. CUFF.30635.0
  misc_feature: Variant of the nucleotide sequence at SEQ ID NO 12887

SEQ ID NO: 12890 - DNA, 2118 bp, Muscodor strobelii
  misc_feature: SGI cDNA ID NO. 564205
  misc_feature: Encodes the peptide sequence at SEQ ID NO 12891
atgtcgcctctgtggtccgatgcaaatgatccgtcgctggcctatgccaactttagaagattcgaagcttccactgtacaacgcctcggcggtcagacgtgcaaccttaatggcatgggagatgcccgccgaccttcgcaatttggccgacagtcgtcacagggccatcaccggcaagatattgctttgagagaaccggtgtcgccccaagcatcatcactcaacagtagcgtgtttggtgagagagagctggagacagggcgctctcctccgccactgctatcttctttaccagtagctaaaagacaaatcatctcaaagcgtggcaactcatggaatattgagataggcaaactatttctctccctaagcgctttcaccggtctacttgctatcctggcacatgtagatggccgtccactaagccaatggcgcttctttgtttctctaaatgctttgatttccatcttggcagccatttctaaggcttcactcggcttttgtatcagttcatgtcttggtcagtccaagtggaactggttcagcaagcgccgggagagcttgattacattcgaacgtttcgatgatgctagtcgagggccttggggaagcttttggctgatagtgcggttacgatgtcctcactgggtacttcttggtgccgtgtgtacaattgtactactagcatttgagccttttgtgcaagtcgtcgtatccttcgttgggcagttggatcgcaacgtcgaagcaagtccatcaataggtcgtagcgagacccttgacgtcggttcatactatcctatccattctttgtattcagtcggattcaggactccttttgaccccccttccaacacatccgacatcctggaacagtttgaatcccagccagatctagggctagcgtccgcgttatacaacggattttacgactcggcagcagaaaagggtgcttctttctcctgcccatctgcgaattgcacctggccgccttacacgtctttggctatctgcagtgcttgccatgatattacaagccatatcaaacgatttgatcggcaaccgcaatacagtccccttatgcctttaccgcccaacatcacctcgactgtccatcagttgctgccgttaattgagctagcaaaccccagcaaatccaatggctcaatggcgacgtatatgtcggcgttctatcagtacagctcccaagactctatttctttcagcaacctcacgacattgatcggggcgttacagatcctgaaggctgataataggtatgaaaagggagagctattatgggaagacacgccggtgactggcaccgagtgcgcgttatatttctgcatgaacctttatgagtcggtcgtcaagaacggtgcgctttcagagcggatcgtgaagtcgtgggcagagcggaacatgagttcatacaaaatcgccgatcctggtaacttctccctcggcgaaacttttgatgcctggaacaaccactccctcttctcgatacagggagattacgtcaggaccgatctcgagatgtttataccattgaacgaaaccatggagtttctcccagaaataaccaaccatgtccggataacgcaacgtgccatcggtagcacagtagacttgatctacaacaactttttgtaccctagcatgctttggccattcaatggtaatcagacaagcccgtaccaacctctggtcgcgcaaacactttataaaagcaccaatctaacgaagacattcgaaaccgtggccctgagcctgtcaaattgggtgcgcgacatctcggacgtgaagcatataggctggggccaggaatgggtgatttatatccgtgtcgactggccgtatcttgcccttcccgccctgtctcttcttatgggcattggcttcagtttgctctgtataatcgaaactcaccagctgcggttacaaccatggaagacagatatgatcgcgacactcacatattcattagatcccgagacaagagcgaaactgcgccaggcagacaaacacggaaacctcgccaaggcagtcagagatatgactgcgagattcgaggatactggctgtggacctgaactgcatacaaagcaagaatga

SEQ ID NO: 12891 - protein, 705 aa, Muscodor strobelii
  misc_feature: SGI Peptide ID NO. 564205
  misc_feature (126)..(692): NCBI GI: 256728432 Blast Desc: NECHADRAFT_53935 [Nectria haematococca mpVI 77-13-4]
  misc_feature (115)..(705): NCBI GI: 256725830 Blast Desc: NECHADRAFT_94612 [Nectria haematococca mpVI 77-13-4]
  misc_feature (112)..(697): NCBI GI: 46135647 Blast Desc: FG09346.1 [Gibberella zeae PH-1]
  misc_feature (109)..(687): NCBI GI: 85093286 Blast Desc: NCU08172 [Neurospora crassa OR74A] gi|28921111|gb|EAA30428.1| [Neurospora crassa OR74A]
  misc_feature (104)..(672): NCBI GI: 164425452 Blast Desc: NCU05801 [Neurospora crassa OR74A] gi|157070931|gb|EAA30825.2| NCU05801 [Neurospora crassa OR74A]
  misc_feature (109)..(700): NCBI GI: 115400213 Blast Desc: [Aspergillus terreus NIH2624] gi|114191361|gb|EAU33061.1| [Aspergillus terreus NIH2624]
  misc_feature (102)..(685): NCBI GI: 169612752 Blast Desc: SNOG_09502 [Phaeosphaeria nodorum SN15] gi|111061647|gb|EAT82767.1| SNOG_09502 [Phaeosphaeria nodorum SN15]
  misc_feature (99)..(659): NCBI GI: 67525663 Blast Desc: AN3289.2 [Aspergillus nidulans FGSC A4] gi|40744077|gb|EAA63257.1| AN3289.2 [Aspergillus nidulans FGSC A4]
  misc_feature (112)..(691): NCBI GI: 169599855 Blast Desc: SNOG_02753 [Phaeosphaeria nodorum SN15] gi|111068364|gb|EAT89484.1| SNOG_02753 [Phaeosphaeria nodorum SN15]
  misc_feature (99)..(654): NCBI GI: 259485744 Blast Desc: TPA: conserved [Aspergillus nidulans FGSC A4]
MSPLWSDANDPSLAYANFRRFEASTVQRLGGQTCNLNGMGDARRPSQFGRQSSQGHHRQDIALREPVSPQASSLNSSVFGERELETGRSPPPLLSSLPVAKRQIISKRGNSWNIEIGKLFLSLSAFTGLLAILAHVDGRPLSQWRFFVSLNALISILAAISKASLGFCISSCLGQSKWNWFSKRRESLITFERFDDASRGPWGSFWLIVRLRCPHWVLLGAVCTIVLLAFEPFVQVVVSFVGQLDRNVEASPSIGRSETLDVGSYYPIHSLYSVGFRTPFDPPSNTSDILEQFESQPDLGLASALYNGFYDSAAEKGASFSCPSANCTWPPYTSLAICSACHDITSHIKRFDRQPQYSPLMPLPPNITSTVHQLLPLIELANPSKSNGSMATYMSAFYQYSSQDSISFSNLTTLIGALQILKADNRYEKGELLWEDTPVTGTECALYFCMNLYESVVKNGALSERIVKSWAERNMSSYKIADPGNFSLGETFDAWNNHSLFSIQGDYVRTDLEMFIPLNETMEFLPEITNHVRITQRAIGSTVDLIYNNFLYPSMLWPFNGNQTSPYQPLVAQTLYKSTNLTKTFETVALSLSNWVRDISDVKHIGWGQEWVIYIRVDWPYLALPALSLLMGIGFSLLCIIETHQLRLQPWKTDMIATLTYSLDPETRAKLRQADKHGNLAKAVRDMTARFEDTGCGPELHTKQE

SEQ ID NO: 12892 - DNA, 1260 bp, Muscodor strobelii
  misc_feature: SGI cDNA ID NO. 564206
  misc_feature: Encodes the peptide sequence at SEQ ID NO 12893
atggctgaaatcgatcccttgatcctctcgtactcgcacttgccgaacttcccacgcgcctctgaagctttgcatatcctcaagaaaatagcttccttggtgaagcctcttatgcgtgcgcgaggctggaaagtgaaacagctgactgagttctatcccgaccagcaaaaccttctaggactcaatgtagggcaaggcatgaaaatttgtctccgccttcgatatcctggagataaaaaccagtttatgcccatcgagcaggtgactgacacaatgctccatgaacttgcacataacgtccacggtccccacgatcagaaattccatgcattgtggaaccagctacgagatgaacacgagtcgttaaccttgaaagggtacacaggagagggattcctgtcagagggtcatcgacttggaggcagaagaatcccgatggaggaggcccggaggctggctcgcgcggctgctgagaagcgacgcactcaaaactcgggctccggtcagcgtcttggcggtcctgctcttcagcctggccaagatattcggcgagttattgcaaatgctgtagaacggcgtaaccggactctacgaggatgcgcaaacgataaccagacgcaggacgagattattgagattgcgaatactgcaacaaggaatgggtttagaacacaagcggaagaggatgcagcgaacgaagccgcaatcgcacaagcattatgggaaatggtccaggaagacgagaaggctagaaacgggagcacacgcgtcccatcacagcatagcacagcatctaaagcgcagaccttgagtagaaactccgaagtgaacacagcaaccgtgcagccaccgcggagccaaggtagtacgaagcaggacgaaacatgcaaagatgcctctagcacgtggacgtgcaacgcctgtacacttgtcaatccggcaacatttctatgctgcgatgcatgtggttcggaaaaacccgagcgtgttgatcagggatctggaagatcgtcgaagcgatccaagacatcgcaacctgtaatcgacctcaccgacccgaacaattcaacaacgaccgaccggcacgaccgacttcgacctccgtcaagcaggccaacgacaacggatccgggtgtaacgactgcgccgtccatggcgtccgctttacagacatggacgtgtcatttttgtggcaataaacgagacaagcaatggtggtcctgcgatttgtgtggcagtatcaagcttgacagcaagtag

SEQ ID NO: 12893 - protein, 419 aa, Muscodor strobelii
  misc_feature: SGI Peptide ID NO. 564206
  misc_feature (6)..(195): Pfam Id: PF08325 Pfam Desc: WLM domain
  misc_feature (298)..(328): Pfam Id: PF00641 Pfam Desc: Zn-finger in Ran binding protein and others
  misc_feature (301)..(328): Pfam Id: PF00641 Pfam Desc: Zn-finger in Ran binding protein and others
  misc_feature (1)..(351): NCBI GI: 46107706 Blast Desc: FG00736.1 [Gibberella zeae PH-1]
  misc_feature (1)..(418): NCBI GI: 212539624 Blast Desc: zinc metallopeptidase, [Penicillium marneffei ATCC 18224] gi|210067266|gb|EEA21358.1| zinc metallopeptidase, [Penicillium marneffei ATCC 18224]
  misc_feature (1)..(419): NCBI GI: 85111604 Blast Desc: NCU02060 [Neurospora crassa OR74A] gi|28925774|gb|EAA34780.1| NCU02060 [Neurospora crassa OR74A]
  misc_feature (1)..(418): NCBI GI: 169766736 Blast Desc: [Aspergillus oryzae RIB40] gi|238483501|ref|XP_002372989.1| zinc metallopeptidase, [Aspergillus flavus NRRL3357] gi|83765694|dbj|BAE55837.1| protein
  misc_feature (3)..(418): NCBI GI: 156054090 Blast Desc: SS1G_05893 [Sclerotinia sclerotiorum 1980] gi|154703673|gb|EDO03412.1| SS1G_05893 [Sclerotinia sclerotiorum 1980]
  misc_feature (1)..(258): NCBI GI: 256734686 Blast Desc: NECHADRAFT_98911 [Nectria haematococca mpVI 77-13-4]
  misc_feature (1)..(418): NCBI GI: 119189391 Blast Desc: CIMG_04743 [Coccidioides immitis RS]
  misc_feature (1)..(418): NCBI GI: 240111253 Blast Desc: Zn-finger in Ran binding protein and others domain containing protein [Coccidioides posadasii C735 delta SOWgp]
  misc_feature (1)..(418): NCBI GI: 239609467 Blast Desc: zinc metallopeptidase [Ajellomyces dermatitidis ER-3]
  misc_feature (1)..(418): NCBI GI: 225562890 Blast Desc: zinc ion binding [Ajellomyces capsulatus G186AR]
MAEIDPLILSYSHLPNFPRASEALHILKKIASLVKPLMRARGWKVKQLTEFYPDQQNLLGLNVGQGMKICLRLRYPGDKNQFMPIEQVTDTMLHELAHNVHGPHDQKFHALWNQLRDEHESLTLKGYTGEGFLSEGHRLGGRRIPMEEARRLARAAAEKRRTQNSGSGQRLGGPALQPGQDIRRVIANAVERRNRTLRGCANDNQTQDEIIEIANTATRNGFRTQAEEDAANEAAIAQALWEMVQEDEKARNGSTRVPSQHSTASKAQTLSRNSEVNTATVQPPRSQGSTKQDETCKDASSTWTCNACTLVNPATFLCCDACGSEKPERVDQGSGRSSKRSKTSQPVIDLTDPNNSTTTDRHDRLRPPSSRPTTTDPGVTTAPSMASALQTWTCHFCGNKRDKQWWSCDLCGSIKLDSK

SEQ ID NO: 12894 - DNA, 2345 bp, Muscodor strobelii
  misc_feature: SGI EST ID NO. CUFF.30650.0
  misc_feature: Variant of the nucleotide sequence at SEQ ID NO 12892
caggcatcctcgagtttcgcgtcctttgtatgagtggcaacactggatccaagtacttttttctggatatcaacggaatggcccagtgcccttgaacttttgtcaaaatgtaaatcgacattgttctgtttattgacccttgattgcaggcatcaaaagcattaatgccacctttcctgtcattgccatttttagacggaaggttaaaccgttaaaaagctgttgagttttgtggttggatctatttaagcaggcgttgtgtctgcagcttcagtacgtcttgccgatttggctgacttcggctggtcgcactcacggttacccacaatctcatatcgaaagatcctcggagcagcggattctcgtcgtaaaagacaagatggctgaaatcgatcccttgatcctctcgtactcgcacttgccgaacttcccacgcgcctctgaagctttgcatatcctcaagaaaatagcttccttggtgaagcctcttatgcgtgcgcgaggctggaaagtgaaacagctgactgagttctatcccgaccagcaaaaccttctaggactcaatgtagggcaaggcatgaaaatttgtctccgccttcgatatcctggagataaaaaccagtttatgcccatcgagcaggtgactgacacaatgctccatgaacttgcacataacgtccacggtccccacgatcagaaattccatgcattgtggaaccagctacgagatgaacacgagtcgttaaccttgaaagggtacacaggagagggattcctgtcagagggtcatcgacttggaggcagaagaatcccgatggaggaggcccggaggctggctcgcgcggctgctgagaagcgacgcactcaaaactcgggctccggtcagcgtcttggcggtcctgctcttcagcctggccaagatattcggcgagttattgcaaatgctgtagaacggcgtaaccggactctacgaggatgcgcaaacgataaccagacgcaggacgagattattgagattgcgaatactgcaacaaggaatgggtttagaacacaagcggaagaggatgcagcgaacgaagccgcaatcgcacaagcattatgggaaatggtccaggaagacgagaaggctagaaacgggagcacacgcgtcccatcacagcatagcacagcatctaaagcgcagaccttgagtagaaactccgaagtgaacacagcaaccgtgcagccaccgcggagccaaggtagtacgaagcaggacgaaacatgcaaagatgcctctagcacgtggacgtgcaacgcctgtacacttgtcaatccggcaacatttctatgctgcgatgcatgtggttcggaaaaacccgagcgtgttgatcagggatctggaagatcgtcgaagcgatccaagacatcgcaacctgtaatcgacctcaccgacccgaacaattcaacaacgaccgaccggcacgaccgacttcgacctccgtcaagcaggccaacgacaacggatccgggtgtaacgactgcgccgtccatggcgtccgctttacagacatggacgtgtcatttttgtggcaataaacgagacaagcaatggtggtcctgcgatttgtgtggcagtatcaagcttgacagcaagtagtgagcgggattgagtgatgaattgcctttctagacatgcacaagacaagatactgctgtatgttgagcggtgagattttggcgcaatagacagactcgacacacacgtgtacggctttagccggcgttcatagcattgatttgtcaataacaagtagctgtttccagacctctgtgaaaacatcttgaacaacctcgggaccttggggtcgtcaggatcgtgttggacgtaggttgctacctattccatgacgtcatagcactatactttagttcacagatcgttagatcagaattgggtcccgtcttgcattccgtgtttcggccatgacttcagctctgagctgtctttggcttttttttttaagagactgcacaacttgccaagcctgccgcaacatctcttctcctcaactacctcgctctattgagcttgggactttcagaaatgcagctcaagaagtgtctgtacatagcctttcataaataaatctatgggtttacagtgtgggcgtacaacgtggttagacgattgccatgagttcgagggctggtactggtagcttaggtaggtacgtcataagctagtagctaatggcaaggatcaggctgggacctgcggacaaaacagctgagacgcttggcgagcgggcaactcgcaagcgcaaaatcgtgtggcgaatgcaatatggatttgtatgtccccg

SEQ ID NO: 12895 - DNA, 4176 bp, Muscodor strobelii
  misc_feature: SGI cDNA ID NO. 564207
  misc_feature: Encodes the peptide sequence at SEQ ID NO 12896
atgacgcctcccgatgcgccgctgcctatttcgccacaccacattctcgacaatgtcgccatttctggccaggaagaactacagtcaaaagtcaacacggcagagccatcccaatcggctgttcataaagatgctacgagcgtcgtggacccggggcagccacactcctcgtcgctaaatgcgccttttcgcaatggatcaacacaggcggttcaagatgggatccatacagacgatatggccacgggccaaagagaaccaagatctgcttcctctgtaggaagtcctctgcggctacctctaaccatgatctcaccagcccaggtcgcgttctctgccatgcaatttctacctattcccttgctcgttctaaatggtctgaaaactgtagttctcgcaaacgaggcgatgggaaccctgctcggctttgacgaagagctatctcccacatcaactagactaaaaggccaaactcttgctcaaattggcattgatcttctgcaagaaggccggcctatttggatctcatgggaatcctttttggaaaatttgaagacggagatgcggtcgagacctcccgtagtgccaaccccctcgagcacggccaacccccacgacagtgttgcgtcgcctgactccgatgctacatcaaaagggagctattttggctcatccggaaaaattgccgtcgattctgctgtcgacgtggttgttacatccaagaaaatacacgatgaaacaattccaaaatctcgacgatcaaaatatcaaacgacagccaagatgatcatctctatttgggaagtagatgactctgagacgtattatacgttgacgttcagtgatattgacacaccattttcttctaactcggaatcacgcatttctgctgctcgcatgtccgttctcgaagctgccgacttcaaatctatccctgcctcaagcacgtcctcaatgggatcaagtggaggatccagttcagcatcgattatcttgagccctgcttcagtatcagtctccgcaaatccgcttccttctattacaccgccatctcgtcttccacaaacgaccactccatccttccttcaaaaagtaacagtgataaaggatgcactcttaaataacacacaaatgccgattttcgcgatgtggatagacggcagcgcaccggtctacaaccgggctgccaaagaactgttcaccttaccagttcctactagcattactgatggttacgatttactaccgaactgggaggtatggactgacgacttttcacggaagttccagccatcggaatatcccattgcggttttgttgagagaacagaaaccgttttccgggtggcgaatagggatgtataatcccaatacacagaaaaaaggtgtctacgacatgttaggcgaagtactaacaagcgacgagacaaatgaagttgtcggaggcgtggtaacatgccgagatgttacgcctatggcggaggaaatcacaaagatcaaagaagcggacgaggaaagatttaggctgatatgcgacacaatgcctcaaatggtttggacgacaacgccagatgggctgcatgatttcttcaataatagatggtatgacttcactggattgagtccagatgagagccttggcttaggatggaaaaatcctttccaccccgatgacatgcccgcgacagaaaagaggtggaagcacagtctagcaacgggacatccttactttacagagtatcgttgtctcagcaaagatggtgagtggcgctggatgataggccgtgcattgcctctcagaaataaggagactggaaagatcgagaagtggtttgggacatgcactgatgtccatgagaccatggaggcaaagttggccatgaagcggacacgcgaacagcttctcagcgtgcttacacacgcccaaacgacaatattctccgtcgatcgtgatcggaaagtgactatgcttgaaggctcactcatttggaatgatagcaatgacaccagaagcagtgacagtgaatctagtcaggattcgcagaagtacattggtcgcaatgtagatgaggtgttcaacgatctcaaccctaggctacgtcgtggagaaacaccggcttttctcaaaccggtatcggacctcttagctggtaaagcgcctagtgacactgtccatgagcatgaaattgacgatcatttctatcggactagatttttaccaatcacggaaaacaggttcaagcctagtcaacccggacggccagtaatcgaaggagtcattggagtggttatgaatgtaacagaattgaaggagacagaaaaagttttgaaaacgcaagtcagagaaaagcgccttcacatggccaatgaggctgccgcaaaagaagcaagtcgggcggcaaaagaagcaagtcgattgaagagccaatttttggctaatatgtcacacgaaatccgaactccaatcactggggtcattggaatggctgaactccttctcgacatgccattaggtgaagaacaacgagagttcgcgttgaatattagtcgttccgccaatgcgctcctcaccgttatcaatgacattcttgatttttcaaaagtcgagtctggtcgattagacatcgaggaggtccagttttcgctctcaatggtagtccaagatgtctcaaaaatgctgagttttgctgcagagagaaagaacctcgactttcgctctgacattgcgccgggcatcgagaatgatcttgtcgtcctgggtgatcccggccgtgttaggcagataataaccaaccttatcacaaacagtatcaagttcaccaatagcggatatgtcgaattctctgtttggaaagaaaaagaaacggacgatgttctcgagacaaaatttgtcatcaaagatactggcattgggattgacgaagacgtacgaaagcgcttgttcaagccgtttagccagggcgatccatcaaccgcaagaaaatttggcggaactgggctgggcctgacgatttcgaaaaatttgctagacctaatgaaagggcgaatcgagctcgaatcatccgttggcaacggaaccactgctaccttctggatacctttcacgaaacttcaaaatcccgagagagacgcactggtggagattgggccaataccagatcgacttcattcggaactgagtgtttcttgcaccagttcggagcaggaacactccgggcctcaaactggcgactcgatgaacacctcgccggagaaggttcgacggcgtaaccacttgccgtcgcatatggtatctgacattgagactttgccgatggctgagcgtgccaagattcatgtactcgttgtagaggataacgccataaaccaacagattgccttgaagacaataaaaaaacttggtttcaaagtccacgcagcatggaacggcaaagaagcgcttgactacattgaggctgcccaggagacaaagctattcaaacccgacatcattctcatggatgtccagatgcccgtgattgatgggtacaaatgcacacacatcctccgacaccatacaccctacaaggcttttacatacgacgttccaatcgtggcgatgacggcttcggctattcaaggcgacagagagaaatgtacccaagctggtatggatgactaccttgcaaagcccgtcaacagcaagacgctcgagaaaatgctggtgcggtggagtaagagcagtcgaagaaatatatcgagtacttcatcgcatgctccagcatccgaatgctccgaatcggcagattactgtgtgagtcccgatataccaactcttggtcttcatgagcaagacaaagaacggtcgcctgtgtcagatccttcgatagatcagcagtactttgaagacttagcgactgcaagcttattgacaccaaggccattgatgaagagtagtttgaatgacatcaattcgtttccttttggagttgcccaaacaacaaggcaactcgactcaaacgagttggcgatgcaacttcgagacgataaattactaggtgccgcaggcgtcggcaccgcgtctgcatctcctccaccgaacacactcaacgagggcgactcgttgacgaaagagaacgtggagaaacttgaaaaactggatagggaaaattcgcagggaaaagtgccacggcggtaa

SEQ ID NO: 12896 - protein, 1391 aa, Muscodor strobelii
  misc_feature: SGI Peptide ID NO. 564207
  misc_feature (920)..(1035): Pfam Id: PF02518 Pfam Desc: Histidine kinase-, DNA gyrase B-, and HSP90-like ATPase
  misc_feature (806)..(871): Pfam Id: PF00512 Pfam Desc: His Kinase A (phosphoacceptor) domain
  misc_feature (527)..(620): Pfam Id: PF08447 Pfam Desc: PAS fold
  misc_feature (1111)..(1235): Pfam Id: PF00072 Pfam Desc: Response regulator receiver domain
  misc_feature (505)..(617): Pfam Id: PF00989 Pfam Desc: PAS fold
  misc_feature (40)..(1376): NCBI GI: 46107708 Blast Desc: FG00737.1 [Gibberella zeae PH-1]
  misc_feature (56)..(1378): NCBI GI: 261358636 Blast Desc: ethylene receptor [Verticillium albo-atrum VaMs.102]
  misc_feature (33)..(1377): NCBI GI: 39726361 Blast Desc: histidine kinase HHK6p [Gibberella moniliformis]
  misc_feature (87)..(1280): NCBI GI: 171687465 Blast Desc: protein product [Podospora anserina] gi|170943694|emb|CAP69346.1| protein product [Podospora anserina]
  misc_feature (95)..(1386): NCBI GI: 145613814 Blast Desc: MGG_01342 [Magnaporthe grisea 70-15] gi|145020837|gb|EDK04966.1| MGG_01342 [Magnaporthe grisea 70-15]
  misc_feature (101)..(1299): NCBI GI: 85111598 Blast Desc: NCU02057 [Neurospora crassa OR74A] gi|28925771|gb|EAA34777.1| conserved [Neurospora crassa OR74A]
  misc_feature (509)..(1349): NCBI GI: 156054917 Blast Desc: SS1G_06305 [Sclerotinia sclerotiorum 1980] gi|154704085|gb|EDO03824.1| SS1G_06305 [Sclerotinia sclerotiorum 1980]
  misc_feature (96)..(1391): NCBI GI: 39656325 Blast Desc: histidine kinase HHK6p [Cochliobolus heterostrophus]
  misc_feature (383)..(1376): NCBI GI: 169602473 Blast Desc: SNOG_04238 [Phaeosphaeria nodorum SN15] gi|160706176|gb|EAT87998.2| SNOG_04238 [Phaeosphaeria nodorum SN15]
  misc_feature (501)..(1253): NCBI GI: 189203185 Blast Desc: autoinducer 2 sensor kinase/phosphatase luxQ [Pyrenophora tritici-repentis Pt-1C-BFP] gi|187985027|gb|EDU50515.1| autoinducer 2 sensor luxQ Pt-1C-BFP]
MTPPDAPLPISPHHILDNVAISGQEELQSKVNTAEPSQSAVHKDATSVVDPGQPHSSSLNAPFRNGSTQAVQDGIHTDDMATGQREPRSASSVGSPLRLPLTMISPAQVAFSAMQFLPIPLLVLNGLKTVVLANEAMGTLLGFDEELSPTSTRLKGQTLAQIGIDLLQEGRPIWISWESFLENLKTEMRSRPPVVPTPSSTANPHDSVASPDSDATSKGSYFGSSGKIAVDSAVDVVVTSKKIHDETIPKSRRSKYQTTAKMIISIWEVDDSETYYTLTFSDIDTPFSSNSESRISAARMSVLEAADFKSIPASSTSSMGSSGGSSSASIILSPASVSVSANPLPSITPPSRLPQTTTPSFLQKVTVIKDALLNNTQMPIFAMWIDGSAPVYNRAAKELFTLPVPTSITDGYDLLPNWEVWTDDFSRKFQPSEYPIAVLLREQKPFSGWRIGMYNPNTQKKGVYDMLGEVLTSDETNEVVGGVVTCRDVTPMAEEITKIKEADEERFRLICDTMPQMVWTTTPDGLHDFFNNRWYDFTGLSPDESLGLGWKNPFHPDDMPATEKRWKHSLATGHPYFTEYRCLSKDGEWRWMIGRALPLRNKETGKIEKWFGTCTDVHETMEAKLAMKRTREQLLSVLTHAQTTIFSVDRDRKVTMLEGSLIWNDSNDTRSSDSESSQDSQKYIGRNVDEVFNDLNPRLRRGETPAFLKPVSDLLAGKAPSDTVHEHEIDDHFYRTRFLPITENRFKPSQPGRPVIEGVIGVVMNVTELKETEKVLKTQVREKRLHMANEAAAKEASRAAKEASRLKSQFLANMSHEIRTPITGVIGMAELLLDMPLGEEQREFALNISRSANALLTVINDILDFSKVESGRLDIEEVQFSLSMVVQDVSKMLSFAAERKNLDFRSDIAPGIENDLVVLGDPGRVRQIITNLITNSIKFTNSGYVEFSVWKEKETDDVLETKFVIKDTGIGIDEDVRKRLFKPFSQGDPSTARKFGGTGLGLTISKNLLDLMKGRIELESSVGNGTTATFWIPFTKLQNPERDALVEIGPIPDRLHSELSVSCTSSEQEHSGPQTGDSMNTSPEKVRRRNHLPSHMVSDIETLPMAERAKIHVLVVEDNAINQQIALKTIKKLGFKVHAAWNGKEALDYIEAAQETKLFKPDIILMDVQMPVIDGYKCTHILRHHTPYKAFTYDVPIVAMTASAIQGDREKCTQAGMDDYLAKPVNSKTLEKMLVRWSKSSRRNISSTSSHAPASECSESADYCVSPDIPTLGLHEQDKERSPVSDPSIDQQYFEDLATASLLTPRPLMKSSLNDINSFPFGVAQTTRQLDSNELAMQLRDDKLLGAAGVGTASASPPPNTLNEGDSLTKENVEKLEKLDRENSQGKVPRR

SEQ ID NO: 12897 - DNA, 5166 bp, Muscodor strobelii
  misc_feature: SGI EST ID NO. CUFF.30659.0
  misc_feature: Variant of the nucleotide sequence at SEQ ID NO 12895
cgagggctggaggctcaggaaggggtcaaaaacccccattgcatctcaccatagacatcatcccctccacatcggtgcgcgttggtcaaacgggaggccgagacggtgctggtaactagacgaattgtgcaatgaattactggactcgtagttgcggcatactaatcatcaaccgaaccgaacgtccctattatgcaacctaaacagtggatgtaggagcaaagtcaatgctcttcctcttatgcatttctacttactatcttacacacacttttctctccacccatctatgaaccggctgctctctcgtcaaacgccgtcacgcgatgtcacagaatccgaaattcatgtcgtaattgctattgaacattacttttaccctgtttcccaaggtttccctctgcattcggcctcttttaccccgttccagcagtgctaagcagaagccatcgacgctacagcgaacccccccgtcacggatcggtcaaggagaaaagagacttctcaactaatagtgccaccgaacgttcgagaccacccctcagatacaccacgtacaccttcgtctcttgacagaaactggtgtcaatcgtctaatctcgtcgcaaagctttttcgcttgtaatccgggagtagctttggcttcttcagcccggtcagttactgtcgtgactcatccatacctgtgttgtgagcgcgcatgttgtcagatctcgttgcgtctatggctcccactcgcccgtgacccaagcttggtctctcgatatgacgcctcccgatgcgccgctgcctatttcgccacaccacattctcgacaatgtcgccatttctggccaggaagaactacagtcaaaagtcaacacggcagagccatcccaatcggctgttcataaagatgctacgagcgtcgtggacccggggcagccacactcctcgtcgctaaatgcgccttttcgcaatggatcaacacaggcggttcaagatgggatccatacagacgatatggccacgggccaaagagaaccaagatctgcttcctctgtaggaagtcctctgcggctacctctaaccatgatctcaccagcccaggtcgcgttctctgccatgcaatttctacctattcccttgctcgttctaaatggtctgaaaactgtagttctcgcaaacgaggcgatgggaaccctgctcggctttgacgaagagctatctcccacatcaactagactaaaaggccaaactcttgctcaaattggcattgatcttctgcaagaaggccggcctatttggatctcatgggaatcctttttggaaaatttgaagacggagatgcggtcgagacctcccgtagtgccaaccccctcgagcacggccaacccccacgacagtgttgcgtcgcctgactccgatgctacatcaaaagggagctattttggctcatccggaaaaattgccgtcgattctgctgtcgacgtggttgttacatccaagaaaatacacgatgaaacaattccaaaatctcgacgatcaaaatatcaaacgacagccaagatgatcatctctatttgggaagtagatgactctgagacgtattatacgttgacgttcagtgatattgacacaccattttcttctaactcggaatcacgcatttctgctgctcgcatgtccgttctcgaagctgccgacttcaaatctatccctgcctcaagcacgtcctcaatgggatcaagtggaggatccagttcagcatcgattatcttgagccctgcttcagtatcagtctccgcaaatccgcttccttctattacaccgccatctcgtcttccacaaacgaccactccatccttccttcaaaaagtaacagtgataaaggatgcactcttaaataacacacaaatgccgattttcgcgatgtggatagacggcagcgcaccggtctacaaccgggctgccaaagaactgttcaccttaccagttcctactagcattactgatggttacgatttactaccgaactgggaggtatggactgacgacttttcacggaagttccagccatcggaatatcccattgcggttttgttgagagaacagaaaccgttttccgggtggcgaatagggatgtataatcccaatacacagaaaaaaggtgtctacgacatgttaggcgaagtactaacaagcgacgagacaaatgaagttgtcggaggcgtggtaacatgccgagatgttacgcctatggcggaggaaatcacaaagatcaaagaagcggacgaggaaagatttaggctgatatgcgacacaatgcctcaaatggtttggacgacaacgccagatgggctgcatgatttcttcaataatagatggtatgacttcactggattgagtccagatgagagccttggcttaggatggaaaaatcctttccaccccgatgacatgcccgcgacagaaaagaggtggaagcacagtctagcaacgggacatccttactttacagagtatcgttgtctcagcaaagatggtgagtggcgctggatgataggccgtgcattgcctctcagaaataaggagactggaaagatcgagaagtggtttgggacatgcactgatgtccatgagaccatggaggcaaagttggccatgaagcggacacgcgaacagcttctcagcgtgcttacacacgcccaaacgacaatattctccgtcgatcgtgatcggaaagtgactatgcttgaaggctcactcatttggaatgatagcaatgacaccagaagcagtgacagtgaatctagtcaggattcgcagaagtacattggtcgcaatgtagatgaggtgttcaacgatctcaaccctaggctacgtcgtggagaaacaccggcttttctcaaaccggtatcggacctcttagctggtaaagcgcctagtgacactgtccatgagcatgaaattgacgatcatttctatcggactagatttttaccaatcacggaaaacaggttcaagcctagtcaacccggacggccagtaatcgaaggagtcattggagtggttatgaatgtaacagaattgaaggagacagaaaaagttttgaaaacgcaagtcagagaaaagcgccttcacatggccaatgaggctgccgcaaaagaagcaagtcgggcggcaaaagaagcaagtcgattgaagagccaatttttggctaatatgtcacacgaaatccgaactccaatcactggggtcattggaatggctgaactccttctcgacatgccattaggtgaagaacaacgagagttcgcgttgaatattagtcgttccgccaatgcgctcctcaccgttatcaatgacattcttgatttttcaaaagtcgagtctggtcgattagacatcgaggaggtccagttttcgctctcaatggtagtccaagatgtctcaaaaatgctgagttttgctgcagagagaaagaacctcgactttcgctctgacattgcgccgggcatcgagaatgatcttgtcgtcctgggtgatcccggccgtgttaggcagataataaccaaccttatcacaaacagtatcaagttcaccaatagcggatatgtcgaattctctgtttggaaagaaaaagaaacggacgatgttctcgagacaaaatttgtcatcaaagatactggcattgggattgacgaagacgtacgaaagcgcttgttcaagccgtttagccagggcgatccatcaaccgcaagaaaatttggcggaactgggctgggcctgacgatttcgaaaaatttgctagacctaatgaaagggcgaatcgagctcgaatcatccgttggcaacggaaccactgctaccttctggatacctttcacgaaacttcaaaatcccgagagagacgcactggtggagattgggccaataccagatcgacttcattcggaactgagtgtttcttgcaccagttcggagcaggaacactccgggcctcaaactggcgactcgatgaacacctcgccggagaaggttcgacggcgtaaccacttgccgtcgcatatggtatctgacattgagactttgccgatggctgagcgtgccaagattcatgtactcgttgtagaggataacgccataaaccaacagattgccttgaagacaataaaaaaacttggtttcaaagtccacgcagcatggaacggcaaagaagcgcttgactacattgaggctgcccaggagacaaagctattcaaacccgacatcattctcatggatgtccagatgcccgtgattgatgggtacaaatgcacacacatcctccgacaccatacaccctacaaggcttttacatacgacgttccaatcgtggcgatgacggcttcggctattcaaggcgacagagagaaatgtacccaagctggtatggatgactaccttgcaaagcccgtcaacagcaagacgctcgagaaaatgctggtgcggtggagtaagagcagtcgaagaaatatatcgagtacttcatcgcatgctccagcatccgaatgctccgaatcggcagattactgtgtgagtcccgatataccaactcttggtcttcatgagcaagacaaagaacggtcgcctgtgtcagatccttcgatagatcagcagtactttgaagacttagcgactgcaagcttattgacaccaaggccattgatgaagagtagtttgaatgacatcaattcgtttccttttggagttgcccaaacaacaaggcaactcgactcaaacgagttggcgatgcaacttcgagacgataaattactaggtgccgcaggcgtcggcaccgcgtctgcatctcctccaccgaacacactcaacgagggcgactcgttgacgaaagagaacgtggagaaacttgaaaaactggatagggaaaattcgcagggaaaagtgccacggcggtaatgttttgcattcttgattaaatccattcatggtgatgtaatttggcatagacacggcgccagcgtctgatttacaggattgcgatcactcggggaataaacttctcacttcatgatgggcgattgatgctacgataatttacgattgtatgtggcgtttttagactagaacatatggcatgtgtcggtgcggcttcttcaatttaagtctatgtgatgcatagag

SEQ ID NO: 12898 - DNA, 3903 bp, Muscodor strobelii
  misc_feature: SGI cDNA ID NO. 564208
  misc_feature: Encodes the peptide sequence at SEQ ID NO 12899
atgactatcgtcgacgaaaaacagagggctcaggcggctggtagcgccacgggaggccgtgctcctccgcctccacctcgatacgtggtcagccatgatcaccaagactctgataggggatttgtgccagacatttctgagatcggccccgaggaggatgttccacccgcctacagcgaacttcacgatcagttcaatatccaccaagctggcttcgacgccggtgccgcagtcacagatgacggccgagtgaacatcaatatcaatcagaccactagtcaactgactgatctacttgcgccaacgctccgcaaccagctaagactagatgctcaagctgctgctgaagctccattaccaccaccctacatccccccaagcctcggcggccaacccggccagacaccgccacccaagttgaacattgtcatacagattgtaggatctcgaggtgatgtgcagccattcgttgccctcggccaagtcctgaagaatacatatggtcaccgcgtacgcgtcgcaacacacgcaacttttcagaaattcgtggaggagaatggcttggagttcttcagtattggtggcgatcctgccgagcttatggccttcatggtcaagcaccccggcctgatgcccggtatcgatgcactgaaagaaggcgagatcacgaggcgtaggctgggcatagaacagattgtgacgggctgctggagatcctgcatcgagaccggtgatggccttgggccggcgccgcgatttgatcgtcaattccgcgaagcttccgccgctctcccccctgcggtcgtcacggatccgaggcacaagccgtttgtcgccgatgctatcattgccaaccctcctagtttcgctcatattcatgttgccgagaaattgggcatcccccttcacttgatgtttactatgccttggtcacccacaagagcgtttcctcagcctttggcaaacatccaatcttccaacactgatcccgtcactaccaactatttttcatacgctctggtcgaaatgatgacctggcaggggttgggcgatgtcatcaaccgattccgaaccaaggttcttgaccttgagcccttatcgttgatctgggcgcctggtgtattgacccgcctgaggatcccctatacgtattgctggtcacctgcactaatccccaagcctaacgattggggaaatcatatcgacattgccgggttttatttccttaacttggcctcttcctatacacccgagcctgatcttgctgctttcttggacgccggcccgcctccagtttacatcggatttggttccatcgttgtggatgaccccaatgcactgacgaagatgatattcgacgcagttgccgaaactggtgtccgagcactagtctctaagggttggggtggattaggcgctgactctatgggtgtaccggatggtgtcttcatgctcggaaatgtacctcacgactggcttttcaagcacgtctcagctgtgtgccatcacggaggcgcaggtacaacagcagctggaatacaggccggcaagcctaccattgtggtcccattctttggagatcagccattctggggggcaatggtggccagagcgggagctggcccagacccaataccctacaagaaactcacggccgaagggcttgcagaagctatccgaattgcgctaaaaccagagacacaggagagggcaaaagagctcggcgagaagatccgggaagagaagggtgccgacatgggcggacagagctttcacaaattcattgatttcgatggcttacgctgtgctgttgctccgagtagagtagctgtttggcgtgtaagacgaagtaaaactcatctaagcgcactcgccgcggccactctggtagatagcggatatctacagtactccgatcttaaactcttccgcgctaaggaatacaatctcggcgatcatcctactgatcctatcactgctgttacatcagctttagtcggagattttacaactattctcatgtctgccgcagattttcctcgggatctcttcaaagctgcaagagggcagcctaaaccaaaacctcaagatgcttcgggaaacaacagcatgccaacaaatcttccccaggcaacagagtctactcaaacgctagcctcggtaacttcgaatacgttgagcaagggcgagaccaatgatagtactcaagatcttactccgattacctccgtcgcgtcgggacaacctgataccccgtcctctcatacgcagcgcgatgaagtccctccagctccatcacccggtgtgaaccagcacttggaaagggctcttggcgctggcaaaagcattaacaatattgtagccactggcgtcaagagtcccatgaacttttgtatgggactcgcaaagggcttcagaaatgcgcccggtctatacaacgacgatacaattcgacccgcggaaaaagttacagacttcagcagtggtctgaaagtagccgccaaagagtttggctttggtatgttcgacggcattacagggctggtcacccagccgttaagaggtgccgagaaagaaggcggtgcaggcttgcttaaaggctttggaaaaggtatcggtggagtggcgctgaaagtgccagccgctatctggtccataccagcatataccatggctggtgtgcatgctgagattcggactcgttttgcgcaaaatgctgccaagtatatcatcgcatcacggattgcccaaggtgatgaagacttcaagcactctactgctgaagagcgagaagacattgaagtgcgctggttaagccagaaagagggcttgaaagggttctataccttcaaacagaaagagaagggcaagtcaagagacagctcaccgccggcgcccgagtattcctcggtcagcgacacacccagaacgggatggcgtcatactcgaaatcttagtttcgacgagaagaaaaagctgcaagatcagaagaaagcgtggaaaaagtcacgagcagatggaccattcattgatgagaaggtaccatcgaggcccgaagccggcggtgcgagcgagatggacgacgaatatgagagcgcgattcaaaatgcggttcacgagacttcgcgaggagatcccgctgaggacgcaagaatcgagcaagcgatccgctcaagcgtgggtgtactcagaagacattcctcgcggatgcgctctgagtcaacctcaagctcgaacaccggctattcccagtggatccctgacaccaaacaaaggggtccggatgagaagagcgaggcgacatcagccacagatgatcttgatattaccgatgaggaatatcaagcacttatcgcagaggccatcaaacttagtatggaagagcagcaacagcaacatcatggcatccagatgattgatcgagagaactatgacgacagttccgacgaggattatcaagcagccctgcagcgatcaaagacagaagacctttccagacacgaagatgacgatgagtatcagaaggctctagctgccagtcaggcggaacatgaggcacagagtcaaggtcctagtgaagatgacgaagcactacgaaaggccattgaagcgtcccagaaggaagaggcgcatcagccagacgacgatgaagagttaaaaagagcacttgagcaatcagaaaaagatcaccaggcagaactagcacgtatgagctctattaagtcagaagaagagatcgttctggagtatgtaaagaaacagagtcttgctgaggaagaatacaggaagaaaatggggcagggaaaagcggggggtgaggaggacgaggaattgagacgcgcaatggaggagagtatgaaaacgggtgggagaagtggaggaggagagtcatcgaggaggtaa

SEQ ID NO: 12899 - protein, 1300 aa, Muscodor strobelii
  misc_feature: SGI Peptide ID NO. 564208
  misc_feature (142)..(317): Pfam Id: PF03033 Pfam Desc: Glycosyltransferase family 28 N-terminal domain
  misc_feature (142)..(214): Pfam Id: PF03033 Pfam Desc: Glycosyltransferase family 28 N-terminal domain
  misc_feature (279)..(317): Pfam Id: PF03033 Pfam Desc: Glycosyltransferase family 28 N-terminal domain
  misc_feature (37)..(1287): NCBI GI: 261355305 Blast Desc: CHIP6 [Verticillium albo-atrum VaMs.102]
  misc_feature (45)..(1287): NCBI GI: 256730584 Blast Desc: NECHADRAFT_56998 [Nectria haematococca mpVI 77-13-4]
  misc_feature (16)..(1293): NCBI GI: 46109296 Blast Desc: FG01530.1 [Gibberella zeae PH-1]
  misc_feature (55)..(1128): NCBI GI: 156054106 Blast Desc: SS1G_05901 [Sclerotinia sclerotiorum 1980] gi|154703681|gb|EDO03420.1| SS1G_05901 [Sclerotinia sclerotiorum 1980]
  misc_feature (82)..(1294): NCBI GI: 171695954 Blast Desc: protein product [Podospora anserina] gi|170948219|emb|CAP60383.1| protein product [Podospora anserina]
  misc_feature (63)..(941): NCBI GI: 85111053 Blast Desc: NCU07473 [Neurospora crassa OR74A] gi|28925478|gb|EAA34516.1| conserved [Neurospora crassa OR74A]
  misc_feature (55)..(1267): NCBI GI: 189197241 Blast Desc: PTRG_04625 [Pyrenophora tritici-repentis Pt-1C-BFP] gi|187980906|gb|EDU47532.1| PTRG_04625 [Pyrenophora tritici-repentis Pt-1C-BFP]
  misc_feature (55)..(1299): NCBI GI: 116180842 Blast Desc: CHGG_01049 [Chaetomium globosum CBS 148.51] gi|88185346|gb|EAQ92814.1| CHGG_01049 [Chaetomium globosum CBS 148.51]
  misc_feature (44)..(1287): NCBI GI: 242796014 Blast Desc: glucosyl/glucuronosyl transferase, [Talaromyces stipitatus ATCC 10500] gi|218719298|gb|EED18718.1| glucosyl/glucuronosyl transferase, [Talaromyces stipitatus ATCC
  misc_feature (204)..(1228): NCBI GI: 154297279 Blast Desc: BC1G_12475 [Botryotinia fuckeliana B05.10] gi|150843002|gb|EDN18195.1| BC1G_12475 [Botryotinia fuckeliana B05.10]
MTIVDEKQRAQAAGSATGGRAPPPPPRYVVSHDHQDSDRGFVPDISEIGPEEDVPPAYSELHDQFNIHQAGFDAGAAVTDDGRVNININQTTSQLTDLLAPTLRNQLRLDAQAAAEAPLPPPYIPPSLGGQPGQTPPPKLNIVIQIVGSRGDVQPFVALGQVLKNTYGHRVRVATHATFQKFVEENGLEFFSIGGDPAELMAFMVKHPGLMPGIDALKEGEITRRRLGIEQIVTGCWRSCIETGDGLGPAPRFDRQFREASAALPPAVVTDPRHKPFVADAIIANPPSFAHIHVAEKLGIPLHLMFTMPWSPTRAFPQPLANIQSSNTDPVTTNYFSYALVEMMTWQGLGDVINRFRTKVLDLEPLSLIWAPGVLTRLRIPYTYCWSPALIPKPNDWGNHIDIAGFYFLNLASSYTPEPDLAAFLDAGPPPVYIGFGSIVVDDPNALTKMIFDAVAETGVRALVSKGWGGLGADSMGVPDGVFMLGNVPHDWLFKHVSAVCHHGGAGTTAAGIQAGKPTIVVPFFGDQPFWGAMVARAGAGPDPIPYKKLTAEGLAEAIRIALKPETQERAKELGEKIREEKGADMGGQSFHKFIDFDGLRCAVAPSRVAVWRVRRSKTHLSALAAATLVDSGYLQYSDLKLFRAKEYNLGDHPTDPITAVTSALVGDFTTILMSAADFPRDLFKAARGQPKPKPQDASGNNSMPTNLPQATESTQTLASVTSNTLSKGETNDSTQDLTPITSVASGQPDTPSSHTQRDEVPPAPSPGVNQHLERALGAGKSINNIVATGVKSPMNFCMGLAKGFRNAPGLYNDDTIRPAEKVTDFSSGLKVAAKEFGFGMFDGITGLVTQPLRGAEKEGGAGLLKGFGKGIGGVALKVPAAIWSIPAYTMAGVHAEIRTRFAQNAAKYIIASRIAQGDEDFKHSTAEEREDIEVRWLSQKEGLKGFYTFKQKEKGKSRDSSPPAPEYSSVSDTPRTGWRHTRNLSFDEKKKLQDQKKAWKKSRADGPFIDEKVPSRPEAGGASEMDDEYESAIQNAVHETSRGDPAEDARIEQAIRSSVGVLRRHSSRMRSESTSSSNTGYSQWIPDTKQRGPDEKSEATSATDDLDITDEEYQALIAEAIKLSMEEQQQQHHGIQMIDRENYDDSSDEDYQAALQRSKTEDLSRHEDDDEYQKALAASQAEHEAQSQGPSEDDEALRKAIEASQKEEAHQPDDDEELKRALEQSEKDHQAELARMSSIKSEEEIVLEYVKKQSLAEEEYRKKMGQGKAGGEEDEELRRAMEESMKTGGRSGGGESSRR

SEQ ID NO: 12900 - DNA, 4670 bp, Muscodor strobelii
  misc_feature: SGI EST ID NO. CUFF.30730.0
  misc_feature: Variant of the nucleotide sequence at SEQ ID NO 12898
cttaagctcgtcgccccgcgcgtcatcgtatgcatgtcccacctcatacttggattttcattacactacaccacactacgcaccacaccatgcccaccttattacgtagctccattttggaggcactgcaccctcaatccacttcctacaagcctacatacctagatcccatgtgcaacctgcatttcgagatactcgagggtgcgatcctagtctcgcatccttgttctattgattcttatacttaactgtagtcttcaaatacgatacttattgctcatagaccttcatgagttccgctttgttctcagtctgtgacaatcccgcttcatggtgtgacgaactgatgcattgacttatacccctcttccaccatcgctcgtctcttgacgcccctcgcccaggctctctcttcgacgcctgtttggtattagagcgtgcaagacccaactgagcaccgaggaacattcttgccatgactatcgtcgacgaaaaacagagggctcaggcggctggtagcgccacgggaggccgtgctcctccgcctccacctcgatacgtggtcagccatgatcaccaagactctgataggggatttgtgccagacatttctgagatcggccccgaggaggatgttccacccgcctacagcgaacttcacgatcagttcaatatccaccaagctggcttcgacgccggtgccgcagtcacagatgacggccgagtgaacatcaatatcaatcagaccactagtcaactgactgatctacttgcgccaacgctccgcaaccagctaagactagatgctcaagctgctgctgaagctccattaccaccaccctacatccccccaagcctcggcggccaacccggccagacaccgccacccaagttgaacattgtcatacagattgtaggatctcgaggtgatgtgcagccattcgttgccctcggccaagtcctgaagaatacatatggtcaccgcgtacgcgtcgcaacacacgcaacttttcagaaattcgtggaggagaatggcttggagttcttcagtattggtggcgatcctgccgagcttatggccttcatggtcaagcaccccggcctgatgcccggtatcgatgcactgaaagaaggcgagatcacgaggcgtaggctgggcatagaacagattgtgacgggctgctggagatcctgcatcgagaccggtgatggccttgggccggcgccgcgatttgatcgtcaattccgcgaagcttccgccgctctcccccctgcggtcgtcacggatccgaggcacaagccgtttgtcgccgatgctatcattgccaaccctcctagtttcgctcatattcatgttgccgagaaattgggcatcccccttcacttgatgtttactatgccttggtcacccacaagagcgtttcctcagcctttggcaaacatccaatcttccaacactgatcccgtcactaccaactatttttcatacgctctggtcgaaatgatgacctggcaggggttgggcgatgtcatcaaccgattccgaaccaaggttcttgaccttgagcccttatcgttgatctgggcgcctggtgtattgacccgcctgaggatcccctatacgtattgctggtcacctgcactaatccccaagcctaacgattggggaaatcatatcgacattgccgggttttatttccttaacttggcctcttcctatacacccgagcctgatcttgctgctttcttggacgccggcccgcctccagtttacatcggatttggttccatcgttgtggatgaccccaatgcactgacgaagatgatattcgacgcagttgccgaaactggtgtccgagcactagtctctaagggttggggtggattaggcgctgactctatgggtgtaccggatggtgtcttcatgctcggaaatgtacctcacgactggcttttcaagcacgtctcagctgtgtgccatcacggaggcgcaggtacaacagcagctggaatacaggccggcaagcctaccattgtggtcccattctttggagatcagccattctggggggcaatggtggccagagcgggagctggcccagacccaataccctacaagaaactcacggccgaagggcttgcagaagctatccgaattgcgctaaaaccagagacacaggagagggcaaaagagctcggcgagaagatccgggaagagaagggtgccgacatgggcggacagagctttcacaaattcattgatttcgatggcttacgctgtgctgttgctccgagtagagtagctgtttggcgtgtaagacgaagtaaaactcatctaagcgcactcgccgcggccactctggtagatagcggatatctacagtactccgatcttaaactcttccgcgctaaggaatacaatctcggcgatcatcctactgatcctatcactgctgttacatcagctttagtcggagattttacaactattctcatgtctgccgcagattttcctcgggatctcttcaaagctgcaagagggcagcctaaaccaaaacctcaagatgcttcgggaaacaacagcatgccaacaaatcttccccaggcaacagagtctactcaaacgctagcctcggtaacttcgaatacgttgagcaagggcgagaccaatgatagtactcaagatcttactccgattacctccgtcgcgtcgggacaacctgataccccgtcctctcatacgcagcgcgatgaagtccctccagctccatcacccggtgtgaaccagcacttggaaagggctcttggcgctggcaaaagcattaacaatattgtagccactggcgtcaagagtcccatgaacttttgtatgggactcgcaaagggcttcagaaatgcgcccggtctatacaacgacgatacaattcgacccgcggaaaaagttacagacttcagcagtggtctgaaagtagccgccaaagagtttggctttggtatgttcgacggcattacagggctggtcacccagccgttaagaggtgccgagaaagaaggcggtgcaggcttgcttaaaggctttggaaaaggtatcggtggagtggcgctgaaagtgccagccgctatctggtccataccagcatataccatggctggtgtgcatgctgagattcggactcgttttgcgcaaaatgctgccaagtatatcatcgcatcacggattgcccaaggtgatgaagacttcaagcactctactgctgaagagcgagaagacattgaagtgcgctggttaagccagaaagagggcttgaaagggttctataccttcaaacagaaagagaagggcaagtcaagagacagctcaccgccggcgcccgagtattcctcggtcagcgacacacccagaacgggatggcgtcatactcgaaatcttagtttcgacgagaagaaaaagctgcaagatcagaagaaagcgtggaaaaagtcacgagcagatggaccattcattgatgagaaggtaccatcgaggcccgaagccggcggtgcgagcgagatggacgacgaatatgagagcgcgattcaaaatgcggttcacgagacttcgcgaggagatcccgctgaggacgcaagaatcgagcaagcgatccgctcaagcgtgggtgtactcagaagacattcctcgcggatgcgctctgagtcaacctcaagctcgaacaccggctattcccagtggatccctgacaccaaacaaaggggtccggatgagaagagcgaggcgacatcagccacagatgatcttgatattaccgatgaggaatatcaagcacttatcgcagaggccatcaaacttagtatggaagagcagcaacagcaacatcatggcatccagatgattgatcgagagaactatgacgacagttccgacgaggattatcaagcagccctgcagcgatcaaagacagaagacctttccagacacgaagatgacgatgagtatcagaaggctctagctgccagtcaggcggaacatgaggcacagagtcaaggtcctagtgaagatgacgaagcactacgaaaggccattgaagcgtcccagaaggaagaggcgcatcagccagacgacgatgaagagttaaaaagagcacttgagcaatcagaaaaagatcaccaggcagaactagcacgtatgagctctattaagtcagaagaagagatcgttctggagtatgtaaagaaacagagtcttgctgaggaagaatacaggaagaaaatggggcagggaaaagcggggggtgaggaggacgaggaattgagacgcgcaatggaggagagtatgaaaacgggtgggagaagtggaggaggagagtcatcgaggaggtaagcgggtttggatgatggacggctatacacgataccctttctcttaggcttacgatgttatgataccatttgagggacctggggatagactactcaaggcatgtgtttttcattgtggctaaattccttcgcctacttcgttagttcatgtcacgcattgaaaatcctggagtaacagtgtagcaagctcgattttattgaacgtgctacgaagtataaatgtgttgacgcagtacagagcctatacaactaaggatctagactttggaatcaccaaatcagttgagagctag

SEQ ID NO: 12901 - DNA, 339 bp, Muscodor strobelii
  misc_feature: SGI cDNA ID NO. 564209
  misc_feature: Reduced expression when VOC is produced
  misc_feature: Encodes the peptide sequence at SEQ ID NO 12902
atgtcttctcctcgcgcttcttcccccgtcaactcgccggccgccacaggcgccagcaccggccgcccctcgtctccggcgcccccaggaggcgcccgaactgccatccgccgacgtgctgcagccgaccagaaggagaagattgccaacgtgcgacccagcagcacgcgggccgctggtgctggtggtagcagtagcaccatgctgagattgtacaccgacgagtctcccggattgaaggtcgaccccgttgtcgtcctcgtcctttctctcgtcttcatcttcagcgttgtcgcattacacatcattgccaaggtcactcggagattctcaagctag

SEQ ID NO: 12902 - protein, 112 aa, Muscodor strobelii
  misc_feature: SGI Peptide ID NO. 564209
  misc_feature (62)..(107): Pfam Id: PF03911 Pfam Desc: Sec61beta family
  misc_feature (2)..(111): NCBI GI: 189207274 Blast Desc: conserved [Pyrenophora tritici-repentis Pt-1C-BFP] gi|187976064|gb|EDU42690.1| conserved [Pyrenophora tritici-repentis Pt-1C-BFP]
  misc_feature (14)..(112): NCBI GI: 256730583 Blast Desc: NECHADRAFT_65220 [Nectria haematococca mpVI 77-13-4]
  misc_feature (1)..(112): NCBI GI: 255941016 Blast Desc: Pc16g09660 [Penicillium chrysogenum Wisconsin 54-1255] gi|211585900|emb|CAP93636.1| Pc16g09660 [Penicillium chrysogenum Wisconsin 54-1255]
  misc_feature (1)..(112): NCBI GI: 261355304 Blast Desc: [Verticillium albo-atrum VaMs.102]
  misc_feature (1)..(112): NCBI GI: 156054108 Blast Desc: SS1G_05902 [Sclerotinia sclerotiorum 1980] gi|154703682|gb|EDO03421.1| SS1G_05902 [Sclerotinia sclerotiorum 1980]
  misc_feature (1)..(112): NCBI GI: 154297275 Blast Desc: [Botryotinia fuckeliana B05.10] gi|150843000|gb|EDN18193.1| [Botryotinia fuckeliana B05.10]
  misc_feature (1)..(112): NCBI GI: 46109292 Blast Desc: FG01528.1 [Gibberella zeae PH-1]
  misc_feature (1)..(112): NCBI GI: 238486478 Blast Desc: translocon protein Sec61beta, [Aspergillus flavus NRRL3357] gi|220699356|gb|EED55695.1| translocon protein Sec61beta, [Aspergillus flavus NRRL3357]
  misc_feature (1)..(112): NCBI GI: 169771025 Blast Desc: [Aspergillus oryzae RIB40] gi|83767841|dbj|BAE57980.1| protein product [Aspergillus oryzae]
  misc_feature (36)..(112): NCBI GI: 169619245 Blast Desc: SNOG_12817 [Phaeosphaeria nodorum SN15] gi|160703777|gb|EAT79617.2| SNOG_12817 [Phaeosphaeria nodorum SN15]
  misc_feature: Useful for introducing or modulating the production of volatile compounds
MSSPRASSPVNSPAATGASTGRPSSPAPPGGARTAIRRRAAADQKEKIANVRPSSTRAAGAGGSSSTMLRLYTDESPGLKVDPVVVLVLSLVFIFSVVALHIIAKVTRRFSS

SEQ ID NO: 12903 - DNA, 1609 bp, Muscodor strobelii
  misc_feature: SGI EST ID NO. CUFF.30676.0
  misc_feature: Variant of the nucleotide sequence at SEQ ID NO 12901
gttgaatgagacggcggcccggcagtcaggggtcaagcaaaatggagactaggcctgattgaccgagcgaatgccaaatcgtggcctcaattgaagacggccctggaattggtgcaaccccagattattttggagccagctggtctccgtcaatccatctcaccactactgtctacagtgtctacatgtgaatctgttcatcaccagcacacctctctttacggcttaccactctcacgtcttcacctggccagagctggtgcatatccgagtcgtcttctaattttcttttaatttcttcgctcgctgtcattatccctcaccatgtcttctcctcgcgcttcttcccccgtcaactcgccggccgccacaggcgccagcaccggccgcccctcgtctccggcgcccccaggaggcgcccgaactgccatccgccgacgtgctgcagccgaccagaaggagaagattgccaacgtgcgacccagcagcacgcgggccgctggtgctggtggtagcagtagcaccatgctgagattgtacaccgacgagtctcccggattgaaggtcgaccccgttgtcgtcctcgtcctttctctcgtcttcatcttcagcgttgtcgcattacacatcattgccaaggtcactcggagattctcaagctagactcggacttgacgatttgataataatgagaaggcggtcatgagaagcgagtgtttctgatcagcaaaggcgcggcttcactgtggtggttgccgcgactctgacgcaacacgatcaactcacgagacgcatctgagtggacggaggcggtcggcaccagcaccagtatcgactacgaagaaagaagctggatggggaaaaagaaaccggagagcatataccgaccgttgtaacataccaaacctatcaaccttgacagactcatgccataatttccttacggccaataccggctctgtgatgatgtcttcgcggatcacgtgtggttttgagcattcttctccaacttatcatgtcaggcgtgctcacacttggggtctggtcgtttgcttccccagaacctcatgtgtgatgggagttggtgctaaatactaacgccatgctacatggctcggggctacagttattcaatattggttctcctggtttgtaagcagctcgcttggctagttctctgacttgggtagtacggtaaatagcacacagcgtgtctaagggtcgtcctgagtgctaagggctgagtgaattgtcgccttggaaacagctcgctagaaggagtgttgtcttgcttgattttgcggatgtctctactttattttctcattatgcctcgcaccaggctgccttgaaggcatgaaatataatgatccgatattcctagattttaggacctaaagccgatcggatggcgattggtccacaatacggcatctagacctgtgacagacgaattgcgaatatcgctctctgtggatcattcagaaacccggtacatgggttcaggaacaaataaagataataaagaggcatatgatttccagaggggcaagttaggatgagcgggatgtcttataaaaagcgataggcagcaagaaatggactctgc

SEQ ID NO: 12904 - DNA, 1386 bp, Muscodor strobelii
  misc_feature: SGI cDNA ID NO. 564210
  misc_feature: Encodes the peptide sequence at SEQ ID NO 12905
atggacttcaatttctcatccgagtatcccgagggggtgctctcctttctcgacaccgatctttataaattaaccatgcagaatgctgttctcaagtattatccagaggtacatgtcacttacgctttcacaaaccggacacccgagaagaagctctccagaaaagctttcaactggctttgtgaccagatatacaaactcggtcacatttccctgaaggaagaggagcttcgattcctaaaatctcactgcagctacctcaccacccagtatctcacatttctgagcgagcttcgcctgtcgccacgcgagcaactcaaaccgacctttacccctataggggaagatacaggggccgacgatgtgattggtgatattcatatcgagatcagtggtaaatgggttgatactattctctatgaaattcccctacttgccttgacatccgaagcttacttcaagttcatggaaacggactggaactacgatgggcaggaagacaaggcctttgaaaagggtatgcagattctcaaggcgggctgtaccctgtccgagttcggcacgcgcagacgcagagattatcacactcaagcattggtatttagaggcctggtcaatgcgagtaagaaagcggcagaggatggcgtgccaggaaaattagctggcaccagtaatgttcacctcgctatgcgtttcaacctggctcctatcggaacggtggcccatgagtggttcatgggtatagctgccatcacgaacgactacgagaacgccacagaagaagccctgcgccgatggataggatgcttcggcgttggtgtgctcggaattgccctgacagatacttttggcacgcctgcatttctcgaggcgttcagcagagcagtcaaatacgacacagatggagtggatggagaaacggcttcaaaccagacatatgcgcaagctttcaccggtgttcgtcaggattcaggagatccagctcgctttgtcaagatcatgcgcgagttttacgacagccagggcatcaaagacaagaagacaatcgtcttttctgatgccttagatgtcgacaaatgtatcgaatacaagcgcatcgctgacaaacagggcctgcaagctagctttggtgttggtacatttctgactaacgatttcgttgagctgaagacgggcaagaaatctgtgccaatgaacatcgtcattaagttgagctctgctaatggcaacccagccataaagattagcgacaacattggcaaaaacacaggcgatgcggacaaagtgaaagaggtcaagaaacagctcgggtacgaagaaaacgcttgggcgggtggagacgagaccaagagatggggtacaagcgacaatgtcgcaaagccatga

SEQ ID NO: 12905 - protein, 461 aa, Muscodor strobelii
  misc_feature: SGI Peptide ID NO. 564210
  misc_feature (181)..(440): Pfam Id: PF04095 Pfam Desc: Nicotinate phosphoribosyltransferase (NAPRTase) family
  misc_feature (313)..(440): Pfam Id: PF04095 Pfam Desc: Nicotinate phosphoribosyltransferase (NAPRTase) family
  misc_feature (181)..(292): Pfam Id: PF04095 Pfam Desc: Nicotinate phosphoribosyltransferase (NAPRTase) family
  misc_feature (1)..(460): NCBI GI: 116182120 Blast Desc: CHGG_01688 [Chaetomium globosum CBS 148.51] gi|88185985|gb|EAQ93453.1| CHGG_01688 [Chaetomium globosum CBS 148.51]
  misc_feature (1)..(453): NCBI GI: 145616016 Blast Desc: MGG_13497 [Magnaporthe grisea 70-15] gi|145009798|gb|EDJ94454.1| MGG_13497 [Magnaporthe grisea 70-15]
  misc_feature (1)..(453): NCBI GI: 256734824 Blast Desc: [Nectria haematococca mpVI 77-13-4]
  misc_feature (1)..(460): NCBI GI: 171695006 Blast Desc: protein product [Podospora anserina] gi|170947745|emb|CAP59908.1| protein product [Podospora anserina]
  misc_feature (1)..(453): NCBI GI: 46105282 Blast Desc: FG00269.1 [Gibberella zeae PH-1]
  misc_feature (1)..(453): NCBI GI: 25294129 Blast Desc: Npt1p [Gibberella moniliformis]
  misc_feature (1)..(459): NCBI GI: 85074843 Blast Desc: NCU00649 [Neurospora crassa OR74A] gi|28927602|gb|EAA36553.1| NCU00649 [Neurospora crassa OR74A]
  misc_feature (1)..(453): NCBI GI: 156057985 Blast Desc: SS1G_04724 [Sclerotinia sclerotiorum 1980] gi|154702509|gb|EDO02248.1| SS1G_04724 [Sclerotinia sclerotiorum 1980]
  misc_feature (1)..(461): NCBI GI: 261358810 Blast Desc: nicotinate phosphoribosyltransferase [Verticillium albo-atrum VaMs.102]
  misc_feature (1)..(453): NCBI GI: 154323360 Blast Desc: BC1G_00079 [Botryotinia fuckeliana B05.10] gi|150842308|gb|EDN17501.1| BC1G_00079 [Botryotinia fuckeliana B05.10]
  misc_feature (12)..(436): SWISSPROT Homolog: EC 2.4.2.11 Nicotinate phosphoribosyltransferase
MDFNFSSEYPEGVLSFLDTDLYKLTMQNAVLKYYPEVHVTYAFTNRTPEKKLSRKAFNWLCDQIYKLGHISLKEEELRFLKSHCSYLTTQYLTFLSELRLSPREQLKPTFTPIGEDTGADDVIGDIHIEISGKWVDTILYEIPLLALTSEAYFKFMETDWNYDGQEDKAFEKGMQILKAGCTLSEFGTRRRRDYHTQALVFRGLVNASKKAAEDGVPGKLAGTSNVHLAMRFNLAPIGTVAHEWFMGIAAITNDYENATEEALRRWIGCFGVGVLGIALTDTFGTPAFLEAFSRAVKYDTDGVDGETASNQTYAQAFTGVRQDSGDPARFVKIMREFYDSQGIKDKKTIVFSDALDVDKCIEYKRIADKQGLQASFGVGTFLTNDFVELKTGKKSVPMNIVIKLSSANGNPAIKISDNIGKNTGDADKVKEVKKQLGYEENAWAGGDETKRWGTSDNVAKP

SEQ ID NO: 12906 - DNA, 2140 bp, Muscodor strobelii
  misc_feature: SGI EST ID NO. CUFF.30678.0
  misc_feature: Variant of the nucleotide sequence at SEQ ID NO 12904
caaacggaggggccatgcaattgtcggagaaccccgctatggaagacttcaggaacttgactttgcgctgggaaggctgctttccacccacttgaggccaatgatatatcgcgcgctgcgaagacagccatgtgggggccgctcgtctttgcaagagagacgatgctattctctgagctgattttaccgacttcgggatctatgctctgtgtcactgtaaacttaagccgtagcttgactagtcgcttgacaccgtctcagttgcgaattacccttctctttgtcctcaacattgtagcacacatgtatcaccggcatttcgactgtctcattcacgcccactccccgttgtaaccaccactatagccgctagaaggaaaatgagacatgacttgtaacagcataaggcgaaccaaagtgacaaacaccagacaccgcgtcctctcttccgtgatacatcacatacactgcaaccctttataagtcgccttaccttcaaggtttcctagttgtcaacttgaaccactagctacctctctggcaatacagacttacggcctctagtctttgctccgacaagcatagcagaactcgaaaaaaatggacttcaatttctcatccgagtatcccgagggggtgctctcctttctcgacaccgatctttataaattaaccatgcagaatgctgttctcaagtattatccagaggtacatgtcacttacgctttcacaaaccggacacccgagaagaagctctccagaaaagctttcaactggctttgtgaccagatatacaaactcggtcacatttccctgaaggaagaggagcttcgattcctaaaatctcactgcagctacctcaccacccagtatctcacatttctgagcgagcttcgcctgtcgccacgcgagcaactcaaaccgacctttacccctataggggaagatacaggggccgacgatgtgattggtgatattcatatcgagatcagtggtaaatgggttgatactattctctatgaaattcccctacttgccttgacatccgaagcttacttcaagttcatggaaacggactggaactacgatgggcaggaagacaaggcctttgaaaagggtatgcagattctcaaggcgggctgtaccctgtccgagttcggcacgcgcagacgcagagattatcacactcaagcattggtatttagaggcctggtcaatgcgagtaagaaagcggcagaggatggcgtgccaggaaaattagctggcaccagtaatgttcacctcgctatgcgtttcaacctggctcctatcggaacggtggcccatgagtggttcatgggtatagctgccatcacgaacgactacgagaacgccacagaagaagccctgcgccgatggataggatgcttcggcgttggtgtgctcggaattgccctgacagatacttttggcacgcctgcatttctcgaggcgttcagcagagcagtcaaatacgacacagatggagtggatggagaaacggcttcaaaccagacatatgcgcaagctttcaccggtgttcgtcaggattcaggagatccagctcgctttgtcaagatcatgcgcgagttttacgacagccagggcatcaaagacaagaagacaatcgtcttttctgatgccttagatgtcgacaaatgtatcgaatacaagcgcatcgctgacaaacagggcctgcaagctagctttggtgttggtacatttctgactaacgatttcgttgagctgaagacgggcaagaaatctgtgccaatgaacatcgtcattaagttgagctctgctaatggcaacccagccataaagattagcgacaacattggcaaaaacacaggcgatgcggacaaagtgaaagaggtcaagaaacagctcgggtacgaagaaaacgcttgggcgggtggagacgagaccaagagatggggtacaagcgacaatgtcgcaaagccatgaaatatagaaattatctagaccgcagtggatcatcagatcagccagttccgaaagcaattctggacacaattgccacaagctgtaattgagacctttactctcgcctgttggcgaccaatcaagattccactgttcctgaatctgatagcttaca

SEQ ID NO: 12907 - DNA, 1521 bp, Muscodor strobelii
  misc_feature: SGI cDNA ID NO. 564211
  misc_feature: Encodes the peptide sequence at SEQ ID NO 12908
atggccctagctactattgccaggaggctgaatcggcactggaatgtcttgacctcatttctgagacaagccggctatggctcccttcaaaagaagggcaacggctgcttctttatatctggccaagggccgaatcagaaacgactgactgcctactgcgctgatcctagcatcgatgtcatcatcttgtcttttgttcacctgttcccagcacaagccaatggcttcccgggcatcaactttgggaatcaatgtagcggggagacatatccaggcccagggtacaaaggcaaaaaggactcgtcgaaggattccctactaaagtgccctaatatccaacaggatctctacacatgccgaaaatcgagtacgaaaaagatcctcctcgcattaggcggtggtacaccagactatcagctcgctggctcccaggacggaacagcattcgcaacgcagatctggggaatgtttggacctcaaacctcagaatggattaaggctggcctaccacggccctttgattattatgacactgcaagcaagaaaacagtcggattctcggtcgacggcttcgatctggatatagaacaccaatccacggataagtcagcgggttacattgctctcgtgacgaaacttaggtcactatacaaggagtcgaaaacctcattctacctgacagcgtcacctcaatgcgtcgtaccagatgccaacatggcttcgatacttagcgcagcgcaattcgacatgttattcgtacaattctacaacacgcaggaatgctccgcagcacggtgggtctccgagaacaagaactactcgcctggtcgctccttcaacgaagcgggattcacgtatgcgaagtgggtgtcttggataacacagacgaaatatagtaaaggagctcgagtgtacattggattaccgggttctagtcaggcggcgaatccagggtataacctttcgagtaattggacgaaaaatattgcctcggcgttctattgcaatccaagttttggcggtatatctatctgggaggcgacttatgcgggaggaaatgttgagggagggaagaattattttcagaatgctaagatgtcgctggaggctgctgcgaaggacaagagacttccgtgtggctccgagtcatcatttcataatgacgacatgatttcaccctatccgtacgactcattcccagatgacattctgaagaacatccgcgccgtcatttcactcaaccactgcatcatgacagtcgaccgcacaattactccatatggatcagagacactggatgaggtttcagagaagatccaagaaacatcggattactttctgagtctaaagaatgatgttctgaagctagagagtgaagatggcttcgatccggagtttcgaaatgagtttttgcagggtgaggcaactttgacattgcagaagcagcaactcgagaagatattcttgttgatgaaggaatcgaatgagagagtgcagtcgcttgaacattacggcatatag

SEQ ID NO: 12908 - protein, 506 aa, Muscodor strobelii
  misc_feature: SGI Peptide ID NO. 564211
  misc_feature (32)..(350): Pfam Id: PF00704 Pfam Desc: Glycosyl hydrolases family 18
  misc_feature (32)..(256): Pfam Id: PF00704 Pfam Desc: Glycosyl hydrolases family 18
  misc_feature (41)..(376): NCBI GI: 39943038 Blast Desc: MGG_03599 [Magnaporthe grisea 70-15] gi|145009830|gb|EDJ94486.1| MGG_03599 [Magnaporthe grisea 70-15] gi|260279099|dbj|BAI44120.1| chitinase [Magnaporthe oryzae]
  misc_feature (41)..(359): NCBI GI: 156035901 Blast Desc: SS1G_13155 [Sclerotinia sclerotiorum 1980] gi|154698559|gb|EDN98297.1| SS1G_13155 [Sclerotinia sclerotiorum 1980]
  misc_feature (41)..(368): NCBI GI: 225559312 Blast Desc: endochitinase [Ajellomyces capsulatus G186AR]
  misc_feature (41)..(368): NCBI GI: 239614107 Blast Desc: chitinase [Ajellomyces dermatitidis ER-3]
  misc_feature (30)..(368): NCBI GI: 169776541 Blast Desc: [Aspergillus oryzae RIB40] gi|83771472|dbj|BAE61604.1| protein product [Aspergillus oryzae]
  misc_feature (41)..(372): NCBI GI: 115433036 Blast Desc: [Aspergillus terreus NIH2624] gi|114189507|gb|EAU31207.1| [Aspergillus terreus NIH2624]
  misc_feature (41)..(365): NCBI GI: 28974510 Blast Desc: chitinase [Aspergillus fumigatus]
  misc_feature (41)..(365): NCBI GI: 159126107 Blast Desc: class III chitinase ChiA1 [Aspergillus fumigatus A1163]
  misc_feature (41)..(365): NCBI GI: 119498803 Blast Desc: glycosyl hydrolase, family 18, [Neosartorya fischeri NRRL 181] gi|119414323|gb|EAW24262.1| glycosyl hydrolase, family 18, [Neosartorya fischeri NRRL 181]
  misc_feature (41)..(365): NCBI GI: 70984924 Blast Desc: class III chitinase ChiA1 [Aspergillus fumigatus Af293] gi|66845596|gb|EAL85930.1| class III chitinase ChiA1 [Aspergillus fumigatus Af293]
  misc_feature (41)..(360): SWISSPROT Homolog: EC 3.2.1.14 Chitinase
MALATIARRLNRHWNVLTSFLRQAGYGSLQKKGNGCFFISGQGPNQKRLTAYCADPSIDVIILSFVHLFPAQANGFPGINFGNQCSGETYPGPGYKGKKDSSKDSLLKCPNIQQDLYTCRKSSTKKILLALGGGTPDYQLAGSQDGTAFATQIWGMFGPQTSEWIKAGLPRPFDYYDTASKKTVGFSVDGFDLDIEHQSTDKSAGYIALVTKLRSLYKESKTSFYLTASPQCVVPDANMASILSAAQFDMLFVQFYNTQECSAARWVSENKNYSPGRSFNEAGFTYAKWVSWITQTKYSKGARVYIGLPGSSQAANPGYNLSSNWTKNIASAFYCNPSFGGISIWEATYAGGNVEGGKNYFQNAKMSLEAAAKDKRLPCGSESSFHNDDMISPYPYDSFPDDILKNIRAVISLNHCIMTVDRTITPYGSETLDEVSEKIQETSDYFLSLKNDVLKLESEDGFDPEFRNEFLQGEATLTLQKQQLEKIFLLMKESNERVQSLEHYGI

SEQ ID NO: 12909 - DNA, 1044 bp, Muscodor strobelii
  misc_feature: SGI cDNA ID NO. 564212
  misc_feature: Encodes the peptide sequence at SEQ ID NO 12910
atgtctgttcctgataaaactaggccacgattacatcggcgatcaggatcgcccattcccttagctctgagcgaggattggaaggctctgcttgcagaactcaggaaccacaaacctgttatcgatctggaaaaaggaaataaatactggtgtaatattgtttcgaagcatgtcaaagaacacaatgggactcttgctcttctagcacaacacacactaggtgccggcaaagacttctatgatatcgatataggcgacgaccttataaaatggcttagcgaaaaggcgcccaatgctttcaatcccctcggcgagcatatgataatcaaggagcagtttccaaaggtgccatttgtcttcgcctgggcatattttccggtgcgcccagagcgtgtcggtcctaaaaccgagttgacgcttcaccaaattctcgatagtcattctgatagccatagacacgaaggatcacaacataatgtgaattggggggaaagaaaaggattgaaacggaaagatgcatctttaaccctttcgcgagacaagggcaaactgccacaacccattttgaagcagggaacaagtcctgaacgccatgattctgcgagtttccctcagtttgttccggatcctagaacagatgtcgcacttcacagttcacgatatgactctgatgatactaccaaaaacgtcattcagtattctcgcgttccagaagacaaccgacgacactcgttggggggcgcatatagttcatcatatcctgatctcggcgatccccatcgatcttcccacgctagctcatcaaccgctcaatcacaggcgcgcgatgatagccaacgcactcagggtctttcccctcgttggaaagatcgatttctctccccacaagatgttggaagtgaaagtcacggataccgccactcgcgcgaacgaagtcactcgcatagtggctcgagacgaaacctacccagaatatcgcgaaagaccatctgggagctcgctacagaatgtcagttcggcaaggcccgcatctcacaggcctga

SEQ ID NO: 12910 - protein, 347 aa, Muscodor strobelii
  misc_feature: SGI Peptide ID NO. 564212
MSVPDKTRPRLHRRSGSPIPLALSEDWKALLAELRNHKPVIDLEKGNKYWCNIVSKHVKEHNGTLALLAQHTLGAGKDFYDIDIGDDLIKWLSEKAPNAFNPLGEHMIIKEQFPKVPFVFAWAYFPVRPERVGPKTELTLHQILDSHSDSHRHEGSQHNVNWGERKGLKRKDASLTLSRDKGKLPQPILKQGTSPERHDSASFPQFVPDPRTDVALHSSRYDSDDTTKNVIQYSRVPEDNRRHSLGGAYSSSYPDLGDPHRSSHASSSTAQSQARDDSQRTQGLSPRWKDRFLSPQDVGSESHGYRHSRERSHSHSGSRRNLPRISRKTIWELATECQFGKARISQA

SEQ ID NO: 12911 - DNA, 396 bp, Muscodor strobelii
  misc_feature: SGI EST ID NO. CUFF.30697.0
  misc_feature: Variant of the nucleotide sequence at SEQ ID NO 12909
cgacgaccttataaaatggcttagcgaaaaggcgcccaatgctttcaatcccctcggcgagcatatgataatcaaggagcagtttccaaaggtgccatttgtcttcgcctgggcatattttccggtgcgcccagagcgtgtcggtcctaaaaccgagttgacgcttcaccaaattctcgatagtcattctgatagccatagacacgaaggatcacaacataatgtgaattggggggaaagaaaaggattgaaacggaaagatgcatctttaaccctttcgcgagacaagggcaaactgccacaacccattttgaagcagggaacaagtcctgaacgccatgattctgcgagtttccctcagtttgttccggatcctagaacagatgtcgcacttca

SEQ ID NO: 12912 - DNA, 1443 bp, Muscodor strobelii
  misc_feature: SGI cDNA ID NO. 564213
  misc_feature: Encodes the peptide sequence at SEQ ID NO 12913
atgtccagcttcgagacgaggctcttcattaatggggagtatgttgagtcgaagagtagcgagcgactaacatgctataatccggtggacaattcagtcgtgacttcagaagtccatgtcgcaggcaaagaggatgtcgacgctgctgtcgcggccgcgagatcagcatttccaaaatgggctgctacaccatcccaagagcgccaaaagattctcatcaagtttgcaagcttattagaagagcacagccaggagctatcgagattggaaagcattgttaccggcaaggctatgtccatggctccttacgagacacagttggcggcgtcgatattccgatactatgcgggatggatcgataaaatagatgccgaatcgttccccgccgagaacgggttcatgcgttttgttcggcgcgaaccgatcggtgtctgcgccggaatcttcgctttcaatggaacagtgccgcaagtgggcatgaaaagcggcgcgtgtttggcaatgggcaatacggcgattctcaagccatcggaaaagacacctttagcagcaatatacatcggcaagttagccaaagaagcgggctttccacctggtgtgtttcaagtcgtgaacggtggcggcgaaacaggcgcgcttctcgcatcacacatggatatcgacaagatctcgttcacgggcagcgttggaaccggcaagaagattgcccaattagctgcggcgagcaacttgaagaaagtgacactggaacttggaggtaaaagcccaagcattgtctttccagatgcaaacctcgaggtggcgactacttggtgtgtacagggtattactatcaacgcaggtcaaatctgcatcgccagttcgcgcgtgtatgttcataaggacgtcaaggaacaatttgtggctgcaatgaagacggcgttcgaaaagacttcggaattcgtcggtgatccacaatcacctgataaacgaattggtactcttgcggataagatacagtttgaccgcgtatcgaagtatattgaaaacggcaagtcggaggccacgcttgtgacgggaggagaccggatgtttggcgagggttgtttcatcaaaccaactatcttcgtagaccctaagcccgatgccaagatctataaagaggagatctttggccctgttgtggtgatcagcgagtttgaagacgaggacgacgtcgttgctcgagcaaacgactcgccatttggtcttgccggcgcggtcttttcgcaggacatcaacagggcattgcgtgtcgctggcaatgtcaaagcaggaacgatgtgcatcaattgctgctcgaaactagacccgacagtaccgttcggtggttataaggctagcggctgggggcgagaaatgggcaaggccggaatcgactcgtatactcagttgaaaactgtatttgtgaatctgacgtactag

SEQ ID NO: 12913 - protein, 480 aa, Muscodor strobelii
  misc_feature: SGI Peptide ID NO. 564213
  misc_feature (14)..(474): Pfam Id: PF00171 Pfam Desc: Aldehyde dehydrogenase family
  misc_feature (7)..(480): NCBI GI: 189208560 Blast Desc: aldehyde dehydrogenase X, mitochondrial precursor [Pyrenophora tritici-repentis Pt-1C-BFP] gi|187976706|gb|EDU43332.1| aldehyde dehydrogenase X, precursor
  misc_feature (7)..(480): NCBI GI: 261355416 Blast Desc: aldehyde dehydrogenase [Verticillium albo-atrum VaMs.102]
  misc_feature (7)..(480): NCBI GI: 169613480 Blast Desc: SNOG_09871 [Phaeosphaeria nodorum SN15] gi|160702733|gb|EAT83136.2| SNOG_09871 [Phaeosphaeria nodorum SN15]
  misc_feature (5)..(478): NCBI GI: 242820069 Blast Desc: aldehyde dehydrogenase, [Talaromyces stipitatus ATCC 10500] gi|218713907|gb|EED13331.1| aldehyde dehydrogenase, [Talaromyces stipitatus ATCC 10500]
  misc_feature (6)..(478): NCBI GI: 256724758 Blast Desc: NECHADRAFT_84385 [Nectria haematococca mpVI 77-13-4]
  misc_feature (1)..(478): NCBI GI: 46139039 Blast Desc: FG11034.1 [Gibberella zeae PH-1]
  misc_feature (6)..(476): NCBI GI: 256720162 Blast Desc: NECHADRAFT_56373 [Nectria haematococca mpVI 77-13-4]
  misc_feature (2)..(478): NCBI GI: 212538877 Blast Desc: aldehyde dehydrogenase, [Penicillium marneffei ATCC 18224] gi|210069336|gb|EEA23427.1| aldehyde dehydrogenase, [Penicillium marneffei ATCC 18224]
  misc_feature (2)..(479): NCBI GI: 71013736 Blast Desc: UM02508.1 [Ustilago maydis 521] gi|1658175|gb|AAC49575.1| indole-3-acetaldehyde dehydrogenase [Ustilago maydis] gi|46098406|gb|EAK83639.1| UM02508.1 [Ustilago
  misc_feature (8)..(478): NCBI GI: 256723549 Blast Desc: [Nectria haematococca mpVI 77-13-4]
  misc_feature (6)..(478): SWISSPROT Homolog: EC 1.2.1.3 Aldehyde dehydrogenase (NAD(+))
  misc_feature: Useful for introducing or modulating the production of volatile compounds
  misc_feature: Useful for fungicidal and/or biocontrol applications
MSSFETRLFINGEYVESKSSERLTCYNPVDNSVVTSEVHVAGKEDVDAAVAAARSAFPKWAATPSQERQKILIKFASLLEEHSQELSRLESIVTGKAMSMAPYETQLAASIFRYYAGWIDKIDAESFPAENGFMRFVRREPIGVCAGIFAFNGTVPQVGMKSGACLAMGNTAILKPSEKTPLAAIYIGKLAKEAGFPPGVFQVVNGGGETGALLASHMDIDKISFTGSVGTGKKIAQLAAASNLKKVTLELGGKSPSIVFPDANLEVATTWCVQGITINAGQICIASSRVYVHKDVKEQFVAAMKTAFEKTSEFVGDPQSPDKRIGTLADKIQFDRVSKYIENGKSEATLVTGGDRMFGEGCFIKPTIFVDPKPDAKIYKEEIFGPVVVISEFEDEDDVVARANDSPFGLAGAVFSQDINRALRVAGNVKAGTMCINCCSKLDPTVPFGGYKASGWGREMGKAGIDSYTQLKTVFVNLTY

SEQ ID NO: 12914 - DNA, 1691 bp, Muscodor strobelii
  misc_feature: SGI EST ID NO. CUFF.30711.0
  misc_feature: Variant of the nucleotide sequence at SEQ ID NO 12912
agatctcgttcacgggcagcgttggaaccggcaagaagattgcccaattagctgcggcgagcaacttgaagaaagtgacactggaacttggaggtaaaagcccaagcattgtctttccagatgcaaacctcgaggtggcgactacttggtgtgtacagggtattactatcaacgcaggtcaaatctgcatcgccagttcgcgcgtgtatgttcataaggacgtcaaggaacaatttgtggctgcaatgaagacggcgttcgaaaagacttcggaattcgtcggtgatccacaatcacctgataaacgaattggtactcttgcggataagatacagtttgaccgcgtatcgaagtatattgaaaacggcaagtcggaggccacgcttgtgacgggaggagaccggatgtttggcgagggttgtttcatcaaaccaactatcttcgtagaccctaagcccgatgccaagatctataaagaggagatctttggccctgttgtggtgatcagcgagtttgaagacgaggacgacgtcgttgctcgagcaaacgactcgccatttggtcttgccggcgcggtcttttcgcaggacatcaacagggcattgcgtgtcgctggcaatgtcaaagcaggaacgatgtgcatcaattgctgctcgaaactagacccgacagtaccgttcggtggttataaggctagcggctgggggcgagaaatgggcaaggccggaatcgactcgtatactcagttgaaaactgtatttgtgaatctgacgtactagtcgtcaggtcggccttgggaaatgaatatgtgtatttaattaacaagacttgtgcctattgttgttcattgagaataatgcgatggatgataccgcggataactggcgataatacatactcacaacttctcaacttcctccagagtctccattaacacagccggacctctaggaacgataggtgaagtcatgcctggcagcgccttgagccttccactcacatagccgctggcatagagccctatgaaaggggcagtagtattatggaacgcaccatttgtcagctcgctctgatcccagtacagtcttcgcagccagagatgtagataaggatagtcgtggcggatggatttcaagttgcactgcattatggtgtaatacgcgacatcaaaacgagcgagtgtcgtgtataaacgaacatccgcctcggtgatgtgctctccaatcaagaatggcttcccgtgtgacttcaatatgttctcgagccggtcgagcgagtcgaacaaaggcactatgtgttcatcgtaggcctcttgagtgcttgcaaatccggctttgtacacgccattgttgattgtgtcgtaaacccagtcgttcatgtcatcaatcgtactgcacaatgcaaccgggtagagtccaccaccaggtttgctgacttctctatacggctctgggatgagatcatcgaactcagaatagaacatgcgaatgatctcgctcgattcgttattgacaattgtctcggttttcttgtcccataacactggaactgttactcgaccctcaaagtgtggattggccttcaggtagagttggcgtagctctgtgaagccgtatagcggatccttatcgagagtcccgtgagagccgtcgaagtaccatccgttgggtccgaggttcatcaacatatag

SEQ ID NO: 12915 - DNA, 1434 bp, Muscodor strobelii
  misc_feature: SGI cDNA ID NO. 564214
  misc_feature: Encodes the peptide sequence at SEQ ID NO 12916
atgtccagcttcgagacgaggctcttcattaatggggagtatgttgagtcgaagagtagcgagcgactaacatgctataatccggtggacaattcagtcgtgacttcagaagtccatgtcgcaggcaaagaggatgtcgacgctgctgtcgcggccgcgagatcagcatttccaaaatgggctgctacaccatcccaagagcgccaaaagattctcatcaagtttgcaagcttattagaagagcacagccaggagctatcgagattggaaagcattgttaccggcaaggctatgtccatggctccttacgagacacagttggcggcgtcgatattccgatactatgcgggatggatcgataaaatagatgccgaatcgttccccgccgagaacgggttcatgcgttttgttcggcgcgaaccgatcggtgtctgcgccggaatcttcgctttcaatggaacagtgccgcaagtgggcatgaaaagcggcgcgtgtttggcaatgggcaatacggcgattctcaagccatcggaaaagacacctttagcagcaatatacatcggcaagttagccaaagaagcgggctttccacctggtgtgtttcaagtcgtgaacggtggcggcgaaacaggcgcgcttctcgcatcacacatggatatcgacaagatctcgttcacgggcagcgttggaaccggcaagaagattgcccaattagctgcggcgagcaacttgaagaaagtgacactggaacttggaggtaaaagcccaagcattgtctttccagatgcaaacctcgaggtggcgactacttggtgtgtacagggtattactatcaacgcaggtcaaatctgcatcgccagttcgcgcgtgtatgttcataaggacgtcaaggaacaatttgtggctgcaatgaagacggcgttcgaaaagacttcggaattcgtcggtgatccacaatcacctgataaacgaattggtactcttgcggataagatacagtttgaccgcgtatcgaagtatattgaaaacggcaagtcggaggccacgcttgtgacgggaggagaccggatgtttggcgagggttgtttcatcaaaccaactatcttcgtagaccctaagcccgatgccaagatctataaagaggagatctttggccctgttgtggtgatcagcgagtttgaagacgaggacgacgtcgttgctcgagcaaacgactcgccatttggtcttgccggcgcggtcttttcgcaggacatcaacagggcattgcgtgtcgctggcaatgtcaaagcaggaacgatgtgcatcaattgctgctcgaaactagacccgacagtaccgttcggtggttataaggctagcggctgggggcgagaaatgggcaaggccggaatcgactcgtatactcagttgaaaactgtatttgtgaagtaa

SEQ ID NO: 12916 - protein, 477 aa, Muscodor strobelii
  misc_feature: SGI Peptide ID NO. 564214
  misc_feature (14)..(474): Pfam Id: PF00171 Pfam Desc: Aldehyde dehydrogenase family
  misc_feature (7)..(476): NCBI GI: 189208560 Blast Desc: aldehyde dehydrogenase X, mitochondrial precursor [Pyrenophora tritici-repentis Pt-1C-BFP] gi|187976706|gb|EDU43332.1| aldehyde dehydrogenase X, precursor
  misc_feature (7)..(477): NCBI GI: 261355416 Blast Desc: aldehyde dehydrogenase [Verticillium albo-atrum VaMs.102]
  misc_feature (7)..(476): NCBI GI: 169613480 Blast Desc: SNOG_09871 [Phaeosphaeria nodorum SN15] gi|160702733|gb|EAT83136.2| SNOG_09871 [Phaeosphaeria nodorum SN15]
  misc_feature (5)..(477): NCBI GI: 242820069 Blast Desc: aldehyde dehydrogenase, [Talaromyces stipitatus ATCC 10500] gi|218713907|gb|EED13331.1| aldehyde dehydrogenase, [Talaromyces stipitatus ATCC 10500]
  misc_feature (6)..(477): NCBI GI: 256724758 Blast Desc: NECHADRAFT_84385 [Nectria haematococca mpVI 77-13-4]
  misc_feature (1)..(476): NCBI GI: 46139039 Blast Desc: FG11034.1 [Gibberella zeae PH-1]
  misc_feature (6)..(477): NCBI GI: 256720162 Blast Desc: NECHADRAFT_56373 [Nectria haematococca mpVI 77-13-4]
  misc_feature (2)..(477): NCBI GI: 212538877 Blast Desc: aldehyde dehydrogenase, [Penicillium marneffei ATCC 18224] gi|210069336|gb|EEA23427.1| aldehyde dehydrogenase, [Penicillium marneffei ATCC 18224]
  misc_feature (8)..(477): NCBI GI: 256723549 Blast Desc: [Nectria haematococca mpVI 77-13-4]
  misc_feature (6)..(477): NCBI GI: 171690144 Blast Desc: protein product [Podospora anserina] gi|170945020|emb|CAP71131.1| protein product [Podospora anserina]
  misc_feature (6)..(477): SWISSPROT Homolog: EC 1.2.1.3 Aldehyde dehydrogenase (NAD(+))
  misc_feature: Useful for introducing or modulating the production of volatile compounds
  misc_feature: Useful for fungicidal and/or biocontrol applications
MSSFETRLFINGEYVESKSSERLTCYNPVDNSVVTSEVHVAGKEDVDAAVAAARSAFPKWAATPSQERQKILIKFASLLEEHSQELSRLESIVTGKAMSMAPYETQLAASIFRYYAGWIDKIDAESFPAENGFMRFVRREPIGVCAGIFAFNGTVPQVGMKSGACLAMGNTAILKPSEKTPLAAIYIGKLAKEAGFPPGVFQVVNGGGETGALLASHMDIDKISFTGSVGTGKKIAQLAAASNLKKVTLELGGKSPSIVFPDANLEVATTWCVQGITINAGQICIASSRVYVHKDVKEQFVAAMKTAFEKTSEFVGDPQSPDKRIGTLADKIQFDRVSKYIENGKSEATLVTGGDRMFGEGCFIKPTIFVDPKPDAKIYKEEIFGPVVVISEFEDEDDVVARANDSPFGLAGAVFSQDINRALRVAGNVKAGTMCINCCSKLDPTVPFGGYKASGWGREMGKAGIDSYTQLKTVFVK

SEQ ID NO: 12917 - DNA, 1691 bp, Muscodor strobelii; identical to SEQ ID NO: 12914
  misc_feature: SGI EST ID NO. CUFF.30711.0
  misc_feature: Variant of the nucleotide sequence at SEQ ID NO 12915

SEQ ID NO: 12918 - DNA, 411 bp, Muscodor strobelii
  misc_feature: SGI cDNA ID NO. 564215
  misc_feature: Encodes the peptide sequence at SEQ ID NO 12919
atgccccaaaaactccgcgaaattgcaagcaagaagatcaatggtccagatgcaaatcccagcctgctaggggaccctatcagcggcatgtataagaagatcccgcgcgaatatcagaaaatggtcctttgtcctaaaatcaaagccgagaccagcgactacgtgccacccacggaagaaggcaaagccgcaaacccacggtctacctctggatcggcaacgggagagtcttccggtggtggggagaccttgagagagaaggcatccaaaaaactacacggtcctggcgccaatccgagccaacttggcgatccgattagtctgaagaacgagacgacggacggtgtgccggttgatagagagagtggcgcgaggcaggagaatgtcacaaagagggattcgaagttgtga

SEQ ID NO: 12919 - protein, 136 aa, Muscodor strobelii
  misc_feature: SGI Peptide ID NO. 564215
MPQKLREIASKKINGPDANPSLLGDPISGMYKKIPREYQKMVLCPKIKAETSDYVPPTEEGKAANPRSTSGSATGESSGGGETLREKASKKLHGPGANPSQLGDPISLKNETTDGVPVDRESGARQENVTKRDSKL

SEQ ID NO: 12920 - DNA, 1092 bp, Muscodor strobelii
  misc_feature: SGI cDNA ID NO. 564216
  misc_feature: Encodes the peptide sequence at SEQ ID NO 12921
atggacgacgaacccgatggaggatgttcctggcaagcatggaagtttgggatgaagagggaggacctctacaccaagctccaagatcagtataacacagtcgccttctccatccaggaccccgacgccttccaccacgacgtctgcgagatctccaagacggcgtcggacaacgatgagttccaccgcctactcgacgagcggaagcagcttcgactcgaccagctcagccagagtctgcagtcggcgtcggtcgagatcatcgcgaaccccaagttgataggtaccgaccagtggcagtatgccatccagctcttccgtacccgttcctttgactcgctcgtccgatacttcgcctcctaccttcctgacgaccaccagtggtcgtcctcagccgccgacgcgacggccaagcccttctttgacgatgagattgagggtcctacctctgtcatgacgcatgagcctttgtcttttattgataccccttgtaccagtatgattccagcaagccatctgcccccttcccctcgctccctcacgacctgctccgaagactcgtccagcgtttcgacgccctcgcgcacgcactccttctccgaacccgagtcggacgctatggtgctgtccacaacgctggcccgagattttgatgatgagtacccctcgcagtgggatgctccagacacgccgacgacgtcggtctctgatgcctcagagtttccgtcgctagacgacgtcgctgacacgaagcattatcacctatgtgaacagatctcgtcgtcggcgccgtcggactcggaagtctttgaagacgacgagcaagacctcgaaacaccgacaccgcgagacgtcgccaaagagctccgactgaagcaacatcagacgacatcgacatcgtcgatagagtcgatgacaagtctatccacaacacccaaggcgtcgccatctaagtacacccccctgcaacagcgagttcgcgacgccagccccgggctgtcacgagcgcgacggagaagtcccgagatcggacgtatccagaaaccccttcctgataccagccggatcagacccaaaagcctcaagcggtag

SEQ ID NO: 12921 - protein, 363 aa, Muscodor strobelii
  misc_feature: SGI Peptide ID NO. 564216
  misc_feature (1)..(219): NCBI GI: 164427640 Blast Desc: NCU02886 [Neurospora crassa OR74A] gi|157071824|gb|EAA36332.2| NCU02886 [Neurospora crassa OR74A]
  misc_feature (3)..(362): NCBI GI: 116182764 Blast Desc: CHGG_02010 [Chaetomium globosum CBS 148.51] gi|88186307|gb|EAQ93775.1| CHGG_02010 [Chaetomium globosum CBS 148.51]
  misc_feature (6)..(363): NCBI GI: 256735508 Blast Desc: NECHADRAFT_75421 [Nectria haematococca mpVI 77-13-4]
  misc_feature (1)..(362): NCBI GI: 171694778 Blast Desc: protein product [Podospora anserina] gi|170947631|emb|CAP59793.1| protein product [Podospora anserina]
  misc_feature (3)..(246): NCBI GI: 46107816 Blast Desc: FG00791.1 [Gibberella zeae PH-1]
  misc_feature (6)..(283): NCBI GI: 145606707 Blast Desc: MGG_09414 [Magnaporthe grisea 70-15] gi|145014379|gb|EDJ98947.1| MGG_09414 [Magnaporthe grisea 70-15]
  misc_feature (6)..(283): NCBI GI: 261358721 Blast Desc: conserved [Verticillium albo-atrum VaMs.102]
  misc_feature (4)..(139): NCBI GI: 116203981 Blast Desc: CHGG_09874 [Chaetomium globosum CBS 148.51] gi|88176002|gb|EAQ83470.1| CHGG_09874 [Chaetomium globosum CBS 148.51]
  misc_feature (11)..(125): NCBI GI: 255940808 Blast Desc: Pc16g08540 [Penicillium chrysogenum Wisconsin 54-1255] gi|211585796|emb|CAP93524.1| Pc16g08540 [Penicillium chrysogenum Wisconsin 54-1255]
  misc_feature (11)..(122): NCBI GI: 256720666 Blast Desc: NECHADRAFT_85600 [Nectria haematococca mpVI 77-13-4]
MDDEPDGGCSWQAWKFGMKREDLYTKLQDQYNTVAFSIQDPDAFHHDVCEISKTASDNDEFHRLLDERKQLRLDQLSQSLQSASVEIIANPKLIGTDQWQYAIQLFRTRSFDSLVRYFASYLPDDHQWSSSAADATAKPFFDDEIEGPTSVMTHEPLSFIDTPCTSMIPASHLPPSPRSLTTCSEDSSSVSTPSRTHSFSEPESDAMVLSTTLARDFDDEYPSQWDAPDTPTTSVSDASEFPSLDDVADTKHYHLCEQISSSAPSDSEVFEDDEQDLETPTPRDVAKELRLKQHQTTSTSSIESMTSLSTTPKASPSKYTPLQQRVRDASPGLSRARRRSPEIGRIQKPLPDTSRIRPKSLKR

SEQ ID NO: 12922 - DNA, 1339 bp, Muscodor strobelii
  misc_feature: SGI EST ID NO. CUFF.30723.0
  misc_feature: Variant of the nucleotide sequence at SEQ ID NO 12920
actttgcaccccgaccctacgcggcagagaatggacgacgaacccgatggaggatgttcctggcaagcatggaagtttgggatgaagagggaggacctctacaccaagctccaagatcagtataacacagtcgccttctccatccaggaccccgacgccttccaccacgacgtctgcgagatctccaagacggcgtcggacaacgatgagttccaccgcctactcgacgagcggaagcagcttcgactcgaccagctcagccagagtctgcagtcggcgtcggtcgagatcatcgcgaaccccaagttgataggtaccgaccagtggcagtatgccatccagctcttccgtacccgttcctttgactcgctcgtccgatacttcgcctcctaccttcctgacgaccaccagtggtcgtcctcagccgccgacgcgacggccaagcccttctttgacgatgagattgagggtcctacctctgtcatgacgcatgagcctttgtcttttattgataccccttgtaccagtatgattccagcaagccatctgcccccttcccctcgctccctcacgacctgctccgaagactcgtccagcgtttcgacgccctcgcgcacgcactccttctccgaacccgagtcggacgctatggtgctgtccacaacgctggcccgagattttgatgatgagtacccctcgcagtgggatgctccagacacgccgacgacgtcggtctctgatgcctcagagtttccgtcgctagacgacgtcgctgacacgaagcattatcacctatgtgaacagatctcgtcgtcggcgccgtcggactcggaagtctttgaagacgacgagcaagacctcgaaacaccgacaccgcgagacgtcgccaaagagctccgactgaagcaacatcagacgacatcgacatcgtcgatagagtcgatgacaagtctatccacaacacccaaggcgtcgccatctaagtacacccccctgcaacagcgagttcgcgacgccagccccgggctgtcacgagcgcgacggagaagtcccgagatcggacgtatccagaaaccccttcctgataccagccggatcagacccaaaagcctcaagcggtagcccgaggggccctgccacggcactgtatatatgtcaaaaagctgtagatacaacgaaagtaatgccctatttaacttccccgttggtttggcgtcatgcgacttcttcacttgagtttattgtcggttctgtgccccaggacgatacagcgatgattgatagcatgctaactaacagggcgatactcattttctcccgtcaggagacctggtttgtt

SEQ ID NO: 12923 - DNA, 1815 bp, Muscodor strobelii
  misc_feature: SGI cDNA ID NO. 564217
  misc_feature: Reduced expression when VOC is produced
  misc_feature: Encodes the peptide sequence at SEQ ID NO 12924
atgacagaggtcttcccatccgaggagaagacggagccgttcacactcgaggagctgaacgtccggcttggcaagagcatcgaagttgatgaaattggcgatgcgcaccttgacgatatccctctggacaacttggtagtcaacgaggagcatcacaaacagggcatcaggattctagtcagacccctcacgagaagtcggtctgtcagccctggtaacgataattgtcaatggcttgctctacgcgcggaggtatccgacccaagccaacccaaatccaaggtcctggcggtgactcaaacttcaaaggacatcaacttctctatcaggattcctcagactgagggcgagaaccatccgcctttgtggtgcgaactgtactatgatccagcgagcgatagtctgattctatggaataaatctgaaattcctatcgtgttggctagggtgtcgcccgatcgcactgatgccaactataaccaggagattttgcccggtacaactagagaactctggccaggaacgtggaaaatcagtgtgggcatcccagtccttgactttaggattctagagaagcgacctgcaaccctgcaagtgccgtcggacagcgttgagtcgtcgccagcccgtagccaagatctgcgcagctctctaggcaagagaagcttcgtatcagatgatcaagacactactgatggtgtgatcgaaaagaaacttcgtgccgatgacgctcaggataaagacaaggatggcgtcattattttatacggtcctggggacaagtccctcatgtttccccttcctaatgctgccaaaacaaaagaaatagctgttccttatggccaagcacttctcgaggttcaaaaggatgagacagctgtcatacctggtggatgtgaacttgacgagtatcagttgacaaaacgagatcaaattgcgaccaccagtgcgtcctctgtctacacggccgaatactcccatgtacccgagggtgttatcactgtcaaggtcctgaaagcacgaggtaatcagcactcagacacacgaccgcaagaaatacatagaaatgtcattcgtcaagcggatgtctggttaagagaataccaaagccaagaggatctgcagcatgattccattgtcaagctatacggcggtgatgcccgatatctgtccttgtatatggagcacgttgacggaaaagacctggccgctcgtaatgtgtggcgagagacgtcaacagataaatttgtgggtaatcgcagcgatgctatccgaatcctaaacgatatcgctggtgctttgcactacattcacgaaaagaaacgaatccacaacgacatcaagcccgcaaatgtactgtattcacgagaaagaggtgccgtactttgcgacttcggtctttcaacacggactgtagattctgcgaccaatggaggcacgccatactacgtgcctccagaattcattgggcagaaacttcgaggcccttcttctgatgtctgggcgctcggaattacaatgttatatgtgctgaggaagatccaatttcctgatgctcgtggacgtcaagggcatccaaagcaattgtattggatgattgcagatctcaaccgaaattcaaggcgtggagtcacggccgttacgcagatgcagcagtggttgagtgaaatcaacgaggcaaagaatcatctcaacccacgcgacaggatagagtacattgtcctccatatgcttacgccgaatcccaaccagcgtatcacgatggctaaagttcttgagctcctcaaagaaaaagacctcacgcccgcgagatga

SEQ ID NO: 12924 - protein, 604 aa, Muscodor strobelii
  misc_feature: SGI Peptide ID NO. 564217
  misc_feature (306)..(595): Pfam Id: PF00069 Pfam Desc: Protein kinase domain
  misc_feature (359)..(595): Pfam Id: PF00069 Pfam Desc: Protein kinase domain
  misc_feature (5)..(595): NCBI GI: 46107818 Blast Desc: FG00792.1 [Gibberella zeae PH-1]
  misc_feature (7)..(591): NCBI GI: 171694780 Blast Desc: protein product [Podospora anserina] gi|170947632|emb|CAP59794.1| protein product [Podospora anserina]
  misc_feature (9)..(592): NCBI GI: 39959715 Blast Desc: MGG_09413 [Magnaporthe grisea 70-15] gi|145014378|gb|EDJ98946.1| MGG_09413 [Magnaporthe grisea 70-15]
  misc_feature (9)..(592): NCBI GI: 85119110 Blast Desc: NCU02885 [Neurospora crassa OR74A] gi|28927378|gb|EAA36331.1| conserved [Neurospora crassa OR74A]
  misc_feature (165)..(599): NCBI GI: 261358722 Blast Desc: MAP kinase kinase skh1/pek1 [Verticillium albo-atrum VaMs.102]
  misc_feature (96)..(598): NCBI GI: 256720868 Blast Desc: NECHADRAFT_85599 [Nectria haematococca mpVI 77-13-4]
  misc_feature (277)..(600): NCBI GI: 255940810 Blast Desc: Pc16g08550 [Penicillium chrysogenum Wisconsin 54-1255] gi|211585797|emb|CAP93525.1| Pc16g08550 [Penicillium chrysogenum Wisconsin 54-1255]
  misc_feature (96)..(587): NCBI GI: 145605066 Blast Desc: MGG_02061 [Magnaporthe grisea 70-15] gi|145012935|gb|EDJ97576.1| MGG_02061 [Magnaporthe grisea 70-15]
  misc_feature (77)..(600): NCBI GI: 145604986 Blast Desc: MGG_02016 [Magnaporthe grisea 70-15] gi|145012886|gb|EDJ97527.1| MGG_02016 [Magnaporthe grisea 70-15]
  misc_feature (7)..(329): NCBI GI: 116182762 Blast Desc: CHGG_02009 [Chaetomium globosum CBS 148.51] gi|88186306|gb|EAQ93774.1| CHGG_02009 [Chaetomium globosum CBS 148.51]
  misc_feature: Useful for introducing or modulating the production of volatile compounds
MTEVFPSEEKTEPFTLEELNVRLGKSIEVDEIGDAHLDDIPLDNLVVNEEHHKQGIRILVRPLTRSRSVSPGNDNCQWLALRAEVSDPSQPKSKVLAVTQTSKDINFSIRIPQTEGENHPPLWCELYYDPASDSLILWNKSEIPIVLARVSPDRTDANYNQEILPGTTRELWPGTWKISVGIPVLDFRILEKRPATLQVPSDSVESSPARSQDLRSSLGKRSFVSDDQDTTDGVIEKKLRADDAQDKDKDGVIILYGPGDKSLMFPLPNAAKTKEIAVPYGQALLEVQKDETAVIPGGCELDEYQLTKRDQIATTSASSVYTAEYSHVPEGVITVKVLKARGNQHSDTRPQEIHRNVIRQADVWLREYQSQEDLQHDSIVKLYGGDARYLSLYMEHVDGKDLAARNVWRETSTDKFVGNRSDAIRILNDIAGALHYIHEKKRIHNDIKPANVLYSRERGAVLCDFGLSTRTVDSATNGGTPYYVPPEFIGQKLRGPSSDVWALGITMLYVLRKIQFPDARGRQGHPKQLYWMIADLNRNSRRGVTAVTQMQQWLSEINEAKNHLNPRDRIEYIVLHMLTPNPNQRITMAKVLELLKEKDLTPAR

SEQ ID NO: 12925 - DNA, 6794 bp, Muscodor strobelii
  misc_feature: SGI EST ID NO. CUFF.31003.0
  misc_feature: Variant of the nucleotide sequence at SEQ ID NO 12923
cgtccctgcacgctgcacccaatcaataatcatgcattgagacaaatgcgggctttgctgctagcgttgagagtctattggctaatgactgggagggcttctcgggcttgcatggaccaaggtggttgtctcaagccgacatcgtctacccaccgtttgggtctcgctatcacccctcagttttcgtatttgacagaggcgaagagaactgttggattatacacatcactcagaccgccttaagggccctttatcgagaatctacgtattcatcacgagtaacaacacgaggtgaccatggacagtatcgtatcgtgtagtagcatcctgtgtcactttcgtttcgtatttcatcaatcgtagatggtttatctcaaagtcgtgttggaaaagcttggtgagcagttaatgggccctatgcgttttacggccaacatcagtgactaccagatcgtttcttgatgaggcttgctttgctcagccaagctgggccagcagtcagcaagcgacggtcagccgagcaaccctccttgttcgccactcttcacgaacgatcacaatagaaaacaccagccacgggacggcagccctattgatgcagtactgattctctaaacatagtctctgaagatgggtgcacggagtttatagccactttatcaggagggacgatgatgtagcctgtccgatcgagccggccgtcatcgagaacgcaggcgaagaggacggatcgtaagacccgctcacctgctgcttcactcgcttatccagtcagggggtcgagcagaagatcgccctaaggagtcacacaccaaaatatcctgtacattcaagtcgcctgcgcgattctgtctgcctccatgttcgtcacacgacagctgtgaaaagtatctgtgaattacatcagacgggcaaaacgggttaccgtcaaaacgttagactttagacgttggctttttcgctaacattcgcagtattgagacagagccgtttctggctgcacaccaatggctagtagataaaagctggagtacaaatctgccctaaagtaggtgacataccaataccgacatagccctactgcgttcgaggcaaccctggtgatgctcccgcctagaggcctcttcgacggcttgactaatccacggcggccagtggaacctgtattaatacctcctgtactgccctagctggccgaggaaacacggaggaacggtcaaggcagccaaccgaatgaaccactcgcactcgggcgggatcagccgcacgcaatcgcgcatttcacgcccttcaccagctactcctgtacttctgaccccttctatgactgtcctgaccgggccgtaagttgcagtgacccgaccctcgtcgtctcgaggacagctcatctgattctgccgagcttccctctatacttggtgtaatcgatcatcaacgacaacgatcttgccagaatggccccctgaagggtttggttctctttcaacgcaattcaaagccttcgaagcgaatgttcatttcatctctctctttcttttctctatctcgtatttacgcatcctgttcctgtcaaacacaacatttctagttatatcacaaacactcgtcgttgaagttggcatcgtcgatgtcacgtaagctccttttgcaactttctctttagttgcaactatgacagaggtcttcccatccgaggagaagacggagccgttcacactcgaggagctgaacgtccggcttggcaagagcatcgaagttgatgaaattggcgatgcgcaccttgacgatatccctctggacaacttggtagtcaacgaggagcatcacaaacagggcatcaggattctagtcagacccctcacgagaagtcggtctgtcagccctggtaacgataattgtcaatggcttgctctacgcgcggaggtatccgacccaagccaacccaaatccaaggtcctggcggtgactcaaacttcaaaggacatcaacttctctatcaggattcctcagactgagggcgagaaccatccgcctttgtggtgcgaactgtactatgatccagcgagcgatagtctgattctatggaataaatctgaaattcctatcgtgttggctagggtgtcgcccgatcgcactgatgccaactataaccaggagattttgcccggtacaactagagaactctggccaggaacgtggaaaatcagtgtgggcatcccagtccttgactttaggattctagagaagcgacctgcaaccctgcaagtgccgtcggacagcgttgagtcgtcgccagcccgtagccaagatctgcgcagctctctaggcaagagaagcttcgtatcagatgatcaagacactactgatggtgtgatcgaaaagaaacttcgtgccgatgacgctcaggataaagacaaggatggcgtcattattttatacggtcctggggacaagtccctcatgtttccccttcctaatgctgccaaaacaaaagaaatagctgttccttatggccaagcacttctcgaggttcaaaaggatgagacagctgtcatacctggtggatgtgaacttgacgagtatcagttgacaaaacgagatcaaattgcgaccaccagtgcgtcctctgtctacacggccgaatactcccatgtacccgagggtgttatcactgtcaaggtcctgaaagcacgaggtaatcagcactcagacacacgaccgcaagaaatacatagaaatgtcattcgtcaagcggatgtctggttaagagaataccaaagccaagaggatctgcagcatgattccattgtcaagctatacggcggtgatgcccgatatctgtccttgtatatggagcacgttgacggaaaagacctggccgctcgtaatgtgtggcgagagacgtcaacagataaatttgtgggtaatcgcagcgatgctatccgaatcctaaacgatatcgctggtgctttgcactacattcacgaaaagaaacgaatccacaacgacatcaagcccgcaaatgtactgtattcacgagaaagaggtgccgtactttgcgacttcggtctttcaacacggactgtagattctgcgaccaatggaggcacgccatactacgtgcctccagaattcattgggcagaaacttcgaggcccttcttctgatgtctgggcgctcggaattacaatgttatatgtgctgaggaagatccaatttcctgatgctcgtggacgtcaagggcatccaaagcaattgtattggatgattgcagatctcaaccgaaattcaaggcgtggagtcacggccgttacgcagatgcagcagtggttgagtgaaatcaacgaggcaaagaatcatctcaacccacgcgacaggatagagtacattgtcctccatatgcttacgccgaatcccaaccagcgtatcacgatggctaaagttcttgagctcctcaaagaaaaagacctcacgcccgcgagatgatgatcttcgcaatggcactttgctttcaatgcttccaagaaattactactcaatgatttgagcaactgtcatgtacatgtactatatggcggaagcaccaatacgaccgtcaagacccagtcggaactgccaaagtctgtttgtggcgaaaagaggcccatattatatcattttgcagcatttaaacggctaattgtttcgcatcatatcgcatgataccctatttcaccaacccatttcgttcaggccgcagatacccaattatagcagagactttacgcggaatgacatatgcaacgagctttcatagggagaactctactgagattcaagtcgtttcgtcatctcccagatactgacgcttgaaacatgaatctatatgtaaacatatactacaattccaccacattccttttcctagtgcacctgctcgacattatccgcaaagcgcgttccacaactcggaacaaatatcattgtggggtctttgtaactgtccgaatcgtaggcagatatattccaatacgaacattgtagacgacatcaagcctccaaaaaaagaggagcagtatgaccatggcgccacatagggtgaattcattatgtggtgagcccaccagttccaacggaaaaaatggtcttcttgcgtataagacaagaccagtccaagaaatatacgtgagcatcgctgtaagtagtagagtcatttggtgatatcctgactatatgaacgattatatacatgaagaaaatatgctggtaacggctttttacctgccaaaataccgcttctcgatgggcctcagtgctaggaatgcaacgacggaaaatccaaaagcaagctcaaacccgacatcacctccaaattctgtaccacacaacttgccgatgggaccgataaaccaaacttgtgcaagaccaagtacagcaccagcaacaccagctaagaaggcgccaagcgcggcaaaacctggaggaagacgcttcggataaatatagtcttctggcttatatccgtcaaatccaccacgtatcacgaagtgttcaacaacaccgatgcctgcgtatatagctaaccaataggcaatgatgagcaagaaatactcaagggcctcggcgaaatgatcgtatcccggaattgcgaccgcaatgtacacagcggttccgatggcagtccagagaaatcgtggtactcgggcggtggcacgggacatgacttgcaaggacaatgaaactgaatagatattcgggcagttattagcgataatggagagcccaagtatgacaacgcagaactctccgaagcggcccaggggcggaacaacgacttgcgcaacgaggccaccaatgccggaatcttcataagcttcggcataagcgggagttgtggcgatcgcgctcgcaacggcagcacccaaaagctctgtgaagatcaacggaaagatgaggcccgcataggtggtgaagaagacggccagacgggatcggtttacgggctgatagacggtataatcggcagcgtatgacgtccaaccggttgcaaatccgtagacggatgctgcaaacgacagaacactaccagcttcacccttaccagtggcaagaggaagaccggcatgaaagtgacctgtagatgcaaattctcccaaaacaatgaggaaaatgatgaaactgggaatccatgaccaacgctcatacaggtgaaccaatttatatccaaaggcgcagataatcagtgttgccacagcgatcacgagaataccagcccagcccggaacattgtggttgatggcgtggaatagctgtgcaccaacgataacgtttgcagctgaccagccaagacacgccagtatgttaaagaaggcaactgcgcataaagtggttaggaacgctccgccgagggatgagggaatagtgtacctattttcacagcataatggccaaagaagaagcgcgaaagcaccatctgtcgcaatccgaatcgggggccaaaggtggagaaaaagcagactggcaagattccgatagcattaaagaagatgatcgtaagtgcgctttcaacgaaaccgagatagaacactgggaaggatagtgcgccgactgcaaaggacgagacgaccatgttcgcggaaaaccactatggttctcgtcagttcagaatctcacacatatagtttgcaaagcacaacgtacaagagtgccgacatgcgtcaaactggtgtccgtcctctcatcgctaggaactcgttcaatacctcgctgttcaacgccatacttgccggcgaacctctgaagctttgcccataccgagttgccttctgaaaaggcttcttgcggtacagagttcaagtccgtaacatgtccagaacccatatccgaaccagccgattctttatccattttctcgttgctattgtttaaaccaagcgtagccattgtgcgtagcaagaaaattcaactcgaaactcgggtggttcgtaatgggcgactttggttgactagtgcggcgctacaagacccgagcgggatttctactggactttaaggaccgacgacgtagttccaataatccgagcaccaacctagaacgaagccgaagtcaaaagagaccggaacttgaaggtagaggatgaacggaacaggccgaccacctgataaaagctgaaagtaggaaatggccggacgaggcggcgtttatacagtagtggctatctgcaccatgcgcccacgacgatcacggagaactactccaaaattccaagggcatggtaaaatacatgacaacagacatgcttatcgacgaaccctgggattgtggacctacttgtttccacactggagagtcaagaaaattatagtaaacccgattgcccgagacggtaattggcgccgggcgtcgagataagaaaacgggggacgcaacagggatctacatgatggcctgcatggtgtagcgaataatgcagttcatttgctcagctgcgatcaagcctggccagcccaggttgctcctcacgataacctaggatcattatgaagagatcgaggcgagcagggttagcatgtccggattgaagccgcagtttgccaactcaggagaggctgccggaaatcgagaatacaagagggaatagcgcatagataacgagttccatatgtggccctagaagccctagaggccctagaagctgagccagaagggcttgaatcaagaggtgcttttttttctactacgatgacacgagtcgcacgcgacacgacaaacgtgggattacgccagatccggactaatgagatagacagtgcca

SEQ ID NO: 12926 - DNA, 1557 bp, Muscodor strobelii
  misc_feature: SGI cDNA ID NO. 564218
  misc_feature: Encodes the peptide sequence at SEQ ID NO 12927
atggctacgcttggtttaaacaatagcaacgagaaaatggataaagaatcggctggttcggatatgggttctggacatgttacggacttgaactctgtaccgcaagaagccttttcagaaggcaactcggtatgggcaaagcttcagaggttcgccggcaagtatggcgttgaacagcgaggtattgaacgagttcctagcgatgagaggacggacaccagtttgacgcatgtcggcactctttggttttccgcgaacatggtcgtctcgtcctttgcagtcggcgcactatccttcccagtgttctatctcggtttcgttgaaagcgcacttacgatcatcttctttaatgctatcggaatcttgccagtctgctttttctccacctttggcccccgattcggattgcgacagatggtgctttcgcgcttcttctttggccattatgctgtgaaaatagttgccttctttaacatactggcgtgtcttggctggtcagctgcaaacgttatcgttggtgcacagctattccacgccatcaaccacaatgttccgggctgggctggtattctcgtgatcgctgtggcaacactgattatctgcgcctttggatataaattggttcacctgtatgagcgttggtcatggattcccagtttcatcattttcctcattgttttgggagaatttgcatctacaggtcactttcatgccggtcttcctcttgccactggtaagggtgaagctggtagtgttctgtcgtttgcagcatccgtctacggatttgcaaccggttggacgtcatacgctgccgattataccgtctatcagcccgtaaaccgatcccgtctggccgtcttcttcaccacctatgcgggcctcatctttccgttgatcttcacagagcttttgggtgctgccgttgcgagcgcgatcgccacaactcccgcttatgccgaagcttatgaagattccggcattggtggcctcgttgcgcaagtcgttgttccgcccctgggccgcttcggagagttctgcgttgtcatacttgggctctccattatcgctaataactgcccgaatatctattcagtttcattgtccttgcaagtcatgtcccgtgccaccgcccgagtaccacgatttctctggactgccatcggaaccgctgtgtacattgcggtcgcaattccgggatacgatcatttcgccgaggcccttgagtatttcttgctcatcattgcctattggttagctatatacgcaggcatcggtgttgttgaacacttcgtgatacgtggtggatttgacggatataagccagaagactatatttatccgaagcgtcttcctccaggttttgccgcgcttggcgccttcttagctggtgttgctggtgctgtacttggtcttgcacaagtttggtttatcggtcccatcggcaagttgtgtggtacagaatttggaggtgatgtcgggtttgagcttgcttttggattttccgtcgttgcattcctagcactgaggcccatcgagaagcggtattttggcaggtaa

SEQ ID NO: 12927 - protein, 518 aa, Muscodor strobelii
  misc_feature: SGI Peptide ID NO. 564218
  misc_feature (64)..(478): Pfam Id: PF02133 Pfam Desc: Permease for cytosine/purines, uracil, thiamine, allantoin
  misc_feature (14)..(518): NCBI GI: 156054316 Blast Desc: SS1G_06006 [Sclerotinia sclerotiorum 1980] gi|154703786|gb|EDO03525.1| SS1G_06006 [Sclerotinia sclerotiorum 1980]
  misc_feature (14)..(518): NCBI GI: 154321317 Blast Desc: BC1G_01533 [Botryotinia fuckeliana B05.10] gi|150852071|gb|EDN27263.1| BC1G_01533 [Botryotinia fuckeliana B05.10]
  misc_feature (32)..(518): NCBI GI: 212536172 Blast Desc: purine-cytosine permease [Penicillium marneffei ATCC 18224] gi|210070641|gb|EEA24731.1| purine-cytosine permease [Penicillium marneffei ATCC 18224]
  misc_feature (32)..(518): NCBI GI: 242795066 Blast Desc: purine-cytosine permease [Talaromyces stipitatus ATCC 10500] gi|218719091|gb|EED18511.1| purine-cytosine permease [Talaromyces stipitatus ATCC 10500]
  misc_feature (10)..(518): NCBI GI: 121715366 Blast Desc: purine-cytosine permease [Aspergillus clavatus NRRL 1] gi|119403449|gb|EAW13866.1| purine-cytosine permease [Aspergillus clavatus NRRL 1]
  misc_feature (8)..(518): NCBI GI: 255950240 Blast Desc: Pc22g19850 [Penicillium chrysogenum Wisconsin 54-1255] gi|211592904|emb|CAP99273.1| Pc22g19850 [Penicillium chrysogenum Wisconsin 54-1255]
  misc_feature (32)..(518): NCBI GI: 169783570 Blast Desc: [Aspergillus oryzae RIB40] gi|238493395|ref|XP_002377934.1| purine-cytosine permease [Aspergillus flavus NRRL3357] gi|83774991|dbj|BAE65114.1| protein
  misc_feature (32)..(518): NCBI GI: 145252648 Blast Desc: An16g05290 [Aspergillus niger] gi|134083390|emb|CAK97383.1| protein product [Aspergillus niger]
  misc_feature (32)..(518): NCBI GI: 169798764 Blast Desc: cytosine-purine permease [Aspergillus fumigatus]
  misc_feature (32)..(518): NCBI GI: 169798762 Blast Desc: cytosine-purine permease [Emericella nidulans] gi|259479800|tpe|CBF70354.1| TPA: Cytosine-purine permease [Source:UniProtKB/TrEMBL;Acc:B1PXD0] [Aspergillus nidulans FGSC
MATLGLNNSNEKMDKESAGSDMGSGHVTDLNSVPQEAFSEGNSVWAKLQRFAGKYGVEQRGIERVPSDERTDTSLTHVGTLWFSANMVVSSFAVGALSFPVFYLGFVESALTIIFFNAIGILPVCFFSTFGPRFGLRQMVLSRFFFGHYAVKIVAFFNILACLGWSAANVIVGAQLFHAINHNVPGWAGILVIAVATLIICAFGYKLVHLYERWSWIPSFIIFLIVLGEFASTGHFHAGLPLATGKGEAGSVLSFAASVYGFATGWTSYAADYTVYQPVNRSRLAVFFTTYAGLIFPLIFTELLGAAVASAIATTPAYAEAYEDSGIGGLVAQVVVPPLGRFGEFCVVILGLSIIANNCPNIYSVSLSLQVMSRATARVPRFLWTAIGTAVYIAVAIPGYDHFAEALEYFLLIIAYWLAIYAGIGVVEHFVIRGGFDGYKPEDYIYPKRLPPGFAALGAFLAGVAGAVLGLAQVWFIGPIGKLCGTEFGGDVGFELAFGFSVVAFLALRPIEKRYFGR

SEQ ID NO: 12928 - DNA, 6738 bp, Muscodor strobelii
  misc_feature: SGI EST ID NO. CUFF.31004.1
  misc_feature: Variant of the nucleotide sequence at SEQ ID NO 12926
tggcactgtctatctcattagtccggatctggcgtaatcccacgtttgtcgtgtcgcgtgcgactcgtgtcatcgtagtagaaaaaaaagcacctcttgattcaagcccttctggctcagcttctagggcctctagggcttctagggccacatatggaactcgttatctatgcgctattccctcttgtattctcgatttccggcagcctctcctgagttggcaaactgcggcttcaatccggacatgctaaccctgctcgcctcgatctcttcataatgatcctaggttatcgtgaggagcaacctgggctggccaggcttgatcgcagctgagcaaatgaactgcattattcgctacaccatgcaggccatcatgtagatccctgttgcgtcccccgttttcttatctcgacgcccggcgccaattaccgtctcgggcaatcgggtttactataattttcttgactctccagtgtggaaacaagtaggtccacaatcccagggttcgtcgataagcatgtctgttgtcatgtattttaccatgcccttggaattttggagtagttctccgtgatcgtcgtgggcgcatggtgcagatagccactactgtataaacgccgcctcgtccggccatttcctactttcagcttttatcaggtggtcggcctgttccgttcatcctctaccttcaagttccggtctcttttgacttcggcttcgttctaggttggtgctcggattattggaactacgtcgtcggtccttaaagtccagtagaaatcccgctcgggtcttgtagcgccgcactagtcaaccaaagtcgcccattacgaaccacccgagtttcgagttgaattttcttgctacgcacaatggctacgcttggtttaaacaatagcaacgagaaaatggataaagaatcggctggttcggatatgggttctggacatgttacggacttgaactctgtaccgcaagaagccttttcagaaggcaactcggtatgggcaaagcttcagaggttcgccggcaagtatggcgttgaacagcgaggtattgaacgagttcctagcgatgagaggacggacaccagtttgacgcatgtcggcactctttggttttccgcgaacatggtcgtctcgtcctttgcagtcggcgcactatccttcccagtgttctatctcggtttcgttgaaagcgcacttacgatcatcttctttaatgctatcggaatcttgccagtctgctttttctccacctttggcccccgattcggattgcgacagatggtgctttcgcgcttcttctttggccattatgctgtgaaaatagttgccttctttaacatactggcgtgtcttggctggtcagctgcaaacgttatcgttggtgcacagctattccacgccatcaaccacaatgttccgggctgggctggtattctcgtgatcgctgtggcaacactgattatctgcgcctttggatataaattggttcacctgtatgagcgttggtcatggattcccagtttcatcattttcctcattgttttgggagaatttgcatctacaggtcactttcatgccggtcttcctcttgccactggtaagggtgaagctggtagtgttctgtcgtttgcagcatccgtctacggatttgcaaccggttggacgtcatacgctgccgattataccgtctatcagcccgtaaaccgatcccgtctggccgtcttcttcaccacctatgcgggcctcatctttccgttgatcttcacagagcttttgggtgctgccgttgcgagcgcgatcgccacaactcccgcttatgccgaagcttatgaagattccggcattggtggcctcgttgcgcaagtcgttgttccgcccctgggccgcttcggagagttctgcgttgtcatacttgggctctccattatcgctaataactgcccgaatatctattcagtttcattgtccttgcaagtcatgtcccgtgccaccgcccgagtaccacgatttctctggactgccatcggaaccgctgtgtacattgcggtcgcaattccgggatacgatcatttcgccgaggcccttgagtatttcttgctcatcattgcctattggttagctatatacgcaggcatcggtgttgttgaacacttcgtgatacgtggtggatttgacggatataagccagaagactatatttatccgaagcgtcttcctccaggttttgccgcgcttggcgccttcttagctggtgttgctggtgctgtacttggtcttgcacaagtttggtttatcggtcccatcggcaagttgtgtggtacagaatttggaggtgatgtcgggtttgagcttgcttttggattttccgtcgttgcattcctagcactgaggcccatcgagaagcggtattttggcaggtaaaaagccgttaccagcatattttcttcatgtatataatcgttcatatagtcaggatatcaccaaatgactctactacttacagcgatgctcacgtatatttcttggactggtcttgtcttatacgcaagaagaccattttttccgttggaactggtgggctcaccacataatgaattcaccctatgtggcgccatggtcatactgctcctctttttttggaggcttgatgtcgtctacaatgttcgtattggaatatatctgcctacgattcggacagttacaaagaccccacaatgatatttgttccgagttgtggaacgcgctttgcggataatgtcgagcaggtgcactaggaaaaggaatgtggtggaattgtagtatatgtttacatatagattcatgtttcaagcgtcagtatctgggagatgacgaaacgacttgaatctcagtagagttctccctatgaaagctcgttgcatatgtcattccgcgtaaagtctctgctataattgggtatctgcggcctgaacgaaatgggttggtgaaatagggtatcatgcgatatgatgcgaaacaattagccgtttaaatgctgcaaaatgatataatatgggcctcctgacaatttactgttagctggttcggatgtgatgagttcaatctgtactcacttttcgccacaaacagactttggcagttccgactgggtcttgacggtcgtattggtgcttccgccatatagtacatgtacatgacagttgctcaaatcattgagtagtaatttcttggaagcattgaaagcaaagtgccattgcgaagatcatcatctcgcgggcgtgaggtctttttctttgaggagctcaagaactttagccatcgtgatacgctggttgggattcggcgtaagcatatggaggacaatgtactctatcctgtcgcgtgggttgagatgattctttgcctcgttgatttcactcaaccactgctgcatctgcgtaacggccgtgactccacgccttgaatttcggttgagatctgcaatcatccaatacaattgctttggatgcccttgacgtccacgagcatcaggaaattggatcttcctcagcacatataacattgtaattccgagcgcccagacatcagaagaagggcctcgaagtttctgcccaatgaattctggaggcacgtagtatggcgtgcctccattggtcgcagaatctacagtccgtgttgaaagaccgaagtcgcaaagtacggcacctctttctcgtgaatacagtacatttgcgggcttgatgtcgttgtggattcgtttcttttcgtgaatgtagtgcaaagcaccagcgatatcgtttaggattcggatagcatcgctgcgattacccacaaatttatctgttgacgtctctcgccacacattacgagcggccaggtcttttccgtcaacgtgctccatatacaaggacagatatcgggcatcaccgccgtatagcttgacaatggaatcatgctgcagatcctcttggctttggtattctcttaaccagacatccgcttgacgaatgacatttctatgtatttcttgcggtcgtgtgtctgagtgctgattacctcgtgctttcaggaccttgacagtgataacaccctcgggtacatgggagtattcggccgtgtagacagaggacgcactggtggtcgcaatttgatctcgttttgtcaactgatactcgtcaagttcacatccaccaggtatgacagctgtctcatccttttgaacctcgagaagtgcttggccataaggaacagctatttcttttgttttggcagcattaggaaggggaaacatgagggacttgtccccaggaccgtataaaataatgacgccatccttgtctttatcctgagcgtcatcggcacgaagtttcttttcgatcacaccatcagtagtgtcttgatcatctgatacgaagcttctcttgcctagagagctgcgcagatcttggctacgggctggcgacgactcaacgctgtccgacggcacttgcagggttgcaggtcgcttctctagaatcctaaagtcaaggactgggatgcccacactgattttccacgttcctggccagagttctctagttgtaccgggcaaaatctcctggttatagttggcatcagtgcgatcgggcgacaccctagccaacacgataggaatttcagatttattccatagaatcagactatcgctcgctggatcatagtacagttcgcaccacaaaggcggatggttctcgccctcagtctgaggaatcctgatagagaagttgatgtcctttgaagtttgagtcaccgccaggaccttggatttgggttggcttgggtcggatacctccgcgcgtagagcaagccattgacaattatcgttaccagggctgacagaccgacttctcgtgaggggtctgactagaatcctgatgccctgtttgtgatgctcctcgttgactaccaagttgtccagagggatatcgtcaaggtgcgcatcgccaatttcatcaacttcgatgctcttgccaagccggacgttcagctcctcgagtgtgaacggctccgtcttctcctcggatgggaagacctctgtcatagttgcaactaaagagaaagttgcaaaaggagcttacgtgacatcgacgatgccaacttcaacgacgagtgtttgtgatataactagaaatgttgtgtttgacaggaacaggatgcgtaaatacgagatagagaaaagaaagagagagatgaaatgaacattcgcttcgaaggctttgaattgcgttgaaagagaaccaaacccttcagggggccattctggcaagatcgttgtcgttgatgatcgattacaccaagtatagagggaagctcggcagaatcagatgagctgtcctcgagacgacgagggtcgggtcactgcaacttacggcccggtcaggacagtcatagaaggggtcagaagtacaggagtagctggtgaagggcgtgaaatgcgcgattgcgtgcggctgatcccgcccgagtgcgagtggttcattcggttggctgccttgaccgttcctccgtgtttcctcggccagctagggcagtacaggaggtattaatacaggttccactggccgccgtggattagtcaagccgtcgaagaggcctctaggcgggagcatcaccagggttgcctcgaacgcagtagggctatgtcggtattggtatgtcacctactttagggcagatttgtactccagcttttatctactagccattggtgtgcagccagaaacggctctgtctcaatactgcgaatgttagcgaaaaagccaacgtctaaagtctaacgttttgacggtaacccgttttgcccgtctgatgtaattcacagatacttttcacagctgtcgtgtgacgaacatggaggcagacagaatcgcgcaggcgacttgaatgtacaggatattttggtgtgtgactccttagggcgatcttctgctcgaccccctgactggataagcgagtgaagcagcaggtgagcgggtcttacgatccgtcctcttcgcctgcgttctcgatgacggccggctcgatcggacaggctacatcatcgtccctcctgataaagtggctataaactccgtgcacccatcttcagagactatgtttagagaatcagtactgcatcaatagggctgccgtcccgtggctggtgttttctattgtgatcgttcgtgaagagtggcgaacaaggagggttgctcggctgaccgtcgcttgctgactgctggcccagcttggctgagcaaagcaagcctcatcaagaaacgatctggtagtcactgatgttggccgtaaaacgcatagggcccattaactgctcaccaagcttttccaacacgactttgagataaaccatctacgattgatgaaatacgaaacgaaagtgacacaggatgctactacacgatacgatactgtccatggtcacctcgtgttgttactcgtgatgaatacgtagattctcgataaagggcccttaaggcggtctgagtgatgtgtataatccaacagttctcttcgcctctgtcaaatacgaaaactgaggggtgatagcgagacccaaacggtgggtagacgatgtcggcttgagacaaccaccttggtccatgcaagcccgagaagccctcccagtcattagccaatagactctcaacgctagcagcaaagcccgcatttgtctcaatgcatgattattgattgggtgcagcgtgcagggacg

SEQ ID NO: 12929 - DNA, 609 bp, Muscodor strobelii
  misc_feature: SGI cDNA ID NO. 564219
  misc_feature: Encodes the peptide sequence at SEQ ID NO 12930
atgcggttctttctacctttcttcgcggctgtgtccgttgctgcgattcccgatgttacagtcgtccctcaagataacacatgtagcaattggccattcttcaggcaatatgcttctgttgccggtccattcagtatatttgctgactccacggactctgctcttgacggcaacaaaggcacttatgtgaaaatcagcgacccaacaatcgcatcaggatgggccggcatttactcgcaggctggagcagccgcaccacaggtgcagtgccaggcattcggatcagctgaaatgctggccatgaatgtgaatggtgaattccagccactcagtatctccgagtatatttatcacgagtatgatggactcgtattcgtcaagacaaccgcgaaaggagcgccaatcgagcctcactggcattactacaccaatggtactcggcaggatggaaccttccttggttggaacaacttcacgacatgggcttatcggctcgatagcacttctaacacttatcgcattcgacttatgacggattctaatcagactctatatgatggggagttcgcaggattcgtgcgcgcaggggatccggggtcgtcggactga

SEQ ID NO: 12930 - protein, 202 aa, Muscodor strobelii
  misc_feature: SGI Peptide ID NO. 564219
  misc_feature (15)..(194): NCBI GI: 121716483 Blast Desc: conserved [Aspergillus clavatus NRRL 1] gi|119403978|gb|EAW14395.1| conserved [Aspergillus clavatus NRRL 1]
  misc_feature (107)..(194): NCBI GI: 145242072 Blast Desc: An09g03650 [Aspergillus niger] gi|76057327|emb|CAJ18289.1| [Aspergillus niger] gi|134078227|emb|CAK96808.1| protein product [Aspergillus niger]
MRFFLPFFAAVSVAAIPDVTVVPQDNTCSNWPFFRQYASVAGPFSIFADSTDSALDGNKGTYVKISDPTIASGWAGIYSQAGAAAPQVQCQAFGSAEMLAMNVNGEFQPLSISEYIYHEYDGLVFVKTTAKGAPIEPHWHYYTNGTRQDGTFLGWNNFTTWAYRLDSTSNTYRIRLMTDSNQTLYDGEFAGFVRAGDPGSSD

SEQ ID NO: 12931 - DNA, 1168 bp, Muscodor strobelii
  misc_feature: SGI EST ID NO. CUFF.30747.0
  misc_feature: Variant of the nucleotide sequence at SEQ ID NO 12929
tgaaaacccagcaattgatctaaaggaatgtcggtgtgaatcacggctaatcgaaagattcagatccaaccgccaacctacgcatcacgtcgtgccgtgttatgcctctcgccgtattgccaagcagacgctatcccgctagcgaatcgtttgtgcctattcgattggccgcatcgtcaactttcatcagaaaggatttctcgtgttgagcgaccgtcagcgttttgatatcagtgataatattgaataatgaatgtcgcatcgagagacgatgatataacacgcgttatagatttcatctatgcggatataaatgagttgcgtaagcatgtatcatttcgaaatgcatcacctttcctcaagtcattcacaatcgtgactgcgaaactcatctagatcatgcggttctttctacctttcttcgcggctgtgtccgttgctgcgattcccgatgttacagtcgtccctcaagataacacatgtagcaattggccattcttcaggcaatatgcttctgttgccggtccattcagtatatttgctgactccacggactctgctcttgacggcaacaaaggcacttatgtgaaaatcagcgacccaacaatcgcatcaggatgggccggcatttactcgcaggctggagcagccgcaccacaggtgcagtgccaggcattcggatcagctgaaatgctggccatgaatgtgaatggtgaattccagccactcagtatctccgagtatatttatcacgagtatgatggactcgtattcgtcaagacaaccgcgaaaggagcgccaatcgagcctcactggcattactacaccaatggtactcggcaggatggaaccttccttggttggaacaacttcacgacatgggcttatcggctcgatagcacttctaacacttatcgcattcgacttatgacggattctaatcagactctatatgatggggagttcgcaggattcgtgcgcgcaggggatccggggtcgtcggactgagagtcaaatagcgatagtttatgatttgaacactagatagagggtcgcaaacttttaggcgttgtgttttatttcctcatgtctctgtacctgaaactgtccaacgcaaacgacgaggaaagctctcgcgaatatataattcataattcgcatctttctc

SEQ ID NO: 12932 - DNA, 1092 bp, Muscodor strobelii
  misc_feature: SGI cDNA ID NO. 564220
  misc_feature: Elevated expression when VOC is produced
  misc_feature: Encodes the peptide sequence at SEQ ID NO 12933
atggccactgctacggagacaagaactcacaaagcttgtgtttattccaagccgggttcgtgctcaattgaggttcgcgatgtgccgacacctgaaccaggaccaggtgaggtcttggttaagttgacacattccggtgtctgccactcagattacggaataatgatgaacacttggcttcatcttccattccccactcaagaaggtcaggttggcggtcatgagggcgttggtttcatagagaaattaggtccgggtaccgaaggcgagggtcgcaaggttggggaccgagttggtatcaagtgggtttcggcagcatgcctttcatgcccaccttgccttgagggcatggaaggcttatgtttcaaccagaaggtcagcgggtattacactccgggcactttccagcaatatgtcattgggcctgcaaactacgtaacaccaatcccagcagacctccccggtgaactagcagcaccaatgctgtgtgctggcgtaacgacatatgcagcattgcggaaatctggcgctgaatctggtcaatgggttgtcatctccggcgcaggcggcggtctcggcactatcgctacaagccttggtgcacatgctatgggctttcgaattattggcatcgatatgccgagtaagaaagaggtgatcttggagtctggtgcagaacactttatcgatgttacagctttcgacgatggaagtattggcaaagaggtcaagagactgacgggacatggagctaaagctgtcattgcttgcacggcgagtaacaaagcctacggccaggctctgtccatgctgaggttcggcggcacattagtttgtgtggggatgcctgagggcgagccggtcccaattgccaatgcatatccgacggcaatggtggccggtatgcacaagatagtcgctgtagcagttggtaatcgtcgtgaagcagctgaaacactcgagatggctagtcgaggcgtggtgaaattcccttccaaaacggttggcatgaaagatctgcagtctgtatttgaacagatgggcgaagggaaagtgatgggtcgtgtagtgttggatttgtcgggcgaataa

SEQ ID NO: 12933 - protein, 363 aa, Muscodor strobelii
  misc_feature: SGI Peptide ID NO. 564220
  misc_feature (35)..(149): Pfam Id: PF08240 Pfam Desc: Alcohol dehydrogenase GroES-like domain
  misc_feature (179)..(325): Pfam Id: PF00107 Pfam Desc: Zinc-binding dehydrogenase
  misc_feature (1)..(361): NCBI GI: 238482095 Blast Desc: alcohol dehydrogenase, [Aspergillus flavus NRRL3357] gi|220700336|gb|EED56674.1| alcohol dehydrogenase, [Aspergillus flavus NRRL3357]
  misc_feature (1)..(361): NCBI GI: 169765534 Blast Desc: [Aspergillus oryzae RIB40] gi|83765093|dbj|BAE55236.1| protein product [Aspergillus oryzae]
  misc_feature (10)..(361): NCBI GI: 18478416 Blast Desc: alcohol dehydrogenase II [Monascus purpureus]
  misc_feature (1)..(361): NCBI GI: 115395344 Blast Desc: alcohol dehydrogenase II [Aspergillus terreus NIH2624] gi|114193066|gb|EAU34766.1| alcohol dehydrogenase II [Aspergillus terreus NIH2624]
  misc_feature (8)..(361): NCBI GI: 121711325 Blast Desc: alcohol dehydrogenase, [Aspergillus clavatus NRRL 1] gi|119401429|gb|EAW11852.1| alcohol dehydrogenase, [Aspergillus clavatus NRRL 1]
  misc_feature (8)..(361): NCBI GI: 154299051 Blast Desc: BC1G_11838 [Botryotinia fuckeliana B05.10] gi|150857541|gb|EDN32733.1| BC1G_11838 [Botryotinia fuckeliana B05.10]
  misc_feature (1)..(361): NCBI GI: 258564498 Blast Desc: alcohol dehydrogenase II [Uncinocarpus reesii 1704] gi|237908501|gb|EEP82902.1| alcohol dehydrogenase II [Uncinocarpus reesii 1704]
  misc_feature (8)..(361): NCBI GI: 226289373 Blast Desc: alcohol dehydrogenase [Paracoccidioides brasiliensis Pb18]
  misc_feature (1)..(361): NCBI GI: 226280102 Blast Desc: alcohol dehydrogenase [Paracoccidioides brasiliensis Pb01]
  misc_feature (1)..(361): NCBI GI: 159123158 Blast Desc: alcohol dehydrogenase, [Aspergillus fumigatus A1163]
  misc_feature (1)..(361): SWISSPROT Homolog: EC 1.1.1.1 Alcohol dehydrogenase
  misc_feature: Useful for introducing or modulating the production of volatile compounds
MATATETRTHKACVYSKPGSCSIEVRDVPTPEPGPGEVLVKLTHSGVCHSDYGIMMNTWLHLPFPTQEGQVGGHEGVGFIEKLGPGTEGEGRKVGDRVGIKWVSAACLSCPPCLEGMEGLCFNQKVSGYYTPGTFQQYVIGPANYVTPIPADLPGELAAPMLCAGVTTYAALRKSGAESGQWVVISGAGGGLGTIATSLGAHAMGFRIIGIDMPSKKEVILESGAEHFIDVTAFDDGSIGKEVKRLTGHGAKAVIACTASNKAYGQALSMLRFGGTLVCVGMPEGEPVPIANAYPTAMVAGMHKIVAVAVGNRREAAETLEMASRGVVKFPSKTVGMKDLQSVFEQMGEGKVMGRVVLDLSGE

SEQ ID NO: 12934 - DNA, 1219 bp, Muscodor strobelii
  misc_feature: SGI EST ID NO. CUFF.30757.0
  misc_feature: Variant of the nucleotide sequence at SEQ ID NO 12932
ggaatatgtcactgtaatttctacagattatctaaactagtccacaatcactttaggaaatcgaatttgaatatggccactgctacggagacaagaactcacaaagcttgtgtttattccaagccgggttcgtgctcaattgaggttcgcgatgtgccgacacctgaaccaggaccaggtgaggtcttggttaagttgacacattccggtgtctgccactcagattacggaataatgatgaacacttggcttcatcttccattccccactcaagaaggtcaggttggcggtcatgagggcgttggtttcatagagaaattaggtccgggtaccgaaggcgagggtcgcaaggttggggaccgagttggtatcaagtgggtttcggcagcatgcctttcatgcccaccttgccttgagggcatggaaggcttatgtttcaaccagaaggtcagcgggtattacactccgggcactttccagcaatatgtcattgggcctgcaaactacgtaacaccaatcccagcagacctccccggtgaactagcagcaccaatgctgtgtgctggcgtaacgacatatgcagcattgcggaaatctggcgctgaatctggtcaatgggttgtcatctccggcgcaggcggcggtctcggcactatcgctacaagccttggtgcacatgctatgggctttcgaattattggcatcgatatgccgagtaagaaagaggtgatcttggagtctggtgcagaacactttatcgatgttacagctttcgacgatggaagtattggcaaagaggtcaagagactgacgggacatggagctaaagctgtcattgcttgcacggcgagtaacaaagcctacggccaggctctgtccatgctgaggttcggcggcacattagtttgtgtggggatgcctgagggcgagccggtcccaattgccaatgcatatccgacggcaatggtggccggtatgcacaagatagtcgctgtagcagttggtaatcgtcgtgaagcagctgaaacactcgagatggctagtcgaggcgtggtgaaattcccttccaaaacggttggcatgaaagatctgcagtctgtatttgaacagatgggcgaagggaaagtgatgggtcgtgtagtgttggatttgtcgggcgaataattcactgtccttgctagattgacggtagattaataaactacatccaggggttaag

SEQ ID NO: 12935 - DNA, 1356 bp, Muscodor strobelii
  misc_feature: SGI cDNA ID NO. 564221
  misc_feature: Reduced expression when VOC is produced
  misc_feature: Encodes the peptide sequence at SEQ ID NO 12936
atgaagtactccgctgctgtcctactgggcagcgctgtcgccagcgtttccgccggctactgtgccgatgctgtcgaatccggcggcaattattactgccccggtgccgtgaagcagattaagtacagcggattggatattgccggctcgtatcgcgctgtgtcgcttatggacaactccggaacatgtaccttcgatagcaaggactactctggccccatggctcctttcgatgaaggtctgtccatgcacttccgtggtccgatccagatcagcaatgttgccgtttatatgcctggatcgagcagcagcaagcgtgaggcaccgaagtccaagcgtcaccagcaccatggccatcagcatctccacaggaagcaccacgaggaggaaaagcgtcaagttggcgccaccgtcaccgcggtgatgaacggcgagaccgttacttggatcaacaagtggagtggacaaactcccgctgccgatgccgacgccggaagcgtggaaacaactgcgactgccgcagctgaggcgcctgctgtcacaacgcctgtcgccccagcgaatgtgaaaggcactactaagacttcgtctagtgccggttccattaaaggcgattgggttcgatccgcttactactctgctgccgacgggactgctgacgggctcacatttttggccaatgttggttccgatgctgtttccggaacttgggataccgtttggggctcttccttggcctatgtgagtgacgatggcaagaccgtcgccgcctctcctcaggtcttgaagaatactttactcgacgatgctaccgaaatcgccatcttctctgattcagcttgcgatgccgagacctgtggcacgtatcgccccaaatctgtcgcctatcgcggcttcgagggagcctccaaagtcttcgttgttgaattcacgatgccccagagcggcaagaccggcttcaacgagaatatgcccgctttctggttgctcaactctgctattccccgtactgctcagtacgcctcttgcagctgctggatgggtgacaactcgagccctcaggaaggtggctgtggtgaattcgacgtcgttgaaatccttacccctggcgagactcgcgccaagtcgaccttccacttcgccaacggcctcggcgactcgcactacttcgagcgtcctgtgtcttcttctggtatctacgctgtcgtgttcgatggcgaaaactcctccgtttccatcaagcagctcgactcatttgactgggccaccagcctcacctcgaataacttcgccgatatgatcgttgatgaggttcaaaatgctcttgttgctttggcggacatcgttgcttcttaa

SEQ ID NO: 12936 - protein, 451 aa, Muscodor strobelii
  misc_feature: SGI Peptide ID NO. 564221
  misc_feature (1)..(446): NCBI GI: 119195769 Blast Desc: CIMG_02259 [Coccidioides immitis RS]
  misc_feature (1)..(428): NCBI GI: 256734726 Blast Desc: NECHADRAFT_75266 [Nectria haematococca mpVI 77-13-4]
  misc_feature (1)..(446): NCBI GI: 240110494 Blast Desc: CPC735_039160 [Coccidioides posadasii C735 delta SOWgp]
  misc_feature (5)..(426): NCBI GI: 46107988 Blast Desc: FG00876.1 [Gibberella zeae PH-1]
  misc_feature (1)..(443): NCBI GI: 225679187 Blast Desc: conserved [Paracoccidioides brasiliensis Pb03]
  misc_feature (1)..(445): NCBI GI: 261355217 Blast Desc: TOS1 [Verticillium albo-atrum VaMs.102]
  misc_feature (6)..(433): NCBI GI: 156040493 Blast Desc: SS1G_12263 [Sclerotinia sclerotiorum 1980] gi|154696319|gb|EDN96057.1| SS1G_12263 [Sclerotinia sclerotiorum 1980]
  misc_feature (1)..(441): NCBI GI: 226278049 Blast Desc: conserved [Paracoccidioides brasiliensis Pb01]
  misc_feature (3)..(438): NCBI GI: 261201736 Blast Desc: conserved [Ajellomyces dermatitidis SLH14081] gi|239590179|gb|EEQ72760.1| conserved [Ajellomyces dermatitidis SLH14081]
  misc_feature (3)..(438): NCBI GI: 239611893 Blast Desc: conserved [Ajellomyces dermatitidis ER-3]
  misc_feature: Useful for introducing or modulating the production of volatile compounds
MKYSAAVLLGSAVASVSAGYCADAVESGGNYYCPGAVKQIKYSGLDIAGSYRAVSLMDNSGTCTFDSKDYSGPMAPFDEGLSMHFRGPIQISNVAVYMPGSSSSKREAPKSKRHQHHGHQHLHRKHHEEEKRQVGATVTAVMNGETVTWINKWSGQTPAADADAGSVETTATAAAEAPAVTTPVAPANVKGTTKTSSSAGSIKGDWVRSAYYSAADGTADGLTFLANVGSDAVSGTWDTVWGSSLAYVSDDGKTVAASPQVLKNTLLDDATEIAIFSDSACDAETCGTYRPKSVAYRGFEGASKVFVVEFTMPQSGKTGFNENMPAFWLLNSAIPRTAQYASCSCWMGDNSSPQEGGCGEFDVVEILTPGETRAKSTFHFANGLGDSHYFERPVSSSGIYAVVFDGENSSVSIKQLDSFDWATSLTSNNFADMIVDEVQNALVALADIVAS

SEQ ID NO: 12937 - DNA, 2138 bp, Muscodor strobelii
  misc_feature: SGI EST ID NO. CUFF.30842.0
  misc_feature: Variant of the nucleotide sequence at SEQ ID NO 12935
tggcgctctttggcgctctctttggcccttgggttcgattcttaataatccctaccatgccgccccgtcgccttgtcgaatgcccgccatcttcttctttttccgacgggaagcaagccagtctttcattgttccggtgaatttacaccacgccgctccttatcgctatttcgattcaggttgttgtcttcgctctttgaggatcatcaacttgtgttgccacgttcattccagcttgccattgtatttatcagggcagaccttgttcagttgtacgacgacgacgacattccagcgattgcgttttgaaactcgatcagatcttgcacgacacgaccacaaaaattacgaatccctgttacttgcaattcgaattaaataaagaggtttcgggtgaaggaatattaaaatgaagtactccgctgctgtcctactgggcagcgctgtcgccagcgtttccgccggctactgtgccgatgctgtcgaatccggcggcaattattactgccccggtgccgtgaagcagattaagtacagcggattggatattgccggctcgtatcgcgctgtgtcgcttatggacaactccggaacatgtaccttcgatagcaaggactactctggccccatggctcctttcgatgaaggtctgtccatgcacttccgtggtccgatccagatcagcaatgttgccgtttatatgcctggatcgagcagcagcaagcgtgaggcaccgaagtccaagcgtcaccagcaccatggccatcagcatctccacaggaagcaccacgaggaggaaaagcgtcaagttggcgccaccgtcaccgcggtgatgaacggcgagaccgttacttggatcaacaagtggagtggacaaactcccgctgccgatgccgacgccggaagcgtggaaacaactgcgactgccgcagctgaggcgcctgctgtcacaacgcctgtcgccccagcgaatgtgaaaggcactactaagacttcgtctagtgccggttccattaaaggcgattgggttcgatccgcttactactctgctgccgacgggactgctgacgggctcacatttttggccaatgttggttccgatgctgtttccggaacttgggataccgtttggggctcttccttggcctatgtgagtgacgatggcaagaccgtcgccgcctctcctcaggtcttgaagaatactttactcgacgatgctaccgaaatcgccatcttctctgattcagcttgcgatgccgagacctgtggcacgtatcgccccaaatctgtcgcctatcgcggcttcgagggagcctccaaagtcttcgttgttgaattcacgatgccccagagcggcaagaccggcttcaacgagaatatgcccgctttctggttgctcaactctgctattccccgtactgctcagtacgcctcttgcagctgctggatgggtgacaactcgagccctcaggaaggtggctgtggtgaattcgacgtcgttgaaatccttacccctggcgagactcgcgccaagtcgaccttccacttcgccaacggcctcggcgactcgcactacttcgagcgtcctgtgtcttcttctggtatctacgctgtcgtgttcgatggcgaaaactcctccgtttccatcaagcagctcgactcatttgactgggccaccagcctcacctcgaataacttcgccgatatgatcgttgatgaggttcaaaatgctcttgttgctttggcggacatcgttgcttcttaaatgtcgaacccaacatctaaatagtatattaacgcggaggcgaacttgatgtaacagaaaaaatcctttcacttcggtgcatcaagccacgaggagtatttaacctaatgatagagtcttcaattattagatgatggtagtatcacgtgggtgactagctttttgagtttattgtcaggattggcgcgttttagccttggttgtaacacacaaatctgttatgcttgttgactgtattcattcacgtgccgcgaaatacttcatgccacgaattgctttcaatgtgtatcaagtcgttgctattgtatacgagaggacggtgagtgtgcacgcgtttcggataagaacttgaacactatgaattaaatcgctg

SEQ ID NO: 12938 - DNA, 393 bp, Muscodor strobelii
  misc_feature: SGI cDNA ID NO. 564222
  misc_feature: Reduced expression when VOC is produced
  misc_feature: Encodes the peptide sequence at SEQ ID NO 12939
atgtccgatgaatctacacccctgatcacaacatcaagacaaaacaagaaaaacatgtattggactctcggctgcgtgtatggggcaactgcggtttgcatgggcgctttcggatctcatggattaaagaaaatcgtcactgatccagccaaactggccagctttgggaccgcagcgcattaccagttgattcactcggttgctttgctagttgcttcgcaggctgcgccagagaacaaacttgcggccaacttattcacagcgggcatgaccatgttcagcggtagtatctacgccctagtactggatcccgcacgcttccggttcctaggtccagtcacgcctcttggtggactgtgtctgattggcggatgggctgcgctagctttctaa

SEQ ID NO: 12939 - protein, 130 aa, Muscodor strobelii
  misc_feature: SGI Peptide ID NO. 564222
  misc_feature (20)..(130): Pfam Id: PF04241 Pfam Desc: Domain of function (DUF423)
  misc_feature (3)..(130): NCBI GI: 39961885 Blast Desc: MGG_09572 [Magnaporthe grisea 70-15] gi|145011080|gb|EDJ95736.1| MGG_09572 [Magnaporthe grisea 70-15]
  misc_feature (2)..(130): NCBI GI: 171680642 Blast Desc: protein product [Podospora anserina] gi|170939948|emb|CAP65174.1| protein product [Podospora anserina]
  misc_feature (20)..(103): NCBI GI: 189188930 Blast Desc: conserved [Pyrenophora tritici-repentis Pt-1C-BFP] gi|187972410|gb|EDU39909.1| conserved [Pyrenophora tritici-repentis Pt-1C-BFP]
  misc_feature (17)..(130): NCBI GI: 281201673 Blast Desc: PPL_10453 [Polysphondylium pallidum PN500]
  misc_feature (21)..(128): NCBI GI: 213401221 Blast Desc: conserved [Schizosaccharomyces japonicus yFS275] gi|211999430|gb|EEB05090.1| conserved [Schizosaccharomyces japonicus yFS275]
  misc_feature (28)..(129): NCBI GI: 209694281 Blast Desc: membrane protein [Aliivibrio salmonicida LFI1238] gi|208008232|emb|CAQ78377.1| membrane protein [Aliivibrio salmonicida LFI1238]
  misc_feature (18)..(128): NCBI GI: 117618639 Blast Desc: AHA_1149 [Aeromonas hydrophila subsp. hydrophila ATCC 7966] gi|117560046|gb|ABK36994.1| membrane protein [Aeromonas hydrophila subsp. hydrophila ATCC 7966]
  misc_feature (17)..(128): NCBI GI: 227540423 Blast Desc: conserved membrane protein [Sphingobacterium spiritivorum ATCC 33300] gi|227239747|gb|EEI89762.1| conserved membrane protein [Sphingobacterium spiritivorum ATCC 33300]
  misc_feature (9)..(128): NCBI GI: 120556411 Blast Desc: Maqu_3505 [Marinobacter aquaeolei VT8] gi|120326260|gb|ABM20575.1| protein of function DUF423 [Marinobacter aquaeolei VT8]
  misc_feature (20)..(130): NCBI GI: 251794259 Blast Desc: protein of function DUF423 [Paenibacillus sp. JDR-2] gi|247541885|gb|ACS98903.1| protein of function DUF423 [Paenibacillus sp. JDR-2]
  misc_feature: Useful for introducing or modulating the production of volatile compounds
MSDESTPLITTSRQNKKNMYWTLGCVYGATAVCMGAFGSHGLKKIVTDPAKLASFGTAAHYQLIHSVALLVASQAAPENKLAANLFTAGMTMFSGSIYALVLDPARFRFLGPVTPLGGLCLIGGWAALAF

SEQ ID NO: 12940 - DNA, 817 bp, Muscodor strobelii
  misc_feature: SGI EST ID NO. CUFF.30790.1
  misc_feature: Variant of the nucleotide sequence at SEQ ID NO 12938
acgagatcgggacctcccgtgcgtgctgtcgtatcgtcctgacatcgtttcagctcatgtcgaatcatcttcatctcatccatattatccgcgctcagtgtatccccgtatcttcctgtgagctacaagtgctcttgtatctttgtatactcttttctggtccacccagtcacttgtaccctccaacccgacgatgtccgatgaatctacacccctgatcacaacatcaagacaaaacaagaaaaacatgtattggactctcggctgcgtgtatggggcaactgcggtttgcatgggcgctttcggatctcatggattaaagaaaatcgtcactgatccagccaaactggccagctttgggaccgcagcgcattaccagttgattcactcggttgctttgctagttgcttcgcaggctgcgccagagaacaaacttgcggccaacttattcacagcgggcatgaccatgttcagcggtagtatctacgccctagtactggatcccgcacgcttccggttcctaggtccagtcacgcctcttggtggactgtgtctgattggcggatgggctgcgctagctttctaaggtcatgaagaggatgacgctgtgattgtgtactgtatgatataaaaggttcgtgattctaccaatagatcatctctattcgaaaactttgagatcagaagtgaaagacggtcaggccgttgacgaaacaattaatacccatttgggcactcctaacaacgctaacaagggacctcgagagacatacattgttcagttgaattttatctattagatattactcgggcgtca

SEQ ID NO: 12941 - DNA, 642 bp, Muscodor strobelii
  misc_feature: SGI cDNA ID NO. 564223
  misc_feature: Encodes the peptide sequence at SEQ ID NO 12942
atggcgtcgtctaccagtcctcctgagggcgagcagccatcgtcagacccgccggccgcaccactcgaagtggtccagacaaatttcttcgatgaaatcctcaagtactatccagccgagaaccaacttcaaccgggaaccagagttgaggtttactgcgctctttgccgtcgtaacatcattgtattgtcacaccctaccgacgaactcgcgaagaagcccaagccaaccagcaagggaatggcagtagtagcctgcggtcattttttccatgatcgctgcctgaagaggtcattcaagtacaaggagccttcccaatgcccctcgtgcaaattaatgcccgatattttccgggaatactccttggaagagatgctcctttcctggcctactcaatggcccgacgaacccctcagcttcgattcgaccagcattttacagcagacccttgaggacattcgcaagatggttgacgtggagcgagccatggatccccagcgacgtgtggaacgtgacagtatgctgatggatatgctgatggattttgcgcctgaagaggctctatggtctggactgtctgatgagagctctgaggctgaagaagatccggctgcggcctcaagccgatcaggggaggagtga

SEQ ID NO: 12942 - protein, 213 aa, Muscodor strobelii
  misc_feature: SGI Peptide ID NO. 564223
  misc_feature (86)..(110): Pfam Id: PF00097 Pfam Desc: Zinc finger, C3HC4 type (RING finger)
MASSTSPPEGEQPSSDPPAAPLEVVQTNFFDEILKYYPAENQLQPGTRVEVYCALCRRNIIVLSHPTDELAKKPKPTSKGMAVVACGHFFHDRCLKRSFKYKEPSQCPSCKLMPDIFREYSLEEMLLSWPTQWPDEPLSFDSTSILQQTLEDIRKMVDVERAMDPQRRVERDSMLMDMLMDFAPEEALWSGLSDESSEAEEDPAAASSRSGEE

SEQ ID NO: 12943 - DNA, 947 bp, Muscodor strobelii
  misc_feature: SGI EST ID NO. CUFF.30778.0
  misc_feature: Variant of the nucleotide sequence at SEQ ID NO 12941
ataatttctcgctcggaaacagagcgacacatccactaagcgtccttcatcaccgagacaacaacaacagcagcctggagtagctttttaagcagctgctcactccgtacatctccattctcctgacttacacttctacacaatcatgacctgaccgatatggcgtcgtctaccagtcctcctgagggcgagcagccatcgtcagacccgccggccgcaccactcgaagtggtccagacaaatttcttcgatgaaatcctcaagtactatccagccgagaaccaacttcaaccgggaaccagagttgaggtttactgcgctctttgccgtcgtaacatcattgtattgtcacaccctaccgacgaactcgcgaagaagcccaagccaaccagcaagggaatggcagtagtagcctgcggtcattttttccatgatcgctgcctgaagaggtcattcaagtacaaggagccttcccaatgcccctcgtgcaaattaatgcccgatattttccgggaatactccttggaagagatgctcctttcctggcctactcaatggcccgacgaacccctcagcttcgattcgaccagcattttacagcagacccttgaggacattcgcaagatggttgacgtggagcgagccatggatccccagcgacgtgtggaacgtgacagtatgctgatggatatgctgatggattttgcgcctgaagaggctctatggtctggactgtctgatgagagctctgaggctgaagaagatccggctgcggcctcaagccgatcaggggaggagtgaactacggaggctcatgccaggtactgccggcatagtcacttgttattagcacaagcattcatttccagcacagtaagatagcacaagttgtgtactatctccagtagccccttcagtacattagctaataatgaagacgttccgaa

SEQ ID NO: 12944 - DNA, 705 bp, Muscodor strobelii
  misc_feature: SGI cDNA ID NO. 564224
  misc_feature: Encodes the peptide sequence at SEQ ID NO 12945
atgagcgctccggcctcctccaccatcgcccaccccgttgagactctggccacatccagccctctcgatgcctcgcgacgacagccccccgccaccgccgccggtgccgccgaactcgcccgtcaaccactagctggcggcgaccaggacaagctggcggcggccaagaagctcgtcgtcgacaacctgcgcatgatccccgacttccccatccccggcatcaagttcatcgacatcctccccgtcttccagaaccccgccgccttcgccgccctcctcgacgtgctcgtcctgctcctcgtcgaccgcttcggcgatgccatacccgatgtcatcgtggggctcgaggcccgcggctttctgttcggcccctccctggccctgcggctcggccgtccctttgtgcccgtccgcaagaagggcaagatgcccggcggctgcataaccgtggaatacaccaaagaatacggcaaggacgagttccaggtccagaccaacgccatcaagcccggccagcagtgcttgatcgtcgatgatatcattgccaccggaggcactgctgcggccgcgggaaaattggttgagctctccgacgcaaaggtcatgggctatctgtttatgattgatatcattaacttgaaaggaacgaccttgcttggcgataaacccataattactctcatcgaacacaatgaggaggaatga

SEQ ID NO: 12945 - protein, 234 aa, Muscodor strobelii
  misc_feature: SGI Peptide ID NO. 564224
  misc_feature (78)..(223): Pfam Id: PF00156 Pfam Desc: Phosphoribosyl transferase domain
  misc_feature (78)..(209): Pfam Id: PF00156 Pfam Desc: Phosphoribosyl transferase domain
  misc_feature (1)..(229): NCBI GI: 46107678 Blast Desc: FG00722.1 [Gibberella zeae PH-1]
  misc_feature (4)..(229): NCBI GI: 256735479 Blast Desc: [Nectria haematococca mpVI 77-13-4]
  misc_feature (19)..(234): NCBI GI: 169782086 Blast Desc: [Aspergillus oryzae RIB40] gi|238498942|ref|XP_002380706.1| adenine phosphoribosyltransferase 1 [Aspergillus flavus NRRL3357] protein
  misc_feature (1)..(234): NCBI GI: 169613512 Blast Desc: SNOG_09887 [Phaeosphaeria nodorum SN15] gi|111062032|gb|EAT83152.1| SNOG_09887 [Phaeosphaeria nodorum SN15]
  misc_feature (24)..(234): NCBI GI: 121709117 Blast Desc: adenine phosphoribosyltransferase 1 [Aspergillus clavatus NRRL 1] gi|119400462|gb|EAW10887.1| adenine phosphoribosyltransferase 1 [Aspergillus clavatus NRRL 1]
  misc_feature (19)..(232): NCBI GI: 145245717 Blast Desc: An12g00320 [Aspergillus niger] gi|134079828|emb|CAK40961.1| protein product [Aspergillus niger]
  misc_feature (18)..(234): NCBI GI: 70982346 Blast Desc: adenine phosphoribosyltransferase 1 [Aspergillus fumigatus Af293] gi|66844325|gb|EAL84663.1| adenine phosphoribosyltransferase 1 [Aspergillus fumigatus Af293] adenine
  misc_feature (34)..(234): NCBI GI: 119489233 Blast Desc: adenine phosphoribosyltransferase 1 [Neosartorya fischeri NRRL 181] gi|119411026|gb|EAW20971.1| adenine phosphoribosyltransferase 1 [Neosartorya fischeri NRRL 181]
  misc_feature (63)..(229): NCBI GI: 240107606 Blast Desc: adenine phosphoribosyltransferase , [Coccidioides posadasii C735 delta SOWgp]
  misc_feature (63)..(229): NCBI GI: 119177657 Blast Desc: CIMG_07744 [Coccidioides immitis RS]
  misc_feature (62)..(232): SWISSPROT Homolog: EC 2.4.2.7 Adenine phosphoribosyltransferase
MSAPASSTIAHPVETLATSSPLDASRRQPPATAAGAAELARQPLAGGDQDKLAAAKKLVVDNLRMIPDFPIPGIKFIDILPVFQNPAAFAALLDVLVLLLVDRFGDAIPDVIVGLEARGFLFGPSLALRLGRPFVPVRKKGKMPGGCITVEYTKEYGKDEFQVQTNAIKPGQQCLIVDDIIATGGTAAAAGKLVELSDAKVMGYLFMIDIINLKGTTLLGDKPIITLIEHNEEE

SEQ ID NO: 12946 - DNA, 2266 bp, Muscodor strobelii
  misc_feature: SGI EST ID NO. CUFF.30800.0
  misc_feature: Variant of the nucleotide sequence at SEQ ID NO 12944
cgaaaggcagccggcggacgacagggaagaaaaaaaaaagtcttgaaaaatttcagaaactagaggacaacaagcccgatgccgtttgagtcacctccatccacgtccatcccactctctcaccaccccaatcgcgtctgcccctcgttgcccatgttgcccatcaccccacatccgggcacttctcacgtacctcccactctgcagtcgagctgatgtaccacaatcgtgccagtatctcgtccggccctactcttgtcgtgctctgcttatcgaaacgaggcggtttcgggcatgtaaatatttataattggtttcgttggggtttaatgtcaggcatccctactagttgccgttagtccgtctcacttttttttctctctctttcgcacgctctctcatgtcccgtcgtgctcgtacgagaagcggcatgcaagtaataaagagtgagtgaccgatgagcgagtgtttcctccaagccgcatccacgtctgcatctgccatatctgctacatgtgctgcacctgagccctgcgtttcctgtcgcccatctgtccgtctgtccgtctgtccgtctgtcaccagtgagacgggagttctgcgacacacgccaggtagccaggctatcattcctgcccatcccactatcccactatcctgacacctgctcgcctgcctgtgcctgcttgagacgccgcggtctaatagtctgtctgatccatacctcgctccgtgtcgctccataccctgtgcttgacgacacacatctgcatatagcatacacacgtactctctggtgcagtccgtgcctgcgtgcgtgcgtccatcccgccgtcaggtcaccgtggtcgcccccagcccggccttgtctctctacctaatacctgcctgcctacataacctaggtcgctgtgcggtccgtcttacttggctctctctgcctggcttgtctggcttgtctggcttgcctgggcctgtctcgtttctgctgccaccccttgcggcctgtctcccgttgtgccacaccccacgaaaattttcggctgccgtattgatattgcccgcgccctctcgcccgtccagacgctcctcttcccccttccctcctcagcatgagcgctccggcctcctccaccatcgcccaccccgttgagactctggccacatccagccctctcgatgcctcgcgacgacagccccccgccaccgccgccggtgccgccgaactcgcccgtcaaccactagctggcggcgaccaggacaagctggcggcggccaagaagctcgtcgtcgacaacctgcgcatgatccccgacttccccatccccggcatcaagttcatcgacatcctccccgtcttccagaaccccgccgccttcgccgccctcctcgacgtgctcgtcctgctcctcgtcgaccgcttcggcgatgccatacccgatgtcatcgtggggctcgaggcccgcggctttctgttcggcccctccctggccctgcggctcggccgtccctttgtgcccgtccgcaagaagggcaagatgcccggcggctgcataaccgtggaatacaccaaagaatacggcaaggacgagttccaggtccagaccaacgccatcaagcccggccagcagtgcttgatcgtcgatgatatcattgccaccggaggcactgctgcggccgcgggaaaattggttgagctctccgacgcaaaggtcatgggctatctgtttatgattgatatcattaacttgaaaggaacgaccttgcttggcgataaacccataattactctcatcgaacacaatgaggaggaatgaaccgaatgaattcggaactacctgtcagaccatctaacaactcatcgaccacgcagggaggggctgaatagctcgttaacgagacaagtcttcttttcatttcttgatagagaccctgctctgttcatacacacggtcctagatctaggactttacatctactaggatgcaagcagacgaaggcgtcatataataccttagaggagccaaatgggcgcttgcatgggttggcgtttgggagcattcaataactactggtgctctgtactttgcggctcatatctgtttttggaacatgtcacgtgtgctacttagagaaacatgcagctccggctaagataattgcaaacaagcaaaaaaagataatacatgttcataacccttcatcggcatggactggcttcgcgctgcacgattgagtgattctttttggagttcttttacacgca

SEQ ID NO: 12947 - DNA, 2106 bp, Muscodor strobelii
  misc_feature: SGI cDNA ID NO. 564225
  misc_feature: Encodes the peptide sequence at SEQ ID NO 12948
atgcagtcgccctctacagcagcttgccgagtcaacgagcacacttccgacttgcatgattctggccgatcgccgtctctaagcccaagcctcaagtcttcaccgccgtccgagactctctccacgggccccctcaggagcgctgtttccctggtccggcgctgccgggaagcatcaactcaaatgcccaacttcttcccctttgtgcaaggcaccgaatccggccgcgcctctcgtctccagacagcagacagtacctcacctctgctcggtcgtttccgtgccgttccgcggtcctcccatccggcaccacggtcttctcgcgctggctctgtcagtctcctctctgcagttggcaggggaagtgtacacgtgggctacggcgctctggtcgccgctgggcttgactcggaagaggaagacaacttctggagttccgcaagcgaggacgaagaagatggcgatacgagaccgatgaggagggccataaggctttggagacacactgccaagacgacgaggagaaacgtcgaggacctctgggttgcgccgagacatggcgccgtgaggagggttgtcgagagctggtggagccgttggggcttgttggtattcatgcccgccattctggctgtggcatggtgcgccataccattcccccaatattctcttgatgccgcacatacaaagccgcacatctcgccgagtctcaacaatccaacaaacccggggcgtaagatacccggtcacggagaagcacgagtgcaggtgaacttctggttcttcctcttcgtctactatggattctacaaccttacggccctgatctggatcaccaaggtcttcaacctctactcgctcaactggtggccttcgagattaggatttcccgtcaccatctccctcatcgccattctatctcttgcagcaccgatccccgtgtacttgattcctgaagcccgcttcctgacggtccacaacacggcctggatcagctggacgttcatcatcatggctttgccagtagctattgccttctgtatcctgatgacccacgagcgacacctgggcctccgccactcgctgtcagagacgcaacgcatcttcacgagctcgtggtggaccggcgatagcggggatgaggccccccgggaccagcctaacgcccgccgcagccggtggggactcggcccgggtggcttcgatcctgatgccgcagtcatgcagatcgccgcggagccaacacagccgcagtctaggatgccggcgtttatgcagcgtcgccgatggctgccggccagttttgtgcggttcgtatggttctgtctggccctggccatcagtctcctcgcatacctcataggcgaggcctacgcggagatatatctgcgcacacttccacataacagtttcgagactatcgtttacgtctacagctgggtcgtcacggtccacttactcgacatgcttaccggttggattttgggtggcagcgaaggggaacgcgtaggcagctatcccctgagctggatattcaagctgtacttcatgttaacctaccagacttatgtgcgggcgctatacgcacgtctacgctcacctcaacaattcatctggctacaggctctgtcttcgggttttctcatcatcctcacgccgctgacgatgacaaaaacatatcatcgagcactcaccgtgctaggattgacagctcagtcgtatggctcgtaccaaaagatctgcactcgcaatgtcttcatacggtttcttgccgagaatgtcagtatgctgaccttcctgggaagtatcctggtgctgcatttcggccccaatacgcatgtatacccctatttcgcgtttgacgacccagacgagccgtataacttcaacgtcaccttttatgcagcagtcgtgacttgggcatgcgagctcatcgcaggcatagtccttcgaggcctcatccgctggatcttcggcgtcaacgctaacgtcgagggcaggctggacttggcggtttggcccgagctgcttcccacgagcgtcgctgtcatgctccatgtcttgcagaacatgctattctcgattatacggttgcatttccgatga

SEQ ID NO: 12948 - protein, 701 aa, Muscodor strobelii
  misc_feature: SGI Peptide ID NO. 564225
  misc_feature (62)..(700): NCBI GI: 85111090 Blast Desc: NCU02089 [Neurospora crassa OR74A] gi|28925498|gb|EAA34533.1| conserved [Neurospora crassa OR74A]
  misc_feature (62)..(701): NCBI GI: 256735480 Blast Desc: [Nectria haematococca mpVI 77-13-4]
  misc_feature (62)..(700): NCBI GI: 46107680 Blast Desc: FG00723.1 [Gibberella zeae PH-1]
  misc_feature (62)..(701): NCBI GI: 39974395 Blast Desc: MGG_00656 [Magnaporthe grisea 70-15] gi|145018429|gb|EDK02708.1| MGG_00656 [Magnaporthe grisea 70-15]
  misc_feature (58)..(701): NCBI GI: 171695096 Blast Desc: protein product [Podospora anserina] gi|170947790|emb|CAP59953.1| protein product [Podospora anserina]
  misc_feature (62)..(701): NCBI GI: 261358838 Blast Desc: conserved [Verticillium albo-atrum VaMs.102]
  misc_feature (62)..(695): NCBI GI: 154299839 Blast Desc: BC1G_10810 [Botryotinia fuckeliana B05.10] gi|150857090|gb|EDN32282.1| BC1G_10810 [Botryotinia fuckeliana B05.10]
  misc_feature (300)..(701): NCBI GI: 116182200 Blast Desc: CHGG_01728 [Chaetomium globosum CBS 148.51] gi|88186025|gb|EAQ93493.1| CHGG_01728 [Chaetomium globosum CBS 148.51]
  misc_feature (62)..(700): NCBI GI: 156053682 Blast Desc: SS1G_05688 [Sclerotinia sclerotiorum 1980] gi|154703469|gb|EDO03208.1| SS1G_05688 [Sclerotinia sclerotiorum 1980]
  misc_feature (150)..(700): NCBI GI: 213405231 Blast Desc: conserved [Schizosaccharomyces japonicus yFS275] gi|212001434|gb|EEB07094.1| conserved [Schizosaccharomyces japonicus yFS275]
MQSPSTAACRVNEHTSDLHDSGRSPSLSPSLKSSPPSETLSTGPLRSAVSLVRRCREASTQMPNFFPFVQGTESGRASRLQTADSTSPLLGRFRAVPRSSHPAPRSSRAGSVSLLSAVGRGSVHVGYGALVAAGLDSEEEDNFWSSASEDEEDGDTRPMRRAIRLWRHTAKTTRRNVEDLWVAPRHGAVRRVVESWWSRWGLLVFMPAILAVAWCAIPFPQYSLDAAHTKPHISPSLNNPTNPGRKIPGHGEARVQVNFWFFLFVYYGFYNLTALIWITKVFNLYSLNWWPSRLGFPVTISLIAILSLAAPIPVYLIPEARFLTVHNTAWISWTFIIMALPVAIAFCILMTHERHLGLRHSLSETQRIFTSSWWTGDSGDEAPRDQPNARRSRWGLGPGGFDPDAAVMQIAAEPTQPQSRMPAFMQRRRWLPASFVRFVWFCLALAISLLAYLIGEAYAEIYLRTLPHNSFETIVYVYSWVVTVHLLDMLTGWILGGSEGERVGSYPLSWIFKLYFMLTYQTYVRALYARLRSPQQFIWLQALSSGFLIILTPLTMTKTYHRALTVLGLTAQSYGSYQKICTRNVFIRFLAENVSMLTFLGSILVLHFGPNTHVYPYFAFDDPDEPYNFNVTFYAAVVTWACELIAGIVLRGLIRWIFGVNANVEGRLDLAVWPELLPTSVAVMLHVLQNMLFSIIRLHFR

SEQ ID NO: 12949 - DNA, 2807 bp, Muscodor strobelii
  misc_feature: SGI EST ID NO. CUFF.30851.1
  misc_feature: Variant of the nucleotide sequence at SEQ ID NO 12947
acgagcctctcggcttctgccctacgaaataaacaccatgacgctgtagtctgcgtcggctttgtttatatgactaaaattatactggtctttggcattgctttgctccttcattcttgttaagtttctctgcatgagttggcgactgtgtatgtcctatatgcgtccgaatacgtagcctatcttcactctcctcgcctcgttccgtttctgcttccatttttgccctattaatctctacgtacatgcagtcgccctctacagcagcttggtgcgaaccgcaaacttcgaatcagtaacttaagatcctaacgacgatgtaaaccagccgagtcaacgagcacacttccgacttgcatgattctggccgatcgccgtctctaagcccaagcctcaagtcttcaccgccgtccgagactctctccacgggccccctcaggagcgctgtttccctggtccggcgctgccgggaagcatcaactcaaatgcccaacttcttcccctttgtgcaaggcaccgaatccggccgcgcctctcgtctccagacagcagacagtacctcacctctgctcggtcgtttccgtgccgttccgcggtcctcccatccggcaccacggtcttctcgcgctggctctgtcagtctcctctctgcagttggcaggggaagtgtacacgtgggctacggcgctctggtcgccgctgggcttgactcggaagaggaagacaacttctggagttccgcaagcgaggacgaagaagatggcgatacgagaccgatgaggagggccataaggctttggagacacactgccaagacgacgaggagaaacgtcgaggacctctgggttgcgccgagacatggcgccgtgaggagggttgtcgagagctggtggagccgttggggcttgttggtattcatgcccgccattctggctgtggcatggtgcgccataccattcccccaatattctcttgatgccgcacatacaaagccgcacatctcgccgagtctcaacaatccaacaaacccggggcgtaagatacccggtcacggagaagcacgagtgcaggtgaacttctggttcttcctcttcgtctactatggattctacaaccttacggccctgatctggatcaccaaggtcttcaacctctactcgctcaactggtggccttcgagattaggatttcccgtcaccatctccctcatcgccattctatctcttgcagcaccgatccccgtgtacttgattcctgaagcccgcttcctgacggtccacaacacggcctggatcagctggacgttcatcatcatggctttgccagtagctattgccttctgtatcctgatgacccacgagcgacacctgggcctccgccactcgctgtcagagacgcaacgcatcttcacgagctcgtggtggaccggcgatagcggggatgaggccccccgggaccagcctaacgcccgccgcagccggtggggactcggcccgggtggcttcgatcctgatgccgcagtcatgcagatcgccgcggagccaacacagccgcagtctaggatgccggcgtttatgcagcgtcgccgatggctgccggccagttttgtgcggttcgtatggttctgtctggccctggccatcagtctcctcgcatacctcataggcgaggcctacgcggagatatatctgcgcacacttccacataacagtttcgagactatcgtttacgtctacagctgggtcgtcacggtccacttactcgacatgcttaccggttggattttgggtggcagcgaaggggaacgcgtaggcagctatcccctgagctggatattcaagctgtacttcatgttaacctaccagacttatgtgcgggcgctatacgcacgtctacgctcacctcaacaattcatctggctacaggctctgtcttcgggttttctcatcatcctcacgccgctgacgatgacaaaaacatatcatcgagcactcaccgtgctaggattgacagctcagtcgtatggctcgtaccaaaagatctgcactcgcaatgtcttcatacggtttcttgccgagaatgtcagtatgctgaccttcctgggaagtatcctggtgctgcatttcggccccaatacgcatgtatacccctatttcgcgtttgacgacccagacgagccgtataacttcaacgtcaccttttatgcagcagtcgtgacttgggcatgcgagctcatcgcaggcatagtccttcgaggcctcatccgctggatcttcggcgtcaacgctaacgtcgagggcaggctggacttggcggtttggcccgagctgcttcccacgagcgtcgctgtcatgctccatgtcttgcagaacatgctattctcgattatacggttgcatttccgatgatcaccatgggtgcagacggaatgacgagacagtgacgagcctatcggggtatatgtaggggtccaagaataggcgagcaccgccgcctattgcgtaatctcatcgaacaagttttatgacggtgtatcatcgtaattattccgatcattgttaagccgctgcagatatcttcggctgagctgaccgatgatcctacggggtacggcgggtggtgtcttgtctctattgtctcttggctctttttgcatttgttgtttttgttagtgtttacagtgtgttcatgcagagatgcccaaccgcggacgataccccattttagagatgcccacatagaaatgatatccctatcgtaatataataattttcccagtagaatctaatgcacggcggattgttttc

SEQ ID NO: 12950 - DNA, 1401 bp, Muscodor strobelii
  misc_feature: SGI cDNA ID NO. 564226
  misc_feature: Reduced expression when VOC is produced
  misc_feature: Encodes the peptide sequence at SEQ ID NO 12951
atgagctccacaaacttcgcccaggctcagcagcgcctggctgcgcgacggctcgcccgtgaacgggaggcccaggcccagctggcagcccatcgcgactcatcacgtgcatgggctcaggttacacgctttccgtatcccttcgaccgtcttggagccgcgtcgctatctacatgggagctcatctcttcccgcgagggcaccaagcccgcctttcgagtcggccaggttgacgccgagctactggacgaagaccttgtccaacaattacgcgaccaggtcggcgatgctctcaagtacctcggccccaacatccgtgacgactggtcggcagagatcctattagctttacgcgctatactgttcaaattgactgtctgggatcacgatgcaacatatggtgctgcgctgcagaatctgaaatacaccgatgcccgtcgcggcggctcggttataacaccccccagtagatggcagaaaagtctatatggattggtaactgtagctggcaaatacggctggacgaaatgggaggattggctgttagaacaagacaacggctatgatcagccctcgccatgggttcaacgattatcggggttgacttcgcgcatcacgactgtacactctatggctgccttggcatccttcctggtgtttctgcttcacggtagatatcggaccctcctggacaggattttacgaatgcgcctggcgcccccaacaaaccaggtcaaccgtgaggtatctttcgagtatctcaaccggcagctagtctggcacgcatttaccgagtttctgctcttcgtcctgcccttagtaggcatcaaccgatggcgccgctggctcggtcgcacatggaggaagacaaaggagctaatacaagttagcccaggagatggcccaggcgagaaaaagggcgaacttgcctttttacccgaacgtacctgtgcgatctgttatcaagatcaaaatagcgtcatgtcggaaaatgaggtgctcgctgctgcagcatctagtggtgtcgtaggatctgctcagacagacattacaaatccatacgagaccatcccctgcggatgtatttactgttttgtctgtctcgcaacgcgactggagcgcgaggagggagagggatggacctgcctacgctgtggggagcttgtaaaggaatgtaaaccatggggcggagatgttctagaagagtcgccaaagtcatcgtcaccggccaccaaacatgttgtgtttatggacgatgaaacaaccagcgcaccaccatcgaatgacctcccgaccgggaatgtacagatcgaagctattgccgatgatagtgcggcagacaccgactcggagatttatgaggaagaggaagccggggtcgaagacgattttgaagattga

SEQ ID NO: 12951 - protein, 466 aa, Muscodor strobelii
  misc_feature: SGI Peptide ID NO. 564226
  misc_feature (79)..(287): Pfam Id: PF04757 Pfam Desc: Pex2 / Pex12 amino terminal region
  misc_feature (1)..(421): NCBI GI: 46107682 Blast Desc: FG00724.1 [Gibberella zeae PH-1]
  misc_feature (2)..(419): NCBI GI: 171695094 Blast Desc: protein product [Podospora anserina] gi|1705594|sp|P51021.1|PEX2_PODAN RecName: Full=Peroxisomal biogenesis factor 2; AltName: Full=Peroxin-2; AltName: protein
  misc_feature (1)..(419): NCBI GI: 256735481 Blast Desc: [Nectria haematococca mpVI 77-13-4]
  misc_feature (6)..(458): NCBI GI: 116182192 Blast Desc: CHGG_01724 [Chaetomium globosum CBS 148.51] gi|88186021|gb|EAQ93489.1| CHGG_01724 [Chaetomium globosum CBS 148.51]
  misc_feature (2)..(400): NCBI GI: 85113877 Blast Desc: peroxisomal biogenesis factor 2 [Neurospora crassa OR74A] gi|28926385|gb|EAA35361.1| peroxisomal biogenesis factor 2 [Neurospora crassa OR74A]
  misc_feature (1)..(463): NCBI GI: 156054818 Blast Desc: SS1G_06257 [Sclerotinia sclerotiorum 1980] gi|154704037|gb|EDO03776.1| SS1G_06257 [Sclerotinia sclerotiorum 1980]
  misc_feature (1)..(466): NCBI GI: 154320482 Blast Desc: BC1G_01713 [Botryotinia fuckeliana B05.10] gi|150853402|gb|EDN28594.1| BC1G_01713 [Botryotinia fuckeliana B05.10]
  misc_feature (1)..(416): NCBI GI: 67527353 Blast Desc: AN4056.2 [Aspergillus nidulans FGSC A4] gi|40739754|gb|EAA58944.1| AN4056.2 [Aspergillus nidulans FGSC A4] gi|259481356|tpe|CBF74795.1| TPA: microbody (peroxisome) 2
  misc_feature (1)..(451): NCBI GI: 121703069 Blast Desc: peroxisome biosynthesis protein (Peroxin-2), [Aspergillus clavatus NRRL 1] gi|119397942|gb|EAW08373.1| peroxisome biosynthesis protein (Peroxin-2), [Aspergillus NRRL 1]
  misc_feature (1)..(432): NCBI GI: 212540410 Blast Desc: peroxisome biosynthesis protein (Peroxin-2), [Penicillium marneffei ATCC 18224] gi|210067659|gb|EEA21751.1| peroxisome biosynthesis protein (Peroxin-2), [Penicillium ATCC
  misc_feature: Useful for introducing or modulating the production of volatile compounds
MSSTNFAQAQQRLAARRLAREREAQAQLAAHRDSSRAWAQVTRFPYPFDRLGAASLSTWELISSREGTKPAFRVGQVDAELLDEDLVQQLRDQVGDALKYLGPNIRDDWSAEILLALRAILFKLTVWDHDATYGAALQNLKYTDARRGGSVITPPSRWQKSLYGLVTVAGKYGWTKWEDWLLEQDNGYDQPSPWVQRLSGLTSRITTVHSMAALASFLVFLLHGRYRTLLDRILRMRLAPPTNQVNREVSFEYLNRQLVWHAFTEFLLFVLPLVGINRWRRWLGRTWRKTKELIQVSPGDGPGEKKGELAFLPERTCAICYQDQNSVMSENEVLAAAASSGVVGSAQTDITNPYETIPCGCIYCFVCLATRLEREEGEGWTCLRCGELVKECKPWGGDVLEESPKSSSPATKHVVFMDDETTSAPPSNDLPTGNVQIEAIADDSAADTDSEIYEEEEAGVEDDFED

SEQ ID NO: 12952 - DNA, 3066 bp, Muscodor strobelii
  misc_feature: SGI EST ID NO. CUFF.30805.0
  misc_feature: Variant of the nucleotide sequence at SEQ ID NO 12950
tctgccccgtgagtaacttgctgtgcaattccaagatctcaatgtgtccctagctacaataaaatacctaccttatgtacctaggcacgggtgttggatgcagggtccaccctgacccaagtcccaggttcaacctcggcccgttggagattcggggtaaggcggcgttactgcgacgcggttgaactttgtacattggcatcttccatcatcgtcacgtcgtcgttacgatttcactttactgtacgctcgagtctcaattcaggtcataatcgaaccacggctcaaaacagcaagccacagctttgggtcgctcgccaacagcgccgcaccgttgttacggcacctattcgtctgtcactggctagagctgaagcttcaagtctctgtcgctgatgtccctctctgggctctatgagctccacaaacttcgcccaggctcagcagcgcctggctgcgcgacggctcgcccgtgaacgggaggcccaggcccagctggcagcccatcgcgactcatcacgtgcatgggctcaggttacacgctttccgtatcccttcgaccgtcttggagccgcgtcgctatctacatgggagctcatctcttcccgcgagggcaccaagcccgcctttcgagtcggccaggttgacgccgagctactggacgaagaccttgtccaacaattacgcgaccaggtcggcgatgctctcaagtacctcggccccaacatccgtgacgactggtcggcagagatcctattagctttacgcgctatactgttcaaattgactgtctgggatcacgatgcaacatatggtgctgcgctgcagaatctgaaatacaccgatgcccgtcgcggcggctcggttataacaccccccagtagatggcagaaaagtctatatggattggtaactgtagctggcaaatacggctggacgaaatgggaggattggctgttagaacaagacaacggctatgatcagccctcgccatgggttcaacgattatcggggttgacttcgcgcatcacgactgtacactctatggctgccttggcatccttcctggtgtttctgcttcacggtagatatcggaccctcctggacaggattttacgaatgcgcctggcgcccccaacaaaccaggtcaaccgtgaggtatctttcgagtatctcaaccggcagctagtctggcacgcatttaccgagtttctgctcttcgtcctgcccttagtaggcatcaaccgatggcgccgctggctcggtcgcacatggaggaagacaaaggagctaatacaagttagcccaggagatggcccaggcgagaaaaagggcgaacttgcctttttacccgaacgtacctgtgcgatctgttatcaagatcaaaatagcgtcatgtcggaaaatgaggtgctcgctgctgcagcatctagtggtgtcgtaggatctgctcagacagacattacaaatccatacgagaccatcccctgcggatgtatttactgttttgtctgtctcgcaacgcgactggagcgcgaggagggagagggatggacctgcctacgctgtggggagcttgtaaaggaatgtaaaccatggggcggagatgttctagaagagtcgccaaagtcatcgtcaccggccaccaaacatgttgtgtttatggacgatgaaacaaccagcgcaccaccatcgaatgacctcccgaccgggaatgtacagatcgaagctattgccgatgatagtgcggcagacaccgactcggagatttatgaggaagaggaagccggggtcgaagacgattttgaagattgattgccataatctaagggtcagtgagtgcatgcttcatctcaaaattttgacgaaaagcgcctcttgcacatcagacaccgcgatgtgatgcgattacatccgaaacgctctgcatcattgatgataatggcttaagtctattcatggccagcgtcaagtgcgttttcaattggtgcacaatacgagagaatcaagagaacctgtctcgagcctggaatggatcacggtgtctctctgacaagcagatcttacggtcatttccagtcgccgactttggcattgtatgacatttgaaccgaaagagatcttggccattctcttgcccacggcaccactgcatgagtgtaatgcaacacttgccagcttctcgatttccgaaactggcgattacctaaactctccctgttgagtcaggccatcgtagcggaagccgtttgctgcgcggtcagtatatactcaactactgttcaggccattatacgcaatatcggcttaataatgacatctgtcagtgtctatcaagctaatgtgcctgggcactagctcaccggtcccatgtcatcgggacacggaacgtggcattagtgccgagcaaagccgaagctaggctcacgatgttgatgcaggtgtaccggcttccgagagatcctgtttgcaggtggaggtttggagctcatgaaactacgctaatttactcctcccttggatttgaatcatgagaaatcatgatttccaagcatggtaacgggtctacctctttggtagcggatgacgtccttattatttgcctggcgaggtccgtttcacgcgcgttgaagtgattaccatcagtaaatgcacatagcctcaaaccacgacaaggggtgccatcccgcttcatgctcttcgttttgtagttgataaagtgcagctgaaagtgcaccatagggagaccaccataattctgcgacaaccatgctggcgtcagcatcttattgaggtacaccttcatctgaaatcacacgcgaggtacttcttgcacgtgtccagtactcaaggatcgtagcaggggccgaatttcttaattcaacttagggtctaaatataaatgcaatgctatcaagactagaaccttacctcataactgctaggaatcacataatactaccctttgtctctgagtacgggtaagaacaatgctgatcatgtggaagtccagcttttccaaatgaaaccgaatacttgaaagcttggaatcgaagatggcaaggc

SEQ ID NO: 12953 - DNA, 975 bp, Muscodor strobelii
  misc_feature: SGI cDNA ID NO. 564227
  misc_feature: Encodes the peptide sequence at SEQ ID NO 12954
atgattgacatcacagacgtttcttctgatgtcgacttcccgtgtaccgaagaatgggattaccaggtaggggacatcgcgcaacctatgtccgaggctcagtatgaacaagaaatcgacctcggccgacgagacttcgcctcttttacactttttgccgactgcgctcgcatgcaggtagaagtaaatgctattttgtccgatagcgaagacgtcgaacaggacgatgaacgcactagtcaactcgatgaccgcctttgcaactttatacgacgtgttccacgatcgaagatggaattagtcgatccccgtggaagagcggatcaactactcattgtggccgtcggatgggcacattcaatgcggatccgtctgcgcgagttgtcgtcacgaagaggcctaaatatccgcgagttcttccccttagggcctgcacggggccctggacgtaaagggcaggctatcaagaagttcggctgggcttcacacccaatcgacgtacaatcagccaacgcaatatccgatctcttccgaaattacccctttcatatcgaatacttctctccaatgttcacttctgtattcataagaatgggtatcgtatatctagacgcgtgtgttttccaagggctggactcacacgccttccgcgagaagatcaatatgatgatacagctactcttgatccatggagacacatggcccctatcaaagaagataggagacgatatccaggccatcgcgaccgaataccttacgcctcgtgactactcaagtccacggtcgagcagcatggagtcggatatgtggaatgttagtgtcgcaactgatccaatcactgccgttccgtttctggacccactgagtgcaggcttcaatgtcttcacggacgtgaactcgggcctgaatatgggcgaggattggctaccaaattccgttggctggtctccttccgttcctggctacccattttga

SEQ ID NO: 12954 - protein, 324 aa, Muscodor strobelii
  misc_feature: SGI Peptide ID NO. 564227
  misc_feature (7)..(250): NCBI GI: 225559858 Blast Desc: C6 zinc finger domain-containing protein [Ajellomyces capsulatus G186AR]
  misc_feature (7)..(250): NCBI GI: 240276266 Blast Desc: glucoamylase [Ajellomyces capsulatus H143]
  misc_feature (7)..(250): NCBI GI: 154287474 Blast Desc: [Ajellomyces capsulatus NAm1] gi|150408173|gb|EDN03714.1| [Ajellomyces capsulatus NAm1]
  misc_feature (7)..(298): NCBI GI: 119499295 Blast Desc: fungal specific transcription factor, [Neosartorya fischeri NRRL 181] gi|119414569|gb|EAW24508.1| fungal specific transcription factor, [Neosartorya fischeri NRRL 181]
  misc_feature (6)..(252): NCBI GI: 242795182 Blast Desc: C6 transcription factor, [Talaromyces stipitatus ATCC 10500] gi|218719116|gb|EED18536.1| C6 transcription factor, [Talaromyces stipitatus ATCC 10500]
  misc_feature (7)..(252): NCBI GI: 67516573 Blast Desc: AN0568.2 [Aspergillus nidulans FGSC A4] gi|40747511|gb|EAA66667.1| AN0568.2 [Aspergillus nidulans FGSC A4] gi|259489168|tpe|CBF89217.1| TPA: Zn(II)2Cys6 transcription
  misc_feature (5)..(253): NCBI GI: 121719426 Blast Desc: fungal specific transcription factor domain protein [Aspergillus clavatus NRRL 1] gi|119404610|gb|EAW14986.1| fungal specific transcription factor domain protein [Aspergillus NRRL 1]
  misc_feature (6)..(270): NCBI GI: 256729855 Blast Desc: NECHADRAFT_46703 [Nectria haematococca mpVI 77-13-4]
  misc_feature (10)..(252): NCBI GI: 238491070 Blast Desc: C6 transcription factor, [Aspergillus flavus NRRL3357] gi|220697185|gb|EED53526.1| C6 transcription factor, [Aspergillus flavus NRRL3357]
  misc_feature (10)..(252): NCBI GI: 169773123 Blast Desc: [Aspergillus oryzae RIB40] gi|83768891|dbj|BAE59028.1| protein product [Aspergillus oryzae]
MIDITDVSSDVDFPCTEEWDYQVGDIAQPMSEAQYEQEIDLGRRDFASFTLFADCARMQVEVNAILSDSEDVEQDDERTSQLDDRLCNFIRRVPRSKMELVDPRGRADQLLIVAVGWAHSMRIRLRELSSRRGLNIREFFPLGPARGPGRKGQAIKKFGWASHPIDVQSANAISDLFRNYPFHIEYFSPMFTSVFIRMGIVYLDACVFQGLDSHAFREKINMMIQLLLIHGDTWPLSKKIGDDIQAIATEYLTPRDYSSPRSSSMESDMWNVSVATDPITAVPFLDPLSAGFNVFTDVNSGLNMGEDWLPNSVGWSPSVPGYPF

SEQ ID NO: 12955 - DNA, 3939 bp, Muscodor strobelii
  misc_feature: SGI EST ID NO. CUFF.30808.0
  misc_feature: Variant of the nucleotide sequence at SEQ ID NO 12953
tttttaaggtaagcagtcgattaggcaggggcgtgagacaagactcacccacaacatcatccattgcaaagtcacacagaggtgagcgggcatcgaaagacatccacgtgctatcaaagtctcaatagtaaaactttcacgctatctatctcaattgtggttatggtggtcatctatctcatgtacatcgaacttttgttacctcatttctgaaaggtactatatgtggattgaagatagtatactcgtccctccatgctattccaaccatgtcagcggctatggtccccctcgcctcggccgttccgacgaatacttgcagcatgtcgaagcccacccaatccaaccattgcctgtcaatatgtacagccacagcctagcttcttctccatctcatcagtcatcagggctcagaagccaagagatagaccagatactccatatagctcagctctttcagacaaattatatcatccagaaacgcatgatggatacataccctcttgccatgccaccatcaaataacaccacccacaccgccatcactgcgcctagcgagccaatgattgatctggatactaattcacgtccatcaagaatgtcaactgtggaggcattcaattgatttcggtcacctcaactcacctcatactctttcgttgactcccgcgaagctataacggatatacatcaattcccgagcatagaaatttcaacgagaccccatgatcatatcgtacatcggtccattatctgcatgtcagcattcgagattcgaaaatcctggaaactggtcccaggtggacattgctggcaaccagagccgatctgctcactcaatcccacaagtcaaccacctgtcatggtctcgtaggtggctcaaactgaaccccggaactgtggcctcgtattgcaccaagttgtttattcataagttatttatgcaccaaggctcacagggaggtctatgcttatactaggaatctattggctggccaaataaatcaccttgttgctactgtagacctcgcatctcgcttcaccgagccaggcaagttcattcgttatcgcgttttgggaacaggagcactcataagtcactgttgcaccttcgtatgactaagttaagaattgcgctgctctaaatctgatctcttggctatcgttgcgcttggcgcgctgaggagttgcaagcattaagccatgtcagaaaatccctattaattgtatttagggtgttcgcaaggttacatcaacagtggccctgaagctgacatctcatctctcgcggggtttatgcttctgccacagctcgtagattcctcttttgaccgccatcttattattttgcaatgagccaagcacatcgacgagacaaaagagtccacagagtcatgtttgttacctacgtgtgagaaatagggattacagcggctatctgggcaaggcactcaagttgtgtaggcgagggtgaacccttgcccctggctctgcccaatccaacgaagctagtaaagctaggataacatttcatatatcatcccacatcagccctatgacatcgatctctcactgccatcacgtcctgctcatacctctgcgccaaatccgtttatgacctcatctgagaaacgatctcatgcctccgccgctcgacaaatccagagactccggcgacgacaggcggcatggctcaaatcaatcatcacctgaagcatcagacacgaaatccgccaaaagccgagcgaaagcggcaatacgcgtttcattggcttgtattcaatgccggagcaaacatgtaaagtgtgacgcgactcagccggtctgtgggcgatgtgcgctcgagggaaaaccatgctattttgcaaaatcaagacggggaattcgagaccctaaaaagcgaagcttgatatccgacaagcccccaacaaccgcgatagaggataccagcctgtatcgctcaagcgaaagtactactgcacctattcatcgtgggatcaatgtatcaagcggttggaggccagtgcagaaaccagtcgatgttcagcgcgaagaccgttccttattcaacatcttttttgatctattctacccgtctcatcctgtcctgccacccaaaaaattcttcctgaagtatatcgaagcagatccagatgcgtttcattttcttctctccgccatcgaactttgcggtgcacaatacgccaaaagcgcttcggtcaaagaactacgagaaacaacgtatgctacagcctgcggcccattgccatttactccacagtcagtccaaggtcttcagatcctagcaatcttggcttggggtgacaccaactatgtcaatcacgtaggattcacaaatcgggcgatgacgatggctgtagaattgggcatgcatcgtcgaacttttgccaacaaaacactagacccattattagcagagagttatcgacgcacttggtggcttttgaagatgcagtgcaccgtacgcaccaatctattcgagcgaatgattgacatcacagacgtttcttctgatgtcgacttcccgtgtaccgaagaatgggattaccaggtaggggacatcgcgcaacctatgtccgaggctcagtatgaacaagaaatcgacctcggccgacgagacttcgcctcttttacactttttgccgactgcgctcgcatgcaggtagaagtaaatgctattttgtccgatagcgaagacgtcgaacaggacgatgaacgcactagtcaactcgatgaccgcctttgcaactttatacgacgtgttccacgatcgaagatggaattagtcgatccccgtggaagagcggatcaactactcattgtggccgtcggatgggcacattcaatgcggatccgtctgcgcgagttgtcgtcacgaagaggcctaaatatccgcgagttcttccccttagggcctgcacggggccctggacgtaaagggcaggctatcaagaagttcggctgggcttcacacccaatcgacgtacaatcagccaacgcaatatccgatctcttccgaaattacccctttcatatcgaatacttctctccaatgttcacttctgtattcataagaatgggtatcgtatatctagacgcgtgtgttttccaagggctggactcacacgccttccgcgagaagatcaatatgatgatacagctactcttgatccatggagacacatggcccctatcaaagaagataggagacgatatccaggccatcgcgaccgaataccttacgcctcgtgactactcaagtccacggtcgagcagcatggagtcggatatgtggaatgttagtgtcgcaactgatccaatcactgccgttccgtttctggacccactgagtgcaggcttcaatgtcttcacggacgtgaactcgggcctgaatatgggcgaggattggctaccaaattccgttggctggtctccttccgttcctggctacccattttgattattagagtgcattgatatctccatctcagagggcttcggcgtacagtacaggtgatatgctgggttttgcaatggcgttcgagagagcaatatcaggagcatagcatgtcattcacattctgacattcggcgcatttggtcattttgagcagggctcggaaacaaaacgataaagggaagcaaaaaggtcaactaagaggcccaagcctcacaaccactctatagatggacttacaatcttttcgatgggtcccggcgttcgcagttttaatcgaagcgcatcgacatggatagtctcggtcgttgctatgtagatccctatacgtgcagcagaataactagacgctgtagtcgtgtggtttgtagatattggaggaccgttggcattgttgtgtgacaacttcaatctgaataaagcaaaagattgtcacaaagtggccgatctattcgggataa

SEQ ID NO: 12956 - DNA, 546 bp, Muscodor strobelii
  misc_feature: SGI cDNA ID NO. 564228
  misc_feature: Encodes the peptide sequence at SEQ ID NO 12957
atggccgacaacaatgacgacaacgagtcggtagctctcactgaccaagagcttttcaccactggccagtactccgacattaccgtcaaatgtggcaacaagtcatgggcactccaccgcaacatcattggcacgcgatgtgaccactttcgagacctattccgtgaggctcgaaccaataaccgtagaatgccacgagtgcacacagttcgggactgtgaccctgatgccctcggtttcgcgcttgagtggctctatcgccaagaattcaacgaacctgcaagaccctcgatgaaagccttgctcgaacgctgggccgctgccgggcaccttggcgcagtccgtctcgtcgacgatcttagagccaaggctcaatccacctggattgaaagccttcaccgagttgaagcagacggagccgcaactccggcagatgtcatcactgatctggtcgacgccgtccgcattttggagtcgaccgtctgcatcgttgtcctcaactccgaggactcagtcgtatcggcactttcgcgcaagacattttag

SEQ ID NO: 12957 - protein, 181 aa, Muscodor strobelii
  misc_feature: SGI Peptide ID NO. 564228
  misc_feature (15)..(128): Pfam Id: PF00651 Pfam Desc: BTB/POZ domain
  misc_feature (16)..(87): Pfam Id: PF00651 Pfam Desc: BTB/POZ domain
  misc_feature (6)..(86): NCBI GI: 171680598 Blast Desc: protein product [Podospora anserina] gi|170939926|emb|CAP65152.1| protein product [Podospora anserina]
  misc_feature (25)..(103): NCBI GI: 159483513 Blast Desc: Mg2+ transporter protein, CorA-like protein [Chlamydomonas reinhardtii] gi|158281747|gb|EDP07501.1| Mg2+ transporter protein, CorA-like protein [Chlamydomonas
  misc_feature (14)..(163): NCBI GI: 85079439 Blast Desc: NCU05044 [Neurospora crassa OR74A] gi|28917412|gb|EAA27116.1| [Neurospora crassa OR74A]
  misc_feature (25)..(164): NCBI GI: 159483927 Blast Desc: CHLREDRAFT_166883 [Chlamydomonas reinhardtii] gi|158281954|gb|EDP07708.1| [Chlamydomonas reinhardtii]
  misc_feature (18)..(90): NCBI GI: 189192190 Blast Desc: PTRG_02101 [Pyrenophora tritici-repentis Pt-1C-BFP] gi|187974040|gb|EDU41539.1| PTRG_02101 [Pyrenophora tritici-repentis Pt-1C-BFP]
  misc_feature (18)..(91): NCBI GI: 242826495 Blast Desc: conserved [Talaromyces stipitatus ATCC 10500] gi|218712471|gb|EED11897.1| conserved [Talaromyces stipitatus ATCC 10500]
  misc_feature (15)..(94): NCBI GI: 116179034 Blast Desc: CHGG_00145 [Chaetomium globosum CBS 148.51] gi|88184442|gb|EAQ91910.1| CHGG_00145 [Chaetomium globosum CBS 148.51]
  misc_feature (17)..(132): NCBI GI: 170591965 Blast Desc: BTB/POZ domain containing protein [Brugia malayi] gi|158591892|gb|EDP30495.1| BTB/POZ domain containing protein [Brugia malayi]
  misc_feature (18)..(91): NCBI GI: 242759811 Blast Desc: conserved [Talaromyces stipitatus ATCC 10500] gi|218723058|gb|EED22475.1| conserved [Talaromyces stipitatus ATCC 10500]
  misc_feature (25)..(86): NCBI GI: 159481211 Blast Desc: CHLREDRAFT_193262 [Chlamydomonas reinhardtii] gi|158273569|gb|EDO99357.1| [Chlamydomonas reinhardtii]
MADNNDDNESVALTDQELFTTGQYSDITVKCGNKSWALHRNIIGTRCDHFRDLFREARTNNRRMPRVHTVRDCDPDALGFALEWLYRQEFNEPARPSMKALLERWAAAGHLGAVRLVDDLRAKAQSTWIESLHRVEADGAATPADVITDLVDAVRILESTVCIVVLNSEDSVVSALSRKTF

SEQ ID NO: 12958 - DNA, 2853 bp, Muscodor strobelii
  misc_feature: SGI cDNA ID NO. 564229
  misc_feature: Encodes the peptide sequence at SEQ ID NO 12959
atggctgctacattcgcgacaccaataaagtcttacacatggagaatctctgcgattccgaggggcacgacgagggaggcgctcgtggatttcttcgatgtcagggatcgtgaacggattgagattcgctctctgtgtcctgatgtattggatccggaatggctcacagctaccgtcctgttcaaaccgcctccgggactaccagacgcacagccagagttggatgtaaatgcgcctcccgatattgaagtcgacaaagacttcgagggtttcacacccctctactcgcctcctggtaatcaaatgatagaagccgacattatcgcggtgacaggattcgctggccatgcttttggttcatgggcgcgctcagagacgttcatgtggttgctcgatcttgcgccaagattcgcgtcgtcttcgcggatcttgacatatggctacgacacgggcttgttgggtggccggagctcagcagcaaccattacagatgaatcggccgcgtttttggatcatcttcttaacatacgggatgaaattgaaggcgaccgcccaattatctttgtaggacatagtctaggatgtttggtcatcaagaaggcaatgatggatgcatactatcgtcaagtgccaagcacacgattgccagttcagaccgccattttccttgctgcaccacaccaaggaatgaatatggaggccttacggactgttgtgaagggtgaaccgcctcaggccttagttgaggagctgacgcccggctctcaagttttgaatgacttgaacaatcgctatatgactgttgccaaagaagtggagtttctcacagtctttgagggcatgagaagcccaaaagctcaacaggtagctaggggagtatggacgagatcaggcgcagaaatatcgatagtcgatgagcagtctatgaagcagtactgggctacagagactagaatttgcgccaatcgcgacgaccacttcagcatagcgaaactgaggaaacagtcacagaacaaagttgtgttggcagtaatgaaaagcttgagacgcgccgtcttcccagcagggggaatttcgcgcatgaacactcttaagaccattgatgaggctgcgcagatcacgcgaaccaacactctcaaaagcattgaagaaactgactcctcgggaactatcggcagccctggacttcaatggcagccaacgcttaactccgcaatgtcgtggcaaaaccggccaccatcggcaccagcaagcgtcccaggttcattcgatctggaaagccgggcaccgaccttcgtgcactctcacgcgcaccgcagcgaacgtataggcctaggcgtttgttccgcatgtaatactgatatctcgtcacatgaatacttctatcagtgcactgattgcaagtccgagtatacttgtcggaaatgtcaaaactcgccggtctgccacttacacggcaagccgagctcaaaacaacaatttgcatggtacggcgatcgacaagatgttaacatttggatcgatccaaaacctgtgtcatgggactcacccttcgttcgggccgtcaaacaagaggacttggagcgtcttagtgcgctagctcgagagccagaagctctgaacgcactcgacagtgatgggttaagtcctcttcatattgctgctcacctcaatctcgaaaacagtgctcggtggcttatagcacatggagcgaaccagcaagtgcagaatcgaaagggcagaacaccacttagtcaagcagtctactccaatcacataggaatgataaagctgttgatggccggaggagtgaacacgaaaccagagcgcactagtcctctacatcgcgcctgcgaaattggttctcgggagatagtcgaagtgctcttgaagggagtcagttccgtggacatcaaagactctgaagggaggacagctctatggacttcatgcaaatcccggcaattcgaacttgcggaattgcttcttgatgcaggagccgatccaaataccaaaatgaaggatgacgcagcgactcttttgggctcagtggcagctgataataatatggaagctctaaatttgttgctaggtcataatgctgaccctgagaacttggatagccaacagcggtcagccctgtaccgtgccgcggaaatggggaatgatgaggcgtgcagggcgcttctcgagaagggcgccaagaccgacgcccaggctaaagacaccgaaggcacgcaaacgatactcggtagagtagcgtctatgggcaagctgagcacagtgaggcttcttctcgagaacggggttgatattgaaggtttagatgcccaaaagcggactcctttcggcagagcggctgtggctgggcacttacttgtctgcaattacttactgagcatgggggcgaatgccgatccacaggcaggttttcctcataagtcgcctcaaggaaactcttggagatggccactgctacatgctgttaccgtaaagggaaatgcggcaattgtccagctgcttctagaaaacaaagtcgacctcgaggagaacgatacgcatcggtggacgcctcttatggcagcagcatatggtggcgatctagagcttgtcaagctatttgtgaaatcgggcgcaaatgtcaaccaccatgaaagcctcatcagcaacgttctgactaaggcagcgcatggaggccatctagaagtcgtcaaatttctactggcgagcggagcctcggcaaagcctacgaacggaaaatggaaaaatctggactttcatccagcagtctcacctgagaccaaggccgcgattctgcaagaactgagagcaaagaagaaagcaaaaccctaa

SEQ ID NO: 12959 - protein, 950 aa, Muscodor strobelii
  misc_feature: SGI Peptide ID NO. 564229
  misc_feature (546)..(578): Pfam Id: PF00023 Pfam Desc: Ankyrin repeat
  misc_feature (854)..(886): Pfam Id: PF00023 Pfam Desc: Ankyrin repeat
  misc_feature (642)..(674): Pfam Id: PF00023 Pfam Desc: Ankyrin repeat
  misc_feature (709)..(741): Pfam Id: PF00023 Pfam Desc: Ankyrin repeat
  misc_feature (609)..(641): Pfam Id: PF00023 Pfam Desc: Ankyrin repeat
  misc_feature (507)..(926): NCBI GI: 189502738 Blast Desc: Aasi_1435 [Candidatus Amoebophilus asiaticus 5a2] gi|189498179|gb|ACE06726.1| Aasi_1435 [Candidatus Amoebophilus asiaticus 5a2]
  misc_feature (508)..(919): NCBI GI: 67517919 Blast Desc: AN1130.2 [Aspergillus nidulans FGSC A4] gi|40747092|gb|EAA66248.1| AN1130.2 [Aspergillus nidulans FGSC A4]
  misc_feature (508)..(919): NCBI GI: 259488555 Blast Desc: TPA: conserved [Aspergillus nidulans FGSC A4]
  misc_feature (493)..(915): NCBI GI: 115939162 Blast Desc: : similar to ankyrin 2,3/unc44 [Strongylocentrotus purpuratus]
  misc_feature (516)..(918): NCBI GI: 115720245 Blast Desc: : similar to ankyrin 2,3/unc44, partial [Strongylocentrotus purpuratus]
  misc_feature (516)..(919): NCBI GI: 123471666 Blast Desc: inversin protein alternative isoform [Trichomonas vaginalis G3] gi|121901805|gb|EAY06808.1| inversin protein alternative isoform, [Trichomonas vaginalis G3]
  misc_feature (515)..(918): NCBI GI: 123471670 Blast Desc: ankyrin repeat protein [Trichomonas vaginalis G3] gi|121901807|gb|EAY06810.1| ankyrin repeat protein, [Trichomonas vaginalis G3]
  misc_feature (516)..(915): NCBI GI: 115738320 Blast Desc: : similar to ankyrin 2,3/unc44 [Strongylocentrotus purpuratus] gi|115939509|ref|XP_001189781.1| : similar to ankyrin 2,3/unc44 [Strongylocentrotus purpuratus]
  misc_feature (508)..(918): NCBI GI: 123471670 Blast Desc: ankyrin repeat protein [Trichomonas vaginalis G3] gi|121901807|gb|EAY06810.1| ankyrin repeat protein, [Trichomonas vaginalis G3]
  misc_feature (513)..(918): NCBI GI: 123446853 Blast Desc: ankyrin repeat protein [Trichomonas vaginalis G3] gi|121894011|gb|EAX99243.1| ankyrin repeat protein, [Trichomonas vaginalis G3]
MAATFATPIKSYTWRISAIPRGTTREALVDFFDVRDRERIEIRSLCPDVLDPEWLTATVLFKPPPGLPDAQPELDVNAPPDIEVDKDFEGFTPLYSPPGNQMIEADIIAVTGFAGHAFGSWARSETFMWLLDLAPRFASSSRILTYGYDTGLLGGRSSAATITDESAAFLDHLLNIRDEIEGDRPIIFVGHSLGCLVIKKAMMDAYYRQVPSTRLPVQTAIFLAAPHQGMNMEALRTVVKGEPPQALVEELTPGSQVLNDLNNRYMTVAKEVEFLTVFEGMRSPKAQQVARGVWTRSGAEISIVDEQSMKQYWATETRICANRDDHFSIAKLRKQSQNKVVLAVMKSLRRAVFPAGGISRMNTLKTIDEAAQITRTNTLKSIEETDSSGTIGSPGLQWQPTLNSAMSWQNRPPSAPASVPGSFDLESRAPTFVHSHAHRSERIGLGVCSACNTDISSHEYFYQCTDCKSEYTCRKCQNSPVCHLHGKPSSKQQFAWYGDRQDVNIWIDPKPVSWDSPFVRAVKQEDLERLSALAREPEALNALDSDGLSPLHIAAHLNLENSARWLIAHGANQQVQNRKGRTPLSQAVYSNHIGMIKLLMAGGVNTKPERTSPLHRACEIGSREIVEVLLKGVSSVDIKDSEGRTALWTSCKSRQFELAELLLDAGADPNTKMKDDAATLLGSVAADNNMEALNLLLGHNADPENLDSQQRSALYRAAEMGNDEACRALLEKGAKTDAQAKDTEGTQTILGRVASMGKLSTVRLLLENGVDIEGLDAQKRTPFGRAAVAGHLLVCNYLLSMGANADPQAGFPHKSPQGNSWRWPLLHAVTVKGNAAIVQLLLENKVDLEENDTHRWTPLMAAAYGGDLELVKLFVKSGANVNHHESLISNVLTKAAHGGHLEVVKFLLASGASAKPTNGKWKNLDFHPAVSPETKAAILQELRAKKKAKP

SEQ ID NO: 12960 - DNA, 2388 bp, Muscodor strobelii
  misc_feature: SGI EST ID NO. CUFF.30815.0
  misc_feature: Variant of the nucleotide sequence at SEQ ID NO 12958
agtttctcacagtctttgagggcatgagaagcccaaaagctcaacaggtagctaggggagtatggacgagatcaggcgcagaaatatcgatagtcgatgagcagtctatgaagcagtactgggctacagagactagaatttgcgccaatcgcgacgaccacttcagcatagcgaaactgaggaaacagtcacagaacaaagttgtgttggcagtaatgaaaagcttgagacgcgccgtcttcccagcagggggaatttcgcgcatgaacactcttaagaccattgatgaggctgcgcagatcacgcgaaccaacactctcaaaagcattgaagaaactgactcctcgggaactatcggcagccctggacttcaatggcagccaacgcttaactccgcaatgtcgtggcaaaaccggccaccatcggcaccagcaagcgtcccaggttcattcgatctggaaagccgggcaccgaccttcgtgcactctcacgcgcaccgcagcgaacgtataggcctaggcgtttgttccgcatgtaatactgatatctcgtcacatgaatacttctatcagtgcactgattgcaagtccgagtatacttgtcggaaatgtcaaaactcgccggtctgccacttacacggcaagccgagctcaaaacaacaatttgcatggtacggcgatcgacaagatgttaacatttggatcgatccaaaacctgtgtcatgggactcacccttcgttcgggccgtcaaacaagaggacttggagcgtcttagtgcgctagctcgagagccagaagctctgaacgcactcgacagtgatgggttaagtcctcttcatattgctgctcacctcaatctcgaaaacagtgctcggtggcttatagcacatggagcgaaccagcaagtgcagaatcgaaagggcagaacaccacttagtcaagcagtctactccaatcacataggaatgataaagctgttgatggccggaggagtgaacacgaaaccagagcgcactagtcctctacatcgcgcctgcgaaattggttctcgggagatagtcgaagtgctcttgaagggagtcagttccgtggacatcaaagactctgaagggaggacagctctatggacttcatgcaaatcccggcaattcgaacttgcggaattgcttcttgatgcaggagccgatccaaataccaaaatgaaggatgacgcagcgactcttttgggctcagtggcagctgataataatatggaagctctaaatttgttgctaggtcataatgctgaccctgagaacttggatagccaacagcggtcagccctgtaccgtgccgcggaaatggggaatgatgaggcgtgcagggcgcttctcgagaagggcgccaagaccgacgcccaggctaaagacaccgaaggcacgcaaacgatactcggtagagtagcgtctatgggcaagctgagcacagtgaggcttcttctcgagaacggggttgatattgaaggtttagatgcccaaaagcggactcctttcggcagagcggctgtggctgggcacttacttgtctgcaattacttactgagcatgggggcgaatgccgatccacaggcaggttttcctcataagtcgcctcaaggaaactcttggagatggccactgctacatgctgttaccgtaaagggaaatgcggcaattgtccagctgcttctagaaaacaaagtcgacctcgaggagaacgatacgcatcggtggacgcctcttatggcagcagcatatggtggcgatctagagcttgtcaagctatttgtgaaatcgggcgcaaatgtcaaccaccatgaaagcctcatcagcaacgttctgactaaggcagcgcatggaggccatctagaagtcgtcaaatttctactggcgagcggagcctcggcaaagcctacgaacggaaaatggaaaaatctggactttcatccagcagtctcacctgagaccaaggccgcgattctgcaagaactgagagcaaagaagaaagcaaaaccctaattcctaagtttttagctggttatgtgacacacgtattaggcattagattgggaagtgttctgggatggcgttctagagcggtggcttcaagcgatatagatagtgcaaaacattcttgtagtatatttaacgaatttttcgtcaacataccctttatatatcaaactttcatgaagctattccttcatgcggattataattcatgcagaattgttgcaaccaaaactacgaatgaaagtcagttctatgttgttcctctaccagaatcacgtgctgtagatttatcacgtgcccaaaagaacaacatgtaatgtaacatgatacatcaaagaccaatatgtctacttcgtct

SEQ ID NO: 12961 - DNA, 633 bp, Muscodor strobelii
  misc_feature: SGI cDNA ID NO. 564230
  misc_feature: Encodes the peptide sequence at SEQ ID NO 12962
atggcgccttacactttcacaatcaacgtggagaacaaaagcaaccggacaatttacctccacgaagccagcacgctggggcgtctcgatggggagacgaactatgataagccatggggtgacaaggatagtgctattgcgcccaacggaacgcaaaagatcaagatcaccaagagcggcggtaccgacggcctcttctcggccctcacctggggtactatccgaacggcgcacagcgcctacggcgactatcccgagatgtggccgcgcttcatgctctggtgcaagatgccggcgtcggcctttagcgatgccagcgtgcagatggctccgatcgagacatttggcgtcccgaaccccttgaactcggacgcccgcgctaagctggcgtatgacaatgaccagagcagtgactgggttcattggaacaacgtgctggactttgaggggggcttcagctgcacgttagagtcaactcagttgggtttcccggactcgagcgccaagattgtgataagctcgaaagacgctgaggctgctattaggcaagccgaaggagctgtagcagccctcggaaggtcgtattccgaggcaccatcccagggccctctcgatttccgcaacctactttag

SEQ ID NO: 12962 - protein, 210 aa, Muscodor strobelii
  misc_feature: SGI Peptide ID NO. 564230
MAPYTFTINVENKSNRTIYLHEASTLGRLDGETNYDKPWGDKDSAIAPNGTQKIKITKSGGTDGLFSALTWGTIRTAHSAYGDYPEMWPRFMLWCKMPASAFSDASVQMAPIETFGVPNPLNSDARAKLAYDNDQSSDWVHWNNVLDFEGGFSCTLESTQLGFPDSSAKIVISSKDAEAAIRQAEGAVAALGRSYSEAPSQGPLDFRNLL

SEQ ID NO: 12963 - DNA, 1322 bp, Muscodor strobelii
  misc_feature: SGI EST ID NO. CUFF.30832.0
  misc_feature: Variant of the nucleotide sequence at SEQ ID NO 12961
ggggggctagcggccagcatcgcgatacataaggcaagccatcatcctagaccctcggatccagtaccaacgagcattactgtcaatcgatcaattataccacctcataacacacattgataactcaccatggcgccttacactttcacaatcaacgtggagaacaaaagcaaccggacaatttacctccacgaagccagcacgctggggcgtctcgatggggagacgaactatgataagccatggggtgacaaggatagtgctattgcgcccaacggaacgcaaaagatcaagatcaccaagagcggcggtaccgacggcctcttctcggccctcacctggggtactatccgaacggcgcacagcgcctacggcgactatcccgagatgtggccgcgcttcatgctctggtgcaagatgccggcgtcggcctttagcgatgccagcgtgcagatggctccgatcgagacatttggcgtcccgaaccccttgaactcggacgcccgcgctaagctggcgtatgacaatgaccagagcagtgactgggttcattggaacaacgtgctggactttgaggggggcttcagctgcacgttagagtcaactcagttgggtttcccggactcgagcgccaagattgtgataagctcaaaatgaagatctgacaatgagagaaatccaacactatatgtatagttaatgtacagttgtgggcgattggtaggcttgactcattttgaagccgtccgtcaacaagcagcgcagctacaagaaatgcgagtctcgactgaggcagctaggaaagacgctgaggctgctattaggcaagccgaaggagctgtagcagccctcggaaggtcgtattccgaggcaccatcccagggccctctcgatttccgcaacctactttagatacatgcagatcagtttaaagttagtgggtacttggctcgactgatgatgggtaggcggaggtcttggaaggacgaggaggatgagcagggtccctaggagaaaaagagaaagctgggtgataactaaggaagagaactgtctgagctgatatctacttggtttacctgaggccccggcgaccgggtttgtgtgatggatatgatgacgcaggtatcgttggtattcggttaggatcccaggtagaaaagagacttacagaaatgaataactcttgaacaccctgaggatctgccttttctttctggtggggtgaactgggaaccgcattcgctcattgatacatgaattcatcgtctttggcctcgttttacaattaaattagaagggtttatgaaaaagagctcgag

SEQ ID NO: 12964 - DNA, 339 bp, Muscodor strobelii
  misc_feature: SGI cDNA ID NO. 564231
  misc_feature: Encodes the peptide sequence at SEQ ID NO 12965
atgggtagacctgctaggagagcgacgaccaagggtcgcacacaaacaaaccgtgctcgtcccaaacgacccccgcccccatcctgctcctcctccccatctcccccctcctcagagtcaagtacggtcgagaatgatgacagcgcgagcgagggtggacctgaaagcatcagcaaccgcgcccccgacaacaccgacgatcaccgagagccagaacctcccctagcgcaccacgataccctagagcttggtgagcctccccaactcgacgatgcgcatatcaacaagccctccgaggacctgcctacaatgacgagggccggttggaagacgttttaa

SEQ ID NO: 12965 - protein, 112 aa, Muscodor strobelii
  misc_feature: SGI Peptide ID NO. 564231
MGRPARRATTKGRTQTNRARPKRPPPPSCSSSPSPPSSESSTVENDDSASEGGPESISNRAPDNTDDHREPEPPLAHHDTLELGEPPQLDDAHINKPSEDLPTMTRAGWKTF

SEQ ID NO: 12966 - DNA, 438 bp, Muscodor strobelii
  misc_feature: SGI EST ID NO. CUFF.30835.0
  misc_feature: Variant of the nucleotide sequence at SEQ ID NO 12964
agaattctgatccttcacatctacatcatcaagagactggaggacttgccctcattctgcctctccacttataagtccctgcctgctgacaatattcaatcgtatcaatatgggtagacctgctaggagagcgacgaccaagggtcgcacacaaacaaaccgtgctcgtcccaaacgacccccgcccccatcctgctcctcctccccatctcccccctcctcagagtcaagtacggtcgagaatgatgacagcgcgagcgagggtggacctgaaagcatcagcaaccgcgcccccgacaacaccgacgatcaccgagagccagaacctcccctagcgcaccacgataccctagagcttggtgagcctccccaactcgacgatgcgcatatcaacaagccctccgaggacctgcctacaatgacgagggccggttggaa

SEQ ID NO: 12967 - DNA, 3084 bp, Muscodor strobelii
  misc_feature: SGI cDNA ID NO. 564232
  misc_feature: Encodes the peptide sequence at SEQ ID NO 12968
atgagcttcgccatcgaggttcctggagccgcgagcccgctcagccgtctggagctctgccgcgtgctcgagtcggcttcgtcccacgatgcctcgaagcgccaggccgccggccagcagctgtcctcgtgggagggcaacccggactattatccagctctgcagactgtctttctcgacaagagcctcccgcacgacatccgcctcctcgccatcatccagctgaagaatggcatcgatcgcttctggcggtattcgaaggctaagaacgcgatacaaccggccgagaggcacctcgttcgatcccatctcttccagggcaccgtcgacgagcccgacgacaagctcgccctccacaacgccctcgtcaccgccaagatcgtcaggaccgacttccctgccgagtggcccgatgccctcgacaccatcctcgctcagatcaacgccgtcaaggacgaccccggccgcctcgcccgcgccctcgtcattctgctgcaggtcgtcaaggagcttggagccgcgcgtctgcccaaatcccagtctggcttgcaggccaacgctcccgctctcgtccaggtcctatgcgagatatacggcgacaggacctcgtcatggatcgcctcggtcgccaatggccagcctccaccgggcatggccatggagaacagccttgcggcattcaaaatcttgcgccggctgcttatagtgggctacaggtatcctcacaaggatgatgttgttcgtcaagtctgggccttctctcgaggtcaattcgaacagttcctccccatcgtcagcgacgccaacccgactatagggaaacacctccttcaattcacaaaactgcacatcgagatggccgagaagcatccagccagctttgccttcttccctgactccatcaatctcacccagacatactggaacctgacgaagcagttctccctcgtgtatgaaaactcggaaggcatccggcagggctcgtcttcgcatgacaacaaatcgcgtgtcgagggtcctctgctggagagattggcactcaagggcctgctgctcatgcgcgcttgtgtgaagatggcgcacaatccgatccagacgatacagtatcgttccaaagaagatgccggagagcagaagcaggctcttgcaaacttgaaagcacagctcttttctgaggcgctcattggcgagatagtcgagacgatagtcacgcgctttttcaagttccgcaaggccgacatggacgcctgggaagaagaccctcaggagtgggagcatcaagaagagagccagggaaatgcatatgaatgggaggttcgaccgtgctccgagaagctcttcctcgacatccttacccaatactccgagcatctcatccctcctttgttaacgtacttcgacagaccgctcgatgggaatgatgttctggagaaagaagctatctatacggcaatgggactagcggctccgttcctcgaaagtaccccgttcgacttcgacgtggtgctacgatcgaagatcgtgcccgaggcacaacagaacgggcctctgtgccagattctgcggcgtcgtctcgctatccttctcagtcaatggattcccgtccgaattgcaaaagagtcacgtccgatggtctacgagatcttcaggcatttcttgaaccccaatgaccgagcgaatgacattgtcattcgcatcactgcagcgaggcaatttaagattgtcgtggacgagttaggtttcgatgaagaaagctttgttccatttgcaccagatgtattgaaggagctcataggtctggtgaaggctgtcgagatcgaagagacgaaactcgccatcctagagacgctgcgcagtctaattgctcggatggaaacgtccgtagtcccctttagcgagatgatcacaagcgcattgccagagatctgggaatcggctagcgaactaggtatgatgataaagcaatccatactagtcatcttgtataacctggtttctgccatgaggaccgactcccagagataccagcacatcatactacccctaattgccgaagccacccagccagacacggagatacacgtctacctaattgatgaagcattggagctgtggaaggctgtggtccaaaacagccagcctccactatcgtcagacctattgagtcttgcaggatccagtctcaggggacttgagcagctggatgagagaagcggcgattatcagaccctagttggttcttacttgatgttagcgccggagacccttctcggcgacaatttgcgcagaccgttgctcaatgcgctatctgccggcctcgatgccaagagccgggaagatgcgagcaatgcctgcagatacatccaagccatgatgacattcagcaataagctcggcgagaaacaagggtttgcgattacaatacgtgatgcagtcaatgctggtttcttacagaaactattagagggcattcacaataactacgaggccaaccaaacatccgggcctaagaagaaaaagagcaccctttcggctgtcgctttaggcgactatttcactattttggctcgcattgccaccatagacccggcgacattcgtcgaaatgatagggtcgttggcccctcttgcggacgtatgggtatggcttagcagcgagtggtttgcgaccttcgacagcatctctgagcccacgaagctcaagctgaatctcataggcatcacgcgcctccttgagctcccacagccggtggctggtctactgctacctaagttgcaagactacttctcgatgtggacgagtgttatcacgcaatactgggacgaagatgtccctggaggcgactccttgcgtcgcactgagagacacgaggcggcgacgtgggatagtcctcaagacttggtggagaaggagatgtggtttgaggaccctgtccagacggttgtctcgcttgattttgtcaaggagagattgcagggtttggcggctggagtaggcgaggcgaattttcaagagtggcttgggaatgtggatagggacgttatcgagtcttttcagaagattgggactaagatagacgagtag

SEQ ID NO: 12968 - protein, 1027 aa, Muscodor strobelii
  misc_feature: SGI Peptide ID NO. 564232
  misc_feature (37)..(110): Pfam Id: PF03810 Pfam Desc: Importin-beta N-terminal domain
  misc_feature (1)..(1024): NCBI GI: 39974219 Blast Desc: MGG_00744 [Magnaporthe grisea 70-15] gi|145018323|gb|EDK02602.1| MGG_00744 [Magnaporthe grisea 70-15]
  misc_feature (3)..(1022): NCBI GI: 164429671 Blast Desc: NCU02069 [Neurospora crassa OR74A] gi|157073572|gb|EAA35360.2| conserved [Neurospora crassa OR74A]
  misc_feature (1)..(1027): NCBI GI: 256735488 Blast Desc: [Nectria haematococca mpVI 77-13-4]
  misc_feature (1)..(1022): NCBI GI: 171695090 Blast Desc: protein product [Podospora anserina] gi|170947787|emb|CAP59950.1| protein product [Podospora anserina]
  misc_feature (1)..(1025): NCBI GI: 46107730 Blast Desc: FG00748.1 [Gibberella zeae PH-1]
  misc_feature (1)..(1021): NCBI GI: 116182194 Blast Desc: CHGG_01725 [Chaetomium globosum CBS 148.51] gi|88186022|gb|EAQ93490.1| CHGG_01725 [Chaetomium globosum CBS 148.51]
  misc_feature (31)..(1021): NCBI GI: 261355151 Blast Desc: KapH [Verticillium albo-atrum VaMs.102]
  misc_feature (1)..(1024): NCBI GI: 156053670 Blast Desc: SS1G_05682 [Sclerotinia sclerotiorum 1980] gi|154703463|gb|EDO03202.1| SS1G_05682 [Sclerotinia sclerotiorum 1980]
  misc_feature (1)..(1024): NCBI GI: 154299841 Blast Desc: BC1G_10811 [Botryotinia fuckeliana B05.10] gi|150857091|gb|EDN32283.1| BC1G_10811 [Botryotinia fuckeliana B05.10]
  misc_feature (1)..(1022): NCBI GI: 145255125 Blast Desc: An18g04110 [Aspergillus niger] gi|134084458|emb|CAK43213.1| protein product [Aspergillus niger]
MSFAIEVPGAASPLSRLELCRVLESASSHDASKRQAAGQQLSSWEGNPDYYPALQTVFLDKSLPHDIRLLAIIQLKNGIDRFWRYSKAKNAIQPAERHLVRSHLFQGTVDEPDDKLALHNALVTAKIVRTDFPAEWPDALDTILAQINAVKDDPGRLARALVILLQVVKELGAARLPKSQSGLQANAPALVQVLCEIYGDRTSSWIASVANGQPPPGMAMENSLAAFKILRRLLIVGYRYPHKDDVVRQVWAFSRGQFEQFLPIVSDANPTIGKHLLQFTKLHIEMAEKHPASFAFFPDSINLTQTYWNLTKQFSLVYENSEGIRQGSSSHDNKSRVEGPLLERLALKGLLLMRACVKMAHNPIQTIQYRSKEDAGEQKQALANLKAQLFSEALIGEIVETIVTRFFKFRKADMDAWEEDPQEWEHQEESQGNAYEWEVRPCSEKLFLDILTQYSEHLIPPLLTYFDRPLDGNDVLEKEAIYTAMGLAAPFLESTPFDFDVVLRSKIVPEAQQNGPLCQILRRRLAILLSQWIPVRIAKESRPMVYEIFRHFLNPNDRANDIVIRITAARQFKIVVDELGFDEESFVPFAPDVLKELIGLVKAVEIEETKLAILETLRSLIARMETSVVPFSEMITSALPEIWESASELGMMIKQSILVILYNLVSAMRTDSQRYQHIILPLIAEATQPDTEIHVYLIDEALELWKAVVQNSQPPLSSDLLSLAGSSLRGLEQLDERSGDYQTLVGSYLMLAPETLLGDNLRRPLLNALSAGLDAKSREDASNACRYIQAMMTFSNKLGEKQGFAITIRDAVNAGFLQKLLEGIHNNYEANQTSGPKKKKSTLSAVALGDYFTILARIATIDPATFVEMIGSLAPLADVWVWLSSEWFATFDSISEPTKLKLNLIGITRLLELPQPVAGLLLPKLQDYFSMWTSVITQYWDEDVPGGDSLRRTERHEAATWDSPQDLVEKEMWFEDPVQTVVSLDFVKERLQGLAAGVGEANFQEWLGNVDRDVIESFQKIGTKIDE

SEQ ID NO: 12969 - DNA, 1665 bp, Muscodor strobelii
  misc_feature: SGI cDNA ID NO. 564233
  misc_feature: Reduced expression when VOC is produced
  misc_feature: Encodes the peptide sequence at SEQ ID NO 12970
atggccgatgtacagaagcccgttgaggtccctgagaccacccctgccgtcacggagccggttgctgagaccaagcctgtcgaggacaagcccgtagaagaggcacccgctcttgagacgactgaagctcccgtcgagaccgctgcggaggagactcctgctgctgccgtagaggaggccaagaaggaggaggctacacctatcgagtctggtactcttgagcacaagggtgctcccgccaatttccccaagaatctgctctacaccaagacgcacttctggtttggcgccgacgccgtcgagaaggagaagcttgccacctatctcaagaacgaaaaggccactgatgttgcccaccatgttgtctcatgggcctctgagactggcaagggcttgttcttcgtcgccaaggagtctgacaagaccactcctacgggtgtcatccagctttcggaagcttctgagcctactgtcgaaggaacaaacaagttccactttaccgccaagggtcataagcacgccttcaaggctcctaccactgctgatcgtgataactgggtcgcccagttgaagctcaagatcgctgaggctaaggagcttgctacaactgtaaccgagtcggagacctacaagaccacccttgagagcttgaagcccgccaagaaggaagagaagcccgtcgctgcagcagcaaccgagactcccaaggaggctaccgaggaagcaaaggaagaggacaaaaaggaggagcccaaggaggagaagaaagaagagaagaaggaggagcccaagcgccgctctgccagccgcaagcgcgcctctatcttcggcagtctgcttggcaagaaggaggctgctcccgccgctgaggataagcctgctgagactgaagccccagcggaggctgctaccgagaccacccctatcgagcagattattcaggctactgagccaactgccgaggccgaggctcctgctgccgagcctgtgactgaggctgctcctgtcgaggaggcgaaggaggagaccaaagaagagaccaagcccgctcctaccaagcgcaacagcatcttcagcagtctttcctttggcaagaagaaggccgaggctgactctacccccatttctcccgcgaaggaggagtccacccccgccaccgaagctcctgttgccgagaccgcaccggtcattcctgctgtagaaactactgagcctctgtctgccgaggtcgcttctcccgccaccgtccccactgagaccacggaggtgacacccgccaccactagcgaggccaagaaggaggtcaagagcgacaagcgcaagtcttcgctgcctttcgcatttggcaagaaggagaaggccgagaagtctgccacctctgacgaagagggtgagaagcccaagtccacccccttcttctccaagctccgccagactgtcaagaagtccaagggcgacaagcctgccgacaagtctgctgaggaaggcactcctgctgaggacaagcccgctgagaccaccgaggccgccgaggagcccgtccctgaggccaaggccgaagagcccaaggctgaggagcctacgcccgtggttcccgccgccgaggagactcctgctgagaagcctgcggccgctacgccggctcctgtcgtggctgctgcctag

SEQ ID NO: 12970 - protein, 554 aa, Muscodor strobelii
  misc_feature: SGI Peptide ID NO. 564233
  misc_feature (61)..(487): NCBI GI: 116182568 Blast Desc: CHGG_01912 [Chaetomium globosum CBS 148.51] gi|88186209|gb|EAQ93677.1| CHGG_01912 [Chaetomium globosum CBS 148.51]
  misc_feature (1)..(542): NCBI GI: 46107948 Blast Desc: FG00857.1 [Gibberella zeae PH-1]
  misc_feature (71)..(554): NCBI GI: 256734734 Blast Desc: NECHADRAFT_98938 [Nectria haematococca mpVI 77-13-4]
  misc_feature (1)..(220): NCBI GI: 171694940 Blast Desc: protein product [Podospora anserina] gi|170947712|emb|CAP59874.1| protein product [Podospora anserina]
  misc_feature (1)..(298): NCBI GI: 85114804 Blast Desc: NCU00935 [Neurospora crassa OR74A] gi|28926554|gb|EAA35525.1| [Neurospora crassa OR74A]
  misc_feature (1)..(446): NCBI GI: 258568802 Blast Desc: [Uncinocarpus reesii 1704] gi|237906591|gb|EEP80992.1| [Uncinocarpus reesii 1704]
  misc_feature (1)..(293): NCBI GI: 119184482 Blast Desc: CIMG_07037 [Coccidioides immitis RS]
  misc_feature (49)..(232): NCBI GI: 156054758 Blast Desc: SS1G_06227 [Sclerotinia sclerotiorum 1980] gi|154704007|gb|EDO03746.1| SS1G_06227 [Sclerotinia sclerotiorum 1980]
  misc_feature (61)..(302): NCBI GI: 240109885 Blast Desc: CPC735_033900 [Coccidioides posadasii C735 delta SOWgp]
  misc_feature (1)..(380): NCBI GI: 261358680 Blast Desc: VDBG_07218 [Verticillium albo-atrum VaMs.102]
  misc_feature: Useful for introducing or modulating the production of volatile compounds
MADVQKPVEVPETTPAVTEPVAETKPVEDKPVEEAPALETTEAPVETAAEETPAAAVEEAKKEEATPIESGTLEHKGAPANFPKNLLYTKTHFWFGADAVEKEKLATYLKNEKATDVAHHVVSWASETGKGLFFVAKESDKTTPTGVIQLSEASEPTVEGTNKFHFTAKGHKHAFKAPTTADRDNWVAQLKLKIAEAKELATTVTESETYKTTLESLKPAKKEEKPVAAAATETPKEATEEAKEEDKKEEPKEEKKEEKKEEPKRRSASRKRASIFGSLLGKKEAAPAAEDKPAETEAPAEAATETTPIEQIIQATEPTAEAEAPAAEPVTEAAPVEEAKEETKEETKPAPTKRNSIFSSLSFGKKKAEADSTPISPAKEESTPATEAPVAETAPVIPAVETTEPLSAEVASPATVPTETTEVTPATTSEAKKEVKSDKRKSSLPFAFGKKEKAEKSATSDEEGEKPKSTPFFSKLRQTVKKSKGDKPADKSAEEGTPAEDKPAETTEAAEEPVPEAKAEEPKAEEPTPVVPAAEETPAEKPAAATPAPVVAAA

SEQ ID NO: 12971 - DNA, 3395 bp, Muscodor strobelii
  misc_feature: SGI EST ID NO. CUFF.32648.1
  misc_feature: Variant of the nucleotide sequence at SEQ ID NO 12969
caggtatctacagtacctgtagtccccaaagctcgcccgttgaaactcgccagttgtggcccttgcaggtaggcgtctgccgcgttggggtggcagtcggtctgttgtctgccctcccttgtcctccctttcctttcctttccatccaggccctccctgctcttagcccacgggacagataaataacacccacaggagcttctgccttccttctcctccctccctcttctcccacccaccaaccatcagtgtcttgtcacctgtactcgacttgactctaataatacttcctacccgcaagcatcagaccatctgaacagctttggtagccgcgtttcctttctatttctttagagatacccatatcgtgatacccaagtacccttttcttcctttgatacccaatacccaacaccaacagacgcaatggccgatgtacagaagcccgttgaggtccctgagaccacccctgccgtcacggagccggttgctgagaccaagcctgtcgaggacaagcccgtagaagaggcacccgctcttgagacgactgaagctcccgtcgagaccgctgcggaggagactcctgctgctgccgtagaggaggccaagaaggaggaggctacacctatcgagtctggtactcttgagcacaagggtgctcccgccaatttccccaagaatctgctctacaccaagacgcacttctggtttggcgccgacgccgtcgagaaggagaagcttgccacctatctcaagaacgaaaaggccactgatgttgcccaccatgttgtctcatgggcctctgagactggcaagggcttgttcttcgtcgccaaggagtctgacaagaccactcctacgggtgtcatccagctttcggaagcttctgagcctactgtcgaaggaacaaacaagttccactttaccgccaagggtcataagcacgccttcaaggctcctaccactgctgatcgtgataactgggtcgcccagttgaagctcaagatcgctgaggctaaggagcttgctacaactgtaaccgagtcggagacctacaagaccacccttgagagcttgaagcccgccaagaaggaagagaagcccgtcgctgcagcagcaaccgagactcccaaggaggctaccgaggaagcaaaggaagaggacaaaaaggaggagcccaaggaggagaagaaagaagagaagaaggaggagcccaagcgccgctctgccagccgcaagcgcgcctctatcttcggcagtctgcttggcaagaaggaggctgctcccgccgctgaggataagcctgctgagactgaagccccagcggaggctgctaccgagaccacccctatcgagcagattattcaggctactgagccaactgccgaggccgaggctcctgctgccgagcctgtgactgaggctgctcctgtcgaggaggcgaaggaggagaccaaagaagagaccaagcccgctcctaccaagcgcaacagcatcttcagcagtctttcctttggcaagaagaaggccgaggctgactctacccccatttctcccgcgaaggaggagtccacccccgccaccgaagctcctgttgccgagaccgcaccggtcattcctgctgtagaaactactgagcctctgtctgccgaggtcgcttctcccgccaccgtccccactgagaccacggaggtgacacccgccaccactagcgaggccaagaaggaggtcaagagcgacaagcgcaagtcttcgctgcctttcgcatttggcaagaaggagaaggccgagaagtctgccacctctgacgaagagggtgagaagcccaagtccacccccttcttctccaagctccgccagactgtcaagaagtccaagggcgacaagcctgccgacaagtctgctgaggaaggcactcctgctgaggacaagcccgctgagaccaccgaggccgccgaggagcccgtccctgaggccaaggccgaagagcccaaggctgaggagcctacgcccgtggttcccgccgccgaggagactcctgctgagaagcctgcggccgctacgccggctcctgtcgtggctgctgcctagtcgcccagctgtgccagcgatacagacagcgcgtctcgggttttcaagatcgacgacgagtgatgttgctggccaagtaatgaattttcatacaagatgggctacctagtcttgttggtttttggtcgggcatgacactgcatttcaagataccctaccaaagattggttccccgctgatacccccgtgtttccttctgccatggtgcgccgatgatcttttgcgacggatacccgagaccgcgtgggccggagcgacgagggagaaggaggtgcatatcatgatttctgttggttttttacatgttgctgttttgcatgcctcgaattacgaagcgtgaagtcggcttgttctgacaacatttccttacactactgatacccagtatacccacaagagtaacgactgattgagagatccccctcgtgggatcagaaaaaagaagggaaacccaaattacaaaaaaaaaaaaaaaaaaaaaaaaagaagaaaattaggtgtgtggcaggttgtgttgacgcaacgggagagagggccgacgctgtgttgggcggtgcgcgtctgatgtcaggaaagccttgcacggttgtgccgcgtcttgtgttctaccatactgtaacgacagcgccggcaacagcggttttaatagctaatagatagagaatatcgcaaacttgaattatgtctgcagcatttcgtcttgtttgacttctcggtgattgtgccaataggtgcttaagcggtgtaaatcaacaaggtaatctcggtgtcgcaagctgtattcacactgcagggtggcagccgagttgcattcgacttctgtcaagtgcctctcggtgccaatgtttgtgtaaacacaggcataaggcataaggttaaaggttctgaacgggttaccatgaatttgtagatatgacagttacatacgagacacaggaccatcgtcattgcccgttagcttaggctggtaagaagattgaaacgtcggaaggaccccgccaaccccaccacagccagttgacctcttcaacaacaacgaatttggtttaccaccacaaagagcgagtgcttgtctcctttcccgcgacgaggcagtgtaggtgcatctgtcctgatgatgcaacacctcagatatacgccctcgtcaagatgagcttcgccatcgaggttcctggagccgcgagcccgctcagccgtctggagctctgccgcgtgctcgagtcggcttcgtcccacgatgcctcgaagcgccaggccgccggccagcagctgtcctcgtgggagggcaacccggactattatcc

SEQ ID NO: 12972 - DNA, 2610 bp, Muscodor strobelii
  misc_feature: SGI cDNA ID NO. 564234
  misc_feature: Encodes the peptide sequence at SEQ ID NO 12973
atggactatccaagagacattggttttgccctgccgcctactctccagtgtacggtcggcgagggtgaccaatcaaacttctacagacagccatccaatccttcctttaatggcggatcaggtgctaagaagtccttcttccctggtctccaagctcctcccggcttcggcgagctgtcttcggtatgtgttcgtccgggcgagatgtgcaagccactatatggcccgattcaaggtcgtcggccccaaggaccagtgcaaatgggtttgatcttcatgcgaaacaacacgggaaaagcacacgaaggactagaaagaaccaacagcgatgagtatgagagggcgaagtttaacccggtccgacatgcctcttattcgcagtacaacaactatgacggtcacaaaatgaccaaggaagaaggtcgaatggtcgagattgctgctcattatcctaatattcgcgctggcattctccaggcaccttttctattgcgccccggtcaagttgctctggcccaggtttcacagcccaatgcgtcgatggttgaagtcttctccatttcggagttagctcaggtcatttatggccatctggtagcgtatcgagaggcactcgatcacctttcccggacctgccagtttcagatgaacaccatcaacgcgacctttgcccgttgtgatgcttctagctgccagtttttgggactagacacaacccctgcctccaaaattggtcagcagttctccggattgatgatcatctcaccagtccgtccacgtcatcagaaggcgcgacattttgagaagtctaacctcaacgagtatggatatccgtgtgtggcacctatggaacctgagccaatgtcgttcagcaagacctggcagagtcatgtccaattcctgagcatggttgcaatgaacggctccatggtgaaacatctcatgcttcacggattgccttggctcgagatcaaagcactgaagaagatccttgaggcttgtcccaacttacagtcgattggcatccatcaatgtttccttctcgattttagccagtcggtaaaggttttccagactgtcattcgggtcaatgataatcgcgaggcaatgggacgtaaccagcctatcatcgactgcgactttggccccttctggttcaaaggtcccgagttcactgaggacggcctcgaccacgtcggagagtacggagtcttaccatctgtccttcactggctatgtcccactgcggccgttggtgctaccatcatgaaagtctactccatcatgggtctcgacgctttcaaggttggcaaagcctatcgacaatatcttgatcggctgccatggggtctcggtggttgcgtcggctttttgagagctgtggcaaacctcttcgctttcgaaaacaacgagtatcattacggagtacaccggtctacggcaaatatctcaccagcaaagacgggagaactccctacagtatcgcacgcagtggaatcagccatgcagcaaacactctggtatgacattatggttgcggcaaaagggcgttcgatgtattccaaggatctgaaactccacatcacgtacgccggccttgtcaacaatgatctttgcgttggatgtggtattgagctatgccccttcttctttggcgagaaagaaaggtaccttgttcatgagtcgtgcctcatctgtgccggatgccaactatccggctacatggacaataatgattgcgaatggcgcatgcgcaccaagagacgttcgctggcaagaaagttactcctgagatataagaacctcatgggaattgctgcggcgtacaagcaaaagcacccgagaccacccatggctaaaagtgtcaacaagatacagcatgacttctactatggattggagcaggttcgaaaagagagccaggatatcatcgatagaattgaagccaagtacgaggcaatcggcaaaccaattcacgatctccagtctcccatgtctgctgaagaccggaagcaattggagacgcacagcgacatcgagcaaaacgctcggctccgcatgggctactaccaacgggagtctcttgtgggtggcccaatcatcatggacagttggcagaaagccatccagctttaccgggcattgtacacggctcaagaaggtttcatcggcaatcgaggtccttacacattacgacatggccgtgacgatgttgtggacatcgtgggccatgacggtgacgtgaccttccagtctcagacagactgggagaacgaggagcccgacaacaaacctgtcacaatatccagagcttctaatactagtactccaggcaacggcactgtcgagaagaccacgagacccaaggcttggatcccaccccacttacgccgcccgagtcctccttcaacgctactagctgtccaggaggaactagagccatcatcatcatcatctccttctactacaaaccacgttgcccctcatcttagacactctgacttgctatctgcctcaacacttaagacagaggacaaagatgaagagcagaagcctcccaactgggttccgcctcatctccgaggcaagccccaacgatcctcaacatag

SEQ ID NO: 12973 - protein, 869 aa, Muscodor strobelii
  misc_feature: SGI Peptide ID NO. 564234
  misc_feature (181)..(588): NCBI GI: 85114791 Blast Desc: NCU00932 [Neurospora crassa OR74A] gi|28926551|gb|EAA35522.1| [Neurospora crassa OR74A]
  misc_feature (283)..(576): NCBI GI: 46107950 Blast Desc: FG00858.1 [Gibberella zeae PH-1]
  misc_feature (311)..(576): NCBI GI: 256735440 Blast Desc: NECHADRAFT_75284 [Nectria haematococca mpVI 77-13-4]
MDYPRDIGFALPPTLQCTVGEGDQSNFYRQPSNPSFNGGSGAKKSFFPGLQAPPGFGELSSVCVRPGEMCKPLYGPIQGRRPQGPVQMGLIFMRNNTGKAHEGLERTNSDEYERAKFNPVRHASYSQYNNYDGHKMTKEEGRMVEIAAHYPNIRAGILQAPFLLRPGQVALAQVSQPNASMVEVFSISELAQVIYGHLVAYREALDHLSRTCQFQMNTINATFARCDASSCQFLGLDTTPASKIGQQFSGLMIISPVRPRHQKARHFEKSNLNEYGYPCVAPMEPEPMSFSKTWQSHVQFLSMVAMNGSMVKHLMLHGLPWLEIKALKKILEACPNLQSIGIHQCFLLDFSQSVKVFQTVIRVNDNREAMGRNQPIIDCDFGPFWFKGPEFTEDGLDHVGEYGVLPSVLHWLCPTAAVGATIMKVYSIMGLDAFKVGKAYRQYLDRLPWGLGGCVGFLRAVANLFAFENNEYHYGVHRSTANISPAKTGELPTVSHAVESAMQQTLWYDIMVAAKGRSMYSKDLKLHITYAGLVNNDLCVGCGIELCPFFFGEKERYLVHESCLICAGCQLSGYMDNNDCEWRMRTKRRSLARKLLLRYKNLMGIAAAYKQKHPRPPMAKSVNKIQHDFYYGLEQVRKESQDIIDRIEAKYEAIGKPIHDLQSPMSAEDRKQLETHSDIEQNARLRMGYYQRESLVGGPIIMDSWQKAIQLYRALYTAQEGFIGNRGPYTLRHGRDDVVDIVGHDGDVTFQSQTDWENEEPDNKPVTISRASNTSTPGNGTVEKTTRPKAWIPPHLRRPSPPSTLLAVQEELEPSSSSSPSTTNHVAPHLRHSDLLSASTLKTEDKDEEQKPPNWVPPHLRGKPQRSST

SEQ ID NO: 12974 - DNA, 1758 bp, Muscodor strobelii
  misc_feature: SGI cDNA ID NO. 564235
  misc_feature: Encodes the peptide sequence at SEQ ID NO 12975
atgaatagtacccaacatctcagctttttacggccttatctctatggctctctaccagccaacaaggctgcgtatgtgcggctgtttacagcttcttgtcggccgagaccttcaggactttcttcttgccgtgcgccacggatattgcttcgtggccaacctatccggccaatttcggaatcggcagaaaagcaggaggagtatctcacagattctgctgctctgacattgaacattgaacgccgtgttcagaaactcgagcaatacgatgccctcaaatatccgcgacttggtcatcggccagaccgcatgggtatacctgaattccgagaggcattcaaggctgagacatcaacaccggcgccagaagaagttgtccttgaaggcagaatcatgacactgagacgttctgggtccaagctagtcttcctgcacatcttgggtggttaccaacaagtccaggctatgattgattttgcccaactcccataccttctcgaccacttcaaaaaggctttgaagccattgcgtcgtggtgacatcgtgtctatcaaaggcaaagctattcgcactaaagcaggagagttaacattaaacgcaaccgagttacccatactcctcagcccggctattgcgccactacccgagaagttgaccaacgtggagaccaggattttgaacagacaggttgatctacttgtgaaccagcgtaccgcagatacactgcgacttcgttcccaagttgtgaaatctatgcgagacttctttcatgagcaagatttcctcgaggttcaaacacccatgcttgcagattccgcaggtggcgctatcgcccgtccctttttgacatctgctaccgaattccccgagaagagtctgtcgctgcgaattgcacctgagctttggctgaaacgtctagtcgtcggcggcaacgataaggtcttcgaaattggtcagtcatttcgaaatgagggattagacccaacacacaatccagaattcaccacctgcgagttctactccgcgtacaccaatcttccggggctcatctcgatgtctgagcgcttaattggccgtctcgtcaaggatgccactcaagccattgaatctcgcttgacgtctcttgataaaccaagcctctcgaatcaagacggtcgatggaaacaagtcgaatttatacctgcactcgaagagattttgggcttcaagtttcccgatttgtcggatccaagcgccctggagaagttgcgagacgcggtcgcagataaacatccgcctgctgccaaccctgaactcagtttgaataaagttctcgactaccttgcttccacacatctcgagaaggactctttcggccaacctctgttcattatccaccatccggcttgcatggcaccgctttcaaagtccttcacttgtcccaagacgggtcagctggtgtccgcgcgcgctgaactattcattgatggccgcgagatagcgaacatgtacgaagaggagaacgacccgtttgaacagagacgcaagttcgaagagcagctccggagtaaaaacagagccaatgatgacgaaggccccttggaaatcgatgagagctatgtccaggcccttgaacatgggcttcctcccacgggtggatggggctgcggtgttgatcggctcgtcatgcttctttctggtgcttcacggatcagtgatactctgccatttggtaacttgaagaacattgtatcacttgcttcagccgccaaaagctag

SEQ ID NO: 12975 - protein, 585 aa, Muscodor strobelii
  misc_feature: SGI Peptide ID NO. 564235
  misc_feature (125)..(206): Pfam Id: PF01336 Pfam Desc: OB-fold nucleic acid binding domain
  misc_feature (220)..(575): Pfam Id: PF00152 Pfam Desc: tRNA synthetases class II (D, K and N)
  misc_feature (82)..(585): NCBI GI: 38567283 Blast Desc: related to lysyl-tRNA synthetase (lysine--tRNA ligase) [Neurospora crassa]
  misc_feature (104)..(585): NCBI GI: 164428694 Blast Desc: NCU00931 [Neurospora crassa OR74A] gi|157072244|gb|EAA35521.2| conserved [Neurospora crassa OR74A]
  misc_feature (82)..(579): NCBI GI: 116182572 Blast Desc: CHGG_01914 [Chaetomium globosum CBS 148.51] gi|88186211|gb|EAQ93679.1| CHGG_01914 [Chaetomium globosum CBS 148.51]
  misc_feature (82)..(577): NCBI GI: 171694880 Blast Desc: protein product [Podospora anserina] gi|170947682|emb|CAP59844.1| protein product [Podospora anserina]
  misc_feature (94)..(585): NCBI GI: 46107986 Blast Desc: FG00875.1 [Gibberella zeae PH-1]
  misc_feature (104)..(579): NCBI GI: 256735430 Blast Desc: [Nectria haematococca mpVI 77-13-4]
  misc_feature (80)..(578): NCBI GI: 238839944 Blast Desc: lysyl-tRNA synthetase [Microsporum canis CBS 113480]
  misc_feature (79)..(583): NCBI GI: 145228973 Blast Desc: An01g03650 [Aspergillus niger] gi|134054891|emb|CAK36903.1| protein product [Aspergillus niger]
  misc_feature (79)..(577): NCBI GI: 255940966 Blast Desc: Pc16g09340 [Penicillium chrysogenum Wisconsin 54-1255] gi|211585875|emb|CAP93604.1| Pc16g09340 [Penicillium chrysogenum Wisconsin 54-1255]
  misc_feature (55)..(577): NCBI GI: 146322444 Blast Desc: lysyl-tRNA synthetase [Aspergillus fumigatus Af293] gi|129557020|gb|EAL88156.2| lysyl-tRNA synthetase, [Aspergillus fumigatus Af293]
  misc_feature (78)..(576): SWISSPROT Homolog: EC 6.1.1.6 Lysine--tRNA ligase
MNSTQHLSFLRPYLYGSLPANKAAYVRLFTASCRPRPSGLSSCRAPRILLRGQPIRPISESAEKQEEYLTDSAALTLNIERRVQKLEQYDALKYPRLGHRPDRMGIPEFREAFKAETSTPAPEEVVLEGRIMTLRRSGSKLVFLHILGGYQQVQAMIDFAQLPYLLDHFKKALKPLRRGDIVSIKGKAIRTKAGELTLNATELPILLSPAIAPLPEKLTNVETRILNRQVDLLVNQRTADTLRLRSQVVKSMRDFFHEQDFLEVQTPMLADSAGGAIARPFLTSATEFPEKSLSLRIAPELWLKRLVVGGNDKVFEIGQSFRNEGLDPTHNPEFTTCEFYSAYTNLPGLISMSERLIGRLVKDATQAIESRLTSLDKPSLSNQDGRWKQVEFIPALEEILGFKFPDLSDPSALEKLRDAVADKHPPAANPELSLNKVLDYLASTHLEKDSFGQPLFIIHHPACMAPLSKSFTCPKTGQLVSARAELFIDGREIANMYEEENDPFEQRRKFEEQLRSKNRANDDEGPLEIDESYVQALEHGLPPTGGWGCGVDRLVMLLSGASRISDTLPFGNLKNIVSLASAAKS

SEQ ID NO: 12976 - DNA, 2119 bp, Muscodor strobelii
  misc_feature: SGI EST ID NO. CUFF.30875.0
  misc_feature: Variant of the nucleotide sequence at SEQ ID NO 12974
ttcacgtgtctctcgattcgtcacatcgctcatttcaatgtacattttataacatcggtggctgtacataagtgagcttttgattatcatctcattccttttctcatgagcctttccttcctccaactatgcgcaattcttgcttaagtcgaattgtaaattctctctcttgtccctctgcaattcggtgccccagccaggttctcagtagtagcatgccagagtaacgaatgttgtggcagaatgaatagtacccaacatctcagctttttacggccttatctctatggctctctaccagccaacaaggctgcgtatgtgcggctgtttacagcttcttgtcggccgagaccttcaggactttcttcttgccgtgcgccacggatattgcttcgtggccaacctatccggccaatttcggaatcggcagaaaagcaggaggagtatctcacagattctgctgctctgacattgaacattgaacgccgtgttcagaaactcgagcaatacgatgccctcaaatatccgcgacttggtcatcggccagaccgcatgggtatacctgaattccgagaggcattcaaggctgagacatcaacaccggcgccagaagaagttgtccttgaaggcagaatcatgacactgagacgttctgggtccaagctagtcttcctgcacatcttgggtggttaccaacaagtccaggctatgattgattttgcccaactcccataccttctcgaccacttcaaaaaggctttgaagccattgcgtcgtggtgacatcgtgtctatcaaaggcaaagctattcgcactaaagcaggagagttaacattaaacgcaaccgagttacccatactcctcagcccggctattgcgccactacccgagaagttgaccaacgtggagaccaggattttgaacagacaggttgatctacttgtgaaccagcgtaccgcagatacactgcgacttcgttcccaagttgtgaaatctatgcgagacttctttcatgagcaagatttcctcgaggttcaaacacccatgcttgcagattccgcaggtggcgctatcgcccgtccctttttgacatctgctaccgaattccccgagaagagtctgtcgctgcgaattgcacctgagctttggctgaaacgtctagtcgtcggcggcaacgataaggtcttcgaaattggtcagtcatttcgaaatgagggattagacccaacacacaatccagaattcaccacctgcgagttctactccgcgtacaccaatcttccggggctcatctcgatgtctgagcgcttaattggccgtctcgtcaaggatgccactcaagccattgaatctcgcttgacgtctcttgataaaccaagcctctcgaatcaagacggtcgatggaaacaagtcgaatttatacctgcactcgaagagattttgggcttcaagtttcccgatttgtcggatccaagcgccctggagaagttgcgagacgcggtcgcagataaacatccgcctgctgccaaccctgaactcagtttgaataaagttctcgactaccttgcttccacacatctcgagaaggactctttcggccaacctctgttcattatccaccatccggcttgcatggcaccgctttcaaagtccttcacttgtcccaagacgggtcagctggtgtccgcgcgcgctgaactattcattgatggccgcgagatagcgaacatgtacgaagaggagaacgacccgtttgaacagagacgcaagttcgaagagcagctccggagtaaaaacagagccaatgatgacgaaggccccttggaaatcgatgagagctatgtccaggcccttgaacatgggcttcctcccacgggtggatggggctgcggtgttgatcggctcgtcatgcttctttctggtgcttcacggatcagtgatactctgccatttggtaacttgaagaacattgtatcacttgcttcagccgccaaaagctaggctgactggcaatatcgtcctaacaatgttataaaatcatgtacactagaaatgataccccatagatgtataacattcgcacttgtttatacagtcaactaggctagacactttcaat

SEQ ID NO: 12977 - DNA, 276 bp, Muscodor strobelii
  misc_feature: SGI cDNA ID NO. 564236
  misc_feature: Encodes the peptide sequence at SEQ ID NO 12978
atgtcgttcctaggattcggtagaccacagcccacctcggcagagaagatcgcagccgtcgaggccgagatgaagctcctgaccgagatggccaaccgcctcacaaaagcctgcgccaagaagtgcgtccccaacaactacctcgagggcgacctcaacaagggcgagagcgtatgtctcgaccgctgcgccgccaagttcttcgacgtccacatgaaggtctccgagcagctacagcaggaatcgcaacagaggggaggtgggcttgggttttag

SEQ ID NO: 12978 - protein, 91 aa, Muscodor strobelii
  misc_feature: SGI Peptide ID NO. 564236
  misc_feature (15)..(81): Pfam Id: PF02953 Pfam Desc: Tim10/DDP family zinc finger
  misc_feature (3)..(91): NCBI GI: 85114782 Blast Desc: mitochondrial import inner membrane translocase subunit tim-10 [Neurospora crassa OR74A] gi|30316117|sp|Q9C0N3.1|TIM10_NEUCR RecName: Full=Mitochondrial
  misc_feature (1)..(87): NCBI GI: 261358677 Blast Desc: mitochondrial import inner membrane translocase subunit TIM10 [Verticillium albo-atrum VaMs.102]
  misc_feature (1)..(91): NCBI GI: 238486442 Blast Desc: mitochondrial intermembrane space translocase subunit Tim10, [Aspergillus flavus NRRL3357] gi|220699338|gb|EED55677.1| mitochondrial intermembrane space translocase subunit Tim10,
  misc_feature (1)..(88): NCBI GI: 116182574 Blast Desc: CHGG_01915 [Chaetomium globosum CBS 148.51] gi|88186212|gb|EAQ93680.1| CHGG_01915 [Chaetomium globosum CBS 148.51]
  misc_feature (1)..(91): NCBI GI: 255940964 Blast Desc: Pc16g09330 [Penicillium chrysogenum Wisconsin 54-1255] gi|211585874|emb|CAP93603.1| Pc16g09330 [Penicillium chrysogenum Wisconsin 54-1255]
  misc_feature (1)..(91): NCBI GI: 115388581 Blast Desc: mitochondrial import inner membrane translocase subunit tim10 [Aspergillus terreus NIH2624] gi|114195880|gb|EAU37580.1| mitochondrial import inner membrane
  misc_feature (1)..(91): NCBI GI: 70990692 Blast Desc: mitochondrial intermembrane space translocase subunit Tim10, [Aspergillus fumigatus Af293] gi|119496885|ref|XP_001265216.1| mitochondrial intermembrane NRRL
  misc_feature (1)..(76): NCBI GI: 46107668 Blast Desc: FG00717.1 [Gibberella zeae PH-1] gi|90101771|sp|Q4IPZ1.1|TIM10_GIBZE RecName: Full=Mitochondrial import inner membrane translocase subunit TIM10
  misc_feature (1)..(91): NCBI GI: 145228971 Blast Desc: An01g03640 [Aspergillus niger] gi|134054890|emb|CAK36902.1| protein product [Aspergillus niger]
  misc_feature (1)..(76): NCBI GI: 256735477 Blast Desc: [Nectria haematococca mpVI 77-13-4]
MSFLGFGRPQPTSAEKIAAVEAEMKLLTEMANRLTKACAKKCVPNNYLEGDLNKGESVCLDRCAAKFFDVHMKVSEQLQQESQQRGGGLGF

SEQ ID NO: 12979 - DNA, 717 bp, Muscodor strobelii
  misc_feature: SGI EST ID NO. CUFF.30877.0
  misc_feature: Variant of the nucleotide sequence at SEQ ID NO 12977
gtcgcattgcattacattacagacaaatcatcgcgatcaacgagaaaacctcaagaaacacactgtacaacacaaaccacatagtgactatgtcgttcctaggattcggtagaccacagcccacctcggcagagaagatcgcagccgtcgaggccgagatgaagctcctgaccgagatggccaaccgcctcacaaaagcctgcgccaagaagtgcgtccccaacaactacctcgagggcgacctcaacaagggcgagagcgtatgtctcgaccgctgcgccgccaagttcttcgacgtccacatgaaggtctccgagcagctacagcaggaatcgcaacagaggggaggtgggcttgggttttagcgtagcaacaagacacgaacaccaataatactcccggcctgagacggcgccgaggcgacaaggtcatgaaagatctaacctcttcttggcaaggagccgagactgtacattacgcgatgggttggtatgcattggttggagggcacgcttgcatatctgatacctttgagcacttgtgggatacgagacgagcgggctatagacttggatctgtataattaactatgaaatcttcgagctaccgatcacgactcgatgtgtaattgattcctctcaaaatccccgtttcgcctctgaatacgacttatgcaagacgccttgttgagcagtcttactatccccgagattgtcg

SEQ ID NO: 12980 - DNA, 810 bp, Muscodor strobelii
  misc_feature: SGI cDNA ID NO. 564237
  misc_feature: Encodes the peptide sequence at SEQ ID NO 12981
atgcgccttcgccgagctgcccgcgtgatcctcgtcggcgcgccgggagtcggaaaaggcacccagtccgagcgactcctcgcccgctttccccagctctccgccatcagctccggcgacctgctccgccacaatgtcaagaaccgcacgcccctcggcatcaaggtcgagaagaccatgaagaccggcggcctcgtccccgacgacatgatcctccgcctcatcaccaacgagctcggccagcgcggatggctgacccctggccagcccgccatgatggccatggcctcggccgtctccggtggtgccatcaccgacgaacccgcggatgctttcatccccggactggactcgaaccctaacgacggcgcgagtctctccagtcaggcctctgatgaccccgccgcttcgttcctcctcgatggcttcccccgcacggcaccccaggccgagcggctcgacgacatcgtccccatcaactgggttgtgtcgctacgaacgcccttcgacgtcatcatggagcgcatctcgtcgcggtgggtgcacgagccctcaggccgtgtctacaacaccacgttccacgccccaaaggtgcctggacgtgacgacgtcacgggcgagccccttgtgcaacgtgccgatgacagcgaggaggtctaccgcacgcggttccagaaatttcaagagaccagcgaaccactcctcgagcattacgccaagaagggtgttctctgggaggtacatggcctcagcagtgacgaaatcagtcccaagcttttctcggagttcgagagacgcttttcgatctga

SEQ ID NO: 12981 - protein, 269 aa, Muscodor strobelii
  misc_feature: SGI Peptide ID NO. 564237
  misc_feature (11)..(243): Pfam Id: PF00406 Pfam Desc: Adenylate kinase
  misc_feature (179)..(214): Pfam Id: PF05191 Pfam Desc: Adenylate kinase, active site lid
  misc_feature (11)..(85): Pfam Id: PF00406 Pfam Desc: Adenylate kinase
  misc_feature (138)..(243): Pfam Id: PF00406 Pfam Desc: Adenylate kinase
  misc_feature (1)..(267): NCBI GI: 39943206 Blast Desc: MGG_03683 [Magnaporthe grisea 70-15] gi|145009722|gb|EDJ94378.1| MGG_03683 [Magnaporthe grisea 70-15]
  misc_feature (1)..(267): NCBI GI: 85117741 Blast Desc: NCU03216 [Neurospora crassa OR74A] gi|28927123|gb|EAA36080.1| NCU03216 [Neurospora crassa OR74A]
  misc_feature (3)..(268): NCBI GI: 171694890 Blast Desc: protein product [Podospora anserina] gi|170947687|emb|CAP59849.1| protein product [Podospora anserina]
  misc_feature (1)..(268): NCBI GI: 261355277 Blast Desc: adenylate kinase [Verticillium albo-atrum VaMs.102]
  misc_feature (1)..(267): NCBI GI: 256720652 Blast Desc: [Nectria haematococca mpVI 77-13-4]
  misc_feature (1)..(268): NCBI GI: 156054352 Blast Desc: SS1G_06024 [Sclerotinia sclerotiorum 1980] gi|154703804|gb|EDO03543.1| SS1G_06024 [Sclerotinia sclerotiorum 1980]
  misc_feature (1)..(267): NCBI GI: 46134045 Blast Desc: FG09162.1 [Gibberella zeae PH-1]
  misc_feature (1)..(268): NCBI GI: 154321259 Blast Desc: adenylate kinase, mitochondrial [Botryotinia fuckeliana B05.10] gi|150852042|gb|EDN27234.1| adenylate kinase, mitochondrial [Botryotinia fuckeliana B05.10]
  misc_feature (2)..(267): NCBI GI: 169603321 Blast Desc: SNOG_04669 [Phaeosphaeria nodorum SN15] gi|111067309|gb|EAT88429.1| SNOG_04669 [Phaeosphaeria nodorum SN15]
  misc_feature (2)..(267): NCBI GI: 189203581 Blast Desc: adenylate kinase isoenzyme 2, mitochondrial [Pyrenophora tritici-repentis Pt-1C-BFP] gi|187985225|gb|EDU50713.1| adenylate kinase isoenzyme 2,
  misc_feature (13)..(255): SWISSPROT Homolog: EC 2.7.4.3 Adenylate kinase
MRLRRAARVILVGAPGVGKGTQSERLLARFPQLSAISSGDLLRHNVKNRTPLGIKVEKTMKTGGLVPDDMILRLITNELGQRGWLTPGQPAMMAMASAVSGGAITDEPADAFIPGLDSNPNDGASLSSQASDDPAASFLLDGFPRTAPQAERLDDIVPINWVVSLRTPFDVIMERISSRWVHEPSGRVYNTTFHAPKVPGRDDVTGEPLVQRADDSEEVYRTRFQKFQETSEPLLEHYAKKGVLWEVHGLSSDEISPKLFSEFERRFSI

SEQ ID NO: 12982 - DNA, 1812 bp, Muscodor strobelii
  misc_feature: SGI cDNA ID NO. 564238
  misc_feature: Encodes the peptide sequence at SEQ ID NO 12983
atggcaagactccatatactcgccttcctcgcgtggacgacgaacgcattagatatttcgagaagatgcccgattttcttcaagacacccaggcaatgcgacccaatagcaccgaaaagcttcttgccacactcggttgttaccagcttcgagtctagaacaggccaaactgctaacgtcactacatttgtcgatctcataggcgctctggatgtcatccagtctgagttcttcgttcctgagcatgggacatggccagatgccattgactggacggctgcggtagtaggcacacatttctccggtgccacgcgtagtgtgtcggaggatttggtgtttttgaatacgtacgaaggtgccgtcagagactggaggcaggcctccaacttgatcgacggctatttcgcacagacagtagcctactacttcggtcaagatgccgaagccattagaaatgaggcttacgacgacatcctctgggttgttcttggatggatcgaatcagtcaaactcgtgaacggccacggcaatcggcactatgcggatggcctgacgagccgtcagtatcatggtaacctatgggtgcctgttttttctcgtagagcccgagagttttgggaatatgccatggcaggctgggatacgcagctgtgtaacggcggcatgatttggaatccgaggctgctgccttacaagaatgcgatcaccaatgagctttttatcgctgcttctatttctatgtatcaccactttcctggcgacggtaaactgacagatcagggggatgatcaggagccgctccccggtagcggtccacgagatgctctgtatttgaaggctgcagttgagggctacaagtggctccaggcttccaatatgacgaactcacatggcttatatgtcgatggcttccacattagcggatatctagacaaagagaataacaataccaagtgcgatagccgcgatgaaatggtgttcacctacaaccaaggtgttgtactcactggccagcgcggactgtgggacgccacgggagctgcttcgtatcttgcggaaggacatactcttatccagcaggtgatcaatgccactggctacaacttgacttcggaccgtcctatcgacagtttgaagaagataaagcctggccatttacccaaatggcatggtctaggccgattaggtatcatggaagagtattgcgacgcaagtgctacttgtagccaagatggtcagacctttaagggaattttcttccatcatcttacgactttctgtgagcctctagaaacacctgataacacgactggtttgcaaatcgatgagcgtgcctttctggcagttcaatcatctcacgctcaagcgtgtgcctcttacagcggctggttgaaacatcatgtaacggcagccctaaagacgagagacgacgctggtcgatttggacagtggtggactgccggtcttcttgttgctaggaattggacaacagttgactggcccactctgagtaccgatgggatatcgagagatccgaaagccacagactatcgcaactatgagctaccgcacgacgatgtgtgggcattgaaagagtcaaaatacgagatagcctcaagtttaacagacttcaaacctgacagccagacgtcgataggacggataggtcagagatctgttgatcatcactatgaaggtcacaaggacatccatcgagatccaaacaatcgcggacgcgggcgaacggttgaaacacagagcggtgggctagcactgctaagagcatactggaagatagctcaggcaccttga

SEQ ID NO: 12983 - protein, 603 aa, Muscodor strobelii
  misc_feature: SGI Peptide ID NO. 564238
  misc_feature (49)..(476): Pfam Id: PF03663 Pfam Desc: Glycosyl hydrolase family 76
  misc_feature (1)..(599): NCBI GI: 261355284 Blast Desc: conserved [Verticillium albo-atrum VaMs.102]
  misc_feature (23)..(602): NCBI GI: 46105332 Blast Desc: FG00294.1 [Gibberella zeae PH-1]
  misc_feature (23)..(602): NCBI GI: 256735527 Blast Desc: NECHADRAFT_105851 [Nectria haematococca mpVI 77-13-4]
  misc_feature (32)..(601): NCBI GI: 171694888 Blast Desc: protein product [Podospora anserina] gi|170947686|emb|CAP59848.1| protein product [Podospora anserina]
  misc_feature (37)..(600): NCBI GI: 116182622 Blast Desc: CHGG_01939 [Chaetomium globosum CBS 148.51] gi|88186236|gb|EAQ93704.1| CHGG_01939 [Chaetomium globosum CBS 148.51]
  misc_feature (59)..(600): NCBI GI: 164427222 Blast Desc: NCU03215 [Neurospora crassa OR74A] gi|157071657|gb|EAA36079.2| conserved [Neurospora crassa OR74A]
  misc_feature (65)..(600): NCBI GI: 39943204 Blast Desc: MGG_03682 [Magnaporthe grisea 70-15] gi|145009723|gb|EDJ94379.1| MGG_03682 [Magnaporthe grisea 70-15]
  misc_feature (98)..(599): NCBI GI: 156039940 Blast Desc: SS1G_12106 [Sclerotinia sclerotiorum 1980] gi|154696163|gb|EDN95901.1| SS1G_12106 [Sclerotinia sclerotiorum 1980]
  misc_feature (98)..(599): NCBI GI: 154300525 Blast Desc: BC1G_11086 [Botryotinia fuckeliana B05.10] gi|150856611|gb|EDN31803.1| BC1G_11086 [Botryotinia fuckeliana B05.10]
  misc_feature (42)..(598): NCBI GI: 212540518 Blast Desc: glycosyl hydrolase, [Penicillium marneffei ATCC 18224] gi|210067713|gb|EEA21805.1| glycosyl hydrolase, [Penicillium marneffei ATCC 18224]
MARLHILAFLAWTTNALDISRRCPIFFKTPRQCDPIAPKSFLPHSVVTSFESRTGQTANVTTFVDLIGALDVIQSEFFVPEHGTWPDAIDWTAAVVGTHFSGATRSVSEDLVFLNTYEGAVRDWRQASNLIDGYFAQTVAYYFGQDAEAIRNEAYDDILWVVLGWIESVKLVNGHGNRHYADGLTSRQYHGNLWVPVFSRRAREFWEYAMAGWDTQLCNGGMIWNPRLLPYKNAITNELFIAASISMYHHFPGDGKLTDQGDDQEPLPGSGPRDALYLKAAVEGYKWLQASNMTNSHGLYVDGFHISGYLDKENNNTKCDSRDEMVFTYNQGVVLTGQRGLWDATGAASYLAEGHTLIQQVINATGYNLTSDRPIDSLKKIKPGHLPKWHGLGRLGIMEEYCDASATCSQDGQTFKGIFFHHLTTFCEPLETPDNTTGLQIDERAFLAVQSSHAQACASYSGWLKHHVTAALKTRDDAGRFGQWWTAGLLVARNWTTVDWPTLSTDGISRDPKATDYRNYELPHDDVWALKESKYEIASSLTDFKPDSQTSIGRIGQRSVDHHYEGHKDIHRDPNNRGRGRTVETQSGGLALLRAYWKIAQAP

SEQ ID NO: 12984 - DNA, 1775 bp, Muscodor strobelii
  misc_feature: SGI EST ID NO. CUFF.30889.0
  misc_feature: Variant of the nucleotide sequence at SEQ ID NO 12982
tgctgccttacaagaatgcgatcaccaatgagctttttatcgctgcttctatttctatgtatcaccactttcctggcgacggtaaactgacagatcagggggatgatcaggagccgctccccggtagcggtccacgagatgctctgtatttgaaggctgcagttgagggctacaagtggctccaggcttccaatatgacgaactcacatggcttatatgtcgatggcttccacattagcggatatctagacaaagagaataacaataccaagtgcgatagccgcgatgaaatggtgttcacctacaaccaaggtgttgtactcactggccagcgcggactgtgggacgccacgggagctgcttcgtatcttgcggaaggacatactcttatccagcaggtgatcaatgccactggctacaacttgacttcggaccgtcctatcgacagtttgaagaagataaagcctggccatttacccaaatggcatggtctaggccgattaggtatcatggaagagtattgcgacgcaagtgctacttgtagccaagatggtcagacctttaagggaattttcttccatcatcttacgactttctgtgagcctctagaaacacctgataacacgactggtttgcaaatcgatgagcgtgcctttctggcagttcaatcatctcacgctcaagcgtgtgcctcttacagcggctggttgaaacatcatgtaacggcagccctaaagacgagagacgacgctggtcgatttggacagtggtggactgccggtcttcttgttgctaggaattggacaacagttgactggcccactctgagtaccgatgggatatcgagagatccgaaagccacagactatcgcaactatgagctaccgcacgacgatgtgtgggcattgaaagagtcaaaatacgagatagcctcaagtttaacagacttcaaacctgacagccagacgtcgataggacggataggtcagagatctgttgatcatcactatgaaggtcacaaggacatccatcgagatccaaacaatcgcggacgcgggcgaacggttgaaacacagagcggtgggctagcactgctaagagcatactggaagatagctcaggcaccttgatggaagcttctcgcaagtagccggcacgttctcacagattcttctcgtctaggtccgcagctttcgcggtgttcatattgcgcgttgtccactcacaacttgcgaaatatccgcaagaacaatgccttgcattgattacaatcaacgcgtctaggaccgaaggcaatactccgatccgctcaggcgctccagcgcgtcggccatgtcttatggccacaaatacaccttggtggctagggcggttgtgcaagccgctacaaacccgatcagcaaaccttgatattgacttaccccttgtttacttcacgaatagttttacgacattggaatctaggtcaacttgtataccatagcatagcgggttagaaacattgttcctgcctattttctgcatttagtcgacaatactcgggtttccggactatctatctacctctggacctgtatatacgtgaacggtcgcacaggacgaactggagtttctgtaaatattctgggcatatagcatcacatgacatataatggcttgttgacataaggagagagaccaagacaagacatcatcgttacaaacagagaccctgatgttaactgataatccactatgctcatgcgtactcgggtcattggccttctggttacttt

SEQ ID NO: 12985 - DNA, 1548 bp, Muscodor strobelii
  misc_feature: SGI cDNA ID NO. 564239
  misc_feature: Encodes the peptide sequence at SEQ ID NO 12986
atgacgaaccaattccatagccaacttgatgatgagcaccgggaagttcgttatcctgctgttcccacgtcctggtcgcagcacccgttacgtcgagatgactacgattggatatctatcaactcgtttataaagttgaatccgcccgctagagacaacgagtccgagaccgacgaggatatgccggaactggtatacgacaatgatctcatagccgagtcttggagagtactttccgccggcggtggcgagaacaacgaagatctctcgaatgggcttcaatccaaccctactgatcgcttctctactgttgatcgagcgcccgctgaatatctgaactataaaaaccaactccatgctctcgagaccaagccatttgtgcccaagatcaagattccggctccccgatctaaaggctctactcccaacattccaaagtctagggaatgtgtacccaaggatgaaaatcacgagcactctatctcaatttctcccaaacccaggagaaaagctaccgcctacgactttgtgatgctcatactctcagtcatgatagctacacagatttacagtctcaccgggaactccaagtcgagcacagcactatggtggttcctagcagaagtagtgatcgagggaacgacattcgtgaccaagctactagtttcccgcgcaccacctcgcgactccgactcgaacaaaggcttcgccaagcctctatcgccaacaggcttccaatctgacaataagttagcaatgacatgccaacgcccagaccaatacgcatcttcagacgataaatcgatcaacgagtcgactccctcatccgacaatatcgatctcctatctgaaaaccttgacaaaatcgcgactcgaatggaagaactccgatccgtcgcagtaaatgagatctgggaagagctcttgacggaagtgttacaaatccacgcagactgtcttcgagatatcggcgcccatgtcacgcgaatgattaaatgctataagaccgcttttctaaaaatcatgaaaatcgacaagcggcctctggtaggcgcgaagatcacatctagaagagaaagagaaatccgcaagaaaggggaaaggacttgcttctttctttccgtcttactcctcgctgtcctgtacactgcgggtctttactaccggtatcaacccgcgagcgtcagcgtcgcgcccgttgaggtcgatataccagctatcccagacaatggaccagttctgtccccttcatcctatttcccagatccctaccactatcttcctcaactctctctcctctccataccccagatcgccctcccaacagtcgatttcaactcccttccttcgttcttcccagcggatctcaaagctcgtctctcaaacacaccaccacacgtcgagatcccgacaccgagcccagacctcacaacactcgcgggagtcaaagtagcgctagatagaacagcacgaagtacaggggaaatggcggggaccctctggcggaacaccaaggacatttttagtctcccgttgagaaaacgctaa

SEQ ID NO: 12986 - protein, 515 aa, Muscodor strobelii
  misc_feature: SGI Peptide ID NO. 564239
MTNQFHSQLDDEHREVRYPAVPTSWSQHPLRRDDYDWISINSFIKLNPPARDNESETDEDMPELVYDNDLIAESWRVLSAGGGENNEDLSNGLQSNPTDRFSTVDRAPAEYLNYKNQLHALETKPFVPKIKIPAPRSKGSTPNIPKSRECVPKDENHEHSISISPKPRRKATAYDFVMLILSVMIATQIYSLTGNSKSSTALWWFLAEVVIEGTTFVTKLLVSRAPPRDSDSNKGFAKPLSPTGFQSDNKLAMTCQRPDQYASSDDKSINESTPSSDNIDLLSENLDKIATRMEELRSVAVNEIWEELLTEVLQIHADCLRDIGAHVTRMIKCYKTAFLKIMKIDKRPLVGAKITSRREREIRKKGERTCFFLSVLLLAVLYTAGLYYRYQPASVSVAPVEVDIPAIPDNGPVLSPSSYFPDPYHYLPQLSLLSIPQIALPTVDFNSLPSFFPADLKARLSNTPPHVEIPTPSPDLTTLAGVKVALDRTARSTGEMAGTLWRNTKDIFSLPLRKR

SEQ ID NO: 12987 - DNA, 347 bp, Muscodor strobelii
  misc_feature: SGI EST ID NO. CUFF.30892.0
  misc_feature: Variant of the nucleotide sequence at SEQ ID NO 12985
cgtttataaagttgaatccgcccgctagagacaacgagtccgagaccgacgaggatatgccggaactggtatacgacaatgatctcatagccgagtcttggagagtactttccgccggcggtggcgagaacaacgaagatctctcgaatgggcttcaatccaaccctactgatcgcttctctactgttgatcgagcgcccgctgaatatctgaactataaaaaccaactccatgctctcgagaccaagccatttgtgcccaagatcaagattccggctccccgatctaaaggctctactcccaacattccaaagtctagggaatgtgtacccaaggatgaaaatcac

SEQ ID NO: 12988 - DNA, 1062 bp, Muscodor strobelii
  misc_feature: SGI cDNA ID NO. 564240
  misc_feature: Reduced expression when VOC is produced
  misc_feature: Encodes the peptide sequence at SEQ ID NO 12989
atgggctggaacatattccgcatcttgggagatgtctcacatctgctctctaaatgcatcctcatatatgccattcatcgaaaccggagcgccgaaggcgtctccatgatcacccagggcctctacgccaccgtattcatctccagatacaccgatctgttctctgagacgcacgggtggaacatcttcttcaaggtcttctacctgctctcctccttctacatcatcgccatcatgcgctggctgttcccccgcacccgcgagaaggagatcgcctggaagcttggtgccgccgtcctcgccctctccctgctcatctcgcctttcgtcatgctcatcttcgagggcaagtcctggtggtcgttctggacgtggatgtgggacttctcgcaaatcctcgaatccgtctgcgtcctgccccagcttctcctcctccgacagaccagcgtgcccaccgtcatcgactccttctatctcctcgccctcggctcctaccgcgcgctgtactgcctgaactggatctacagggccatcgacaccaacgagcgagctcccaacgccgtctccgtcatctttggtgtcatccagactgccctctacgtcgatttcttctgggtatactacacccgccagcgcgtcaagctgcgatacggcggcatcgtcgacgccgatgatattcgacaaggctggcttctcaaccgcatctttggcaacaagcgcttcgagcaggatcaagacgatgaagagagcacacccgggcgtggaggcgaagaaaacggacatgcacagttccagaggagatccaaatggggcgccagaggcatttccatcagcgctgatgacaccacattggagcaggagccgcttcggcacgacgacgaatacgagggtcttgttgagggcgtggtcgacccggacgccaagatgaaggatcccgatgagctggcgcgtgccctcgatgatgacgatgacgaggagggacttccttccagctcatctactagctctcataagaacgtaccggctggcgtgaacaacgagaacgaatggcgcgattcgtaa

SEQ ID NO: 12989 - protein, 353 aa, Muscodor strobelii
  misc_feature: SGI Peptide ID NO. 564240
  misc_feature (3)..(211): Pfam Id: PF00810 Pfam Desc: ER lumen protein retaining receptor
  misc_feature (126)..(211): Pfam Id: PF00810 Pfam Desc: ER lumen protein retaining receptor
  misc_feature (4)..(80): Pfam Id: PF00810 Pfam Desc: ER lumen protein retaining receptor
  misc_feature (2)..(352): NCBI GI: 256720847 Blast Desc: NECHADRAFT_105438 [Nectria haematococca mpVI 77-13-4]
  misc_feature (3)..(318): NCBI GI: 39943202 Blast Desc: MGG_03681 [Magnaporthe grisea 70-15] gi|145009724|gb|EDJ94380.1| MGG_03681 [Magnaporthe grisea 70-15]
  misc_feature (3)..(352): NCBI GI: 46134047 Blast Desc: FG09163.1 [Gibberella zeae PH-1]
  misc_feature (1)..(352): NCBI GI: 171696254 Blast Desc: protein product [Podospora anserina] gi|170948369|emb|CAP60533.1| protein product [Podospora anserina]
  misc_feature (1)..(351): NCBI GI: 156039938 Blast Desc: SS1G_12105 [Sclerotinia sclerotiorum 1980] gi|154696162|gb|EDN95900.1| SS1G_12105 [Sclerotinia sclerotiorum 1980]
  misc_feature (12)..(352): NCBI GI: 116181576 Blast Desc: CHGG_01416 [Chaetomium globosum CBS 148.51] gi|88185713|gb|EAQ93181.1| CHGG_01416 [Chaetomium globosum CBS 148.51]
  misc_feature (1)..(311): NCBI GI: 159128844 Blast Desc: protein-ER retention receptor, [Aspergillus fumigatus A1163]
  misc_feature (1)..(311): NCBI GI: 70989167 Blast Desc: protein-ER retention receptor [Aspergillus fumigatus Af293] gi|66847064|gb|EAL87395.1| protein-ER retention receptor, [Aspergillus fumigatus Af293]
  misc_feature (1)..(294): NCBI GI: 242801808 Blast Desc: protein-ER retention receptor, [Talaromyces stipitatus ATCC 10500] gi|218717190|gb|EED16611.1| protein-ER retention receptor, [Talaromyces stipitatus ATCC 10500]
  misc_feature (34)..(351): NCBI GI: 154300527 Blast Desc: BC1G_11087 [Botryotinia fuckeliana B05.10] gi|150856612|gb|EDN31804.1| BC1G_11087 [Botryotinia fuckeliana B05.10]
  misc_feature: Useful for introducing or modulating the production of volatile compounds
MGWNIFRILGDVSHLLSKCILIYAIHRNRSAEGVSMITQGLYATVFISRYTDLFSETHGWNIFFKVFYLLSSFYIIAIMRWLFPRTREKEIAWKLGAAVLALSLLISPFVMLIFEGKSWWSFWTWMWDFSQILESVCVLPQLLLLRQTSVPTVIDSFYLLALGSYRALYCLNWIYRAIDTNERAPNAVSVIFGVIQTALYVDFFWVYYTRQRVKLRYGGIVDADDIRQGWLLNRIFGNKRFEQDQDDEESTPGRGGEENGHAQFQRRSKWGARGISISADDTTLEQEPLRHDDEYEGLVEGVVDPDAKMKDPDELARALDDDDDEEGLPSSSSTSSHKNVPAGVNNENEWRDS

SEQ ID NO: 12990 - DNA, 1770 bp, Muscodor strobelii
  misc_feature: SGI EST ID NO. CUFF.30917.0
  misc_feature: Variant of the nucleotide sequence at SEQ ID NO 12988
aaacaacggggcactctcagctcaagctcgtgtcgccgaatgcttggccacgtaattgcgacactgcgacgcagctccgacctctgtctacaagaccttcctagcctccttagttctatctacctatccatcaggcagacagatattgtctcgcagccttctcttttgtttccgtcctccccccgtcccgatccaattccacgacactgctctcaatcacacgcgcgcaagctacagcggcttgcagccgatccccgtcgccatcatgggctggaacatattccgcatcttgggagatgtctcacatctgctctctaaatgcatcctcatatatgccattcatcgaaaccggagcgccgaaggcgtctccatgatcacccagggcctctacgccaccgtattcatctccagatacaccgatctgttctctgagacgcacgggtggaacatcttcttcaaggtcttctacctgctctcctccttctacatcatcgccatcatgcgctggctgttcccccgcacccgcgagaaggagatcgcctggaagcttggtgccgccgtcctcgccctctccctgctcatctcgcctttcgtcatgctcatcttcgagggcaagtcctggtggtcgttctggacgtggatgtgggacttctcgcaaatcctcgaatccgtctgcgtcctgccccagcttctcctcctccgacagaccagcgtgcccaccgtcatcgactccttctatctcctcgccctcggctcctaccgcgcgctgtactgcctgaactggatctacagggccatcgacaccaacgagcgagctcccaacgccgtctccgtcatctttggtgtcatccagactgccctctacgtcgatttcttctgggtatactacacccgccagcgcgtcaagctgcgatacggcggcatcgtcgacgccgatgatattcgacaaggctggcttctcaaccgcatctttggcaacaagcgcttcgagcaggatcaagacgatgaagagagcacacccgggcgtggaggcgaagaaaacggacatgcacagttccagaggagatccaaatggggcgccagaggcatttccatcagcgctgatgacaccacattggagcaggagccgcttcggcacgacgacgaatacgagggtcttgttgagggcgtggtcgacccggacgccaagatgaaggatcccgatgagctggcgcgtgccctcgatgatgacgatgacgaggagggacttccttccagctcatctactagctctcataagaacgtaccggctggcgtgaacaacgagaacgaatggcgcgattcgtaattttgggcggagcaaatcgcccgtgacgcgcactttatatggagcatggacgaataaagggtaggatatcaggatggactttcgaagtgtgggagaagcaacaggtgggaaatgataccacgtgagctctggcggtagatgagtattctcgcatgtcgtttgatacaaactcttctttgggggatactcacatctgttgaagatgtgagagatcctgtgttcaataacctcttagcacggatggcgtacagggagtactgggaatctgcgaaatgtcacacatagcttggtcgagggtctcgagtttagggagccctctattatcatataaaggaagccagattttcacatatatcatatttgctagtcgccagctcattcgtcgatttatctgagctactaacacgggattttaacgacggtattgcaacctcacattgaaa

SEQ ID NO: 12991 - DNA, 2073 bp, Muscodor strobelii
  misc_feature: SGI cDNA ID NO. 564241
  misc_feature: Encodes the peptide sequence at SEQ ID NO 12992
atggcgaccagccgcgaggagcgcatgcaacagcgcatgcgaggggctgggcgccatgaagtcgccgatgactcgtttgacttcgttttgcctgccgcagagccctcctccgaccaagcctccgaccaggcctcagaaccacccgccgaaccgccatcatcctctgtcgccccgccacgagcagagcccaactcctcggctaagcgccgacggctagataatgagcccgaccctttgcccaccccgaggccggccgcaaggaggacatcgccacggcttagtgccgccaatgctgcagcatcccggcccggaacagagtcgcaatcaacgagcaagatatctacgacgagtgctacgcaagataacccttacgacgctttggacgagagctcacgagaggacgccacacaaatttccccagctatcgaggagacagcagctgaggcagagaatgaagaggcagacggggcagatgaggcagaagaggccgaggatgaagacactgtgttgcccgacatccccgcctccacgccgggatcagcatcacgaaactccgcaatctcacgcgtgtctcacgatatctcaactgagtatgccgaggaagtcaccgagagccccgttgccgaccccggaagcggcaggcgccggcagatcatacctaacaacgttggcacccagagcgccaggctgcagagaatcgtgatggaagccgaagctggcaccacgggcgaaatcaccacatcttcacctctggtacgcaaggcaaggcttagcgaggcaacagggcctccgatttccacgaggactactaggtcagcggcgagaagatcactatcgtcaccaattgaaggaccgcatggctcatctcccttggcgcaccagaccggcgtgagtgccgcctctccaacccctgttcggccaggcgtaagaaggcgtgccgcccgaccgaaacgtcagagtcctctcagcacagtcgtggacgaaggagataagctgtcctcgccaccagatgctgcaggcactggtagtcccaagaagcggaggacgaggcaacccaaggctcgatcagtgcctgagtccccagaccctgccgaggctgatgaggaacctcaggccgaaggtgagcctgaggaggacctggctgaggaagtcgacgatctcgaagccgcacgccagatcggccgcaaacgccgtcgggcgagtcacgaaccaagcacttcggaagataagctcttacccgatgctgaagagactcgtccctctaagaagagtcggacgaggcgtatacatcatagtccagcggtacagtcgcatccgaagcccatccaagagaagaagagacgctctcccaaaaggaaaggtgacggcgattctatccctgtcaccgtccagagatacactcgtccattgcgccgcgacgaagcagactcggacgaggatatcctcaatgccgatatcccgtacaccgatcacaagtctcctaatgttgttgatatagtcttgcaaatgtgcgaggagtctttcgacaagtatttgaatgcactccatgaggaagccaacctcgcacaagacaaggaatcaagaaaggaatttaggacgaagctacggactttggaggccttccaagaggaagttcgcatacgactacagacacacacaattgtgcttgataacctacgcacgctcaaaaagcgtgtgcgagcagcgcagaaggagagagtcacactccgccaggagatctcgcgcattcgtgccgagagggagcaggtcgccctcaagatggatgctatacgtaaccgtcatgaggcggcggctaaggaatcaattcatcaactaaatctatccacaagtatggataacatcgaattcgccattgaaaaaggcaaaacagcatcagatcttcctccgaaacaacagagggtagccgagctggggaatttagatctcttgattgcgcagatcgcagataaagtcagtatggtcggtgataagggaggtgcgcttaaacagatcagggacttcaatgcgtttcttgagcgtgctgccgttgcgctcgaggctgggggaaaatga

SEQ ID NO: 12992 - protein, 690 aa, Muscodor strobelii
  misc_feature: SGI Peptide ID NO. 564241
  misc_feature (457)..(687): NCBI GI: 85117726 Blast Desc: NCU03212 [Neurospora crassa OR74A] gi|28927119|gb|EAA36076.1| [Neurospora crassa OR74A]
  misc_feature (384)..(687): NCBI GI: 145615936 Blast Desc: MGG_03678 [Magnaporthe grisea 70-15] gi|145009727|gb|EDJ94383.1| MGG_03678 [Magnaporthe grisea 70-15]
  misc_feature (458)..(686): NCBI GI: 171695920 Blast Desc: protein product [Podospora anserina] gi|170948202|emb|CAP60366.1| protein product [Podospora anserina]
  misc_feature (380)..(686): NCBI GI: 256720654 Blast Desc: NECHADRAFT_50042 [Nectria haematococca mpVI 77-13-4]
  misc_feature (295)..(687): NCBI GI: 156057657 Blast Desc: SS1G_04560 [Sclerotinia sclerotiorum 1980] gi|154702345|gb|EDO02084.1| SS1G_04560 [Sclerotinia sclerotiorum 1980]
  misc_feature (503)..(686): NCBI GI: 261355273 Blast Desc: conserved [Verticillium albo-atrum VaMs.102]
  misc_feature (535)..(687): NCBI GI: 154308450 Blast Desc: BC1G_08285 [Botryotinia fuckeliana B05.10] gi|150852826|gb|EDN28018.1| BC1G_08285 [Botryotinia fuckeliana B05.10]
  misc_feature (495)..(687): NCBI GI: 238484883 Blast Desc: triadin, [Aspergillus flavus NRRL3357] gi|220701730|gb|EED58068.1| triadin, [Aspergillus flavus NRRL3357]
  misc_feature (456)..(686): NCBI GI: 154272059 Blast Desc: [Ajellomyces capsulatus NAm1] gi|150408869|gb|EDN04325.1| [Ajellomyces capsulatus NAm1]
  misc_feature (377)..(686): NCBI GI: 261187530 Blast Desc: AT hook domain-containing protein [Ajellomyces dermatitidis SLH14081] gi|239594169|gb|EEQ76750.1| AT hook domain-containing protein [Ajellomyces dermatitidis SLH14081]
MATSREERMQQRMRGAGRHEVADDSFDFVLPAAEPSSDQASDQASEPPAEPPSSSVAPPRAEPNSSAKRRRLDNEPDPLPTPRPAARRTSPRLSAANAAASRPGTESQSTSKISTTSATQDNPYDALDESSREDATQISPAIEETAAEAENEEADGADEAEEAEDEDTVLPDIPASTPGSASRNSAISRVSHDISTEYAEEVTESPVADPGSGRRRQIIPNNVGTQSARLQRIVMEAEAGTTGEITTSSPLVRKARLSEATGPPISTRTTRSAARRSLSSPIEGPHGSSPLAHQTGVSAASPTPVRPGVRRRAARPKRQSPLSTVVDEGDKLSSPPDAAGTGSPKKRRTRQPKARSVPESPDPAEADEEPQAEGEPEEDLAEEVDDLEAARQIGRKRRRASHEPSTSEDKLLPDAEETRPSKKSRTRRIHHSPAVQSHPKPIQEKKRRSPKRKGDGDSIPVTVQRYTRPLRRDEADSDEDILNADIPYTDHKSPNVVDIVLQMCEESFDKYLNALHEEANLAQDKESRKEFRTKLRTLEAFQEEVRIRLQTHTIVLDNLRTLKKRVRAAQKERVTLRQEISRIRAEREQVALKMDAIRNRHEAAAKESIHQLNLSTSMDNIEFAIEKGKTASDLPPKQQRVAELGNLDLLIAQIADKVSMVGDKGGALKQIRDFNAFLERAAVALEAGGK

SEQ ID NO: 12993 - DNA, 2964 bp, Muscodor strobelii
  misc_feature: SGI EST ID NO. CUFF.30964.0
  misc_feature: Variant of the nucleotide sequence at SEQ ID NO 12991
aggcagtgctgtggcttccaggttggtacagagacaagggcccctctatctacagcgcgacagccacatctctaagtgggatgcggtcgctaaggtctactaccttaagtaaggtaggtattgccgtcgcgtgtcgagacgcgttgacatcacccaatctatcgagtttgatatcagtccaccacacatccgcacagctgtgatacacagttccggtgatacgaacatgttgatcacggcttgtgcctgctgactgtcacttctacaccggtttcgccgccatggcgaccagccgcgaggagcgcatgcaacagcgcatgcgaggggctgggtatgtcaccacaatcgagcctgacgccttcaaattttgttaatgaccgtgtcatgataggcgccatgaagtcgccgatgactcgtttgacttcgttttgcctgccgcagagccctcctccgaccaagcctccgaccaggcctcagaaccacccgccgaaccgccatcatcctctgtcgccccgccacgagcagagcccaactcctcggctaagcgccgacggctagataatgagcccgaccctttgcccaccccgaggccggccgcaaggaggacatcgccacggcttagtgccgccaatgctgcagcatcccggcccggaacagagtcgcaatcaacgagcaagatatctacgacgagtgctacgcaagataacccttacgacgctttggacgagagctcacgagaggacgccacacaaatttccccagctatcgaggagacagcagctgaggcagagaatgaagaggcagacggggcagatgaggcagaagaggccgaggatgaagacactgtgttgcccgacatccccgcctccacgccgggatcagcatcacgaaactccgcaatctcacgcgtgtctcacgatatctcaactgagtatgccgaggaagtcaccgagagccccgttgccgaccccggaagcggcaggcgccggcagatcatacctaacaacgttggcacccagagcgccaggctgcagagaatcgtgatggaagccgaagctggcaccacgggcgaaatcaccacatcttcacctctggtacgcaaggcaaggcttagcgaggcaacagggcctccgatttccacgaggactactaggtcagcggcgagaagatcactatcgtcaccaattgaaggaccgcatggctcatctcccttggcgcaccagaccggcgtgagtgccgcctctccaacccctgttcggccaggcgtaagaaggcgtgccgcccgaccgaaacgtcagagtcctctcagcacagtcgtggacgaaggagataagctgtcctcgccaccagatgctgcaggcactggtagtcccaagaagcggaggacgaggcaacccaaggctcgatcagtgcctgagtccccagaccctgccgaggctgatgaggaacctcaggccgaaggtgagcctgaggaggacctggctgaggaagtcgacgatctcgaagccgcacgccagatcggccgcaaacgccgtcgggcgagtcacgaaccaagcacttcggaagataagctcttacccgatgctgaagagactcgtccctctaagaagagtcggacgaggcgtatacatcatagtccagcggtacagtcgcatccgaagcccatccaagagaagaagagacgctctcccaaaaggaaaggtgacggcgattctatccctgtcaccgtccagagatacactcgtccattgcgccgcgacgaagcagactcggacgaggatatcctcaatgccgatatcccgtacaccgatcacaagtctcctaatgttgttgatatagtcttgcaaatgtgcgaggagtctttcgacaagtatttgaatgcactccatgaggaagccaacctcgcacaagacaaggaatcaagaaaggaatttaggacgaagctacggactttggaggccttccaagaggaagttcgcatacgactacagacacacacaattgtgcttgataacctacgcacgctcaaaaagcgtgtgcgagcagcgcagaaggagagagtcacactccgccaggagatctcgcgcattcgtgccgagagggagcaggtcgccctcaagatggatgctatacgtaaccgtcatgaggcggcggctaaggaatcaattcatcaactaaatctatccacaagtatggataacatcgaattcgccattgaaaaaggcaaaacagcatcagatcttcctccgaaacaacagagggtagccgagctggggaatttagatctcttgattgcgcagatcgcagataaagtcagtatggtcggtgataagggaggtgcgcttaaacagatcagggacttcaatgcgtttcttgagcgtgctgccgttgcgctcgaggctgggggaaaatgagctgttgaccgttaaagattggcgggtccttgctattgagagtctgtgctacagagactcttttcatgcttgttgctactgtagatgatgattgaatgagtatacgacgattttatgacgagtggattgcaatcatcttgcgcttagctgtcctggagatggtgagccgtaggcaagattgtattccggggttgtggcagtgtcggcatccacagtttgccttgcgagatgctttttttagcatactatggaactacttaaagtacctaggtacctagccatttccactccgatgttagggcggcagatgctattctgatgttagtcctaggctagcgtcgctgccaatctctggccaatctcattcttctggcctgtgcttcgtagtggggtctcgggatgagacttggggggtggtgatggtgatattctccatgtgtcgtgatgttgactcgcgtttaacgatactgcaggattttaactgaatatcatgtgttacaattattgtatagccaactactgtagttgagaggagggtcggatgcgcacg

SEQ ID NO: 12994 - DNA, 717 bp, Muscodor strobelii
  misc_feature: SGI cDNA ID NO. 564242
  misc_feature: Elevated expression when VOC is produced
  misc_feature: Encodes the peptide sequence at SEQ ID NO 12995
atggcttcgaaatacgccaattaccaaccctacaagaagggtgtcgatattaccgcttgggtcctacagttcctcgtttgcattatcttgctcgctgtctcgattatcgcgcttgtcgctgtgaagtcgatagatgacggaaacgatgtttacgacgttgctgctacggccgctggtgtctctattgccatcatcgtaatttgcatcatcatcaacatcgtcgagatcgttttcatcgcgaagaagaagatgccaccagctctctacctgtcgctcgcttgcatcaagtttgtcatttggttgattgtcttcatcgtggaaatcttgggactcgccatcatcggcatcattctcgctctgatttgcgttgtcacatctggcgtacaactcggattcggcgcaaagtttgttcacacctggcgcaaggagaagcgaggcgaatattcgcaagctctcaaccccggccacattgagactggcaactacaacgctccccagaacaactacggtgttccccagcaaaccacaggctacaccgatgcccagtaccctcctcaagtccaccccggcgcgccctacaatcccggccagcagccgatctccgcgtaccagtctcccgcgcaacagcagggcatgtatcagccaccgcaggagtacaaatatcctcacgacccgagttcgtacgagctgtctaatcaccctgccatgaggcaataa

SEQ ID NO: 12995 - protein, 238 aa, Muscodor strobelii
  misc_feature: SGI Peptide ID NO. 564242
  misc_feature (6)..(208): NCBI GI: 85094978 Blast Desc: NCU06130 [Neurospora crassa OR74A] gi|28921450|gb|EAA30756.1| [Neurospora crassa OR74A]
  misc_feature (1)..(207): NCBI GI: 171679902 Blast Desc: protein product [Podospora anserina] gi|170939577|emb|CAP64804.1| protein product [Podospora anserina]
  misc_feature (148)..(234): NCBI GI: 193713944 Blast Desc: : similar to AGAP004367-PA [Acyrthosiphon pisum]
  misc_feature (9)..(206): NCBI GI: 261357677 Blast Desc: conserved [Verticillium albo-atrum VaMs.102]
  misc_feature (6)..(186): NCBI GI: 39976671 Blast Desc: MGG_06238 [Magnaporthe grisea 70-15] gi|145016369|gb|EDK00859.1| MGG_06238 [Magnaporthe grisea 70-15]
  misc_feature (8)..(182): NCBI GI: 154319808 Blast Desc: BC1G_02385 [Botryotinia fuckeliana B05.10] gi|150856043|gb|EDN31235.1| BC1G_02385 [Botryotinia fuckeliana B05.10]
  misc_feature: Useful for introducing or modulating the production of volatile compounds
MASKYANYQPYKKGVDITAWVLQFLVCIILLAVSIIALVAVKSIDDGNDVYDVAATAAGVSIAIIVICIIINIVEIVFIAKKKMPPALYLSLACIKFVIWLIVFIVEILGLAIIGIILALICVVTSGVQLGFGAKFVHTWRKEKRGEYSQALNPGHIETGNYNAPQNNYGVPQQTTGYTDAQYPPQVHPGAPYNPGQQPISAYQSPAQQQGMYQPPQEYKYPHDPSSYELSNHPAMRQ

SEQ ID NO: 12996 - DNA, 1346 bp, Muscodor strobelii
  misc_feature: SGI EST ID NO. CUFF.30922.0
  misc_feature: Variant of the nucleotide sequence at SEQ ID NO 12994
cgaccagccagccaaggctcaaaagaccaaaagtcctttaacgaaattgaggcagggtagtgtatggagaaaatagtgtttttttggctccgcctaactaaaagcgcgccaagagaggcctcaagggtcccgtcatcttggcacaccgcacacagccccccttgagggtatcgcgcgctagcttcagctaggtggattttttcgttcgcgctgggagcatgctccctattaaatgaagcgcgctacccctcgagctgaagaagagtatcttcagtcagtcttctgttcttgttgggaagtaagaaattggactgtcgtttccatcagcaatttcagaatcgcatcattccctatcgtcagtcgctaagcaacgattcgtccaacatggcttcgaaatacgccaattaccaaccctacaagaagggtgtcgatattaccgcttgggtcctacagttcctcgtttgcattatcttgctcgctgtctcgattatcgcgcttgtcgctgtgaagtcgatagatgacggaaacgatgtttacgacgttgctgctacggccgctggtgtctctattgccatcatcgtaatttgcatcatcatcaacatcgtcgagatcgttttcatcgcgaagaagaagatgccaccagctctctacctgtcgctcgcttgcatcaagtttgtcatttggttgattgtcttcatcgtggaaatcttgggactcgccatcatcggcatcattctcgctctgatttgcgttgtcacatctggcgtacaactcggattcggcgcaaagtttgttcacacctggcgcaaggagaagcgaggcgaatattcgcaagctctcaaccccggccacattgagactggcaactacaacgctccccagaacaactacggtgttccccagcaaaccacaggctacaccgatgcccagtaccctcctcaagtccaccccggcgcgccctacaatcccggccagcagccgatctccgcgtaccagtctcccgcgcaacagcagggcatgtatcagccaccgcaggagtacaaatatcctcacgacccgagttcgtacgagctgtctaatcaccctgccatgaggcaataatttcgatatcctgggaagcagttgggaatataatcacatacaaacatacatatcatgaggcatggaaaagtctactattgttatttctgcggattacggcgcattggagctggtgtggttttgcatgcggtatatacctacttagcattgaatttaatcatgatcattcaaacgttacacaatgctttgttgtcagacatcctttcctcattaagcacacacaaccttactggattgaattccag

SEQ ID NO: 12997 - DNA, 534 bp, Muscodor strobelii
  misc_feature: SGI cDNA ID NO. 564243
  misc_feature: Encodes the peptide sequence at SEQ ID NO 12998
atgtcgtccgctggaaagaagaccggcaagaagactggcaacgccaccagcagccccgctaagaagggcgcgtggacgcttgaggagcacctcaatctcgccatgatcgtcatccacaaggacaatcccgagctcgccatcaaggactggggaaaagtcgctgccgatgccactgcctacttgaagaaggacgtcaccgtgcccgctgccaaacagctgtgggcgaagatccgggacagctggcgcgagggcgctcctgacaactttgtcacggccgaacccgctgatggcgccaagggagccaccaagggcaaaaagaccaagggcgccaccggcaagcgcaagcgtgctcctgccgctgtcggcacatccgacgacaacgaagacagcaacaacagtgacgctgacgtgctcaccacttcccccaccaagaaggcgcgaaagggcaccgccaagaaggttgtcagggaggaggtcatcgaggaggctgagaatgaagactccggagagaaggaggattctggtgaggcttga

SEQ ID NO: 12998 - protein, 177 aa, Muscodor strobelii
  misc_feature: SGI Peptide ID NO. 564243
MSSAGKKTGKKTGNATSSPAKKGAWTLEEHLNLAMIVIHKDNPELAIKDWGKVAADATAYLKKDVTVPAAKQLWAKIRDSWREGAPDNFVTAEPADGAKGATKGKKTKGATGKRKRAPAAVGTSDDNEDSNNSDADVLTTSPTKKARKGTAKKVVREEVIEEAENEDSGEKEDSGEA

SEQ ID NO: 12999 - DNA, 1011 bp, Muscodor strobelii
  misc_feature: SGI cDNA ID NO. 564244
  misc_feature: Encodes the peptide sequence at SEQ ID NO 13000
atggctcctcgaggcaaaagaccccgattctacaggggcaagcttgcagagctctccccttccagaggcttcatctggaagaccgctatgaacagattcgccatgaccaatgccgagtgccgaacaatcatctacgcgatcccgagtgcccgcaagaattccgtctccaacaagaactgggttcacgtatgctatgaacagcttttcgagaatgcagttaagcgcatcgacgaagtcgagaagaacgatgatcctgctgctttcttctcctcacttctgcccgggactttatttggcgagagccccgacttcaccggagctctggctcacaaattctctctcgttatgatcgccgctcgagctcgtttcaagagcggtggcactgttggagaaggatgcctaagagaggatgatacgactcgtattgtcgacagctacacggacaagatgtggaccatgtacggtgacccctccaattcggaggagaagaggcgcaggtaccacgattatctcggtgtcctttttgggtctggaggtgaaggtgaagatgatcattccgatacgagtgaggaacccacgggcgactctacgggcaatgacatcgacggagatgccgagggcgacgtccacagtgatggcgcagacatcgataccactcacaacgattccatcgccaacagcagtagcgccgtagatgacaccgagaatactgcctccaagcacgatgtcaacgatgacgatgccctgaaggatgatgccgtcaatgctgagactgccaacacaccgtctctcaataacgatgacatcactgccatcaccgtgaaggatagcgaggacgatgtcgccaagggtgttatccccaacgatggtatcaacagcaatgacgccgtcacggatagctgtgaggacaatcttcccaaggacgataccggcaacgacaatgttattaagaatgatgctgtcaaggacgatgccgtcgacggtcctcaggagaatgtcgagaatgactaa

SEQ ID NO: 13000 - protein, 336 aa, Muscodor strobelii
  misc_feature: SGI Peptide ID NO. 564244
MAPRGKRPRFYRGKLAELSPSRGFIWKTAMNRFAMTNAECRTIIYAIPSARKNSVSNKNWVHVCYEQLFENAVKRIDEVEKNDDPAAFFSSLLPGTLFGESPDFTGALAHKFSLVMIAARARFKSGGTVGEGCLREDDTTRIVDSYTDKMWTMYGDPSNSEEKRRRYHDYLGVLFGSGGEGEDDHSDTSEEPTGDSTGNDIDGDAEGDVHSDGADIDTTHNDSIANSSSAVDDTENTASKHDVNDDDALKDDAVNAETANTPSLNNDDITAITVKDSEDDVAKGVIPNDGINSNDAVTDSCEDNLPKDDTGNDNVIKNDAVKDDAVDGPQENVEND

SEQ ID NO: 13001 - DNA, 1176 bp, Muscodor strobelii
  misc_feature: SGI cDNA ID NO. 564245
  misc_feature: Encodes the peptide sequence at SEQ ID NO 13002
atgtcgggaacagcttcgccgcggagcggtcgtccgctgacgtcgtcgtacgttgacttgatgaaacctgacgaggactggagaaatctacccgacgcagctgagcgaagaaaaatccaaaaccgtctagcccaaagagcttaccggcgtaacatgcgggacaggacgaaagaagtagaaaagctaaagaagcaacttcaacagttacaagacaccataaatacagattctacgacacccccgcccgaggcagaagcatcttcgggaggaaggagtccagctagctcaggacatacgccagcacctcctgtagaacacccatccaagatagaagatgcaccgcagcagatgagcgactatgtgcaagcatggccaaactctcacgggcctgaacagttaagtggtctcgggctcatgaccgacagagatacgccaatgacctttgatgcggctactgctttcttctcgcaaatgccgtctccaaacgatgtcgtcccggagctatcgccttcctccgtcctcggccgccgagcacgagctgttaccacaaccatggctccgggctcaataccacagcattctgggccctctaggagcaatagcattcccgccaccttctcctcgagctgctctagtcctctcccctgggtcaatgggagcgagggcccagaaggacttccaatttcaaatgccttcaatatttacagcaacgccgaagagctatccctgtaccaccctgaatctgtatattcattagaggatagtctggcagcatctactgcatatgctacgtctccaggttccgaattaaatagtccagctggttggtcgtcggtcgatagaaaatcgttaccgcgatctgccagcacctccctcccaacaggctacctttctagtatcaatgctgcggacgtccctgatttaccaaagtcagtgccagagacgacagcaccgttgctgcactttgctgtagcgggtggaaacaccgagactctccgattattacttcagcgctatgatgtcaacatcaacggccgcgataactccggctacactgcccttcaacgcgcagtgatgtgtggacgaaccgatatggctgccatgcttctcgagcgaggtgcagttgtcgacagggaagaaacctggacggctgaaaacgcaaagatcgaagcctaa

SEQ ID NO: 13002 - protein, 391 aa, Muscodor strobelii
  misc_feature: SGI Peptide ID NO. 564245
  misc_feature (349)..(381): Pfam Id: PF00023 Pfam Desc: Ankyrin repeat
  misc_feature (9)..(80): NCBI GI: 145236072 Blast Desc: protein product [Aspergillus niger] gi|134075134|emb|CAK39144.1| protein product [Aspergillus niger]
  misc_feature (8)..(70): NCBI GI: 169621773 Blast Desc: SNOG_14099 [Phaeosphaeria nodorum SN15] gi|111057216|gb|EAT78336.1| SNOG_14099 [Phaeosphaeria nodorum SN15]
  misc_feature (16)..(56): NCBI GI: 145614787 Blast Desc: [Magnaporthe grisea 70-15] gi|145021723|gb|EDK05800.1| [Magnaporthe grisea 70-15]
  misc_feature (16)..(56): NCBI GI: 149209313 Blast Desc: MGCH7_ch7g149 [Magnaporthe grisea 70-15] gi|86196104|gb|EAQ70742.1| MGCH7_ch7g149 [Magnaporthe grisea 70-15]
  misc_feature (313)..(374): NCBI GI: 145236072 Blast Desc: protein product [Aspergillus niger] gi|134075134|emb|CAK39144.1| protein product [Aspergillus niger]
  misc_feature (314)..(374): NCBI GI: 145614787 Blast Desc: [Magnaporthe grisea 70-15] gi|145021723|gb|EDK05800.1| [Magnaporthe grisea 70-15]
  misc_feature (313)..(375): NCBI GI: 169621773 Blast Desc: SNOG_14099 [Phaeosphaeria nodorum SN15] gi|111057216|gb|EAT78336.1| SNOG_14099 [Phaeosphaeria nodorum SN15]
  misc_feature (23)..(104): NCBI GI: 171682334 Blast Desc: protein product [Podospora anserina] gi|170941126|emb|CAP66776.1| protein product [Podospora anserina]
  misc_feature (9)..(61): NCBI GI: 164426722 Blast Desc: NCU04058 [Neurospora crassa OR74A] gi|157071448|gb|EAA28437.2| NCU04058 [Neurospora crassa OR74A]
  misc_feature (4)..(99): NCBI GI: 145256491 Blast Desc: An04g00480 [Aspergillus niger] gi|134058314|emb|CAK38504.1| protein product [Aspergillus niger]
MSGTASPRSGRPLTSSYVDLMKPDEDWRNLPDAAERRKIQNRLAQRAYRRNMRDRTKEVEKLKKQLQQLQDTINTDSTTPPPEAEASSGGRSPASSGHTPAPPVEHPSKIEDAPQQMSDYVQAWPNSHGPEQLSGLGLMTDRDTPMTFDAATAFFSQMPSPNDVVPELSPSSVLGRRARAVTTTMAPGSIPQHSGPSRSNSIPATFSSSCSSPLPWVNGSEGPEGLPISNAFNIYSNAEELSLYHPESVYSLEDSLAASTAYATSPGSELNSPAGWSSVDRKSLPRSASTSLPTGYLSSINAADVPDLPKSVPETTAPLLHFAVAGGNTETLRLLLQRYDVNINGRDNSGYTALQRAVMCGRTDMAAMLLERGAVVDREETWTAENAKIEA

SEQ ID NO: 13003 - DNA, 2554 bp, Muscodor strobelii
  misc_feature: SGI EST ID NO. CUFF.30956.0
  misc_feature: Variant of the nucleotide sequence at SEQ ID NO 13001
ttcggtctccgacattctaccaacgtatccaaaaacatgtggaggaattgcctctctgcataagtgcgatatgagaagtgcttgttgttttcatagtacctcctcttattattattagaaagcagcgccgtcggcgagcagcgattggcaactccaatttccttaccaggccatcaaataatagactgcgattcctgggatgcactacccaggctcgcaaggaggctatctagtactaggatgccggggatttcgtgatgcgatttaaacggccagcggtcgacgatcgctcgtgcctcttgctgtgtcgagtgtttcctcccacgtttcccagtctgagattgacactcgaggaacggaggctctgtccagatgggaaacctcccagcgacaggcctatctgcaaacagatgggaccaagcgcccgaaggagctcggggtaacactaggattgcctaccttagttaccctattactcggacacgacaatttttggctccctgcactttatgtagctggttgtaggaggtcgtttcattgtggctagacgtgttgcattacaacaagtaccctcctctacccgcgaaggatcttcacactgtatgtaggtattgtacctgtgcagtatgggtccccaattgacatccatcctaatgcttgctcgttgaggaccacgagaaaccgaaccgccaccataattatctatatacataaggtgtcgaccctggcgtccaagtcatcaatacattcgtgtgccctcttacctcctcttgttcttctctcggcctgtgaccttagagcaacaagacgacatacctatcaccaattcctcacatacttgtacaatcatcaacaccagtagcatgtcgggaacagcttcgccgcggagcggtcgtccgctgacgtcgtcgtacgttgacttgatgaaacctgacgaggactggagaaatctacccgacgcagctgagcgaagaaaaatccaaaaccgtctagcccaaagagcttaccggcgtaacatgcgggacaggacgaaagaagtagaaaagctaaagaagcaacttcaacagttacaagacaccataaatacagattctacgacacccccgcccgaggcagaagcatcttcgggaggaaggagtccagctagctcaggacatacgccagcacctcctgtagaacacccatccaagatagaagatgcaccgcagcagatgagcgactatgtgcaagcatggccaaactctcacgggcctgaacagttaagtggtctcgggctcatgaccgacagagatacgccaatgacctttgatgcggctactgctttcttctcgcaaatgccgtctccaaacgatgtcgtcccggagctatcgccttcctccgtcctcggccgccgagcacgagctgttaccacaaccatggctccgggctcaataccacagcattctgggccctctaggagcaatagcattcccgccaccttctcctcgagctgctctagtcctctcccctgggtcaatgggagcgagggcccagaaggacttccaatttcaaatgccttcaatatttacagcaacgccgaagagctatccctgtaccaccctgaatctgtatattcattagaggatagtctggcagcatctactgcatatgctacgtctccaggttccgaattaaatagtccagctggttggtcgtcggtcgatagaaaatcgttaccgcgatctgccagcacctccctcccaacaggctacctttctagtatcaatgctgcggacgtccctgatttaccaaagtcagtgccagagacgacagcaccgttgctgcactttgctgtagcgggtggaaacaccgagactctccgattattacttcagcgctatgatgtcaacatcaacggccgcgataactccggctacactgcccttcaacgcgcagtgatgtgtggacgaaccgatatggctgccatgcttctcgagcgaggtgcagttgtcgacagggaagaaacctggacggctgaaaacgcaaagatcgaagcctaatttacccaacaccaattattcctttgtctcaattctcgcgagggtgtcatctattgattacggtctcctttgttacgggctaggcaacgggcgttcacatgcaggtgtaagggtattcccagggtcacagggctggaacgagctctatcgagtattgtatgtggaatggtcacacggcgctctgggcgtagggataagaggcaggtttgcctaatcaagctcaaaaagatgagttgccggccggatcgcagaaggattgcgaactacatcggccactacacacacacatacacacactagagagaaccgttttctactatgcatactcacgatcacgagtaaaaacacgaccaaagcatatttgctgctgtattgtatctcaaaatcatacacagagaatgaatacccaatacaaagatgattgaatgacatactaaatctgcatgaacaatcgtgatggagctcctgagatgccagacctaaaaatcggaagcttcaaggtacccctccaaagc

SEQ ID NO: 13004 - DNA, 1599 bp, Muscodor strobelii
  misc_feature: SGI cDNA ID NO. 564246
  misc_feature: Encodes the peptide sequence at SEQ ID NO 13005
atgcacatctaccgatcgggggagatcactatccccacagaccaaaacttgacggagctgttgcactcatcagcacgtccagacctcccagaatcgcatttgatatctaaagacaatttgacaaaccgtagcattacattaggtaggctacgggataatgctggtagaatcgcaaaagggtttcagctaaagctcaagcctgcggaccaagcccgatgggccatcatcctgccaaatagtgtcgatttcctggagcttgtacacgcgattctttggactggaggtgttgtctgtcccatcaattatgctctcaaatcttccgaaataggacacggtctctcggtggcgcgtcctgactttattgtttcgtacggccaaaccataaccgtcgtgcaagacgccgtgaggattgctagcaagttattggtcaaccagggcacgacttggagagaacctcaagtaatcacaattcttaaccgggtaccagggcatctccatatcccggatgacttttgtgcctctaagcgtctacctatcccacactatagtgacacgcggaagcggcttgcaactatacacttgtcgtctggcactacaggaaacccgaagggcgtcgagttaacgcactataactttgtagcaaattgctatcagctgttcgcacgggatccaaaggcattttcaccagatagccgcgtagtagcgttcacgccatggacacatatcgggaatacgaccatgccactcttccttggaccatggactgggatgatgcaccacgccatgccgacatacaacttcgaagaatacgtaaaattagttgggtcaaataaggcaaccagctttcaaggcgttcccagtgtcgtacttcagctcgccaactccgatgccacctcacgctatgacttctctcaggcagtggtcgttaatgttggcggcatattgaaacaggagcttcagcaacgtttcctcagcagggctccttggaagctcaatcaagtatatggtatgacggaagctgctggatatgtcgcataccaggctatagatgaaaaactgcccaacggcatcaccggcagattactcccgaatatcgaggcgtgccttaggaaagaggggacgctggaagacgcgccgaaagggggccctggcgagctatggattcgaggtcctaatataacacatggctacgccttcaatgaagaggcgaacaagaagggcttctcacagggttggtataacaccggggacgtctgcaccatcgacagtacaggaacgatcagcgttgtgggaagaaccaaggacttaatcaagtacaagggctttcaggtctcgccaacagagcttgagggttacctcaatactcatcctcatgtcgtcgagggcggagtggccgcgctctgggacgagagtcaactcacggagcttccaagtgcttgggtcattctcaaaagccacttcgcaactgccgagcagcaaaaaaagctctccaggaaattcatcaggctgttgataaagaagttagcggctataagaagctcagaggtggcgtatggcagatcgctaaattacctaagaatccgacgggcaaaattttga

SEQ ID NO: 13005 - protein, 532 aa, Muscodor strobelii
  misc_feature: SGI Peptide ID NO. 564246
  misc_feature (46)..(464): Pfam Id: PF00501 Pfam Desc: AMP-binding enzyme
  misc_feature (1)..(498): NCBI GI: 261354671 Blast Desc: 4-coumarate-CoA ligase [Verticillium albo-atrum VaMs.102]
  misc_feature (11)..(496): NCBI GI: 212533901 Blast Desc: AMP dependent CoA ligase, [Penicillium marneffei ATCC 18224] gi|210072471|gb|EEA26560.1| AMP dependent CoA ligase, [Penicillium marneffei ATCC 18224]
  misc_feature (1)..(494): NCBI GI: 238845716 Blast Desc: acyl-CoA synthetases/AMP-acid ligases II [Microsporum canis CBS 113480]
  misc_feature (29)..(436): NCBI GI: 115399168 Blast Desc: [Aspergillus terreus NIH2624] gi|114192056|gb|EAU33756.1| [Aspergillus terreus NIH2624]
  misc_feature (33)..(502): NCBI GI: 115388765 Blast Desc: ATEG_02710 [Aspergillus terreus NIH2624] gi|114195972|gb|EAU37672.1| ATEG_02710 [Aspergillus terreus NIH2624]
  misc_feature (8)..(486): NCBI GI: 212541170 Blast Desc: AMP dependent CoA ligase, [Penicillium marneffei ATCC 18224] gi|210068039|gb|EEA22131.1| AMP dependent CoA ligase, [Penicillium marneffei ATCC 18224]
  misc_feature (2)..(509): NCBI GI: 71005304 Blast Desc: UM01171.1 [Ustilago maydis 521] gi|46096722|gb|EAK81955.1| UM01171.1 [Ustilago maydis 521]
  misc_feature (9)..(498): NCBI GI: 145252556 Blast Desc: An16g04830 [Aspergillus niger] gi|134083343|emb|CAK42910.1| protein product [Aspergillus niger]
  misc_feature (1)..(500): NCBI GI: 110679158 Blast Desc: 4-coumarate [Roseobacter denitrificans OCh 114] gi|109455274|gb|ABG31479.1| 4-coumarate [Roseobacter denitrificans OCh 114]
  misc_feature (16)..(510): NCBI GI: 154314383 Blast Desc: BC1G_05285 [Botryotinia fuckeliana B05.10] gi|150848930|gb|EDN24123.1| BC1G_05285 [Botryotinia fuckeliana B05.10]
  misc_feature (27)..(493): SWISSPROT Homolog: EC 6.2.1.12 4-coumarate--CoA ligase
MHIYRSGEITIPTDQNLTELLHSSARPDLPESHLISKDNLTNRSITLGRLRDNAGRIAKGFQLKLKPADQARWAIILPNSVDFLELVHAILWTGGVVCPINYALKSSEIGHGLSVARPDFIVSYGQTITVVQDAVRIASKLLVNQGTTWREPQVITILNRVPGHLHIPDDFCASKRLPIPHYSDTRKRLATIHLSSGTTGNPKGVELTHYNFVANCYQLFARDPKAFSPDSRVVAFTPWTHIGNTTMPLFLGPWTGMMHHAMPTYNFEEYVKLVGSNKATSFQGVPSVVLQLANSDATSRYDFSQAVVVNVGGILKQELQQRFLSRAPWKLNQVYGMTEAAGYVAYQAIDEKLPNGITGRLLPNIEACLRKEGTLEDAPKGGPGELWIRGPNITHGYAFNEEANKKGFSQGWYNTGDVCTIDSTGTISVVGRTKDLIKYKGFQVSPTELEGYLNTHPHVVEGGVAALWDESQLTELPSAWVILKSHFATAEQQKKLSRKFIRLLIKKLAAIRSSEVAYGRSLNYLRIRRAKF

SEQ ID NO: 13006 - DNA, 1971 bp, Muscodor strobelii
  misc_feature: SGI EST ID NO. CUFF.30976.0
  misc_feature: Variant of the nucleotide sequence at SEQ ID NO 13004
tctagccgtacattgcgccaaacaggcaattagcttgtagtatctaccatagtgcggatctgataatttccagggtcccaaaacttagaacctttttcttcatggcacaattcagcctttgactttgatagaagtcacttcgcattgctcacttcgtttactagttcgatctgtacactgcattcataatgcacatctaccgatcgggggagatcactatccccacagaccaaaacttgacggagctgttgcactcatcagcacgtccagacctcccagaatcgcatttgatatctaaagacaatttgacaaaccgtagcattacattaggtaggctacgggataatgctggtagaatcgcaaaagggtttcagctaaagctcaagcctgcggaccaagcccgatgggccatcatcctgccaaatagtgtcgatttcctggagcttgtacacgcgattctttggactggaggtgttgtctgtcccatcaattatgctctcaaatcttccgaaataggacacggtctctcggtggcgcgtcctgactttattgtttcgtacggccaaaccataaccgtcgtgcaagacgccgtgaggattgctagcaagttattggtcaaccagggcacgacttggagagaacctcaagtaatcacaattcttaaccgggtaccagggcatctccatatcccggatgacttttgtgcctctaagcgtctacctatcccacactatagtgacacgcggaagcggcttgcaactatacacttgtcgtctggcactacaggaaacccgaagggcgtcgagttaacgcactataactttgtagcaaattgctatcagctgttcgcacgggatccaaaggcattttcaccagatagccgcgtagtagcgttcacgccatggacacatatcgggaatacgaccatgccactcttccttggaccatggactgggatgatgcaccacgccatgccgacatacaacttcgaagaatacgtaaaattagttgggtcaaataaggcaaccagctttcaaggcgttcccagtgtcgtacttcagctcgccaactccgatgccacctcacgctatgacttctctcaggcagtggtcgttaatgttggcggcatattgaaacaggagcttcagcaacgtttcctcagcagggctccttggaagctcaatcaagtatatggtatgacggaagctgctggatatgtcgcataccaggctatagatgaaaaactgcccaacggcatcaccggcagattactcccgaatatcgaggcgtgccttaggaaagaggggacgctggaagacgcgccgaaagggggccctggcgagctatggattcgaggtcctaatataacacatggctacgccttcaatgaagaggcgaacaagaagggcttctcacagggttggtataacaccggggacgtctgcaccatcgacagtacaggaacgatcagcgttgtgggaagaaccaaggacttaatcaagtacaagggctttcaggtctcgccaacagagcttgagggttacctcaatactcatcctcatgtcgtcgagggcggagtggccgcgctctgggacgagagtcaactcacggagcttccaagtgcttgggtcattctcaaaagccacttcgcaactgccgagcagcaaaaaaagctctccaggaaattcatcaggctgttgataaagaagttagcggctataagaagctcagaggtggcgtatggcagatcgctaaattacctaagaatccgacgggcaaaattttgaggaaacaacttgttgagatgagggatggactgtgttcgctcgacaacgcgccgaaggcaaagttgtagattattcaaacgcaattttagcgcttgggatatgttttctattacttcctcctcgaggtgcttattgataccccaagccagttgctacctcttgcttaatatagcctgcttcctat

SEQ ID NO: 13007 - DNA, 834 bp, Muscodor strobelii
  misc_feature: SGI cDNA ID NO. 564247
  misc_feature: Reduced expression when VOC is produced
  misc_feature: Encodes the peptide sequence at SEQ ID NO 13008
atggaaactcctacagagaccgctccaccacctacacctactttcctgaagctatctttcccggcgccgcgggtgcttctagtacggatggaccgaccaaaagacctcaatgcaatgtcaacgaaaggacaatgggaaatggattcagtgtggaagtggttcgatttagagccccggttaagtgttgctgtcattacgggcaccgggagagcattctcagcaggcgccgatcttaaggagtggaataggtcgatgggcgaggacgtggaccccaaggaccgcatgggaaatgcgccagcattcaagcctttgagtcgccggcttgggaagaaacctgtgatagccgctgttaacgggttggccatgggtggtggttgcgaatttatcgtgaactgcgatctcgtgatcgcagcggatgacgcctacttcggtctcccggaggtgaagcggggtgtggcagcaattggaggagctctgccgcggctgatccggactattggtttacagcgggcgtccgagtttgcgctcacggcacggaatgccacagcacaggagatgtaccaatggggtgtagttaataagatcgtacccaaagaacaggtcgtggacgaagctgtcaagtacgccgagatgatcgcaaagaacagccctgacgccattatatgcacacgtgcagcaatacggcaaggttgggagacggccagcgtggaacgggctgtcgaatggactcttgagaaggaatttgccgagcttcagcgcggcgagaatatacttgagggcctcgcggcctttacggaaaagagggagcctcgatggaaggccagcaagctatag

SEQ ID NO: 13008 - protein, 277 aa, Muscodor strobelii
  misc_feature: SGI Peptide ID NO. 564247
  misc_feature (26)..(197): Pfam Id: PF00378 Pfam Desc: Enoyl-CoA hydratase/isomerase family
  misc_feature (5)..(277): NCBI GI: 261354675 Blast Desc: carnitinyl-CoA dehydratase [Verticillium albo-atrum VaMs.102]
  misc_feature (8)..(277): NCBI GI: 67539608 Blast Desc: AN5974.2 [Aspergillus nidulans FGSC A4] gi|40738533|gb|EAA57723.1| AN5974.2 [Aspergillus nidulans FGSC A4]
  misc_feature (8)..(277): NCBI GI: 259479844 Blast Desc: TPA: enoyl-CoA hydratase (AFU_orthologue; AFUA_2G10650) [Aspergillus nidulans FGSC A4]
  misc_feature (7)..(277): NCBI GI: 119481027 Blast Desc: enoyl-CoA hydratase [Neosartorya fischeri NRRL 181] gi|119408696|gb|EAW18645.1| enoyl-CoA hydratase [Neosartorya fischeri NRRL 181]
  misc_feature (5)..(277): NCBI GI: 238493245 Blast Desc: enoyl-CoA hydratase [Aspergillus flavus NRRL3357] gi|220696353|gb|EED52695.1| enoyl-CoA hydratase [Aspergillus flavus NRRL3357]
  misc_feature (5)..(272): NCBI GI: 169783452 Blast Desc: [Aspergillus oryzae RIB40] gi|83774932|dbj|BAE65055.1| protein product [Aspergillus oryzae]
  misc_feature (5)..(277): NCBI GI: 121715502 Blast Desc: enoyl-CoA hydratase [Aspergillus clavatus NRRL 1] gi|119403517|gb|EAW13934.1| enoyl-CoA hydratase [Aspergillus clavatus NRRL 1]
  misc_feature (9)..(277): NCBI GI: 115384654 Blast Desc: conserved [Aspergillus terreus NIH2624] gi|114196566|gb|EAU38266.1| conserved [Aspergillus terreus NIH2624]
  misc_feature (10)..(277): NCBI GI: 71001434 Blast Desc: enoyl-CoA hydratase [Aspergillus fumigatus Af293] gi|66853036|gb|EAL93360.1| enoyl-CoA hydratase [Aspergillus fumigatus Af293] gi|159129470|gb|EDP54584.1| enoyl-CoA hydratase
  misc_feature (5)..(277): NCBI GI: 46122989 Blast Desc: FG05872.1 [Gibberella zeae PH-1]
  misc_feature (24)..(273): SWISSPROT Homolog: EC 4.2.1.17 Enoyl-CoA hydratase
  misc_feature: Useful for introducing or modulating the production of volatile compounds
METPTETAPPPTPTFLKLSFPAPRVLLVRMDRPKDLNAMSTKGQWEMDSVWKWFDLEPRLSVAVITGTGRAFSAGADLKEWNRSMGEDVDPKDRMGNAPAFKPLSRRLGKKPVIAAVNGLAMGGGCEFIVNCDLVIAADDAYFGLPEVKRGVAAIGGALPRLIRTIGLQRASEFALTARNATAQEMYQWGVVNKIVPKEQVVDEAVKYAEMIAKNSPDAIICTRAAIRQGWETASVERAVEWTLEKEFAELQRGENILEGLAAFTEKREPRWKASKL

SEQ ID NO: 13009 - DNA, 2725 bp, Muscodor strobelii
  misc_feature: SGI EST ID NO. CUFF.30988.0
  misc_feature: Variant of the nucleotide sequence at SEQ ID NO 13007
gttcgcctcatcaatttccaattgtgttgccatttctagaagaatggatgagaggcattctttattgctcgtatcacgactccgaatgctgaatatttccggccaagtccactactgcttgtcagtgggttagtgccgaaatacgtccatatggaccccctgtcgaagcctgtctgttggctagcgagctgctccctcggctgctccctggtcgtcgcgatttacttacttcctgagccctggaccctgctgccgggaacttcttgcgcatgcaacttcaccttcagcagaactaacccgtctctagtgttaacggattgcgcgaatccgattctgcacaggacagccccgcggccccgccacctgctatccattggtggtgagcccctgagcagaaggcctggcatgcatggagggctttcgttcgactgccagatgccctgccgagctgcagtacaacacatggcagcacgatgatcttcggctggaaggttaatttttgaccgcggtaaaacgtgcgcaacgaactattgtatgcattgcgacgcctcgttgaagttaaaggcgaacgtggcaataccgtggcttacttatgcttcatctacatgaatatcttcacttgtatcatacccttacaagcaaacacgcacacaccaccatatcaccattagctttggaagtcaagatggaaactcctacagagaccgctccaccacctacacctactttcctgaagctatctttcccggcgccgcgggtgcttctagtacggatggaccgaccaaaagacctcaatgcaatgtcaacgaaaggacaatgggaaatggattcagtgtggaagtggttcgatttagagccccggttaagtgttgctgtcattacgggcaccgggagagcattctcagcaggcgccgatcttaaggagtggaataggtcgatgggcgaggacgtggaccccaaggaccgcatgggaaatgcgccagcattcaagcctttgagtcgccggcttgggaagaaacctgtgatagccgctgttaacgggttggccatgggtggtggttgcgaatttatcgtgaactgcgatctcgtgatcgcagcggatgacgcctacttcggtctcccggaggtgaagcggggtgtggcagcaattggaggagctctgccgcggctgatccggactattggtttacagcgggcgtccgagtttgcgctcacggcacggaatgccacagcacaggagatgtaccaatggggtgtagttaataagatcgtacccaaagaacaggtcgtggacgaagctgtcaagtacgccgagatgatcgcaaagaacagccctgacgccattatatgcacacgtgcagcaatacggcaaggttgggagacggccagcgtggaacgggctgtcgaatggactcttgagaaggaatttgccgagcttcagcgcggcgagaatatacttgagggcctcgcggcctttacggaaaagagggagcctcgatggaaggccagcaagctatagtctcaactagcgagtctacttgagtacagctctgcatggtaataatatacctgatacgtagtatacgtggcattcgctgttctgtcgcataattgtctaataactcaataatacgttagaacttaacttagccatctttcaaagtctacacaaatgctttcttctcctgcaactaggtagctaccattgctcatttctgtgattcgacgtagcttcgttttcaacatttcacactattactgtgcttttagttcaaatgggttgatatcggtcttggtttgtaaatattgatggcccgagaacacagacctcgtttgagcaagcatgattgagacaacctggaatctagattctttgagtctgatgcaaagtactagggatgaggttcttgtgcataatgcgtagctagccttcggtgccccctacatcgcttttcgagacggttcgccggtcatactaatgattgcttgcgacggcaggcataatttactcgtacgagagtatgtttcgagactgtaccctcgctcgtgcatgataaagctccgaaactaacaccgagtatttgggatgaattaatgaatgtaatatgctcgacggccaaggatgttgaatagaccccttccctcactgctcacggtcattcgtccgcaggagcaggcggcgagtcatgggtatcgcatcgcatgctgctgatcagccgaatcgccccatattggggtaaaggatgactgccgatgttagctagactacgccgccaacctttttccgggcgaggtttgattgcactagacgctggatgtcgaagaccatgcctacctatctgtagatttcggggacctttcgtcagcgctagaatactacataacacgagtattgctgtatcagatctttctgtcaccaggtttcacgtgttacgtagcagcaagatgcaatttggcaggcacatgaattcgtctcaatgcgttgcaaagggtccatcagtcgccttggtcggcattgggtctctattctcgacactattactgctatcagtaggtagttgcgtattctggtgagggggagatctctacaatcgccacccccgacggcagtggtattccagttttgcgtgctttgagtctgcacgttggtccacagaatgcattcggatgcaacttgtacagcacccggccggcgttcccaccaccatcgagcttgccgagctgc

SEQ ID NO: 13010 - DNA, 1773 bp, Muscodor strobelii
  misc_feature: SGI cDNA ID NO. 564248
  misc_feature: Encodes the peptide sequence at SEQ ID NO 13011
atggcgaccgcaacacctttcgaccatgagaagggatctcaagactccggtagaatttcgacccccgtccactacgatgacgacaggagcgacgcgatgtctgtccgcgaggaggccctgggaagggaccttcctgatggctatttctactctgtgggattcataggcaatgttgtcgccttctgtctctcgtccatatctgcttacatcttcttgctattcccaactaccatcctctccttcatcaatgcagatatcggacctagcccatatctctcctgggtcaacgttggtcggacattgggcctgtcattcacttacacagttcttggacgtctttccgatctttttggacgacgttggttcttcattggtggcaacattatcgctctcattggcatcatagtctgctctacagctcaaaacatcaatgctttgatcattggcagcactatctacggtatcggcgagactacacagttaagcttcaacgttgccattggcgaattggtcccaaacaagcaccgtcccgtcgttttgtcattcattttcgccaccagtgcccctattgccggattaggttcgatcttctctcgctacatctaccagaaccccaatctaggatggcgatggacctaccatctcaacaccatcgtcacgggtgtggctattgtcctcatgtttatcttctatcacccaccgacgttcgatctccttcatgagcggaagtcaaagacacagattttgaagtcactggactatgttggaactttcctctggattgcaggactgacgatctttctgatcggcatcagcgttggtggcacaatttatccatggaagtcagctgcaactatatccactattgtcatcggtgcgcttctccttatcgtcttgttcgtctacgaaacctacgcgaagctcgaatatcctgccattcccgtgaagttcttccgcaaccgcggtttcatcagtctcgttgcctgcgccactgtcgcgaccatgttctattattccgctgttcttctatggcctcagcaaatcggacaaatgtacactagtgacgttatttatggtggctggttgtcggctaccgtcggcagctccacggccatcggtcaaattgtcgccggtcttctattgaagtttggcatcaactcgcgttacttcttgattttctccacattcgccatggttggaattgttggctcactcgcagcactgacccctgacactctcaatactggaatcgctctcactctcgtcggacctttcttcactggtgtgattgagctgacatccctcgcgctcgcacctctgttttgcaagcccgaagacattgggctagcatcgggattgctcgcctcaattcgttccgctggtggctccattgctgtcactgtatactctgccattctacttaaccgcaaggcgagcacaattcctgcagccgtgattcctgctgtcaccgctgctggcttgcccgaaagcgaaattgccagctacgtcaaagctgtcattgctggcacctacatcaaattgccgaatatttccgccgatgtattggcagcaaccaaggctgttctgcctggtgcttactcacaagccttccaaacagtctatttggccagttttggtttcggcggtattgcactcattggttgtctctacgccaaggatgcgcgtcagtacttaaatgacacagtggaccgtaaaatgcacggtgccactgtaggggagaagaagaccaatcaagaaacagaaaacatttga

SEQ ID NO: 13011 - protein, 590 aa, Muscodor strobelii
  misc_feature: SGI Peptide ID NO. 564248
  misc_feature (61)..(466): Pfam Id: PF07690 Pfam Desc: Major Facilitator Superfamily
  misc_feature (4)..(589): Pfam Id: PF06609 Pfam Desc: Fungal trichothecene efflux pump (TRI12)
  misc_feature (61)..(234): Pfam Id: PF07690 Pfam Desc: Major Facilitator Superfamily
  misc_feature (43)..(569): Pfam Id: PF06609 Pfam Desc: Fungal trichothecene efflux pump (TRI12)
  misc_feature (56)..(590): NCBI GI: 261354676 Blast Desc: trichothecene efflux pump [Verticillium albo-atrum VaMs.102]
  misc_feature (13)..(585): NCBI GI: 189208644 Blast Desc: trichothecene efflux pump [Pyrenophora tritici-repentis Pt-1C-BFP] gi|187976748|gb|EDU43374.1| trichothecene efflux pump [Pyrenophora tritici-repentis
  misc_feature (32)..(586): NCBI GI: 242771562 Blast Desc: siderophore iron transporter, [Talaromyces stipitatus ATCC 10500] gi|218721486|gb|EED20904.1| siderophore iron transporter, [Talaromyces stipitatus ATCC 10500]
  misc_feature (23)..(525): NCBI GI: 169614029 Blast Desc: SNOG_10149 [Phaeosphaeria nodorum SN15] gi|160707263|gb|EAT82484.2| SNOG_10149 [Phaeosphaeria nodorum SN15]
  misc_feature (9)..(574): NCBI GI: 261361349 Blast Desc: conserved [Verticillium albo-atrum VaMs.102]
  misc_feature (8)..(590): NCBI GI: 169595438 Blast Desc: SNOG_00458 [Phaeosphaeria nodorum SN15] gi|160701097|gb|EAT91953.2| SNOG_00458 [Phaeosphaeria nodorum SN15]
  misc_feature (28)..(589): NCBI GI: 145241974 Blast Desc: An09g03170 [Aspergillus niger] gi|134078176|emb|CAK40256.1| protein product [Aspergillus niger]
  misc_feature (24)..(590): NCBI GI: 255944063 Blast Desc: Pc20g02450 [Penicillium chrysogenum Wisconsin 54-1255] gi|211587534|emb|CAP85574.1| Pc20g02450 [Penicillium chrysogenum Wisconsin 54-1255]
  misc_feature (67)..(572): NCBI GI: 189192566 Blast Desc: conserved [Pyrenophora tritici-repentis Pt-1C-BFP] gi|187974228|gb|EDU41727.1| conserved [Pyrenophora tritici-repentis Pt-1C-BFP]
  misc_feature (1)..(574): NCBI GI: 169595380 Blast Desc: SNOG_00428 [Phaeosphaeria nodorum SN15] gi|160701085|gb|EAT91923.2| SNOG_00428 [Phaeosphaeria nodorum SN15]
MATATPFDHEKGSQDSGRISTPVHYDDDRSDAMSVREEALGRDLPDGYFYSVGFIGNVVAFCLSSISAYIFLLFPTTILSFINADIGPSPYLSWVNVGRTLGLSFTYTVLGRLSDLFGRRWFFIGGNIIALIGIIVCSTAQNINALIIGSTIYGIGETTQLSFNVAIGELVPNKHRPVVLSFIFATSAPIAGLGSIFSRYIYQNPNLGWRWTYHLNTIVTGVAIVLMFIFYHPPTFDLLHERKSKTQILKSLDYVGTFLWIAGLTIFLIGISVGGTIYPWKSAATISTIVIGALLLIVLFVYETYAKLEYPAIPVKFFRNRGFISLVACATVATMFYYSAVLLWPQQIGQMYTSDVIYGGWLSATVGSSTAIGQIVAGLLLKFGINSRYFLIFSTFAMVGIVGSLAALTPDTLNTGIALTLVGPFFTGVIELTSLALAPLFCKPEDIGLASGLLASIRSAGGSIAVTVYSAILLNRKASTIPAAVIPAVTAAGLPESEIASYVKAVIAGTYIKLPNISADVLAATKAVLPGAYSQAFQTVYLASFGFGGIALIGCLYAKDARQYLNDTVDRKMHGATVGEKKTNQETENI

SEQ ID NO: 13012 - DNA, 2321 bp, Muscodor strobelii
  misc_feature: SGI EST ID NO. CUFF.30997.0
  misc_feature: Variant of the nucleotide sequence at SEQ ID NO 13010
cgtaaacccaagaaccaggatcagcataacgcaacgcagcaataatgcacgacacacagccgggaccattgctcgcagtctattccatataaataagaaccagccgatcacttccctgactgtgatcttacacgtgtgggcaacgaggcacaaaagaaattgggtttccccttcgcattctctagtttacccttctgttctgttgaggattgagcgttgagcgtttggtcaaatttccagcagcaccgaaggaactattcgagaggagactcgtgtcatggctgtcgccgaagcgaaagaagccatggcgaccgcaacacctttcgaccatgagaagggatctcaagactccggtagaatttcgacccccgtccactacgatgacgacaggagcgacgcgatgtctgtccgcgaggaggccctgggaagggaccttcctgatggctatttctactctgtgggattcataggcaatgttgtcgccttctgtctctcgtccatatctgcttacatcttcttgctattcccaactaccatcctctccttcatcaatgcagatatcggacctagcccatatctctcctgggtcaacgttggtcggacattgggcctgtcattcacttacacagttcttggacgtctttccgatctttttggacgacgttggttcttcattggtggcaacattatcgctctcattggcatcatagtctgctctacagctcaaaacatcaatgctttgatcattggcagcactatctacggtatcggcgagactacacagttaagcttcaacgttgccattggcgaattggtcccaaacaagcaccgtcccgtcgttttgtcattcattttcgccaccagtgcccctattgccggattaggttcgatcttctctcgctacatctaccagaaccccaatctaggatggcgatggacctaccatctcaacaccatcgtcacgggtgtggctattgtcctcatgtttatcttctatcacccaccgacgttcgatctccttcatgagcggaagtcaaagacacagattttgaagtcactggactatgttggaactttcctctggattgcaggactgacgatctttctgatcggcatcagcgttggtggcacaatttatccatggaagtcagctgcaactatatccactattgtcatcggtgcgcttctccttatcgtcttgttcgtctacgaaacctacgcgaagctcgaatatcctgccattcccgtgaagttcttccgcaaccgcggtttcatcagtctcgttgcctgcgccactgtcgcgaccatgttctattattccgctgttcttctatggcctcagcaaatcggacaaatgtacactagtgacgttatttatggtggctggttgtcggctaccgtcggcagctccacggccatcggtcaaattgtcgccggtcttctattgaagtttggcatcaactcgcgttacttcttgattttctccacattcgccatggttggaattgttggctcactcgcagcactgacccctgacactctcaatactggaatcgctctcactctcgtcggacctttcttcactggtgtgattgagctgacatccctcgcgctcgcacctctgttttgcaagcccgaagacattgggctagcatcgggattgctcgcctcaattcgttccgctggtggctccattgctgtcactgtatactctgccattctacttaaccgcaaggcgagcacaattcctgcagccgtgattcctgctgtcaccgctgctggcttgcccgaaagcgaaattgccagctacgtcaaagctgtcattgctggcacctacatcaaattgccgaatatttccgccgatgtattggcagcaaccaaggctgttctgcctggtgcttactcacaagccttccaaacagtctatttggccagttttggtttcggcggtattgcactcattggttgtctctacgccaaggatgcgcgtcagtacttaaatgacacagtggaccgtaaaatgcacggtgccactgtaggggagaagaagaccaatcaagaaacagaaaacatttgagatgagcacgaattgatggaggatgacttagtggaatcatgaagttttgtttacgtgatttacagaggcgatgcatgcgatgtcttgcatgaaatttttgaaaacgaatacccgatctcgtatatattatcaccaactgtatttgcctgtatttacaactatagagactgcgctcaagatggcatatgttacttggaagctggtcatttcttaataaaacgactttgtgtcgataacattcggc

SEQ ID NO: 13013 - DNA, 783 bp, Muscodor strobelii
  misc_feature: SGI cDNA ID NO. 564249
  misc_feature: Encodes the peptide sequence at SEQ ID NO 13014
atgtcatcaagtactcagttcgcaaacaaggtggtcgccctgactggcgcggcgtcagggattgggcttgcaacagctcatactcttgctagtcgtggggcaaaactatctctggcagatattcaacttgatggcctcgagaaagtgaaggccgatctgcagtcgaagtacagtgcagatgtcatcatttcgaaggttaatgtgaggaattacgaggatgtagatgcttggatcagcactacggtcaagacctacgggaagcttgacggcgctgcgaacctcgcaggtgtaatttctcaaaaaattggtgtctcaaccctagcagacgaagagactgcggattgggatttcgtgcttggggtcaacttaactggtgtgatgcattgtctaaaggcccagatgcgcgtcattgcggataatggttcgatcgtcaatgcttcgtccattgctggtgtcataggtttctcgaagaatggtggctacacggcatcaaaacatggcgtggtgggcctaacaaaggccgccgcaaaagaagtaggggctaaaggcgtgcgagtaaatgccatctgcccaggacgaatcgaaacgccaatgatcacaaaagcgggaaaaatagccgcggacgcgaacacaaaagacaaaacagatgacatgagcttgatcgcccttggtcgccaaggccagccacaggaagttgcgaatctcatttgctttctgctctctgacgagtcaacatatggtggtgccattggtattgatggcggttggaacgtgagtaactag

SEQ ID NO: 13014 - protein, 260 aa, Muscodor strobelii
  misc_feature: SGI Peptide ID NO. 564249
  misc_feature (10)..(180): Pfam Id: PF00106 Pfam Desc: short chain dehydrogenase
  misc_feature (3)..(258): NCBI GI: 154309270 Blast Desc: BC1G_07529 [Botryotinia fuckeliana B05.10] gi|150852353|gb|EDN27545.1| BC1G_07529 [Botryotinia fuckeliana B05.10]
  misc_feature (3)..(256): NCBI GI: 110162100 Blast Desc: ABA4 protein [Botryotinia fuckeliana]
  misc_feature (9)..(256): NCBI GI: 169600775 Blast Desc: SNOG_03237 [Phaeosphaeria nodorum SN15] gi|111068848|gb|EAT89968.1| SNOG_03237 [Phaeosphaeria nodorum SN15]
  misc_feature (10)..(256): NCBI GI: 189192222 Blast Desc: 3-alpha-(or 20-beta)-hydroxysteroid dehydrogenase [Pyrenophora tritici-repentis Pt-1C-BFP] gi|187974056|gb|EDU41555.1| 3-alpha-(or 20-beta)-hydroxysteroid
  misc_feature (10)..(256): NCBI GI: 256728470 Blast Desc: [Nectria haematococca mpVI 77-13-4]
  misc_feature (10)..(255): NCBI GI: 261360495 Blast Desc: 3-oxoacyl-[acyl-carrier-protein] reductase [Verticillium albo-atrum VaMs.102]
  misc_feature (9)..(257): NCBI GI: 70999972 Blast Desc: oxidoreductase, short chain dehydrogenase/reductase family protein [Aspergillus fumigatus Af293] gi|66852340|gb|EAL92665.1| oxidoreductase, short chain family
  misc_feature (10)..(256): NCBI GI: 261361457 Blast Desc: 3-alpha-(or 20-beta)-hydroxysteroid dehydrogenase [Verticillium albo-atrum VaMs.102]
  misc_feature (9)..(257): NCBI GI: 119492117 Blast Desc: short chain dehydrogenase/reductase family oxidoreductase, [Neosartorya fischeri NRRL 181] gi|119411689|gb|EAW21632.1| short chain dehydrogenase/reductase
  misc_feature (1)..(182): NCBI GI: 261354679 Blast Desc: 3-oxoacyl-[acyl-carrier-protein] reductase [Verticillium albo-atrum VaMs.102]
  misc_feature (6)..(255): SWISSPROT Homolog: EC 1.1.1.100 3-oxoacyl-[acyl-carrier-protein] reductase
MSSSTQFANKVVALTGAASGIGLATAHTLASRGAKLSLADIQLDGLEKVKADLQSKYSADVIISKVNVRNYEDVDAWISTTVKTYGKLDGAANLAGVISQKIGVSTLADEETADWDFVLGVNLTGVMHCLKAQMRVIADNGSIVNASSIAGVIGFSKNGGYTASKHGVVGLTKAAAKEVGAKGVRVNAICPGRIETPMITKAGKIAADANTKDKTDDMSLIALGRQGQPQEVANLICFLLSDESTYGGAIGIDGGWNVSN

SEQ ID NO: 13015 - DNA, 624 bp, Muscodor strobelii
  misc_feature: SGI cDNA ID NO. 564250
  misc_feature: Reduced expression when VOC is produced
  misc_feature: Encodes the peptide sequence at SEQ ID NO 13016
atgatacccaataccaggatcctcgaaactctgtatctagcctccgtcgtatcgcacacaatcgcagcggtagtgactattatggcgtcgcctacggtccccagcacggtaccgcaatacacagacgaggcaaaattcacgtctgccatactgaactcgacgaatttttatcgcgaagagtacaatgcgtcagcattggtctggaacacgacgcttgaggattttgcaagcgaatatgtgaactccacaggcgatgactgcgcatttaaacactctggtggtccttatggtgagaatcttgccattgggtatccaaatgcgacggcgagtgtggaggcttggggtaatgagggagagaaatacaacttcaagaagcccggttttgatgaggacacagggcacttctcgcagttggtctggaagaatactacggatgtaggctgtgggcggagattgtgcggcacttctggatggtatgttgtttgtgagtattggccacgagggaatgttatcggacagtttgacgatgaggttgataagcccatcaatgctggcgggaaaccacgatattcagaatggttggtagccgtagctgttttgactgggttatggtttacgatttaa

SEQ ID NO: 13016 - protein, 207 aa, Muscodor strobelii
  misc_feature: SGI Peptide ID NO. 564250
  misc_feature (51)..(164): Pfam Id: PF00188 Pfam Desc: SCP-like extracellular protein
  misc_feature (20)..(202): NCBI GI: 256725715 Blast Desc: NECHADRAFT_70256 [Nectria haematococca mpVI 77-13-4]
  misc_feature (22)..(180): NCBI GI: 46111725 Blast Desc: FG02744.1 [Gibberella zeae PH-1]
  misc_feature (11)..(207): NCBI GI: 261359084 Blast Desc: PRY1 [Verticillium albo-atrum VaMs.102]
  misc_feature (1)..(203): NCBI GI: 39973025 Blast Desc: MGG_07807 [Magnaporthe grisea 70-15] gi|145012583|gb|EDJ97237.1| MGG_07807 [Magnaporthe grisea 70-15]
  misc_feature (39)..(182): NCBI GI: 169601160 Blast Desc: SNOG_03437 [Phaeosphaeria nodorum SN15] gi|160705876|gb|EAT88642.2| SNOG_03437 [Phaeosphaeria nodorum SN15]
  misc_feature (29)..(193): NCBI GI: 85095599 Blast Desc: NCU05618 [Neurospora crassa OR74A] gi|28921584|gb|EAA30878.1| conserved [Neurospora crassa OR74A] gi|40881953|emb|CAF06272.1| related to pathogenesis-related 1
  misc_feature (31)..(175): NCBI GI: 67516153 Blast Desc: AN0358.2 [Aspergillus nidulans FGSC A4] gi|40746608|gb|EAA65764.1| AN0358.2 [Aspergillus nidulans FGSC A4]
  misc_feature (31)..(203): NCBI GI: 242796061 Blast Desc: extracellular SCP domain protein Pry1, [Talaromyces stipitatus ATCC 10500] gi|218719308|gb|EED18728.1| extracellular SCP domain protein Pry1, [Talaromyces stipitatus ATCC 10500]
  misc_feature (4)..(172): NCBI GI: 121703347 Blast Desc: secretion pathway protein Sls2/Rcy1, [Aspergillus clavatus NRRL 1] gi|119398081|gb|EAW08512.1| secretion pathway protein Sls2/Rcy1, [Aspergillus clavatus NRRL 1]
  misc_feature (24)..(166): NCBI GI: 154308440 Blast Desc: BC1G_08280 [Botryotinia fuckeliana B05.10] gi|150852821|gb|EDN28013.1| BC1G_08280 [Botryotinia fuckeliana B05.10]
  misc_feature: Useful for introducing or modulating the production of volatile compounds
MIPNTRILETLYLASVVSHTIAAVVTIMASPTVPSTVPQYTDEAKFTSAILNSTNFYREEYNASALVWNTTLEDFASEYVNSTGDDCAFKHSGGPYGENLAIGYPNATASVEAWGNEGEKYNFKKPGFDEDTGHFSQLVWKNTTDVGCGRRLCGTSGWYVVCEYWPRGNVIGQFDDEVDKPINAGGKPRYSEWLVAVAVLTGLWFTI

SEQ ID NO: 13017 - DNA, 1071 bp, Muscodor strobelii
  misc_feature: SGI EST ID NO. CUFF.31010.0
  misc_feature: Variant of the nucleotide sequence at SEQ ID NO 13015
gaatttttgaaactcgtttcttatgtgtttttcagtgagttgagtaattaaagttcatttggcatctacagcatagcggaaacgaagctatcacgacttacacacgaccatccctgttcaattccacgttttcagctccaaaccttctgcgataccaaaaataaccaacggctcacggaagcagtccattcgaagctcagctcccgaactcaatttccaatcgagtcaagaatgatacccaataccaggatcctcgaaactctgtatctagcctccgtcgtatcgcacacaatcgcagcggtagtgactattatggcgtcgcctacggtccccagcacggtaccgcaatacacagacgaggcaaaattcacgtctgccatactgaactcgacgaatttttatcgcgaagagtacaatgcgtcagcattggtctggaacacgacgcttgaggattttgcaagcgaatatgtgaactccacaggcgatgactgcgcatttaaacactctggtggtccttatggtgagaatcttgccattgggtatccaaatgcgacggcgagtgtggaggcttggggtaatgagggagagaaatacaacttcaagaagcccggttttgatgaggacacagggcacttctcgcagttggtctggaagaatactacggatgtaggctgtgggcggagattgtgcggcacttctggatggtatgttgtttgtgagtattggccacgagggaatgttatcggacagtttgacgatgaggttgataagcccatcaatgctggcgggaaaccacgatattcagaatggttggtagccgtagctgttttgactgggttatggtttacgatttaattgtatatgaactctaatcattacgatgtatataagctagatgtgttccaaatggaaacccatcatgagggtacgaaaacacacattgggactggtcggctgtcatggatggtgttacttgcatggctaggaatcataggtgttatgatatgatattagaacatgatgttaaatagagtattaattcgtacaccacgtatcacccagcgtgagtct

SEQ ID NO: 13018 - DNA, 1020 bp, Muscodor strobelii
  misc_feature: SGI cDNA ID NO. 564251
  misc_feature: Reduced expression when VOC is produced
  misc_feature: Encodes the peptide sequence at SEQ ID NO 13019
atgtcttcgctgcccaaaacttacaaggcggccgtcgccaaaagtgccgataagcctctatccattgaagaacttgagctgaagcaaccgggtcctggtcaagttctcgtaaaggtcattgcatgtggcgtgtgtcactcagacgccttgatttcaggcggacatcttggtgacgtattccctcgtgtaccaggtcacgagattgtgggtgacgtcgttgctgtcggcgagggtgtaaagaaattttctggtggcgagagagtgggtggcccatggcacggtggtcacgacaaaacatgccggtcatgttcccgcggccaattccaaatgtgtgacaatgcccaagtaaatggtcttagctttgatggcggttacgcagaatacacactgctgcgcgaggaggctgtagttcgtgtaccgaaagaggccgacgccgctgaagttgcgccccttctctgcgctggcgtgactgtcttcaactccatacgtaagcagcacgtcgagcaaggaaacttagtcgctatacagggtctcggtgggcttggacatttggcagtccagtacgccaataagatgggttaccaagtcgttgccattagctctggcagcgccaagaaggatttcgcgcaaaagctcggcgcgcacgactacatcgacacgtcgaaagacgatgccgtcaagaagctccaggagatgggtggagctgccctgattgttgccacagccccgaatcccaaggctataagccccttggttggcggtctacaagccggtggtactctcttggttttggctcccgttggtccggtcgagtttgatactggagcgttggtcgtgaggggcgcctctgtcgcaggctggccgagcggccatgcgcttgactctgaagaagccatcaaatttgctactacccatggcgtgaagtgcatgatcgagaaatttccactttcggatgctgtcaaggcgatggaccattgcacatcgggcaacgtcagattccgaggtgtgcttatgatgtag

SEQ ID NO: 13019 - protein, 339 aa, Muscodor strobelii
  misc_feature: SGI Peptide ID NO. 564251
  misc_feature (32)..(139): Pfam Id: PF08240 Pfam Desc: Alcohol dehydrogenase GroES-like domain
  misc_feature (169)..(304): Pfam Id: PF00107 Pfam Desc: Zinc-binding dehydrogenase
  misc_feature (1)..(339): NCBI GI: 261361397 Blast Desc: alcohol dehydrogenase [Verticillium albo-atrum VaMs.102]
  misc_feature (1)..(339): NCBI GI: 256720592 Blast Desc: [Nectria haematococca mpVI 77-13-4]
  misc_feature (1)..(339): NCBI GI: 46135697 Blast Desc: FG09364.1 [Gibberella zeae PH-1]
  misc_feature (3)..(339): NCBI GI: 156039950 Blast Desc: SS1G_12111 [Sclerotinia sclerotiorum 1980] gi|154696168|gb|EDN95906.1| SS1G_12111 [Sclerotinia sclerotiorum 1980]
  misc_feature (3)..(339): NCBI GI: 154300519 Blast Desc: alcohol dehydrogenase [Botryotinia fuckeliana B05.10] gi|150856608|gb|EDN31800.1| alcohol dehydrogenase [Botryotinia fuckeliana B05.10]
  misc_feature (1)..(339): NCBI GI: 256723554 Blast Desc: NECHADRAFT_42222 [Nectria haematococca mpVI 77-13-4]
  misc_feature (1)..(339): NCBI GI: 71020793 Blast Desc: UM04480.1 [Ustilago maydis 521] gi|46100360|gb|EAK85593.1| UM04480.1 [Ustilago maydis 521]
  misc_feature (4)..(334): NCBI GI: 225682902 Blast Desc: alcohol dehydrogenase [Paracoccidioides brasiliensis Pb03]
  misc_feature (3)..(339): NCBI GI: 239613714 Blast Desc: zinc-binding dehydrogenase [Ajellomyces dermatitidis ER-3]
  misc_feature (4)..(339): NCBI GI: 226285423 Blast Desc: alcohol dehydrogenase [Paracoccidioides brasiliensis Pb01]
  misc_feature (9)..(339): SWISSPROT Homolog: EC 1.1.1.1 Alcohol dehydrogenase
  misc_feature: Useful for introducing or modulating the production of volatile compounds
MSSLPKTYKAAVAKSADKPLSIEELELKQPGPGQVLVKVIACGVCHSDALISGGHLGDVFPRVPGHEIVGDVVAVGEGVKKFSGGERVGGPWHGGHDKTCRSCSRGQFQMCDNAQVNGLSFDGGYAEYTLLREEAVVRVPKEADAAEVAPLLCAGVTVFNSIRKQHVEQGNLVAIQGLGGLGHLAVQYANKMGYQVVAISSGSAKKDFAQKLGAHDYIDTSKDDAVKKLQEMGGAALIVATAPNPKAISPLVGGLQAGGTLLVLAPVGPVEFDTGALVVRGASVAGWPSGHALDSEEAIKFATTHGVKCMIEKFPLSDAVKAMDHCTSGNVRFRGVLMM

SEQ ID NO: 13020 - DNA, 1648 bp, Muscodor strobelii
  misc_feature: SGI EST ID NO. CUFF.31014.0
  misc_feature: Variant of the nucleotide sequence at SEQ ID NO 13018
ttcgttttgcagtgtgcatggacgtgtctgtgtgagacatgttaacgccgcgatatcttgagcattgagtgtatatatatcacgttcatgtctcgccatttcgtcacaatgatctgccctcatctcatctcctcaacctatcgactcaccaagcttcctcttcctgcacctcaacatttgcgacactaacaaacccacccagcactttattcgaacacatcctacaaacatgtcttcgctgcccaaaacttacaaggcggccgtcgccaaaagtgccgataagcctctatccattgaagaacttgagctgaagcaaccgggtcctggtcaagttctcgtaaaggtcattgcatgtggcgtgtgtcactcagacgccttgatttcaggcggacatcttggtgacgtattccctcgtgtaccaggtcacgagattgtgggtgacgtcgttgctgtcggcgagggtgtaaagaaattttctggtggcgagagagtgggtggcccatggcacggtggtcacgacaaaacatgccggtcatgttcccgcggccaattccaaatgtgtgacaatgcccaagtaaatggtcttagctttgatggcggttacgcagaatacacactgctgcgcgaggaggctgtagttcgtgtaccgaaagaggccgacgccgctgaagttgcgccccttctctgcgctggcgtgactgtcttcaactccatacgtaagcagcacgtcgagcaaggaaacttagtcgctatacagggtctcggtgggcttggacatttggcagtccagtacgccaataagatgggttaccaagtcgttgccattagctctggcagcgccaagaaggatttcgcgcaaaagctcggcgcgcacgactacatcgacacgtcgaaagacgatgccgtcaagaagctccaggagatgggtggagctgccctgattgttgccacagccccgaatcccaaggctataagccccttggttggcggtctacaagccggtggtactctcttggttttggctcccgttggtccggtcgagtttgatactggagcgttggtcgtgaggggcgcctctgtcgcaggctggccgagcggccatgcgcttgactctgaagaagccatcaaatttgctactacccatggcgtgaagtgcatgatcgagaaatttccactttcggatgctgtcaaggcgatggaccattgcacatcgggcaacgtcagattccgaggtgtgcttatgatgtagagagctgctagactcttgcttcgaatctgacaaggcagaaaatccaaagaatttagaaatattgtttggaatgatagcgaaagtacctagttgtaccattgttgggcccaataataaaaatcaactaaatcttcaatgtcccatatgcactaatttcggtgcttatctaaatacgtgcgaaacgcgtgcattcgaactcctctcacatacagtttcctttgaatacagtaagggcagtaggtgacttcaatgtcccatatgcgatcacaaacctcctattgcaatgcgaccaatcattttaagactcgatccgactgaaacattgcaaagagttataaagaacccggccgtttgcctccatactcttcgatttaagataagcacaatgcttcacctaga

SEQ ID NO: 13021 - DNA, 762 bp, Muscodor strobelii
  misc_feature: SGI cDNA ID NO. 564252
  misc_feature: Encodes the peptide sequence at SEQ ID NO 13022
atgtcttcctatcaccagaccctaacagacaaagtgatcatcatcaccggcggaaccaagggcatcggtctcgcaacggcacagcgcgtctcagcagcaggcgcgaaagtagtaataaactacggccgagactccgccgccgcctcgacagcgctctcctctctctcaggcggcccctcaaagtccctagccatccaagcagatgccggctcccccaccgcaatggcctcgctcgtcacgcaaaccatctccaaattcggacgcatcgacgtcctagtcctaaacgccggcataatgcccctacagcccttagcaaacgtcacagagtccctcttcgactcaaccttcgcactgaacgtcaagggtccttttttcctcacccaatccgcagtgccccatatgccacagggcggacgcgtgatcttcatctctaccggaatcgccaagtcttctgctcccccgccgccataccaactttacgcttctaccaagggtgctatcgagcagatgacgcgtgttctggccaaggatctgggatctaagggtattaccgtgaatgctgttgcgcctggtcctactgatacggagttgtttaggaaggggaagccggaagctatgattaagggtattgaggcgcagtctcccttccagcgactgggcactccgaaggagatcgctgatgttattgcgtttgtggcgagcgaggctagttcttggataagtggacagattttgggagcgaatggtggttcgtttgtttaa

SEQ ID NO: 13022 - protein, 253 aa, Muscodor strobelii
  misc_feature: SGI Peptide ID NO. 564252
  misc_feature (11)..(179): Pfam Id: PF00106 Pfam Desc: short chain dehydrogenase
  misc_feature (13)..(247): Pfam Id: PF01370 Pfam Desc: NAD dependent epimerase/dehydratase family
  misc_feature (11)..(144): Pfam Id: PF00106 Pfam Desc: short chain dehydrogenase
  misc_feature (12)..(117): Pfam Id: PF08659 Pfam Desc: KR domain
  misc_feature (7)..(253): NCBI GI: 256728447 Blast Desc: NECHADRAFT_87890 [Nectria haematococca mpVI 77-13-4]
  misc_feature (11)..(250): NCBI GI: 242798352 Blast Desc: oxidoreductase, short-chain dehydrogenase/reductase family, [Talaromyces stipitatus ATCC 10500] gi|218716497|gb|EED15918.1| oxidoreductase, short-chain family,
  misc_feature (11)..(249): NCBI GI: 212541544 Blast Desc: oxidoreductase, short-chain dehydrogenase/reductase family, [Penicillium marneffei ATCC 18224] gi|210068226|gb|EEA22318.1| oxidoreductase, short-chain family,
  misc_feature (7)..(253): NCBI GI: 171695662 Blast Desc: protein product [Podospora anserina] gi|170948073|emb|CAP60237.1| protein product [Podospora anserina]
  misc_feature (1)..(250): NCBI GI: 116183006 Blast Desc: CHGG_02131 [Chaetomium globosum CBS 148.51] gi|88186428|gb|EAQ93896.1| CHGG_02131 [Chaetomium globosum CBS 148.51]
  misc_feature (7)..(250): NCBI GI: 67540560 Blast Desc: AN6450.2 [Aspergillus nidulans FGSC A4] gi|40739282|gb|EAA58472.1| AN6450.2 [Aspergillus nidulans FGSC A4] gi|259479321|tpe|CBF69447.1| TPA: oxidoreductase, short-chain
  misc_feature (6)..(250): NCBI GI: 156040457 Blast Desc: Brn1 [Sclerotinia sclerotiorum 1980] gi|154696301|gb|EDN96039.1| Brn1 [Sclerotinia sclerotiorum 1980]
  misc_feature (6)..(250): NCBI GI: 154320756 Blast Desc: BC1G_01850 [Botryotinia fuckeliana B05.10] gi|150853539|gb|EDN28731.1| BC1G_01850 [Botryotinia fuckeliana B05.10]
  misc_feature (8)..(250): NCBI GI: 242211627 Blast Desc: [Postia placenta Mad-698-R] gi|220729327|gb|EED83204.1| [Postia placenta Mad-698-R]
  misc_feature (7)..(233): NCBI GI: 115390965 Blast Desc: 60S ribosomal protein L40 [Aspergillus terreus NIH2624] gi|114193911|gb|EAU35611.1| 60S ribosomal protein L40 [Aspergillus terreus NIH2624]
  misc_feature (27)..(251): SWISSPROT Homolog: EC 1.1.1.252 Tetrahydroxynaphthalene reductase
MSSYHQTLTDKVIIITGGTKGIGLATAQRVSAAGAKVVINYGRDSAAASTALSSLSGGPSKSLAIQADAGSPTAMASLVTQTISKFGRIDVLVLNAGIMPLQPLANVTESLFDSTFALNVKGPFFLTQSAVPHMPQGGRVIFISTGIAKSSAPPPPYQLYASTKGAIEQMTRVLAKDLGSKGITVNAVAPGPTDTELFRKGKPEAMIKGIEAQSPFQRLGTPKEIADVIAFVASEASSWISGQILGANGGSFV

SEQ ID NO: 13023 - DNA, 1329 bp, Muscodor strobelii
  misc_feature: SGI cDNA ID NO. 564253
  misc_feature: Encodes the peptide sequence at SEQ ID NO 13024
atggcggccaatattcccgccaagttgaagactgcgggcatcaccccctttgtcatacgcgctggtcagcttgagaccgccaagcctgtcatcgcctactggtgtcattactggatcgtcaaccagattcttgccaagcagcttcataatgcagatgatgagtgccttgagtacactaccatgctcatggacaaactcgaacacatgaagacaactcatgctgataacgacgctatccttgatgacgtagctggtcaggcatatgttgagcagttcgctcaggagactttcgaccgtgccctccggccgatgaaagttaacaaggtcacgcaacagactgcagctacctttgaggctgcagctacattcttccagcttgtcaacatttgggggacgccggaagctgaagtccttaagaacatcaagtttgctaaatggaatgctgctcgcatattgaaggccatcaaggagggcaaggatcccaatgagtccaaccctcagcaagcagggccaaaggaagagcctatagagcctcttgatccaaacgacccagatgttcgagctatcagcacgggacttccgcgacctcccatggtcgaagatgcgcccgatgatggtgagccgtcaggggggccagcatcaagctattctcttcagcctaccggaccggtatcagcaccaacatcaccacttcctccaaccgcggcggtgccagaccaagtttctcccatagcgcccccagacgtaccacaccaggagccgggaagctactttccgaacgctccgtcagctgttgatcaatctccattagacttaccttcaaccaccagcatgccacccccaggatctagtgtcatgggctcgccaccagctgtcccgcctcctggctcatatgctccgggaattcccccgtccgtaccctctcggcctccgggagcaccatctactcctccccaagactactacaacccccctcctcaaccacagcacccgactgttcctacacctacgccgccattcgtccctccgccgcagcacttccagccaccgcaggctcctccacctgctcaaaactactatcagcagcctgccgcccatcctgtgcaaccgagggttatgcccgctcctggtgtgatgccgacgcctgcacccgtactagcccctgtccagcagtatggaagtaatgcgatggcgcccaacgtcgacgatatggccatggtgcaagcgcagaagcacgctaaatgggcaatttctgcgctcaacttcgaggatgttcctactgcaattaaggaattgcaggctgctcttgctactcttggagcaaggtag

SEQ ID NO: 13024 - protein, 442 aa, Muscodor strobelii
  misc_feature: SGI Peptide ID NO. 564253
  misc_feature (12)..(440): Pfam Id: PF04652 Pfam Desc: Vta1 like
  misc_feature (1)..(442): NCBI GI: 156039816 Blast Desc: SS1G_12044 [Sclerotinia sclerotiorum 1980] gi|154696101|gb|EDN95839.1| SS1G_12044 [Sclerotinia sclerotiorum 1980]
  misc_feature (1)..(441): NCBI GI: 121703087 Blast Desc: conserved [Aspergillus clavatus NRRL 1] gi|119397951|gb|EAW08382.1| conserved [Aspergillus clavatus NRRL 1]
  misc_feature (1)..(442): NCBI GI: 154295928 Blast Desc: BC1G_13117 [Botryotinia fuckeliana B05.10] gi|150843769|gb|EDN18962.1| BC1G_13117 [Botryotinia fuckeliana B05.10]
  misc_feature (6)..(442): NCBI GI: 39977805 Blast Desc: MGG_06787 [Magnaporthe grisea 70-15] gi|145013687|gb|EDJ98328.1| MGG_06787 [Magnaporthe grisea 70-15]
  misc_feature (1)..(442): NCBI GI: 119189543 Blast Desc: CIMG_04819 [Coccidioides immitis RS]
  misc_feature (1)..(442): NCBI GI: 240111196 Blast Desc: CPC735_070310 [Coccidioides posadasii C735 delta SOWgp]
  misc_feature (1)..(237): NCBI GI: 261361396 Blast Desc: conserved [Verticillium albo-atrum VaMs.102]
  misc_feature (1)..(442): NCBI GI: 226287477 Blast Desc: conserved [Paracoccidioides brasiliensis Pb18]
  misc_feature (1)..(441): NCBI GI: 119497081 Blast Desc: NFIA_021190 [Neosartorya fischeri NRRL 181] gi|119413470|gb|EAW23411.1| conserved [Neosartorya fischeri NRRL 181]
  misc_feature (5)..(441): NCBI GI: 171695622 Blast Desc: protein product [Podospora anserina] gi|170948053|emb|CAP60217.1| protein product [Podospora anserina]
MAANIPAKLKTAGITPFVIRAGQLETAKPVIAYWCHYWIVNQILAKQLHNADDECLEYTTMLMDKLEHMKTTHADNDAILDDVAGQAYVEQFAQETFDRALRPMKVNKVTQQTAATFEAAATFFQLVNIWGTPEAEVLKNIKFAKWNAARILKAIKEGKDPNESNPQQAGPKEEPIEPLDPNDPDVRAISTGLPRPPMVEDAPDDGEPSGGPASSYSLQPTGPVSAPTSPLPPTAAVPDQVSPIAPPDVPHQEPGSYFPNAPSAVDQSPLDLPSTTSMPPPGSSVMGSPPAVPPPGSYAPGIPPSVPSRPPGAPSTPPQDYYNPPPQPQHPTVPTPTPPFVPPPQHFQPPQAPPPAQNYYQQPAAHPVQPRVMPAPGVMPTPAPVLAPVQQYGSNAMAPNVDDMAMVQAQKHAKWAISALNFEDVPTAIKELQAALATLGAR

SEQ ID NO: 13025 - DNA, 3694 bp, Muscodor strobelii
  misc_feature: SGI EST ID NO. CUFF.31008.0
  misc_feature: Variant of the nucleotide sequence at SEQ ID NO 13023
gcgagagctatcccctgcgcatactgctgatgggcttatatgggatgacttcagcggggtgggcttgctatcgtgcatgtttacagctcaactgaactcaaatgagtactgcgtccgaacaccctcggacttccatcttgttttcttgctcacggcgattcaatataaatgaggcatagtcgaaatttaaagacgtgccgttaaaaccgagctccttaggaaagagcaacgctcccacccacttcgtcttggaactcgctgcctgagaggttgcgaccggaccttggcaacaggcgccgagattccaaccacttctctaggtgtcttgtcctactcaacaactgcaaccagcagatatatcaaaaactaagacttgcaaatcggtcgccgacacgatatcactcgcataaactcgaagagagctttgatttgaacacttgcgcctgttcacgaagcgtaggatcttgcgccggcgctgcccgtcatggcggccaatattcccgccaagttgaagactgcgggcatcaccccctttgtcatacgcgctggtcagcttgagaccgccaagcctgtcatcgcctactggtgtcattactggatcgtcaaccagattcttgccaagcagcttcataatgcagatgatgagtgccttgagtacactaccatgctcatggacaaactcgaacacatgaagacaactcatgctgataacgacgctatccttgatgacgtagctggtcaggcatatgttgagcagttcgctcaggagactttcgaccgtgccctccggccgatgaaagttaacaaggtcacgcaacagactgcagctacctttgaggctgcagctacattcttccagcttgtcaacatttgggggacgccggaagctgaagtccttaagaacatcaagtttgctaaatggaatgctgctcgcatattgaaggccatcaaggagggcaaggatcccaatgagtccaaccctcagcaagcagggccaaaggaagagcctatagagcctcttgatccaaacgacccagatgttcgagctatcagcacgggacttccgcgacctcccatggtcgaagatgcgcccgatgatggtgagccgtcaggggggccagcatcaagctattctcttcagcctaccggaccggtatcagcaccaacatcaccacttcctccaaccgcggcggtgccagaccaagtttctcccatagcgcccccagacgtaccacaccaggagccgggaagctactttccgaacgctccgtcagctgttgatcaatctccattagacttaccttcaaccaccagcatgccacccccaggatctagtgtcatgggctcgccaccagctgtcccgcctcctggctcatatgctccgggaattcccccgtccgtaccctctcggcctccgggagcaccatctactcctccccaagactactacaacccccctcctcaaccacagcacccgactgttcctacacctacgccgccattcgtccctccgccgcagcacttccagccaccgcaggctcctccacctgctcaaaactactatcagcagcctgccgcccatcctgtgcaaccgagggttatgcccgctcctggtgtgatgccgacgcctgcacccgtactagcccctgtccagcagtatggaagtaatgcgatggcgcccaacgtcgacgatatggccatggtgcaagcgcagaagcacgctaaatgggcaatttctgcgctcaacttcgaggatgttcctactgcaattaaggaattgcaggctgctcttgctactcttggagcaaggtagtatgggttgcgattgtccgaactgaggtgtttcattcaatttggaatgccggaagtcaagggttgcgatcgtgaggcctctataagagacttaatacgttgactttcgagtgatatgtacatatgagatgctgggaaagctatggagaggacagtttcggtagattttggcttgctatctgtgtgcttgaaagaagcatagacatcacgttggcgacttccaagagcgcgtcttgctagaatgtcgctggcgctacccaatgatagagccgacttttcaatgcaaatctgcaacaaatctccgacgcaatgtatgtcacgtcaatggcccgctcattcggatttttcaacagccataattcggtgcgcccatagagcatgatataatgattggcgcacgcgcgtgcgtgcgtgtacaccatcgttgtttgccatgtcgttgccgtagtggtcgctgggcgcggcgtggtgtggtgattctgcccgcagctggggactgccatgacaacctctcgggctccccacgacaccaccctggaaacagcacgacgttatcaattcaaataacacagtcgctcatcacccgtagtgggtttaatggtatgacggtatgattgaacgtttatttcattactagaatgtatctttgaagtatctagttcgaataccatacttaaaaaaaggctaagtccttttttttctctttagaaaatagctgttacaattcatattgtttttacttagacattttgcgctgttccataaacgacgaaaagtaaaagtatccatatgttccctatctacttatatacatctttcacccttccgtactgtcttaaacaaacgaaccaccattcgctcccaaaatctgtccacttatccaagaactagcctcgctcgccacaaacgcaataacatcagcgatctccttcggagtgcccagtcgctggaagggagactgcgcctcaatacccttaatcatagcttccggcttccccttcctaaacaactccgtatcagtaggaccaggcgcaacagcattcacggtaatacccttagatcccagatccttggccagaacacgcgtcatctgctcgatagcacccttggtagaagcgtaaagttggtatggcggcgggggagcagaagacttggcgattccggtagagatgaagatcacgcgtccgccctgtggcatatggggcactgcggattgggtgaggaaaaaaggacccttgacgttcagtgcgaaggttgagtcgaagagggactctgtgacgtttgctaagggctgtaggggcattatgccggcgtttaggactaggacgtcgatgcgtccgaatttggagatggtttgcgtgacgagcgaggccattgcggtgggggagccggcatctgcttggatggctagggactttgaggggccgcctgagagagaggagagcgctgtcgaggcggcggcggagtctcggccgtagtttattactactttcgcgcctgctgctgagacgcgctgtgccgttgcgagaccgatgcccttggttccgccggtgatgatgatcactttgtctgttagggtctggtgataggaagacattttcgaggccggcgttgttgtaagttgagagattggcgttgttgtagttgtaggcttagatgttgattgcgatctagatgttgagcagagaattctgcggacgtgtttcatgagttgaaagatgaagtcggtatggctttgaaaccttgatactgatgctgatgattcgaacgagaagaagacatcttggaaacaggactcgaggctatacttatacttttcgaattctacatgacctaccttcgcgttttcacgttctcactatgaccgatgcgcgaggcgctc

SEQ ID NO: 13026 - DNA, 1509 bp, Muscodor strobelii
  misc_feature: SGI cDNA ID NO. 564254
  misc_feature: Reduced expression when VOC is produced
  misc_feature: Encodes the peptide sequence at SEQ ID NO 13027
atgcattacatcgctttaacggcagtcgccttcctgtctgcccttcccgctgtccaggccggcggcttgtacaccaagagctctcccgtcctccaagtggatgttaagaactacgacagattgatcgctaaatccaaccacacttcgattgtcgagttctacgccccctggtgcggccactgccagaaccttaagcccgcctacgagaaagccgccaagaacctcgagggtctcgccaaggtcgccgccgtaaactgcgatgaggaagagaacaagccgctatgcggtagcatgggcgtccaggggttccccaccctcaaggtcgttcgtccggggaagaagggcaagaagcccgtcgtcgaggactaccaggggccccgaaccaccaagggcatctacgaggcggtcgtcgacaagatcaccaaccatgttcagcgcgttgccgacaaggacctcgagagcttcttgtcgagcaagaatgaatcggccaaggccatcctgttcaccgagaagggcaccacgagcgctttgctccgcagcttggccatcgatttcctcgatgtgatttcggtggcgcaaatcagaagcaaggagaccaaggcgatcgagatgttcggtatcgagtcttacccgacgctcgtcctactccctggcggagacaaggatagcgtcgtatacgacggagagatgaagaaggccggcatgcttacgttcctgtcgcaagccggtgccccgaatcccgatccggctcccgccaaagccaagggtgacaagaagagcgagaaaaagagcgaaaagaaggacacaaaggcaaagaaggagaaggcggcgaaggaatcatctttagagtctagctccactgctacgtctgagccgtccgaggctactgatgttcctcctgttcctcctgttgctgagtcccagcccagagcctccgagcctgtcccagccatcccctggatcaccacctaccagagattgatcaatgaatgcctccacgccaaggcccatgcttgcgttctcgccttcgttcccggagcccacggtgaaacagccgacaaggctgtgaccacactatccgagctggcccacaaacatgcgcaagtcaaacgacatctattccccttctacgaagttcatgtcaacagcgaggagacggcggcggtatgcacgagtctggagctgaagaacgacgtcgagatcgtagcggtcaatgcgaaacgagggtggtggcgacgctacgagggtgactttagccatgccagcatcgaaagctggatcgacgccatccggatgaatgagggagccaagaacaagctccccgaggccgtgattggggaggtggttgcagagacggagacggcagaagagcccattgagacgatcgaggtcaagctaggagaggaggtcaaggtcgaggtcgagcccgaggagtcggagacttcgtggcaaggggccgaaccgacgcctgaggccaccgacgctcctcccaagcatgaggaactgtag

SEQ ID NO: 13027 - protein, 502 aa, Muscodor strobelii
  misc_feature: SGI Peptide ID NO. 564254
  misc_feature (29)..(139): Pfam Id: PF00085 Pfam Desc: Thioredoxin
  misc_feature (205)..(242): Pfam Id: PF00085 Pfam Desc: Thioredoxin
  misc_feature (4)..(471): NCBI GI: 46135693 Blast Desc: FG09362.1 [Gibberella zeae PH-1]
  misc_feature (1)..(445): NCBI GI: 171695620 Blast Desc: protein product [Podospora anserina] gi|170948052|emb|CAP60216.1| protein product [Podospora anserina]
  misc_feature (1)..(447): NCBI GI: 85112518 Blast Desc: NCU00813 [Neurospora crassa OR74A] gi|28926135|gb|EAA35120.1| NCU00813 [Neurospora crassa OR74A]
  misc_feature (23)..(451): NCBI GI: 256720591 Blast Desc: NECHADRAFT_4540 [Nectria haematococca mpVI 77-13-4]
  misc_feature (6)..(445): NCBI GI: 154280298 Blast Desc: conserved [Ajellomyces capsulatus NAm1] gi|150412905|gb|EDN08292.1| conserved [Ajellomyces capsulatus NAm1]
  misc_feature (6)..(445): NCBI GI: 225562968 Blast Desc: thioredoxin [Ajellomyces capsulatus G186AR]
  misc_feature (19)..(447): NCBI GI: 70990864 Blast Desc: disulfide isomerase [Aspergillus fumigatus Af293] gi|66847913|gb|EAL88243.1| disulfide isomerase, [Aspergillus fumigatus Af293] gi|159130754|gb|EDP55867.1| disulfide isomerase,
  misc_feature (4)..(463): NCBI GI: 156039814 Blast Desc: SS1G_12043 [Sclerotinia sclerotiorum 1980] gi|154696100|gb|EDN95838.1| SS1G_12043 [Sclerotinia sclerotiorum 1980]
  misc_feature (6)..(445): NCBI GI: 240279789 Blast Desc: thioredoxin [Ajellomyces capsulatus H143]
  misc_feature (18)..(458): NCBI GI: 238486526 Blast Desc: disulfide isomerase, [Aspergillus flavus NRRL3357] gi|220699380|gb|EED55719.1| disulfide isomerase, [Aspergillus flavus NRRL3357]
  misc_feature: Useful for introducing or modulating the production of volatile compounds
MHYIALTAVAFLSALPAVQAGGLYTKSSPVLQVDVKNYDRLIAKSNHTSIVEFYAPWCGHCQNLKPAYEKAAKNLEGLAKVAAVNCDEEENKPLCGSMGVQGFPTLKVVRPGKKGKKPVVEDYQGPRTTKGIYEAVVDKITNHVQRVADKDLESFLSSKNESAKAILFTEKGTTSALLRSLAIDFLDVISVAQIRSKETKAIEMFGIESYPTLVLLPGGDKDSVVYDGEMKKAGMLTFLSQAGAPNPDPAPAKAKGDKKSEKKSEKKDTKAKKEKAAKESSLESSSTATSEPSEATDVPPVPPVAESQPRASEPVPAIPWITTYQRLINECLHAKAHACVLAFVPGAHGETADKAVTTLSELAHKHAQVKRHLFPFYEVHVNSEETAAVCTSLELKNDVEIVAVNAKRGWWRRYEGDFSHASIESWIDAIRMNEGAKNKLPEAVIGEVVAETETAEEPIETIEVKLGEEVKVEVEPEESETSWQGAEPTPEATDAPPKHEEL

SEQ ID NO: 13028 - DNA, 2531 bp, Muscodor strobelii
  misc_feature: SGI EST ID NO. CUFF.31375.0
  misc_feature: Variant of the nucleotide sequence at SEQ ID NO 13026
ggggtcaccagctgtgcagcttccaattggcaaatgctatctgttcttttcaccatctgctcaccgtggcctcttcccacgccgcacctcattcacagaacacacatttaaagagcagacatcccgagagtcaagtcccattgcctcgaactcgtcatttgcggtgccatgttgtgccctttctaaatattcaatcatagtactgcgatttgacaccacctctacctattgattgtcccttgtgtatttcgagttttgctttcaacttctaattaagcttcgcgccatcggatagctctatttgatgctctctaactgatctcttgctattttgatatttcactgagcccggctcaaagtcgccatgcattacatcgctttaacggcagtcgccttcctgtctgcccttcccgctgtccaggccggcggcttgtacaccaagagctctcccgtcctccaagtggatgttaagaactacgacagattgatcgctaaatccaaccacacttcgattgtcgagttctacgccccctggtgcggccactgccagaaccttaagcccgcctacgagaaagccgccaagaacctcgagggtctcgccaaggtcgccgccgtaaactgcgatgaggaagagaacaagccgctatgcggtagcatgggcgtccaggggttccccaccctcaaggtcgttcgtccggggaagaagggcaagaagcccgtcgtcgaggactaccaggggccccgaaccaccaagggcatctacgaggcggtcgtcgacaagatcaccaaccatgttcagcgcgttgccgacaaggacctcgagagcttcttgtcgagcaagaatgaatcggccaaggccatcctgttcaccgagaagggcaccacgagcgctttgctccgcagcttggccatcgatttcctcgatgtgatttcggtggcgcaaatcagaagcaaggagaccaaggcgatcgagatgttcggtatcgagtcttacccgacgctcgtcctactccctggcggagacaaggatagcgtcgtatacgacggagagatgaagaaggccggcatgcttacgttcctgtcgcaagccggtgccccgaatcccgatccggctcccgccaaagccaagggtgacaagaagagcgagaaaaagagcgaaaagaaggacacaaaggcaaagaaggagaaggcggcgaaggaatcatctttagagtctagctccactgctacgtctgagccgtccgaggctactgatgttcctcctgttcctcctgttgctgagtcccagcccagagcctccgagcctgtcccagccatcccctggatcaccacctaccagagattgatcaatgaatgcctccacgccaaggcccatgcttgcgttctcgccttcgttcccggagcccacggtgaaacagccgacaaggctgtgaccacactatccgagctggcccacaaacatgcgcaagtcaaacgacatctattccccttctacgaagttcatgtcaacagcgaggagacggcggcggtatgcacgagtctggagctgaagaacgacgtcgagatcgtagcggtcaatgcgaaacgagggtggtggcgacgctacgagggtgactttagccatgccagcatcgaaagctggatcgacgccatccggatgaatgagggagccaagaacaagctccccgaggccgtgattggggaggtggttgcagagacggagacggcagaagagcccattgagacgatcgaggtcaagctaggagaggaggtcaaggtcgaggtcgagcccgaggagtcggagacttcgtggcaaggggccgaaccgacgcctgaggccaccgacgctcctcccaagcatgaggaactgtagagagtccatattagcgagattgtgaatagtgaaagcgaaataccagaaagattgagggcttacaaacatcggtgctacctatccaagtgtgcatgtctcgttccacgtaatctcatgcgtatgtccgaacaagatcaatcaactatctcaaacatcgatatccatggccatgcttgcgcccttctcgatggcaccctcagtgaccatcttgcgtccctgatccctgacgacctggtccaagaacttgcgcacgcctttgcaggcgtcagcagcactagccatcataccctcgagtctcgaaacctggactctggtctcgcagaccaggacggagactttgtccgtggcgccaagcgtagcgagagtcagaaagggcagctcttgttcctcctgggtgttcagatcgaccaggggatccgccgactcgtcaccggcggagtgggaggatgtgctgcccgctgtgcaggcgacgaggtagtcggtcatgggcacgccggcgtcgacgagggcgagggtggcggcgtttatgagggccgcgaggagggacccgtcttgcgagaggacgtgcagggatatggagattgcggagcgggcgtagaggtgcacgtgtaggttcgttgctagggctttggctatggttgcttgcatctccgagatg

SEQ ID NO: 13029 - DNA, 822 bp, Muscodor strobelii
  misc_feature: SGI cDNA ID NO. 564255
  misc_feature: Encodes the peptide sequence at SEQ ID NO 13030
atgcccctcgacacctcaacctacgacctggcgctcctgcgcgtcgacggccgccgctggaacgagctccggcgcctacacgcccagatccgcacccaagccgccgccgacggctcgtcctacctcgagatgggcaacacaaaagtgatgtgcgtcatctctggcccctccgaagacgcctccaagcgcaagggcatatccaactcggcctcgacggcgcagaccccgggcggcgccgacgtcatcgtcagcatcgtcgtcggaggcttcagctctgtcgatcggcgcaagcgggcgcgcaccgataagcgcatctcggagatgcaagcaaccatagccaaagccctagcaacgaacctacacgtgcacctctacgcccgctccgcaatctccatatccctgcacgtcctctcgcaagacgggtccctcctcgcggccctcataaacgccgccaccctcgccctcgtcgacgccggcgtgcccatgaccgactacctcgtcgcctgcacagcgggcagcacatcctcccactccgccggtgacgagtcggcggatcccctggtcgatctgaacacccaggaggaacaagagctgccctttctgactctcgctacgcttggcgccacggacaaagtctccgtcctggtctgcgagaccagagtccaggtttcgagactcgagggtatgatggctagtgctgctgacgcctgcaaaggcgtgcgcaagttcttggaccaggtcgtcagggatcagggacgcaagatggtcactgagggtgccatcgagaagggcgcaagcatggccatggatatcgatgtttga

SEQ ID NO: 13030 - protein, 273 aa, Muscodor strobelii
  misc_feature: SGI Peptide ID NO. 564255
  misc_feature (22)..(161): Pfam Id: PF01138 Pfam Desc: 3' exoribonuclease family, domain 1
  misc_feature (1)..(272): NCBI GI: 39977801 Blast Desc: MGG_06785 [Magnaporthe grisea 70-15] gi|145013689|gb|EDJ98330.1| MGG_06785 [Magnaporthe grisea 70-15]
  misc_feature (1)..(271): NCBI GI: 256720781 Blast Desc: NECHADRAFT_96576 [Nectria haematococca mpVI 77-13-4]
  misc_feature (1)..(272): NCBI GI: 116181272 Blast Desc: CHGG_01264 [Chaetomium globosum CBS 148.51] gi|88185561|gb|EAQ93029.1| CHGG_01264 [Chaetomium globosum CBS 148.51]
  misc_feature (1)..(272): NCBI GI: 164428624 Blast Desc: NCU00812 [Neurospora crassa OR74A] gi|157072219|gb|EAA35119.2| conserved [Neurospora crassa OR74A]
  misc_feature (1)..(272): NCBI GI: 171695618 Blast Desc: protein product [Podospora anserina] gi|170948051|emb|CAP60215.1| protein product [Podospora anserina]
  misc_feature (1)..(228): NCBI GI: 46135695 Blast Desc: FG09363.1 [Gibberella zeae PH-1]
  misc_feature (1)..(257): NCBI GI: 154295932 Blast Desc: BC1G_13119 [Botryotinia fuckeliana B05.10] gi|150843771|gb|EDN18964.1| BC1G_13119 [Botryotinia fuckeliana B05.10]
  misc_feature (1)..(256): NCBI GI: 156039812 Blast Desc: SS1G_12042 [Sclerotinia sclerotiorum 1980] gi|154696099|gb|EDN95837.1| SS1G_12042 [Sclerotinia sclerotiorum 1980]
  misc_feature (1)..(255): NCBI GI: 169595492 Blast Desc: SNOG_00485 [Phaeosphaeria nodorum SN15] gi|111070860|gb|EAT91980.1| SNOG_00485 [Phaeosphaeria nodorum SN15]
  misc_feature (1)..(255): NCBI GI: 189208598 Blast Desc: exosome complex exonuclease RRP41 [Pyrenophora tritici-repentis Pt-1C-BFP] gi|187976725|gb|EDU43351.1| exosome complex exonuclease RRP41 [Pyrenophora tritici-repentis
  misc_feature (14)..(191): SWISSPROT Homolog: EC 2.7.7.56 tRNA nucleotidyltransferase
MPLDTSTYDLALLRVDGRRWNELRRLHAQIRTQAAADGSSYLEMGNTKVMCVISGPSEDASKRKGISNSASTAQTPGGADVIVSIVVGGFSSVDRRKRARTDKRISEMQATIAKALATNLHVHLYARSAISISLHVLSQDGSLLAALINAATLALVDAGVPMTDYLVACTAGSTSSHSAGDESADPLVDLNTQEEQELPFLTLATLGATDKVSVLVCETRVQVSRLEGMMASAADACKGVRKFLDQVVRDQGRKMVTEGAIEKGASMAMDIDV

SEQ ID NO: 13031 - DNA, 3108 bp, Muscodor strobelii
  misc_feature: SGI EST ID NO. CUFF.31376.1
  misc_feature: Variant of the nucleotide sequence at SEQ ID NO 13029
ccccaccaaaaatttccactgagcagctccagcccaccttcgtctcaatcttcaccatcgcaacccaatacaccagacgaagaccccacaaacactcggcctcgaggtccaggtcataaacgaaacctctataccccctcgaaaatcaccgcttccccaaacataaacccaattggcctctcacatcacgacacgatgcccctcgacacctcaacctacgacctggcgctcctgcgcgtcgacggccgccgctggaacgagctccggcgcctacacgcccagatccgcacccaagccgccgccgacggctcgtcctacctcgagatgggcaacacaaaagtgatgtgcgtcatctctggcccctccgaagacgcctccaagcgcaagggcatatccaactcggcctcgacggcgcagaccccgggcggcgccgacgtcatcgtcagcatcgtcgtcggaggcttcagctctgtcgatcggcgcaagcgggcgcgcaccgataagcgcatctcggagatgcaagcaaccatagccaaagccctagcaacgaacctacacgtgcacctctacgcccgctccgcaatctccatatccctgcacgtcctctcgcaagacgggtccctcctcgcggccctcataaacgccgccaccctcgccctcgtcgacgccggcgtgcccatgaccgactacctcgtcgcctgcacagcgggcagcacatcctcccactccgccggtgacgagtcggcggatcccctggtcgatctgaacacccaggaggaacaagagctgccctttctgactctcgctacgcttggcgccacggacaaagtctccgtcctggtctgcgagaccagagtccaggtttcgagactcgagggtatgatggctagtgctgctgacgcctgcaaaggcgtgcgcaagttcttggaccaggtcgtcagggatcagggacgcaagatggtcactgagggtgccatcgagaagggcgcaagcatggccatggatatcgatgtttgagatagttgattgatcttgttcggacatacgcatgagattacgtggaacgagacatgcacacttggataggtagcaccgatgtttgtaagccctcaatctttctggtatttcgctttcactattcacaatctcgctaatatggactctctacagttcctcatgcttgggaggagcgtcggtggcctcaggcgtcggttcggccccttgccacgaagtctccgactcctcgggctcgacctcgaccttgacctcctctcctagcttgacctcgatcgtctcaatgggctcttctgccgtctccgtctctgcaaccacctccccaatcacggcctcggggagcttgttcttggctccctcattcatccggatggcgtcgatccagctttcgatgctggcatggctaaagtcaccctcgtagcgtcgccaccaccctcgtttcgcattgaccgctacgatctcgacgtcgttcttcagctccagactcgtgcataccgccgccgtctcctcgctgttgacatgaacttcgtagaaggggaatagatgtcgtttgacttgcgcatgtttgtgggccagctcggatagtgtggtcacagccttgtcggctgtttcaccgtgggctccgggaacgaaggcgagaacgcaagcatgggccttggcgtggaggcattcattgatcaatctctggtaggtggtgatccaggggatggctgggacaggctcggaggctctgggctgggactcagcaacaggaggaacaggaggaacatcagtagcctcggacggctcagacgtagcagtggagctagactctaaagatgattccttcgccgccttctccttctttgcctttgtgtccttcttttcgctctttttctcgctcttcttgtcacccttggctttggcgggagccggatcgggattcggggcaccggcttgcgacaggaacgtaagcatgccggccttcttcatctctccgtcgtatacgacgctatccttgtctccgccagggagtaggacgagcgtcgggtaagactcgataccgaacatctcgatcgccttggtctccttgcttctgatttgcgccaccgaaatcacatcgaggaaatcgatggccaagctgcggagcaaagcgctcgtggtgcccttctcggtgaacaggatggccttggccgattcattcttgctcgacaagaagctctcgaggtccttgtcggcaacgcgctgaacatggttggtgatcttgtcgacgaccgcctcgtagatgcccttggtggttcggggcccctggtagtcctcgacgacgggcttcttgcccttcttccccggacgaacgaccttgagggtggggaacccctggacgcccatgctaccgcatagcggcttgttctcttcctcatcgcagtttacggcggcgaccttggcgagaccctcgaggttcttggcggctttctcgtaggcgggcttaaggttctggcagtggccgcaccagggggcgtagaactcgacaatctgcaattgggtctgggttaggagcttgcctcgtggaggttggattggtagcaagagatagtgtggcctaccgaagtgtggttggatttagcgatcaatctgtcgtagttcttaacatccacttggaggacgggagagctcttggtgtacaagccgccggcctggacagcgggaagggcagacaggaaggcgactgccgttaaagcgatgtaatgcatggcgactttgagccgggctcagtgaaatatcaaaatagcaagagatcagttagagagcatcaaatagagctatccgatggcgcgaagcttaattagaagttgaaagcaaaactcgaaatacacaagggacaatcaataggtagaggtggtgtcaaatcgcagtactatgattgaatatttagaaagggcacaacatggcaccgcaaatgacgagttcgaggcaatgggacttgactctcgggatgtctgctctttaaatgtgtgttctgtgaatgaggtgcggcgtgggaagaggccacggtgagcagatggtgaaaagaacagatagcatttgccaattggaagctgcacagctggtgacccc

SEQ ID NO: 13032 - DNA, 987 bp, Muscodor strobelii
  misc_feature: SGI cDNA ID NO. 564256
  misc_feature: Reduced expression when VOC is produced
  misc_feature: Encodes the peptide sequence at SEQ ID NO 13033
atgtgcgccgccgtgagcaaggcacccgtgcgcatcgtcgcccgactgccggggctcgccaaatcgtctctccgcagctcggggagcatccgagctttccaccagcccgccaccaagccctcgacattcttcacatctcgcgccaccaccgcgtcgtcgtccatcctacgatcaactccaaagaatgccttctccaaggcccagtcacaggcgaggttctacaaccagcagtcgacgagacccgccgacaatggctccctagcgagcaagctcctgaccggcggtgccatcttcggcggcaccctcgtcgccgtcaacctcgtcttcaaccgcgagacccgcgaggacggcggcatgcccgtgttcgagcgcgagtatctcaactcgaccttcctgcacacgggcctgggcatcggcatcattggcctcaccgcgcgccagatggtcaacaccggcttcgtttaccgcatgatggtcaccaaccccctggattgtcgccatcgctacatccccaagtatgccatgtggactgccttcaacgctactcaggctgccttcgtcgctcccctgatcgccttcgcccctggtgcccttattgctcgtgctggtctctacaccgtcgccatgatgggctccattgccttcgtcggtgctaccgctaagcaagagaagtacatgtacctcggaggtcccctgttggccggtgctgccattgtcgccgtctccggtctcgcgcctctcgtcattcccgctactgctgtccgcaccctagccatgaccgagaagctctggctctacggtggtctggccgtcttcggtggattcaccctctacgatgtccagaagatcctctaccactctcgtctggctgagcgcggtatcatcaagaaggacactgtcaacgagtccatttccctcgagctcgactttctcaacatcttcatccgtatggtccagatcttgatgatgcagcagcgccgcaagtag

SEQ ID NO: 13033 - protein, 328 aa, Muscodor strobelii
  misc_feature: SGI Peptide ID NO. 564256
  misc_feature (14)..(328): NCBI GI: 39944462 Blast Desc: MGG_04242 [Magnaporthe grisea 70-15] gi|145014989|gb|EDJ99557.1| MGG_04242 [Magnaporthe grisea 70-15]
  misc_feature (9)..(328): NCBI GI: 46107866 Blast Desc: FG00816.1 [Gibberella zeae PH-1]
  misc_feature (5)..(328): NCBI GI: 85089596 Blast Desc: NCU10028 [Neurospora crassa OR74A] gi|28919329|gb|EAA28785.1| NCU10028 [Neurospora crassa OR74A]
  misc_feature (5)..(328): NCBI GI: 116182792 Blast Desc: CHGG_02024 [Chaetomium globosum CBS 148.51] gi|88186321|gb|EAQ93789.1| CHGG_02024 [Chaetomium globosum CBS 148.51]
  misc_feature (7)..(328): NCBI GI: 154321499 Blast Desc: BC1G_01624 [Botryotinia fuckeliana B05.10] gi|150852162|gb|EDN27354.1| BC1G_01624 [Botryotinia fuckeliana B05.10]
  misc_feature (17)..(328): NCBI GI: 171694806 Blast Desc: protein product [Podospora anserina] gi|170947645|emb|CAP59807.1| protein product [Podospora anserina]
  misc_feature (7)..(328): NCBI GI: 156053982 Blast Desc: SS1G_05839 [Sclerotinia sclerotiorum 1980] gi|154703619|gb|EDO03358.1| SS1G_05839 [Sclerotinia sclerotiorum 1980]
  misc_feature (31)..(328): NCBI GI: 212540514 Blast Desc: Bax Inhibitor family protein [Penicillium marneffei ATCC 18224] gi|210067711|gb|EEA21803.1| Bax Inhibitor family protein [Penicillium marneffei ATCC 18224]
  misc_feature (35)..(324): NCBI GI: 154279764 Blast Desc: conserved [Ajellomyces capsulatus NAm1] gi|150412638|gb|EDN08025.1| conserved [Ajellomyces capsulatus NAm1]
  misc_feature (19)..(328): NCBI GI: 242801585 Blast Desc: Bax Inhibitor family protein [Talaromyces stipitatus ATCC 10500] gi|218717142|gb|EED16563.1| Bax Inhibitor family protein [Talaromyces stipitatus ATCC 10500]
  misc_feature: Useful for introducing or modulating the production of volatile compounds
MCAAVSKAPVRIVARLPGLAKSSLRSSGSIRAFHQPATKPSTFFTSRATTASSSILRSTPKNAFSKAQSQARFYNQQSTRPADNGSLASKLLTGGAIFGGTLVAVNLVFNRETREDGGMPVFEREYLNSTFLHTGLGIGIIGLTARQMVNTGFVYRMMVTNPLDCRHRYIPKYAMWTAFNATQAAFVAPLIAFAPGALIARAGLYTVAMMGSIAFVGATAKQEKYMYLGGPLLAGAAIVAVSGLAPLVIPATAVRTLAMTEKLWLYGGLAVFGGFTLYDVQKILYHSRLAERGIIKKDTVNESISLELDFLNIFIRMVQILMMQQRRK

SEQ ID NO: 13034 - DNA, 1524 bp, Muscodor strobelii
  misc_feature: SGI EST ID NO. CUFF.31052.0
  misc_feature: Variant of the nucleotide sequence at SEQ ID NO 13032
gcaagcacgggccattgtcgattacctcatccagctgctgagccagcaacagccatcgtcatttacccatcgccgcactgctctgttcacatttatcacgcctcaccttccgccatccatcgcacctcttctacctcttccctttgttccaccccaaccacaaccgatcaataccctacacaacccactggtttcgaccgtagcagcaaacatgtgcgccgccgtgagcaaggcacccgtgcgcatcgtcgcccgactgccggggctcgccaaatcgtctctccgcagctcggggagcatccgagctttccaccagcccgccaccaagccctcgacattcttcacatctcgcgccaccaccgcgtcgtcgtccatcctacgatcaactccaaagaatgccttctccaaggcccagtcacaggcgaggttctacaaccagcagtcgacgagacccgccgacaatggctccctagcgagcaagctcctgaccggcggtgccatcttcggcggcaccctcgtcgccgtcaacctcgtcttcaaccgcgagacccgcgaggacggcggcatgcccgtgttcgagcgcgagtatctcaactcgaccttcctgcacacgggcctgggcatcggcatcattggcctcaccgcgcgccagatggtcaacaccggcttcgtttaccgcatgatggtcaccaaccccctggattgtcgccatcggtggcctcgctgccagcttcggtactatgatcgccacccgctccatcgatcctgacaactacatccccaagtatgccatgtggactgccttcaacgctactcaggctgccttcgtcgctcccctgatcgccttcgcccctggtgcccttattgctcgtgctggtctctacaccgtcgccatgatgggctccattgccttcgtcggtgctaccgctaagcaagagaagtacatgtacctcggaggtcccctgttggccggtgctgccattgtcgccgtctccggtctcgcgcctctcgtcattcccgctactgctgtccgcaccctagccatgaccgagaagctctggctctacggtggtctggccgtcttcggtggattcaccctctacgatgtccagaagatcctctaccactctcgtctggctgagcgcggtatcatcaagaaggacactgtcaacgagtccatttccctcgagctcgactttctcaacatcttcatccgtatggtccagatcttgatgatgcagcagcgccgcaagtagatgtccagcatgcagtgtctgggaagaaaggtgtaattattactttgttattggacatgatatcatggttgaggacggggctccattgagagcccgatgttcccaacattaggccatggcgttaggaaaactcctctcctgttggtgaaaagactgagaagagctgcatcgcggagcaaccacagcttggtgctcgagactatgtacactatgctttatgaactcgaaaaaaatacaataaaagaagatcaaaactatatccataaga

SEQ ID NO: 13035 - DNA, 618 bp, Muscodor strobelii
  misc_feature: SGI cDNA ID NO. 564257
  misc_feature: Encodes the peptide sequence at SEQ ID NO 13036
atgccatccttcattcagcgcctattccgccccatgtccaccgccatgggcatcacgagccccggtggcggcgccgtcactcgacccgtcattccggagggtgctgagattgcgaccgttggcgctggctgcttctggggcgttgagcatctataccgcaagcacttcggcgacaagggactttacgatgcgcgcgttggatatatcggaggcgataccaagaaccccagctacaagcaagtctgcagtggcaagaccggccacaacgaagccctacaaattcattttgacccatcgcgcataacataccgtcaactcctcgagttcttctaccgcatgcacgatcccacaacagccaaccgtcaaggccccgatgtcgggccaaactaccgctcaggaatctactttcacaacgaaggccaagagaagattgcgcgagaagtcacaaaacaggcaaacgagcaatggtacaagggccgcatcgtcactgagatcgtaccggctggcccgtggtgggacgctgaggagtaccaccagctgtacctcgagagaaacccatggggctacgagtgccctagccactttttgaggccgttcgaaccactcggagagtcatga

SEQ ID NO: 13036 - protein, 205 aa, Muscodor strobelii
  misc_feature: SGI Peptide ID NO. 564257
  misc_feature (36)..(195): Pfam Id: PF01625 Pfam Desc: Peptide methionine sulfoxide reductase
  misc_feature (1)..(202): NCBI GI: 156053976 Blast Desc: SS1G_05836 [Sclerotinia sclerotiorum 1980] gi|154703616|gb|EDO03355.1| SS1G_05836 [Sclerotinia sclerotiorum 1980]
  misc_feature (1)..(202): NCBI GI: 46107864 Blast Desc: FG00815.1 [Gibberella zeae PH-1]
  misc_feature (3)..(204): NCBI GI: 169594694 Blast Desc: SNOG_00074 [Phaeosphaeria nodorum SN15] gi|160700915|gb|EAT91569.2| SNOG_00074 [Phaeosphaeria nodorum SN15]
  misc_feature (1)..(202): NCBI GI: 154321495 Blast Desc: peptide methionine sulphoxide [Botryotinia fuckeliana B05.10] gi|150852160|gb|EDN27352.1| peptide methionine sulphoxide [Botryotinia fuckeliana B05.10]
  misc_feature (10)..(202): NCBI GI: 261361425 Blast Desc: peptide methionine sulfoxide reductase msrB/msrA [Verticillium albo-atrum VaMs.102]
  misc_feature (2)..(202): NCBI GI: 39944464 Blast Desc: MGG_04243 [Magnaporthe grisea 70-15] gi|145014990|gb|EDJ99558.1| MGG_04243 [Magnaporthe grisea 70-15]
  misc_feature (1)..(202): NCBI GI: 256734814 Blast Desc: [Nectria haematococca mpVI 77-13-4]
  misc_feature (1)..(204): NCBI GI: 212540494 Blast Desc: peptide methionine sulfoxide reductase [Penicillium marneffei ATCC 18224] gi|212540496|ref|XP_002150403.1| peptide methionine sulfoxide reductase [Penicillium marneffei ATCC 18224]
  misc_feature (2)..(202): NCBI GI: 171694808 Blast Desc: protein product [Podospora anserina] gi|170947646|emb|CAP59808.1| protein product [Podospora anserina]
  misc_feature (26)..(202): NCBI GI: 116182794 Blast Desc: CHGG_02025 [Chaetomium globosum CBS 148.51] gi|88186322|gb|EAQ93790.1| CHGG_02025 [Chaetomium globosum CBS 148.51]
  misc_feature (36)..(197): SWISSPROT Homolog: EC 1.8.4.11 Peptide-methionine (S)-S-oxide reductase
MPSFIQRLFRPMSTAMGITSPGGGAVTRPVIPEGAEIATVGAGCFWGVEHLYRKHFGDKGLYDARVGYIGGDTKNPSYKQVCSGKTGHNEALQIHFDPSRITYRQLLEFFYRMHDPTTANRQGPDVGPNYRSGIYFHNEGQEKIAREVTKQANEQWYKGRIVTEIVPAGPWWDAEEYHQLYLERNPWGYECPSHFLRPFEPLGES

SEQ ID NO: 13037 - DNA, 1416 bp, Muscodor strobelii
  misc_feature: SGI EST ID NO. CUFF.31022.0
  misc_feature: Variant of the nucleotide sequence at SEQ ID NO 13035
gtcgcatgtttccgccccgcgagcactcgaagctggagctcccatgccccgccaaaaatggcagagatgcgaagggacaatgaatttgtcattgatcggtcccaacttactgtcatccatgcactccctcaaaacccagtggcggcgcaacgtcaacgacttctgtgattcctcatttctcttgtagaatccgtatgtaccactacgttatataacctcactatccgtacaaatcaactctctatccacgaccgtgaatgtcagaaagacaacaagccacgacgaataccaactccaatagctatttctctctttcaacgatattctctgcgatccccttagtaatcgcgctcgcactcatggccaacacgatgccatccttcattcagcgcctattccgccccatgtccaccgccatgggcatcacgagccccggtggcggcgccgtcactcgacccgtcattccggagggtgctgagattgcgaccgttggcgctggctgcttctggggcgttgagcatctataccgcaagcacttcggcgacaagggactttacgatgcgcgcgttggatatatcggaggcgataccaagaaccccagctacaagcaagtctgcagtggcaagaccggccacaacgaagccctacaaattcattttgacccatcgcgcataacataccgtcaactcctcgagttcttctaccgcatgcacgatcccacaacagccaaccgtcaaggccccgatgtcgggccaaactaccgctcaggaatctactttcacaacgaaggccaagagaagattgcgcgagaagtcacaaaacaggcaaacgagcaatggtacaagggccgcatcgtcactgagatcgtaccggctggcccgtggtgggacgctgaggagtaccaccagctgtacctcgagagaaacccatggggctacgagtgccctagccactttttgaggccgttcgaaccactcggagagtcatgagctgcgaggtaatagatcgagaatggttgggctaggggtcagagaggaaatgaacgcttggggttatgagtgaaatgagcattgataagagctgagagccatgtgccagtgatcatatgggttccatgtggtggaaagtgcaacacatgcacttatttctatggtacaattgagttacaagtgcagaatcttagaacgccttggggataaataggagcgaaaatggaaaagcttgaacacgtcaatttgaagtattcatgcgctgtactaggatattatctgtttcaaacactgtataagtaacaacgaggccattgcaggtacctacctatcttagacttacacatgttaaagttgctcgagatcaagatagcatggcgatgcaatttgcagagccgtccaaaatctaatcctgttttgttgggca

SEQ ID NO: 13038 - DNA, 1248 bp, Muscodor strobelii
  misc_feature: SGI cDNA ID NO. 564258
  misc_feature: Encodes the peptide sequence at SEQ ID NO 13039
atgactttgcccgatgtctcggccgctgtggctcccagcggcatcgatgctggcccagagctactagcagctgtagtatctgccggtagtgaatttttcaagcaaggtggcgattctgttattgctcgtcgagctctacttgtaaaaatccgtgatctcacgcatgcactcgagacgccacgcgagatcatgatacagcattgctgggcacagcctaccaatgtaatggccatcgcatttggtgcccagtcagggctatgggccaccatggcggagaacggtgacgggccgcagaaagtaacagatctggctaatcagctcggtgtgcaagaggagcttctacagcgcatgatgagacacgtagctgcttctggatacatcaacatgacggctcctgacgtctatacgcccaacaacttcagcaagtccctcgcttccaaagaaatgagcgctggctataatgtcgctcccccaatcttaaatccaaccttcttcactgcgccgaagtggctaaaggaaagaggctacaagtgtgccacaaataaccaagataatccgtttcaaggaggccataacacaagtctgcatttcttcgagtatctccaagccaacccaccacatgcagagaacttcaacgatcacatgcgcgggtatctttctggtagaccgcagtggatggacgaagggttctacccggtcaaagaacgagttttcgacggctttaacaaggcagacgataacgcagtcttgcttgttgacgtcgcgggaggtattggccattataccgaaggcttcctttccaaattcccagatgcacaaggacgcttcatccttcaagacttgcctcctgtccttgaccaggctaaggaactccacccgcgaatcgagaagatggcatacgatttctttaccgagcaaccagtaaaaggtgctcgcgtttactacacacacttcattctgcatgattggccagatcacgacgctctcaggattgctcagggcgtgagagatgccatgaaaccaggatatagtagatttctcacccatgaccacgttgttccgccgatgggacaagactatgaacagaccgcactagacctcatcatgatgacgaattttggcgccaaagaacgcagcgctgctcagtggtcggacttgcttgagaagcaatgtgggcttaagatagtgaagatctggactcctattaatggcatcgaaagtgttattgagtgtgaacgtccagagtga

SEQ ID NO: 13039 - protein, 415 aa, Muscodor strobelii
  misc_feature: SGI Peptide ID NO. 564258
  misc_feature (130)..(388): Pfam Id: PF00891 Pfam Desc: O-methyltransferase
  misc_feature (251)..(388): Pfam Id: PF00891 Pfam Desc: O-methyltransferase
  misc_feature (5)..(412): NCBI GI: 256727756 Blast Desc: NECHADRAFT_34244 [Nectria haematococca mpVI 77-13-4]
  misc_feature (5)..(412): NCBI GI: 242783242 Blast Desc: O-methyltransferase, [Talaromyces stipitatus ATCC 10500] gi|218720295|gb|EED19714.1| O-methyltransferase, [Talaromyces stipitatus ATCC 10500]
  misc_feature (5)..(412): NCBI GI: 212527272 Blast Desc: O-methyltransferase, [Penicillium marneffei ATCC 18224] gi|210073191|gb|EEA27278.1| O-methyltransferase, [Penicillium marneffei ATCC 18224]
  misc_feature (5)..(412): NCBI GI: 240107098 Blast Desc: sterigmatocystin 8-O-methyltransferase precursor, [Coccidioides posadasii C735 delta SOWgp]
  misc_feature (2)..(412): NCBI GI: 116203239 Blast Desc: CHGG_09504 [Chaetomium globosum CBS 148.51] gi|88178022|gb|EAQ85490.1| CHGG_09504 [Chaetomium globosum CBS 148.51]
  misc_feature (37)..(412): NCBI GI: 39945744 Blast Desc: MGG_07992 [Magnaporthe grisea 70-15] gi|145019225|gb|EDK03453.1| MGG_07992 [Magnaporthe grisea 70-15]
  misc_feature (5)..(412): NCBI GI: 121709769 Blast Desc: o-methyltransferase [Aspergillus clavatus NRRL 1] gi|119400664|gb|EAW11089.1| o-methyltransferase [Aspergillus clavatus NRRL 1]
  misc_feature (16)..(412): NCBI GI: 255933237 Blast Desc: Pc12g12810 [Penicillium chrysogenum Wisconsin 54-1255] gi|211582708|emb|CAP80908.1| Pc12g12810 [Penicillium chrysogenum Wisconsin 54-1255]
  misc_feature (5)..(412): NCBI GI: 119175356 Blast Desc: CIMG_09542 [Coccidioides immitis RS]
  misc_feature (12)..(414): NCBI GI: 46137631 Blast Desc: FG10331.1 [Gibberella zeae PH-1]
  misc_feature (93)..(399): SWISSPROT Homolog: EC 2.1.1.110 Sterigmatocystin 8-O-methyltransferase
MTLPDVSAAVAPSGIDAGPELLAAVVSAGSEFFKQGGDSVIARRALLVKIRDLTHALETPREIMIQHCWAQPTNVMAIAFGAQSGLWATMAENGDGPQKVTDLANQLGVQEELLQRMMRHVAASGYINMTAPDVYTPNNFSKSLASKEMSAGYNVAPPILNPTFFTAPKWLKERGYKCATNNQDNPFQGGHNTSLHFFEYLQANPPHAENFNDHMRGYLSGRPQWMDEGFYPVKERVFDGFNKADDNAVLLVDVAGGIGHYTEGFLSKFPDAQGRFILQDLPPVLDQAKELHPRIEKMAYDFFTEQPVKGARVYYTHFILHDWPDHDALRIAQGVRDAMKPGYSRFLTHDHVVPPMGQDYEQTALDLIMMTNFGAKERSAAQWSDLLEKQCGLKIVKIWTPINGIESVIECERPE

SEQ ID NO: 13040 - DNA, 801 bp, Muscodor strobelii
  misc_feature: SGI cDNA ID NO. 564259
  misc_feature: Encodes the peptide sequence at SEQ ID NO 13041
atgggacaggcaccgtcattacctggtccgcctggaacgaagtttcgtgtcattggtgccggctggtcacgaacgggtaccaagacgcttaatgaagccttgacaatccttctggatggacctgtccatgactcggggatacagtctcttggaggtccgatgaaccagataacaacctggttagagataatggatcttgcaccaaaagcgaaatcattctcggatcagaaaaaactagactggctcataagttcagtcatcgacggctacgtagcaacaatggattgtccagctgccgcactgacaccggagattatgcgcgtatacccagatgccattgttatagcgacaacgagagatcctgagtcctggtggaggagtatgcagcatttgaacagcatgatgggcacatggtacttaccaatcattgtgctttggttgtacaaaagtcagatgtacggagtatggatggcaaagttcggtgccatcatggaatggcggtatggtcaagagaagatcgagaaagatacgctccaaaaacacgagcagcatctgcgcgacgtcgtccctccagaaaggctcatgtggtacaatgtaagtgaaggttgggagcctctgtgtcggattctcaacgtgcctgtgccagacgttccttttccccacaacaataataaggtcgatgccgcgaaaacgtttagagagcatattgttgcaggcgccgttgcgtggatatttgtactatcttccttctctatcatgatctggttccttagagactggtatctacgtcatttctcttga

SEQ ID NO: 13041 - protein, 266 aa, Muscodor strobelii
  misc_feature: SGI Peptide ID NO. 564259
  misc_feature (1)..(256): NCBI GI: 39943962 Blast Desc: MGG_03992 [Magnaporthe grisea 70-15] gi|145014711|gb|EDJ99279.1| MGG_03992 [Magnaporthe grisea 70-15]
  misc_feature (1)..(241): NCBI GI: 145247056 Blast Desc: An12g07240 [Aspergillus niger] gi|134080504|emb|CAK46352.1| protein product [Aspergillus niger]
  misc_feature (1)..(260): NCBI GI: 255941500 Blast Desc: Pc16g12200 [Penicillium chrysogenum Wisconsin 54-1255] gi|211586142|emb|CAP93890.1| Pc16g12200 [Penicillium chrysogenum Wisconsin 54-1255]
  misc_feature (1)..(258): NCBI GI: 169774259 Blast Desc: [Aspergillus oryzae RIB40] gi|83769460|dbj|BAE59595.1| protein product [Aspergillus oryzae]
  misc_feature (1)..(258): NCBI GI: 238497233 Blast Desc: NAD dependent epimerase/dehydratase, [Aspergillus flavus NRRL3357] gi|220694732|gb|EED51076.1| NAD dependent epimerase/dehydratase, [Aspergillus flavus NRRL3357]
  misc_feature (1)..(258): NCBI GI: 145234771 Blast Desc: An03g01320 [Aspergillus niger] gi|134057707|emb|CAK38105.1| protein product [Aspergillus niger]
  misc_feature (1)..(257): NCBI GI: 256728385 Blast Desc: NECHADRAFT_54291 [Nectria haematococca mpVI 77-13-4]
  misc_feature (1)..(266): NCBI GI: 145246676 Blast Desc: An12g05170 [Aspergillus niger] gi|134080308|emb|CAK46230.1| protein product [Aspergillus niger]
  misc_feature (1)..(236): NCBI GI: 67904648 Blast Desc: AN9311.2 [Aspergillus nidulans FGSC A4] gi|40747222|gb|EAA66378.1| AN9311.2 [Aspergillus nidulans FGSC A4] gi|259488146|tpe|CBF87380.1| TPA: conserved [Aspergillus FGSC
  misc_feature (1)..(260): NCBI GI: 238490282 Blast Desc: NAD dependent epimerase/dehydratase, [Aspergillus flavus NRRL3357] gi|220696791|gb|EED53132.1| NAD dependent epimerase/dehydratase, [Aspergillus flavus NRRL3357]
MGQAPSLPGPPGTKFRVIGAGWSRTGTKTLNEALTILLDGPVHDSGIQSLGGPMNQITTWLEIMDLAPKAKSFSDQKKLDWLISSVIDGYVATMDCPAAALTPEIMRVYPDAIVIATTRDPESWWRSMQHLNSMMGTWYLPIIVLWLYKSQMYGVWMAKFGAIMEWRYGQEKIEKDTLQKHEQHLRDVVPPERLMWYNVSEGWEPLCRILNVPVPDVPFPHNNNKVDAAKTFREHIVAGAVAWIFVLSSFSIMIWFLRDWYLRHFS

SEQ ID NO: 13042 - DNA, 187 bp, Muscodor strobelii
  misc_feature: SGI EST ID NO. CUFF.31040.0
  misc_feature: Variant of the nucleotide sequence at SEQ ID NO 13040
cgaattattatctcgtcatcaaggcttgtcagattgagtcaaggatgggacaggcaccgtcattacctggtccgcctggaacgaagtttcgtgtcattggtgccggctggtcacgaacgggtaccaagacgcttaatgaagccttgacaatccttctggatggacctgtccatgactcggggataca

SEQ ID NO: 13043 - DNA, 1587 bp, Muscodor strobelii
  misc_feature: SGI cDNA ID NO. 564260
  misc_feature: Elevated expression when VOC is produced
  misc_feature: Encodes the peptide sequence at SEQ ID NO 13044
atggcgaactggcttttgaaaaagattgtcagaaatgacgcgatgaaaactgatccgtcggagatttatggatggcgcgtatatctactagcatgctctgcctgttttggagcggcttctttcggttgggatagtggtgtaattggtggtgtcatcaagctggcaccttttattgcggattaccacctgggcgacacaaagagtctgtcttcagcgaacctccaagcaaatatcgtctctgtccttcaagcaggctgcttctttggtgctctagctgcatacccactagctgacatcttgggccgaaaatggactttggtctatgcttctctcttgacccttgcgggagtcattctgcaagccgctgcctctggctacgttcaggtcctctacgtcggtcgagtcgttactggactcggcgtaggagcttccagtgtcattaatcctatctacgtatccgaaaatgcgccaagagctattcgaggattgcttacgggcatgtatcaactattcatcgtgacgggtagtttgatcgccttctggacaaattacggtgccagtttacacttgaagggcaagactcaatacgtcgtcccccttgctcttcaggggctacctgcactgttcctcttcagcttgatgctgatttgcaacgaatcgccacgatatcttgcccgaaaggatcgatgggaagagtcaaaggctgtcttgaagagacttagacagctgcctgacgagcatccctatctccaggaagaaatccaagagattgccgaccagctcgagaatgagcgacgcctcatgggtgacgccaacttttggactatccagaaagagatgtggggtgtagcgacaaaccgttatcgtgccattctcagtatccttctcatgatcttccagcaacttaccggtacaaacgcaattaatgtctacgcgccgactattctcgaggggctcggcgttaagggtacatcacagggccttctcggaactggtgtctatggcattgtcaaggtgacagcttgcagcatcttcttgttattcatggcagactcacttggtcgtcgtcgctccttgcttgtgtcagcagttggccaggcattctgcatgttctacattggtatctaccttcgtgtagcacccccagacccagacaagccaatccctgtcgctggttacttcgccttggcttttatctatgtcttcgctgcgttcttccagtttggctggggccctgcctgctggattctcgtgtccgaaatccctaccactcgtcttcgcccttacaatgtagctctcgctgcagccacgcaatggttgttcaacttcgtcgttgctcgaacactacctgtcatgcttgcgactctgggcagagctggatttggaacctatttcttgtacggtagcttcagtgctatcatgtttttcttcgtctggtttttcattcctgagaccaaaggcgtttctctcgaacatatcggacagctcttcggtgactcgcagcttgatgcaaagctcgagggtgatgatgacaaaagagacactgcagttgagatctcagagactgaagggcctcgtaaggtgtaa

SEQ ID NO: 13044 - protein, 528 aa, Muscodor strobelii
  misc_feature: SGI Peptide ID NO. 564260
  misc_feature (34)..(446): Pfam Id: PF07690 Pfam Desc: Major Facilitator Superfamily
  misc_feature (30)..(497): Pfam Id: PF00083 Pfam Desc: Sugar (and other) transporter
  misc_feature (5)..(521): NCBI GI: 171694526 Blast Desc: protein product [Podospora anserina] gi|170947505|emb|CAP59666.1| protein product [Podospora anserina]
  misc_feature (5)..(508): NCBI GI: 116182958 Blast Desc: CHGG_02107 [Chaetomium globosum CBS 148.51] gi|88186404|gb|EAQ93872.1| CHGG_02107 [Chaetomium globosum CBS 148.51]
  misc_feature (1)..(511): NCBI GI: 85111358 Blast Desc: NCU00988 [Neurospora crassa OR74A] gi|28925646|gb|EAA34662.1| NCU00988 [Neurospora crassa OR74A]
  misc_feature (5)..(527): NCBI GI: 261361374 Blast Desc: quinate permease [Verticillium albo-atrum VaMs.102]
  misc_feature (5)..(527): NCBI GI: 169769687 Blast Desc: [Aspergillus oryzae RIB40] gi|83767172|dbj|BAE57311.1| protein product [Aspergillus oryzae]
  misc_feature (5)..(527): NCBI GI: 39944428 Blast Desc: MGG_04225 [Magnaporthe grisea 70-15] gi|145014972|gb|EDJ99540.1| MGG_04225 [Magnaporthe grisea 70-15]
  misc_feature (3)..(512): NCBI GI: 255938844 Blast Desc: Pc14g01980 [Penicillium chrysogenum Wisconsin 54-1255] gi|211584813|emb|CAP74339.1| Pc14g01980 [Penicillium chrysogenum Wisconsin 54-1255]
  misc_feature (5)..(527): NCBI GI: 238487992 Blast Desc: MFS quinate transporter, [Aspergillus flavus NRRL3357] gi|220700113|gb|EED56452.1| MFS quinate transporter, [Aspergillus flavus NRRL3357]
  misc_feature (3)..(519): NCBI GI: 67539128 Blast Desc: AN5734.2 [Aspergillus nidulans FGSC A4] gi|40743637|gb|EAA62827.1| AN5734.2 [Aspergillus nidulans FGSC A4] gi|259484789|tpe|CBF81311.1| TPA: MFS quinate transporter,
  misc_feature (5)..(523): NCBI GI: 146324387 Blast Desc: MFS quinate transporter [Aspergillus fumigatus Af293] gi|129557221|gb|EAL88551.2| MFS quinate transporter, [Aspergillus fumigatus Af293] gi|159124145|gb|EDP49263.1| MFS quinate A1163]
  misc_feature: Useful for introducing or modulating the production of volatile compounds
MANWLLKKIVRNDAMKTDPSEIYGWRVYLLACSACFGAASFGWDSGVIGGVIKLAPFIADYHLGDTKSLSSANLQANIVSVLQAGCFFGALAAYPLADILGRKWTLVYASLLTLAGVILQAAASGYVQVLYVGRVVTGLGVGASSVINPIYVSENAPRAIRGLLTGMYQLFIVTGSLIAFWTNYGASLHLKGKTQYVVPLALQGLPALFLFSLMLICNESPRYLARKDRWEESKAVLKRLRQLPDEHPYLQEEIQEIADQLENERRLMGDANFWTIQKEMWGVATNRYRAILSILLMIFQQLTGTNAINVYAPTILEGLGVKGTSQGLLGTGVYGIVKVTACSIFLLFMADSLGRRRSLLVSAVGQAFCMFYIGIYLRVAPPDPDKPIPVAGYFALAFIYVFAAFFQFGWGPACWILVSEIPTTRLRPYNVALAAATQWLFNFVVARTLPVMLATLGRAGFGTYFLYGSFSAIMFFFVWFFIPETKGVSLEHIGQLFGDSQLDAKLEGDDDKRDTAVEISETEGPRKV

SEQ ID NO: 13045 - DNA, 1286 bp, Muscodor strobelii
  misc_feature: SGI EST ID NO. CUFF.31047.0
  misc_feature: Variant of the nucleotide sequence at SEQ ID NO 13043
ggagcttccagtgtcattaatcctatctacgtatccgaaaatgcgccaagagctattcgaggattgcttacgggcatgtatcaactattcatcgtgacgggtagtttgatcgccttctggacaaattacggtgccagtttacacttgaagggcaagactcaatacgtcgtcccccttgctcttcaggggctacctgcactgttcctcttcagcttgatgctgatttgcaacgaatcgccacgatatcttgcccgaaaggatcgatgggaagagtcaaaggctgtcttgaagagacttagacagctgcctgacgagcatccctatctccaggaagaaatccaagagattgccgaccagctcgagaatgagcgacgcctcatgggtgacgccaacttttggactatccagaaagagatgtggggtgtagcgacaaaccgttatcgtgccattctcagtatccttctcatgatcttccagcaacttaccggtacaaacgcaattaatgtctacgcgccgactattctcgaggggctcggcgttaagggtacatcacagggccttctcggaactggtgtctatggcattgtcaaggtgacagcttgcagcatcttcttgttattcatggcagactcacttggtcgtcgtcgctccttgcttgtgtcagcagttggccaggcattctgcatgttctacattggtatctaccttcgtgtagcacccccagacccagacaagccaatccctgtcgctggttacttcgccttggcttttatctatgtcttcgctgcgttcttccagtttggctggggccctgcctgctggattctcgtgtccgaaatccctaccactcgtcttcgcccttacaatgtagctctcgctgcagccacgcaatggttgttcaacttcgtcgttgctcgaacactacctgtcatgcttgcgactctgggcagagctggatttggaacctatttcttgtacggtagcttcagtgctatcatgtttttcttcgtctggtttttcattcctgagaccaaaggcgtttctctcgaacatatcggacagctcttcggtgactcgcagcttgatgcaaagctcgagggtgatgatgacaaaagagacactgcagttgagatctcagagactgaagggcctcgtaaggtgtaaatcggacagtgatagatgttgaaaaatagatgatatctagtatgaatgaataatgccagtttgcccgtggtgacgataccctcgtttctcttcctttattctgacaatataattcaagtaca

SEQ ID NO: 13046 - DNA, 1647 bp, Muscodor strobelii
  misc_feature: SGI cDNA ID NO. 564261
  misc_feature: Encodes the peptide sequence at SEQ ID NO 13047
atggcgaactggcttttgaaaaagattgtcagaaatgacgcgatgaaaactgatccgtcggagatttatggatggcgcgtatatctactagcatgctctgcctgttttggagcggcttctttcggttgggatagtggtgtaattggtggtgtcatcaagctggcaccttttattgcgtatgttctgattgcacgtcacgcaaagaccaatgcgactaacacggagattctcattagggattaccacctgggcgacacaaagagtctgtcttcagcgaacctccaagcaaatatcgtctctgtccttcaagcaggctgcttctttggtgctctagctgcatacccactagctgacatcttgggccgaaaatggactttggtctatgcttctctcttgacccttgcgggagtcattctgcaagccgctgcctctggctacgttcaggtcctctacgtcggtcgagtcgttactggactcggcgtaggagcttccagtgtcattaatcctatctacgtatccgaaaatgcgccaagagctattcgaggattgcttacgggcatgtatcaactattcatcgtgacgggtagtttgatcgccttctggacaaattacggtgccagtttacacttgaagggcaagactcaatacgtcgtcccccttgctcttcaggggctacctgcactgttcctcttcagcttgatgctgatttgcaacgaatcgccacgatatcttgcccgaaaggatcgatgggaagagtcaaaggctgtcttgaagagacttagacagctgcctgacgagcatccctatctccaggaagaaatccaagagattgccgaccagctcgagaatgagcgacgcctcatgggtgacgccaacttttggactatccagaaagagatgtggggtgtagcgacaaaccgttatcgtgccattctcagtatccttctcatgatcttccagcaacttaccggtacaaacgcaattaatgtctacgcgccgactattctcgaggggctcggcgttaagggtacatcacagggccttctcggaactggtgtctatggcattgtcaaggtgacagcttgcagcatcttcttgttattcatggcagactcacttggtcgtcgtcgctccttgcttgtgtcagcagttggccaggcattctgcatgttctacattggtatctaccttcgtgtagcacccccagacccagacaagccaatccctgtcgctggttacttcgccttggcttttatctatgtcttcgctgcgttcttccagtttggctggggccctgcctgctggattctcgtgtccgaaatccctaccactcgtcttcgcccttacaatgtagctctcgctgcagccacgcaatggttgttcaacttcgtcgttgctcgaacactacctgtcatgcttgcgactctgggcagagctggatttggaacctatttcttgtacggtagcttcagtgctatcatgtttttcttcgtctggtttttcattcctgagaccaaaggcgtttctctcgaacatatcggacagctcttcggtgactcgcagcttgatgcaaagctcgagggtgatgatgacaaaagagacactgcagttgagatctcagagactgaagggcctcgtaaggtgtaa

SEQ ID NO: 13047 - protein, 548 aa, Muscodor strobelii
  misc_feature: SGI Peptide ID NO. 564261
  misc_feature (29)..(466): Pfam Id: PF07690 Pfam Desc: Major Facilitator Superfamily
  misc_feature (30)..(517): Pfam Id: PF00083 Pfam Desc: Sugar (and other) transporter
  misc_feature (5)..(541): NCBI GI: 171694526 Blast Desc: protein product [Podospora anserina] gi|170947505|emb|CAP59666.1| protein product [Podospora anserina]
  misc_feature (1)..(531): NCBI GI: 85111358 Blast Desc: NCU00988 [Neurospora crassa OR74A] gi|28925646|gb|EAA34662.1| NCU00988 [Neurospora crassa OR74A]
  misc_feature (5)..(528): NCBI GI: 116182958 Blast Desc: CHGG_02107 [Chaetomium globosum CBS 148.51] gi|88186404|gb|EAQ93872.1| CHGG_02107 [Chaetomium globosum CBS 148.51]
  misc_feature (5)..(547): NCBI GI: 261361374 Blast Desc: quinate permease [Verticillium albo-atrum VaMs.102]
  misc_feature (5)..(547): NCBI GI: 169769687 Blast Desc: [Aspergillus oryzae RIB40] gi|83767172|dbj|BAE57311.1| protein product [Aspergillus oryzae]
  misc_feature (5)..(547): NCBI GI: 39944428 Blast Desc: MGG_04225 [Magnaporthe grisea 70-15] gi|145014972|gb|EDJ99540.1| MGG_04225 [Magnaporthe grisea 70-15]
  misc_feature (3)..(532): NCBI GI: 255938844 Blast Desc: Pc14g01980 [Penicillium chrysogenum Wisconsin 54-1255] gi|211584813|emb|CAP74339.1| Pc14g01980 [Penicillium chrysogenum Wisconsin 54-1255]
  misc_feature (5)..(547): NCBI GI: 238487992 Blast Desc: MFS quinate transporter, [Aspergillus flavus NRRL3357] gi|220700113|gb|EED56452.1| MFS quinate transporter, [Aspergillus flavus NRRL3357]
  misc_feature (3)..(539): NCBI GI: 67539128 Blast Desc: AN5734.2 [Aspergillus nidulans FGSC A4] gi|40743637|gb|EAA62827.1| AN5734.2 [Aspergillus nidulans FGSC A4] gi|259484789|tpe|CBF81311.1| TPA: MFS quinate transporter,
  misc_feature (5)..(543): NCBI GI: 146324387 Blast Desc: MFS quinate transporter [Aspergillus fumigatus Af293] gi|129557221|gb|EAL88551.2| MFS quinate transporter, [Aspergillus fumigatus Af293] gi|159124145|gb|EDP49263.1| MFS quinate A1163]
MANWLLKKIVRNDAMKTDPSEIYGWRVYLLACSACFGAASFGWDSGVIGGVIKLAPFIAYVLIARHAKTNATNTEILIRDYHLGDTKSLSSANLQANIVSVLQAGCFFGALAAYPLADILGRKWTLVYASLLTLAGVILQAAASGYVQVLYVGRVVTGLGVGASSVINPIYVSENAPRAIRGLLTGMYQLFIVTGSLIAFWTNYGASLHLKGKTQYVVPLALQGLPALFLFSLMLICNESPRYLARKDRWEESKAVLKRLRQLPDEHPYLQEEIQEIADQLENERRLMGDANFWTIQKEMWGVATNRYRAILSILLMIFQQLTGTNAINVYAPTILEGLGVKGTSQGLLGTGVYGIVKVTACSIFLLFMADSLGRRRSLLVSAVGQAFCMFYIGIYLRVAPPDPDKPIPVAGYFALAFIYVFAAFFQFGWGPACWILVSEIPTTRLRPYNVALAAATQWLFNFVVARTLPVMLATLGRAGFGTYFLYGSFSAIMFFFVWFFIPETKGVSLEHIGQLFGDSQLDAKLEGDDDKRDTAVEISETEGPRKV

SEQ ID NO: 13048 - DNA, 1286 bp, Muscodor strobelii; identical to SEQ ID NO: 13045
  misc_feature: SGI EST ID NO. CUFF.31047.0
  misc_feature: Variant of the nucleotide sequence at SEQ ID NO 13046

SEQ ID NO: 13049 - DNA, 1380 bp, Muscodor strobelii
  misc_feature: SGI cDNA ID NO. 564262
  misc_feature: Reduced expression when VOC is produced
  misc_feature: Encodes the peptide sequence at SEQ ID NO 13050
atgctccctgatccctcccgcacgacactcggcccagatccgatacaccggcgatgcgcgatcaacggctacgcattccagcaagatgcgctacaaacctttaacgggtggcaatacgcatgcttctatgcatcactgggagacatcgaagagccattatatgtacatctctccaggcgcaaactaccagccggcgagtgggaaactatcatctttgaggactacccccagacgacggacgatggacataatacggtccagttaggtatatgtccaggtgatggcacgatacatacgtcgtatgaccatcactgcgatgtactccgatacagacactcaacaccagggctcgccacagcaccagatgactatatctggacacccaagctcttcacagaaaccctatcttccctcccaggcctatcatctcttcaaatcacagacctactaagctacataacatacccacgcttcgtagcccgcggtcacgacctcctattcacctttcggacgggcaaagccggcttaggcgacgaccacatctgtgtctacacaccctcaattaaatcttcgtcttccgcagacgtaccaacaacaatcggaacatacgcctttctaggaacgcatctaaagggcatacaaaacaacccatacatccattccctctccgtctgcccctcctcccacgatctcgtcacgacatgggtataccgggacttcgtttactacccaggatgggacgatccgctagacacgaaacataaagcacaagctggtccgaacggggcggagaacaaccacgatatctgctatgcgacttctcccgacgcggggcttacatggcggaacgcgaagggtgaggttattgcggatttgcgaaagggggagagtatactgccgagttctaatggtgtgacggtgtgggaggttgagaagggcatggggttgattaatcaggagagtcaggctgtggatcgagaggggggttgtcatgtgcttaatagggattgtgtggatgggagtatgaggtggagacattattttcttgatgctggtggaaccgcagtctctcgccctttaccacacgtagaaggcgtatacgggggcaaacgcggacaagtcgccgtcgcgaaaaacggcgatctgtatttcgttcttccgcatcattcgaagcccgagctatcgattttgtgcgcgagaaaagagaatgagtacaaggactacgagcttgtgtggcgaggggaaggattcccaccatctgagccgctcgttgataagtcgaggctgaaagaggaggatgtgctctctgtctttactaaggcagtgagcagagagagggagggcggtgttgatgttgtggtgttggattttcggctttga

SEQ ID NO: 13050 - protein, 459 aa, Muscodor strobelii
  misc_feature: SGI Peptide ID NO. 564262
  misc_feature (2)..(459): NCBI GI: 164428733 Blast Desc: NCU00990 [Neurospora crassa OR74A] gi|157072257|gb|EAA34664.2| [Neurospora crassa OR74A]
  misc_feature (1)..(357): NCBI GI: 171694528 Blast Desc: protein product [Podospora anserina] gi|170947506|emb|CAP59667.1| protein product [Podospora anserina]
  misc_feature (2)..(459): NCBI GI: 154295809 Blast Desc: BC1G_13274 [Botryotinia fuckeliana B05.10] gi|150843824|gb|EDN19017.1| BC1G_13274 [Botryotinia fuckeliana B05.10]
  misc_feature (5)..(459): NCBI GI: 145248898 Blast Desc: An14g01610 [Aspergillus niger] gi|134081461|emb|CAK46474.1| protein product [Aspergillus niger]
  misc_feature (1)..(222): NCBI GI: 116182956 Blast Desc: CHGG_02106 [Chaetomium globosum CBS 148.51] gi|88186403|gb|EAQ93871.1| CHGG_02106 [Chaetomium globosum CBS 148.51]
  misc_feature (21)..(438): NCBI GI: 162457599 Blast Desc: sce9313 [Sorangium cellulosum 'So ce 56'] gi|161168181|emb|CAN99486.1| by Glimmer/Critica [Sorangium cellulosum 'So ce 56']
  misc_feature (10)..(441): NCBI GI: 50421617 Blast Desc: DEHA0E01045g [Debaryomyces hansenii CBS767] gi|49655030|emb|CAG87554.1| DEHA2E00770p [Debaryomyces hansenii]
  misc_feature (21)..(459): NCBI GI: 169615775 Blast Desc: SNOG_11050 [Phaeosphaeria nodorum SN15] gi|111060429|gb|EAT81549.1| SNOG_11050 [Phaeosphaeria nodorum SN15]
  misc_feature (21)..(440): NCBI GI: 256725694 Blast Desc: NECHADRAFT_43140 [Nectria haematococca mpVI 77-13-4]
  misc_feature (9)..(443): NCBI GI: 46139481 Blast Desc: FG11255.1 [Gibberella zeae PH-1]
  misc_feature: Useful for introducing or modulating the production of volatile compounds
MLPDPSRTTLGPDPIHRRCAINGYAFQQDALQTFNGWQYACFYASLGDIEEPLYVHLSRRKLPAGEWETIIFEDYPQTTDDGHNTVQLGICPGDGTIHTSYDHHCDVLRYRHSTPGLATAPDDYIWTPKLFTETLSSLPGLSSLQITDLLSYITYPRFVARGHDLLFTFRTGKAGLGDDHICVYTPSIKSSSSADVPTTIGTYAFLGTHLKGIQNNPYIHSLSVCPSSHDLVTTWVYRDFVYYPGWDDPLDTKHKAQAGPNGAENNHDICYATSPDAGLTWRNAKGEVIADLRKGESILPSSNGVTVWEVEKGMGLINQESQAVDREGGCHVLNRDCVDGSMRWRHYFLDAGGTAVSRPLPHVEGVYGGKRGQVAVAKNGDLYFVLPHHSKPELSILCARKENEYKDYELVWRGEGFPPSEPLVDKSRLKEEDVLSVFTKAVSREREGGVDVVVLDFRL

SEQ ID NO: 13051 - DNA, 3269 bp, Muscodor strobelii
  misc_feature: SGI EST ID NO. CUFF.31369.1
  misc_feature: Variant of the nucleotide sequence at SEQ ID NO 13049
taagcaataatcgatcataccaactatagaaacttataatcaaacaacagactccgatacagacactcaacaccagggctcgccacagcaccagatgactatatctggacacccaagctcttcacagaaaccctatcttccctcccaggcctatcatctcttcaaatcacagacctactaagctacataacatacccacgcttcgtagcccgcggtcacgacctcctattcacctttcggacgggcaaagccggcttaggcgacgaccacatctgtgtctacacaccctcaattaaatcttcgtcttccgcagacgtaccaacaacaatcggaacatacgcctttctaggaacgcatctaaagggcatacaaaacaacccatacatccattccctctccgtctgcccctcctcccacgatctcgtcacgacatgggtataccgggacttcgtttactacccaggatgggacgatccgctagacacgaaacataaagcacaagctggtccgaacggggcggagaacaaccacgatatctgctatgcgacttctcccgacgcggggcttacatggcggaacgcgaagggtgaggttattgcggatttgcgaaagggggagagtatactgccgagttctaatggtgtgacggtgtgggaggttgagaagggcatggggttgattaatcaggagagtcaggctgtggatcgagaggggggttgtcatgtgcttaatagggattgtgtggatgggagtatgaggtggagacattattttcttgatgctggtggaaccgcagtctctcgccctttaccacacgtagaaggcgtatacgggggcaaacgcggacaagtcgccgtcgcgaaaaacggcgatctgtatttcgttcttccgcatcattcgaagcccgagctatcgattttgtgcgcgagaaaagagaatgagtacaaggactacgagcttgtgtggcgaggggaaggattcccaccatctgagccgctcgttgataagtcgaggctgaaagaggaggatgtgctctctgtctttactaaggcagtgagcagagagagggagggcggtgttgatgttgtggtgttggattttcggctttgagctgagctgtgtggcatctattcatcctgaccaaaacttgattcgggacttaatcttgggaagaggggtacatttgtcacgaataatatgtatatatgttccagtgttggtttcatttgccatagtgaatatcaaagttttattcattgcttcgttctatttccaaataccgaactccagtacccaacaatactatatcttcttcacatcgccattcgttctatcatcttttatagggacactgccattgataacctccttaggctttccagccgcaccatttggcaccttctcggccttcttcgtctctgctttttggacgggatctgagagcactttctcttgtatccacttttcagcatcaaatccagacgcaatagcaatctgcagcccagcatatgcaaaaagtacaacgatcaataccaagtcaaacacgtgcacaaaccaccagtaatactggcggccgagcgcacagttggcaaattcgtacttccattcccacgtctcttcgtcaaaccaaagactgagtaagccggcattgccaccaaagtcggccatcatgctgcgaacagtgatttctcgcatgcccggcagcagggccttccctggaagctgatctcgcgtggcgttcttccactgagtgacttcccacttgcggtcttctccttcgagagtctggttgatataatggtatatatcacaaccttcgtgatcgtgaccattgatgacgatgcctggccgtcctctgccacctgcagcagcagtcttatccccgttcaggccgtagactccttccaacaaaccccgagaagcatcagaagagagctgattttgttccttcacaccacctccgtcctcgtggaagtcgaagaagggcgcatctacgcatatgccctctcgtttgtagaggggcatgtgggtgagtactatagtaaagtggcccttgaactcgaccgctgtggaagtgtggatgacggcgttgatgaaggcatatgtgtcgtcttgtagtttctgttcgagggcgggcgtatccaagttcatattattcaggttcacgatacgtagctcgggtagcagtcggtcggaggtcgggttggtgtcgggatcaaacatggtcgcattcgtgaccgggttatcgatcggtagctcgaatcgcaactcgtatgcagatttgccaaaagcacgttcgaagcgttcgaggcgctccgtcgtgagatctcccgcgtacccaatgtcgtgatttcccacaacgttgataatccttcgcgtccatagctccgcctcgctgtcgtttctgcccagtatgccgctcacgttgtagtcctcggcaggatatgcggcgatgtcgtctgggatgcgctcgccgcccttgaacgagcggttccagaagcgccagctacgtttgtcgaactcgacgtcctcgatccattggctccccagcagatcgccgagaacagtcacgtgggtgggcttggtccaccacatgagcaggcgatagatatgtgcgaggtagaagtcgttcccaaacaggtcgatgtgcttgcggatggactcgagggtgtcggggatgtcgtcgaagaagacgtcgatcaggtcgtggacgacctggcgtatgcgcttgcgcagcgacggctgttcggtctggtatgtcagatgcctccatgcccactcggcgtggtggaaggccgagtggccgtagttcgcaatcgacgtgtcgccctcgagctggggatctccgagcgtcaggagtcggaagggcgccgagatgcccgtggggcccgacgtgtgctgccgccaagtctcttgaaatgcagcgccgtcatcgccatcactaccatttgcagcggaagtaggtaggggaaacgcacatcctcggacgacaggccagagatagatgtgtgtagtacagactatcgacacgagtatggacacgcgcacgacattgcgcagaagagcaaggatggccgcgggggtcattgggacaaccacatgaggccgtagccttggacgatgccgacggggccctggacaaaaaggaaaaggaaagtagaatgaacgaaagtgaagaagaatacagattacagactacggattacagagggcaacacttagggatgccgtataacgtcacgttaggcagggagcctagagcacagtcg

SEQ ID NO: 13052 - DNA, 1785 bp, Muscodor strobelii
  misc_feature: SGI cDNA ID NO. 564263
  misc_feature: Reduced expression when VOC is produced
  misc_feature: Encodes the peptide sequence at SEQ ID NO 13053
atgacccccgcggccatccttgctcttctgcgcaatgtcgtgcgcgtgtccatactcgtgtcgatagtctgtactacacacatctatctctggcctgtcgtccgaggatgtgcgtttcccctacctacttccgctgcaaatggtagtgatggcgatgacggcgctgcatttcaagagacttggcggcagcacacgtcgggccccacgggcatctcggcgcccttccgactcctgacgctcggagatccccagctcgagggcgacacgtcgattgcgaactacggccactcggccttccaccacgccgagtgggcatggaggcatctgacataccagaccgaacagccgtcgctgcgcaagcgcatacgccaggtcgtccacgacctgatcgacgtcttcttcgacgacatccccgacaccctcgagtccatccgcaagcacatcgacctgtttgggaacgacttctacctcgcacatatctatcgcctgctcatgtggtggaccaagcccacccacgtgactgttctcggcgatctgctggggagccaatggatcgaggacgtcgagttcgacaaacgtagctggcgcttctggaaccgctcgttcaagggcggcgagcgcatcccagacgacatcgccgcatatcctgccgaggactacaacgtgagcggcatactgggcagaaacgacagcgaggcggagctatggacgcgaaggattatcaacgttgtgggaaatcacgacattgggtacgcgggagatctcacgacggagcgcctcgaacgcttcgaacgtgcttttggcaaatctgcatacgagttgcgattcgagctaccgatcgataacccggtcacgaatgcgaccatgtttgatcccgacaccaacccgacctccgaccgactgctacccgagctacgtatcgtgaacctgaataatatgaacttggatacgcccgccctcgaacagaaactacaagacgacacatatgccttcatcaacgccgtcatccacacttccacagcggtcgagttcaagggccactttactatagtactcacccacatgcccctctacaaacgagagggcatatgcgtagatgcgcccttcttcgacttccacgaggacggaggtggtgtgaaggaacaaaatcagctctcttctgatgcttctcggggtttgttggaaggagtctacggcctgaacggggataagactgctgctgcaggtggcagaggacggccaggcatcgtcatcaatggtcacgatcacgaaggttgtgatatataccattatatcaaccagactctcgaaggagaagaccgcaagtgggaagtcactcagtggaagaacgccacgcgagatcagcttccagggaaggccctgctgccgggcatgcgagaaatcactgttcgcagcatgatggccgactttggtggcaatgccggcttactcagtctttggtttgacgaagagacgtgggaatggaagtacgaatttgccaactgtgcgctcggccgccagtattactggtggtttgtgcacgtgtttgacttggtattgatcgttgtactttttgcatatgctgggctgcagattgctattgcgtctggatttgatgctgaaaagtggatacaagagaaagtgctctcagatcccgtccaaaaagcagagacgaagaaggccgagaaggtgccaaatggtgcggctggaaagcctaaggaggttatcaatggcagtgtccctataaaagatgatagaacgaatggcgatgtgaagaagatatag

SEQ ID NO: 13053 - protein, 594 aa, Muscodor strobelii
  misc_feature: SGI Peptide ID NO. 564263
  misc_feature (1)..(581): NCBI GI: 116182978 Blast Desc: CHGG_02117 [Chaetomium globosum CBS 148.51] gi|88186414|gb|EAQ93882.1| CHGG_02117 [Chaetomium globosum CBS 148.51]
  misc_feature (6)..(541): NCBI GI: 256722585 Blast Desc: NECHADRAFT_49766 [Nectria haematococca mpVI 77-13-4]
  misc_feature (6)..(541): NCBI GI: 46120472 Blast Desc: FG04883.1 [Gibberella zeae PH-1]
  misc_feature (8)..(544): NCBI GI: 164427615 Blast Desc: NCU02940 [Neurospora crassa OR74A] gi|157071816|gb|EAA36386.2| conserved [Neurospora crassa OR74A]
  misc_feature (1)..(537): NCBI GI: 145607401 Blast Desc: MGG_12179 [Magnaporthe grisea 70-15] gi|145014966|gb|EDJ99534.1| MGG_12179 [Magnaporthe grisea 70-15]
  misc_feature (8)..(561): NCBI GI: 171694540 Blast Desc: protein product [Podospora anserina] gi|170947512|emb|CAP59673.1| protein product [Podospora anserina]
  misc_feature (6)..(580): NCBI GI: 156054951 Blast Desc: SS1G_06322 [Sclerotinia sclerotiorum 1980] gi|154704102|gb|EDO03841.1| SS1G_06322 [Sclerotinia sclerotiorum 1980]
  misc_feature (8)..(558): NCBI GI: 238843161 Blast Desc: conserved [Microsporum canis CBS 113480]
  misc_feature (16)..(548): NCBI GI: 70989245 Blast Desc: conserved [Aspergillus fumigatus Af293] gi|66847103|gb|EAL87434.1| conserved [Aspergillus fumigatus Af293] gi|159128884|gb|EDP53998.1| conserved [Aspergillus A1163]
  misc_feature (9)..(580): NCBI GI: 119188965 Blast Desc: CIMG_04530 [Coccidioides immitis RS]
  misc_feature: Useful for introducing or modulating the production of volatile compounds
MTPAAILALLRNVVRVSILVSIVCTTHIYLWPVVRGCAFPLPTSAANGSDGDDGAAFQETWRQHTSGPTGISAPFRLLTLGDPQLEGDTSIANYGHSAFHHAEWAWRHLTYQTEQPSLRKRIRQVVHDLIDVFFDDIPDTLESIRKHIDLFGNDFYLAHIYRLLMWWTKPTHVTVLGDLLGSQWIEDVEFDKRSWRFWNRSFKGGERIPDDIAAYPAEDYNVSGILGRNDSEAELWTRRIINVVGNHDIGYAGDLTTERLERFERAFGKSAYELRFELPIDNPVTNATMFDPDTNPTSDRLLPELRIVNLNNMNLDTPALEQKLQDDTYAFINAVIHTSTAVEFKGHFTIVLTHMPLYKREGICVDAPFFDFHEDGGGVKEQNQLSSDASRGLLEGVYGLNGDKTAAAGGRGRPGIVINGHDHEGCDIYHYINQTLEGEDRKWEVTQWKNATRDQLPGKALLPGMREITVRSMMADFGGNAGLLSLWFDEETWEWKYEFANCALGRQYYWWFVHVFDLVLIVVLFAYAGLQIAIASGFDAEKWIQEKVLSDPVQKAETKKAEKVPNGAAGKPKEVINGSVPIKDDRTNGDVKKI

SEQ ID NO: 13054 - DNA, 3361 bp, Muscodor strobelii
  misc_feature: SGI EST ID NO. CUFF.31369.0
  misc_feature: Variant of the nucleotide sequence at SEQ ID NO 13052
cgactgtgctctaggctccctgcctaacgtgacgttatacggcatccctaagtgttgccctctgtaatccgtagtctgtaatctgtattcttcttcactttcgttcattctactttccttttcctttttgtccagggccccgtcggcatcgtccaaggctacggcctcatgtggttgtcccaatgacccccgcggccatccttgctcttctgcgcaatgtcgtgcgcgtgtccatactcgtgtcgatagtctgtactacacacatctatctctggcctgtcgtccgaggatgtgcgtttcccctacctacttccgctgcaaatggtagtgatggcgatgacggcgctgcatttcaagagacttggcggcagcacacgtcgggccccacgggcatctcggcgcccttccgactcctgacgctcggagatccccagctcgagggcgacacgtcgattgcgaactacggccactcggccttccaccacgccgagtgggcatggaggcatctgacataccagaccgaacagccgtcgctgcgcaagcgcatacgccaggtcgtccacgacctgatcgacgtcttcttcgacgacatccccgacaccctcgagtccatccgcaagcacatcgacctgtttgggaacgacttctacctcgcacatatctatcgcctgctcatgtggtggaccaagcccacccacgtgactgttctcggcgatctgctggggagccaatggatcgaggacgtcgagttcgacaaacgtagctggcgcttctggaaccgctcgttcaagggcggcgagcgcatcccagacgacatcgccgcatatcctgccgaggactacaacgtgagcggcatactgggcagaaacgacagcgaggcggagctatggacgcgaaggattatcaacgttgtgggaaatcacgacattgggtacgcgggagatctcacgacggagcgcctcgaacgcttcgaacgtgcttttggcaaatctgcatacgagttgcgattcgagctaccgatcgataacccggtcacgaatgcgaccatgtttgatcccgacaccaacccgacctccgaccgactgctacccgagctacgtatcgtgaacctgaataatatgaacttggatacgcccgccctcgaacagaaactacaagacgacacatatgccttcatcaacgccgtcatccacacttccacagcggtcgagttcaagggccactttactatagtactcacccacatgcccctctacaaacgagagggcatatgcgtagatgcgcccttcttcgacttccacgaggacggaggtggtgtgaaggaacaaaatcagctctcttctgatgcttctcggggtttgttggaaggagtctacggcctgaacggggataagactgctgctgcaggtggcagaggacggccaggcatcgtcatcaatggtcacgatcacgaaggttgtgatatataccattatatcaaccagactctcgaaggagaagaccgcaagtgggaagtcactcagtggaagaacgccacgcgagatcagcttccagggaaggccctgctgccgggcatgcgagaaatcactgttcgcagcatgatggccgactttggtggcaatgccggcttactcagtctttggtttgacgaagagacgtgggaatggaagtacgaatttgccaactgtgcgctcggccgccagtattactggtggtttgtgcacgtgtttgacttggtattgatcgttgtactttttgcatatgctgggctgcagattgctattgcgtctggatttgatgctgaaaagtggatacaagagaaagtgctctcagatcccgtccaaaaagcagagacgaagaaggccgagaaggtgccaaatggtgcggctggaaagcctaaggaggttatcaatggcagtgtccctataaaagatgatagaacgaatggcgatgtgaagaagatatagtattgttgggtactggagttcggtatttggaaatagaacgaagcaatgaataaaactttgatattcactatggcaaatgaaaccaacactggaacatatatacatattattcgtgacaaatgtacccctcttcccaagattaagtcccgaatcaagttttggtcaggatgaatagatgccacacagctcagctcaaagccgaaaatccaacaccacaacatcaacaccgccctccctctctctgctcactgccttagtaaagacagagagcacatcctcctctttcagcctcgacttatcaacgagcggctcagatggtgggaatccttcccctcgccacacaagctcgtagtccttgtactcattctcttttctcgcgcacaaaatcgatagctcgggcttcgaatgatgcggaagaacgaaatacagatcgccgtttttcgcgacggcgacttgtccgcgtttgcccccgtatacgccttctacgtgtggtaaagggcgagagactgcggttcctgcgtaacgattttgtcagcgtcccatacaggtgcaaaacaagagaatcagagacgatagaatcgatatggacgacagaagatgaacataccaccagcatcaagaaaataatgtctccacctcatactcccatccacacaatccctattaagcacatgacaacccccctctcgatccacagcctgactctcctgattaatcaaccccatgcccttctcaacctcccacaccgtcacaccattagaactcggcagtatactctccccctttcgcaaatccgcaataacctcacccttcgcgttccgccatgtaagccccgcgtcgggagaagtcgcatagcagatatcgtggttgttctccgccccgttcggaccagcttgtgctttatgtttcgtgtctagcggatcgtcccatcctgggtagtaaacgaagtcccggtatacccatgtcgtgacgagatcgtgggaggaggggcagacggagagggaatggatgtatgggttgttttgtatgccctttagatgcgttcctagaaaggcgtatgttccgattgttgttggtacgtctgcggaagacgaagatttaattgagggtgtgtagacacagatgtggtcgtcgcctaagccggctttgcccgtccgaaaggtgaataggaggtcgtgaccgcgggctacgaagcgtgggtatgttatgtagcttagtaggtctgtgatttgaagagatgataggcctgggagggaagatagggtttctgtgaagagcttgggtgtccagatatagtcatctggtgctgtggcgagccctggtgttgagtgtctgtatcggagtctgttgtttgattataagtttctatagttggtatgatcgattattgctta

SEQ ID NO: 13055 - DNA, 423 bp, Muscodor strobelii
  misc_feature: SGI cDNA ID NO. 564264
  misc_feature: Encodes the peptide sequence at SEQ ID NO 13056
atggtgaaccgagacgagatcctggacgttgacatatcactgcgcttcaagcatggcatccagaccatcttcatgttcgtcgaccccttgaagcccttcaccgacgtccaggaagagctgttggaagtgctcaaggacagataccccaagggcattatcagcacgtcgtttcccaagaggaccaccgagcttccccaggatgcctcacagatcaagtttgcgacaccaaagtctgctgttgaccccaagcaaggctggacacccctgcacttcgatgaagacgacactcctgtcagcaagggactcaagaacaacgccatcgtggcgtttgccatcgccccggagagtgacgatgattttgagcctgagtgggaggtcgagttcccaggctacggcgacgaggaggaggaagccggggcatga

SEQ ID NO: 13056 - protein, 140 aa, Muscodor strobelii
  misc_feature: SGI Peptide ID NO. 564264
  misc_feature (6)..(129): NCBI GI: 256722584 Blast Desc: NECHADRAFT_49685 [Nectria haematococca mpVI 77-13-4]
  misc_feature (9)..(137): NCBI GI: 46120474 Blast Desc: FG04884.1 [Gibberella zeae PH-1]
  misc_feature (11)..(140): NCBI GI: 261361389 Blast Desc: conserved [Verticillium albo-atrum VaMs.102]
  misc_feature (11)..(139): NCBI GI: 156039874 Blast Desc: SS1G_12073 [Sclerotinia sclerotiorum 1980] gi|154696130|gb|EDN95868.1| SS1G_12073 [Sclerotinia sclerotiorum 1980]
  misc_feature (9)..(124): NCBI GI: 145607439 Blast Desc: MGG_04246 [Magnaporthe grisea 70-15] gi|145014993|gb|EDJ99561.1| MGG_04246 [Magnaporthe grisea 70-15]
  misc_feature (12)..(129): NCBI GI: 171694520 Blast Desc: protein product [Podospora anserina] gi|170947502|emb|CAP59663.1| protein product [Podospora anserina]
  misc_feature (12)..(137): NCBI GI: 85119317 Blast Desc: NCU02938 [Neurospora crassa OR74A] gi|28927431|gb|EAA36384.1| [Neurospora crassa OR74A]
  misc_feature (14)..(118): NCBI GI: 116182968 Blast Desc: CHGG_02112 [Chaetomium globosum CBS 148.51] gi|88186409|gb|EAQ93877.1| CHGG_02112 [Chaetomium globosum CBS 148.51]
  misc_feature (9)..(110): NCBI GI: 154296026 Blast Desc: [Botryotinia fuckeliana B05.10] gi|150843818|gb|EDN19011.1| [Botryotinia fuckeliana B05.10]
  misc_feature (13)..(137): NCBI GI: 238843137 Blast Desc: conserved [Microsporum canis CBS 113480]
MVNRDEILDVDISLRFKHGIQTIFMFVDPLKPFTDVQEELLEVLKDRYPKGIISTSFPKRTTELPQDASQIKFATPKSAVDPKQGWTPLHFDEDDTPVSKGLKNNAIVAFAIAPESDDDFEPEWEVEFPGYGDEEEEAGA

SEQ ID NO: 13057 - DNA, 1129 bp, Muscodor strobelii
  misc_feature: SGI EST ID NO. CUFF.31339.1
  misc_feature: Variant of the nucleotide sequence at SEQ ID NO 13055
gcaacccagtgtaaagtccatgcatctctctaattccacttgcactctgacagcattattctccttcgattccgcttggtgttcgtaaccagcagatatttggcttcgcacgcagttcgactgccacttccaagccgctaagaagaccataccttatcagcggacagcccagagtcaaaacatctttaactcggtgattcatacgtcacgatggtgaaccgagacgagatcctggacgttgacatatcactgcgcttcaagcatggcatccagaccatcttcatgttcgtcgaccccttgaagcccttcaccgacgtccaggaagagctgttggaagtgctcaaggacagataccccaagggcattatcagcacgtcgtttcccaagaggaccaccgagcttccccaggatgcctcacagatcaagtttgcgacaccaaagtctgctgttgaccccaagcaaggctggacacccctgcacttcgatgaagacgacactcctgtcagcaagggactcaagaacaacgccatcgtggcgtttgccatcgccccggagagtgacgatgattttgagcctgagtgggaggtcgagttcccaggctacggcgacgaggaggaggaagccggggcatgaaagcaggatcctaagagatgactagcacatatgacaaatgacgaagactcaccgccatcacgagttatgagacatgcacatgggcggtgtgtagttctcccacctggaggcaccagaaggaccgcacagaacttggccagacttgcgcagaacatcttaactggtactcactgccttcgacaggggaacatcggaggcgaaatctacgggttgtgtgtatggcttaacaccaagttatgtatggtaatgaaaggccgaaacaggcgagacgatgatgcctttctggagatcgtggccgcactgaatcataagaaatctggttgtagtggaacggacgagatgaggctagctggtgaatcacgattctgcatgaggcaaacaatttagtacttggctccatgattcccatcacatctcagatatgtggcttctcagtgatgacctggccgagagtgaaattgatgaacggcttgggatcagacgagtcagatgaggt

SEQ ID NO: 13058 - DNA, 648 bp, Muscodor strobelii
  misc_feature: SGI cDNA ID NO. 564265
  misc_feature: Encodes the peptide sequence at SEQ ID NO 13059
atgtcacttggttccaacctggaaatggagcagccaaactctgctggaaggcgacgagctcccaaactgagccgcgaagaatacgaccagctccgaagagacgcccgcctatccatcccgccgctcctacgcatccccgctgccgccattaccgcctttggcatcggcatgtcattgggtctagcacatggtagcaagatggccgggctgcgcttccgcgccgagcatgcccaccgcttgcccaagacaactaccggctggtatctataccacaaaagcaagaactatcatctcgcatttggtgggctgaaagagggcttcaaagtcggcgccaagctcggcctgctcagtactgctatgttttgcgccgagaacctgttcgatgtctatcgtggcacgaaagactttgtcagtactgttatggccagtctcgctgtcgccggcggcttcagtctgttgaatcgcttctctgctgcagagaccgctagaacggcaaaaaaggggctcgtctttggtctggtgtatggtggcgtacaggacgcgatctctcttgccaagggccgacctgtcagatatgtcgaggtgattcgagaacagctcttcggacaacctgcaccagacagtgaagtgcctagtcaatctgcctga

SEQ ID NO: 13059 - protein, 215 aa, Muscodor strobelii
  misc_feature: SGI Peptide ID NO. 564265
  misc_feature (9)..(208): NCBI GI: 39944468 Blast Desc: MGG_04245 [Magnaporthe grisea 70-15] gi|145014992|gb|EDJ99560.1| MGG_04245 [Magnaporthe grisea 70-15]
  misc_feature (24)..(200): NCBI GI: 116182970 Blast Desc: CHGG_02113 [Chaetomium globosum CBS 148.51] gi|88186410|gb|EAQ93878.1| CHGG_02113 [Chaetomium globosum CBS 148.51]
  misc_feature (34)..(200): NCBI GI: 261361388 Blast Desc: conserved [Verticillium albo-atrum VaMs.102]
  misc_feature (22)..(200): NCBI GI: 171694518 Blast Desc: protein product [Podospora anserina] gi|170947501|emb|CAP59662.1| protein product [Podospora anserina]
  misc_feature (35)..(202): NCBI GI: 85119313 Blast Desc: NCU02937 [Neurospora crassa OR74A] gi|28927430|gb|EAA36383.1| conserved [Neurospora crassa OR74A]
  misc_feature (25)..(196): NCBI GI: 156039876 Blast Desc: SS1G_12074 [Sclerotinia sclerotiorum 1980] gi|154696131|gb|EDN95869.1| SS1G_12074 [Sclerotinia sclerotiorum 1980]
  misc_feature (25)..(196): NCBI GI: 154296024 Blast Desc: BC1G_13165 [Botryotinia fuckeliana B05.10] gi|150843817|gb|EDN19010.1| BC1G_13165 [Botryotinia fuckeliana B05.10]
  misc_feature (36)..(196): NCBI GI: 256722650 Blast Desc: [Nectria haematococca mpVI 77-13-4]
  misc_feature (36)..(199): NCBI GI: 46120476 Blast Desc: FG04885.1 [Gibberella zeae PH-1]
  misc_feature (36)..(200): NCBI GI: 240279552 Blast Desc: conserved [Ajellomyces capsulatus H143]
MSLGSNLEMEQPNSAGRRRAPKLSREEYDQLRRDARLSIPPLLRIPAAAITAFGIGMSLGLAHGSKMAGLRFRAEHAHRLPKTTTGWYLYHKSKNYHLAFGGLKEGFKVGAKLGLLSTAMFCAENLFDVYRGTKDFVSTVMASLAVAGGFSLLNRFSAAETARTAKKGLVFGLVYGGVQDAISLAKGRPVRYVEVIREQLFGQPAPDSEVPSQSA

SEQ ID NO: 13060 - DNA, 5118 bp, Muscodor strobelii
  misc_feature: SGI EST ID NO. CUFF.31619.0
  misc_feature: Variant of the nucleotide sequence at SEQ ID NO 13058
tgtctccaggcgggtcgcagctgcccctgtcgcctaagaaagctctgtttgccgtttccatctggtgaagctctccgcacaaatacatcggaccacagccttgcgacgcttaccggactatacagagggtattcaacgccgtgcgctattcaatacgcgccagccctgtcacgactgcaatctacgacacgccttaccaatctccactacggatcatgtcacttggttccaacctggaaatggagcagccaaactctgctggaaggcgacgagctcccaaactgagccgcgaagaatacgaccagctccgaagagacgcccgcctatccatcccgccgctcctacgcatccccgctgccgccattaccgcctttggcatcggcatgtcattgggtctagcacatggtagcaagatggccgggctgcgcttccgcgccgagcatgcccaccgcttgcccaagacaactaccggctggtatctataccacaaaagcaagaactatcatctcgcatttggtgggctgaaagagggcttcaaagtcggcgccaagctcggcctgctcagtactgctatgttttgcgccgagaacctgttcgatgtctatcgtggcacgaaagactttgtcagtactgttatggccagtctcgctgtcgccggcggcttcagtctgttgaatcgcttctctgctgcagagaccgctagaacggcaaaaaaggggctcgtctttggtctggtgtatggtggcgtacaggacgcgatctctcttgccaagggccgacctgtcagatatgtcgaggtgattcgagaacagctcttcggacaacctgcaccagacagtgaagtgcctagtcaatctgcctgatgtgcacggcatgtgaatactacctggtaggctctgatgcgccatcttacacgaatgaccggaaacccggaaaccgggaaaccttgaaccatatctgtttggagagccaaacgcggctaccttctcctgctggttgccctcgcgatctactggaataaaggattgcgtcgcaccatgccacccctcgaccgactcgtcgaatggtagggatatgcaccttgcttcggcatagaggcttaccttagcgctcggcaggccaagagtctccgaggtcccctctcacggcagcttagcttatacttctaccactcgtgatgagagaactggaattgcgcaagctgactatagggtggctggcaaaagttttacgtgatggtatgccgcgatcatttgcaacgcaaatctttgcattatagcaggtcacatgagccgtcacgaccccgacacgatagcagtcggttttctcaggctcagagtggaactcaccaatgaagctccgagcccatcgcgatgtgctacaatagcgctatggacgtgggctacgtaacggcgcgcatggaaatccggctatgggccattgacggattttcttagtcgtgccctggactttcgtcgcattcgagaatctacttttggatttagcgagcgccggaaatctacggcatattccttgattggacaatgcctgcacgcctcacggctactggcggtattcttattggacccacgtgcgtcagtcccttgtttgataagacttccccgcgaagaccgcgaccgcagtcaggtccagtattcgacaaccgcattatcacaatgtcattgaatcgtaattggaaatatcggtggaatcgagtggatgttcgctttctgcagggtgatcttgactggcccgcatgatgcattccaaggccttttcgggctcaacaagcccgttgcgtctgggcaagccagttgcgaattcggagatagagacacgttgaaccatgacgatccgtcaaactcaagcgcagaaccttaatcccttggagaaagggaagttaaagctcgtctcctgtgttttaggctcgtccgatatcttccatgtatataaggtagcccctccaaattcaccgccctcaagcatacaaatcaataaactactccaaacttactctcctattcctccgatctcttggctcaagtattaccagtattggcttgtcatagaactattactcatcttgacgtggagtacctgacaatgatcaagacccccggggtgctcggcagtagggcggtcttgccttgctgtcttgccccgacaacaaagaagccgtcggaacttctttatgtcagtatccgtcatggacaatcacagaaattcagcacagactcacggaccaggaggaaaatccatggttcctcagcgaggccatctcctcctgcggagcagcttgttgcaactgccacgccgctgatcaaccccatagcagtagaagtcccgggagtctcaacgcccattgccaccacgatgcccaaatcagcccccttatccgtgttgccattggcgactattctgaggacactggcctctacgacgatttcatcctctcctctcctcctcccaccttctttaaagatcatgtctacgctcgctcactccaaccgagctattctaaacccagaccaaaaccctatgctccgctggtttctcaaaaagacattttacgctcagttctgcgccggcgagaatgccgccgaggtgcgccgcaccgtcgatggtctgaagaagatcggatttactggtgttctgctaggatatgcacgggaggttgtactcacagagcaacagcaacgcgatctttccccttgtggagaaggagaagcggccgaagagtgcatccgcaacgaaatcatcccctggaagaacggtaccatggagacgatccgtctagccggcaaaagtgacttcgtttctgtcaagttcagcggtgctggacggcaagcgctgtatgcactgacccaccgccttcctcccacaaaacccctcgcagcggcaattgaagagatctgcgagctggctaaggagcgcgatgtgcccctgcttatcgatgcggaacaaacagccgtccaagatggtatcgatgactgggccatgcactaccagcggcgatacaacactacacctggtcacgctatcatctacaacacctaccaggcatatctcaaggccacaccccgagttcttacctcgcatcttgatctagcatcgaaggagggtttcacattgggtgtcaagcttgtgcgcggtgcatatctaggctcggatcctcgacacatcatccacgacacaaaggagaacacagataacgcctacgacggaatcgccgcatctctcatcacacggcaatggggatcagtcctgaagaagcacgaagctgcattcccacccatcagcgtcgtgctcggatcccacaacctagagaccgtgcgcaaggctcgggaaatccgcaacagccccgcgtcggcaggcacggaactcgcgatcgcgcagctcatgggcatggcggacgaggttagctgcgagttattgggcaagaagaaagattgcgaggagagtggactggtggagaagggtgtttgtgaggcgccgagggcttataagtatatcgtctggggctcgacgaaagagtgcatggcgtatctattgagacgcgcgcatgagaataaggatgcggtgcagagaactagggctggacgggatgcggcttggaatgaggttaagaggagggtttgggcgaagttgggatttgcttaaagggcaaacttcccgaacttccccatattttctggtaaggcggaggaaagggacctttatgaggtatgaactcacgaattcatgattatggcgctctagagatcgagaaagattcagctttgcattgctatatggtcttagaggggacagagaagtgtgcatgctttagagggtatcctttatccagacagcagtagcattgatacaaacttcacgtttagcaatttttacgacttgaacattgtccgcgttgtgtggttgagtttctcctaggatggtacacgtatcctttcacacgcctcgcaaagcaattccacccactatcagcatctcggtctcgtgtctcttcgcgtcttcatctttgatcccgtccagccaacccatgccgttcagcttgtaatacttacgtattttgctattgtctgtcatggattgtaagacttcatcagtgaagcgttgtggtatgccctggacatgagcgaagaggtggtcttctacttctgaaggcgtgttgggaatcttggattctgatcctgtgtttgaagaggtggcgggaggcgtgatgaggactttgacgatgatgagattttgactggtgggcgttatgccgtgccggcggtaggcttctgagatctgagatttgcgttagcgagttcggaggaagaggtacgaggtatactgacgttgtttcccggactgagtgagtacacgatctctgagtggacgtttggcgttttcataacgccggttgtttgggctgtggtggctttgaatactgcgcttaagacttgtatgcgggatgttatctgggagtccgttaatgagttgtgcttttcctttcgatgctaacattgaatttaatcaggaagtcgtgagacatgatcctgttcatatggtgttcggtgtgtatttctacttgtatgagtttgattgaagaagttgggctcaccacactcgcgtctatgaaggcatactcgaaagcagcgttccgactcaacagctgcgcatgtaagaacgccgcgttattaacgtctttgaatactgccacatgtaccgaatgtgatgctggtagatgctcaagcggtatcgtttctaatatctgctggggtgaagtctggtttgaagacattatggcgtttgcttccgtcatcgtaaggctaggtctgtgaatcgggtagcctgtttcaaatatctcactaatgttccctctttggctatgagatagagcgcgaagggccgtagattggttgaaagtgtgcaaatttacgaatttggcttctattccatgtcccaccaagatgcatgcatgtacgactacaacatttgccgagctacttctcacatcgcggggcagttgtgacactttggaggggcatggctgccggctgccaactgctggggtctcgatatcatctctaacggaaaaagccgcctcataacttcacgaaccacgacgac

SEQ ID NO: 13061 - DNA, 1287 bp, Muscodor strobelii
  misc_feature: SGI cDNA ID NO. 564266
  misc_feature: Encodes the peptide sequence at SEQ ID NO 13062
atgcccaaatcagcccccttatccgtgttgccattggcgactattctgaggacactggcctctacgacgatttcatcctctcctctcctcctcccaccttctttaaagatcatgtctacgctcgctcactccaaccgagctattctaaacccagaccaaaaccctatgctccgctggtttctcaaaaagacattttacgctcagttctgcgccggcgagaatgccgccgaggtgcgccgcaccgtcgatggtctgaagaagatcggatttactggtgttctgctaggatatgcacgggaggttgtactcacagagcaacagcaacgcgatctttccccttgtggagaaggagaagcggccgaagagtgcatccgcaacgaaatcatcccctggaagaacggtaccatggagacgatccgtctagccggcaaaagtgacttcgtttctgtcaagttcagcggtgctggacggcaagcgctgtatgcactgacccaccgccttcctcccacaaaacccctcgcagcggcaattgaagagatctgcgagctggctaaggagcgcgatgtgcccctgcttatcgatgcggaacaaacagccgtccaagatggtatcgatgactgggccatgcactaccagcggcgatacaacactacacctggtcacgctatcatctacaacacctaccaggcatatctcaaggccacaccccgagttcttacctcgcatcttgatctagcatcgaaggagggtttcacattgggtgtcaagcttgtgcgcggtgcatatctaggctcggatcctcgacacatcatccacgacacaaaggagaacacagataacgcctacgacggaatcgccgcatctctcatcacacggcaatggggatcagtcctgaagaagcacgaagctgcattcccacccatcagcgtcgtgctcggatcccacaacctagagaccgtgcgcaaggctcgggaaatccgcaacagccccgcgtcggcaggcacggaactcgcgatcgcgcagctcatgggcatggcggacgaggttagctgcgagttattgggcaagaagaaagattgcgaggagagtggactggtggagaagggtgtttgtgaggcgccgagggcttataagtatatcgtctggggctcgacgaaagagtgcatggcgtatctattgagacgcgcgcatgagaataaggatgcggtgcagagaactagggctggacgggatgcggcttggaatgaggttaagaggagggtttgggcgaagttgggatttgcttaa

SEQ ID NO: 13062 - protein, 428 aa, Muscodor strobelii
  misc_feature: SGI Peptide ID NO. 564266
  misc_feature (33)..(413): Pfam Id: PF01619 Pfam Desc: Proline dehydrogenase
  misc_feature (176)..(413): Pfam Id: PF01619 Pfam Desc: Proline dehydrogenase
  misc_feature (1)..(428): NCBI GI: 116182972 Blast Desc: CHGG_02114 [Chaetomium globosum CBS 148.51] gi|88186411|gb|EAQ93879.1| CHGG_02114 [Chaetomium globosum CBS 148.51]
  misc_feature (1)..(428): NCBI GI: 85119309 Blast Desc: NCU02936 [Neurospora crassa OR74A] gi|28927429|gb|EAA36382.1| conserved [Neurospora crassa OR74A]
  misc_feature (5)..(428): NCBI GI: 256722649 Blast Desc: [Nectria haematococca mpVI 77-13-4]
  misc_feature (5)..(427): NCBI GI: 261361387 Blast Desc: proline oxidase [Verticillium albo-atrum VaMs.102]
  misc_feature (1)..(428): NCBI GI: 46120478 Blast Desc: FG04886.1 [Gibberella zeae PH-1]
  misc_feature (1)..(426): NCBI GI: 154296020 Blast Desc: BC1G_13163 [Botryotinia fuckeliana B05.10] gi|150843815|gb|EDN19008.1| BC1G_13163 [Botryotinia fuckeliana B05.10]
  misc_feature (2)..(428): NCBI GI: 171694516 Blast Desc: protein product [Podospora anserina] gi|170947500|emb|CAP59661.1| protein product [Podospora anserina]
  misc_feature (2)..(421): NCBI GI: 225680461 Blast Desc: carbapenem antibiotics biosynthesis protein carD [Paracoccidioides brasiliensis Pb03]
  misc_feature (2)..(421): NCBI GI: 226292915 Blast Desc: carbapenem antibiotics biosynthesis protein carD [Paracoccidioides brasiliensis Pb18]
  misc_feature (2)..(421): NCBI GI: 226280793 Blast Desc: carbapenem antibiotics biosynthesis protein carD [Paracoccidioides brasiliensis Pb01]
  misc_feature (54)..(422): SWISSPROT Homolog: EC 1.5.99.8 Proline dehydrogenase
MPKSAPLSVLPLATILRTLASTTISSSPLLLPPSLKIMSTLAHSNRAILNPDQNPMLRWFLKKTFYAQFCAGENAAEVRRTVDGLKKIGFTGVLLGYAREVVLTEQQQRDLSPCGEGEAAEECIRNEIIPWKNGTMETIRLAGKSDFVSVKFSGAGRQALYALTHRLPPTKPLAAAIEEICELAKERDVPLLIDAEQTAVQDGIDDWAMHYQRRYNTTPGHAIIYNTYQAYLKATPRVLTSHLDLASKEGFTLGVKLVRGAYLGSDPRHIIHDTKENTDNAYDGIAASLITRQWGSVLKKHEAAFPPISVVLGSHNLETVRKAREIRNSPASAGTELAIAQLMGMADEVSCELLGKKKDCEESGLVEKGVCEAPRAYKYIVWGSTKECMAYLLRRAHENKDAVQRTRAGRDAAWNEVKRRVWAKLGFA

SEQ ID NO: 13063 - DNA, 5118 bp, Muscodor strobelii; identical to SEQ ID NO: 13060
  misc_feature: SGI EST ID NO. CUFF.31619.0
  misc_feature: Variant of the nucleotide sequence at SEQ ID NO 13061

SEQ ID NO: 13064 - DNA, 645 bp, Muscodor strobelii
  misc_feature: SGI cDNA ID NO. 564267
  misc_feature: Encodes the peptide sequence at SEQ ID NO 13065
atgtcttcaaaccagacttcaccccagcagatattagaaacgataccgcttgagcatctaccagcatcacattcggtacatgtggcagtattcaaagacgttaataacgcggcgttcttacatgcgcagctgttgagtcggaacgctgctttcgagtatgccttcatagacgcgagtgtgataacatcccgcatacaagtcttaagcgcagtattcaaagccaccacagcccaaacaaccggcgttatgaaaacgccaaacgtccactcagagatcgtgtactcactcagtccgggaaacaacatctcagaagcctaccgccggcacggcataacgcccaccagtcaaaatctcatcatcgtcaaagtcctcatcacgcctcccgccacctcttcaaacacaggatcagaatccaagattcccaacacgccttcagaagtagaagaccacctcttcgctcatgtccagggcataccacaacgcttcactgatgaagtcttacaatccatgacagacaatagcaaaatacgtaagtattacaagctgaacggcatgggttggctggacgggatcaaagatgaagacgcgaagagacacgagaccgagatgctgatagtgggtggaattgctttgcgaggcgtgtga

SEQ ID NO: 13065 - protein, 214 aa, Muscodor strobelii
  misc_feature: SGI Peptide ID NO. 564267
  misc_feature (61)..(183): Pfam Id: PF08617 Pfam Desc: Kinase binding protein CGI-121
  misc_feature (12)..(214): NCBI GI: 46120480 Blast Desc: FG04887.1 [Gibberella zeae PH-1] gi|121814885|sp|Q4ID21.1|CG121_GIBZE RecName: Full=Protein CGI121
  misc_feature (11)..(214): NCBI GI: 145607409 Blast Desc: MGG_04223 [Magnaporthe grisea 70-15] gi|145014970|gb|EDJ99538.1| MGG_04223 [Magnaporthe grisea 70-15]
  misc_feature (11)..(214): NCBI GI: 261361386 Blast Desc: CGI121 [Verticillium albo-atrum VaMs.102]
  misc_feature (12)..(214): NCBI GI: 85119305 Blast Desc: NCU02935 [Neurospora crassa OR74A] gi|74618923|sp|Q7SHG9.1|CG121_NEUCR RecName: Full=Protein cgi-121 gi|28927428|gb|EAA36381.1| [Neurospora crassa OR74A]
  misc_feature (7)..(213): NCBI GI: 156039908 Blast Desc: SS1G_12090 [Sclerotinia sclerotiorum 1980] gi|154696147|gb|EDN95885.1| SS1G_12090 [Sclerotinia sclerotiorum 1980]
  misc_feature (12)..(214): NCBI GI: 171694514 Blast Desc: protein product [Podospora anserina] gi|170947499|emb|CAP59660.1| protein product [Podospora anserina]
  misc_feature (12)..(213): NCBI GI: 70989213 Blast Desc: conserved [Aspergillus fumigatus Af293] gi|74669192|sp|Q4WI37.1|CG121_ASPFU RecName: Full=Protein cgi121 gi|66847087|gb|EAL87418.1| conserved [Aspergillus fumigatus
  misc_feature (12)..(213): NCBI GI: 121710488 Blast Desc: conserved [Aspergillus clavatus NRRL 1] gi|150387839|sp|A1CEY5.1|CG121_ASPCL RecName: Full=Protein cgi121 gi|119401010|gb|EAW11434.1| conserved [Aspergillus clavatus NRRL
  misc_feature (8)..(213): NCBI GI: 145238388 Blast Desc: An07g07660 [Aspergillus niger] gi|134076326|emb|CAK39582.1| protein product [Aspergillus niger]
  misc_feature (11)..(213): NCBI GI: 242801590 Blast Desc: conserved [Talaromyces stipitatus ATCC 10500] gi|218717143|gb|EED16564.1| conserved [Talaromyces stipitatus ATCC 10500]
MSSNQTSPQQILETIPLEHLPASHSVHVAVFKDVNNAAFLHAQLLSRNAAFEYAFIDASVITSRIQVLSAVFKATTAQTTGVMKTPNVHSEIVYSLSPGNNISEAYRRHGITPTSQNLIIVKVLITPPATSSNTGSESKIPNTPSEVEDHLFAHVQGIPQRFTDEVLQSMTDNSKIRKYYKLNGMGWLDGIKDEDAKRHETEMLIVGGIALRGV

SEQ ID NO: 13066 - DNA, 4971 bp, Muscodor strobelii
  misc_feature: SGI EST ID NO. CUFF.31620.1
  misc_feature: Variant of the nucleotide sequence at SEQ ID NO 13064
cgtgaagttatgaggcggctttttccgttagagatgatatcgagaccccagcagttggcagccggcagccatgcccctccaaagtgtcacaactgccccgcgatgtgagaagtagctcggcaaatgttgtagtcgtacatgcatgcatcttggtgggacatggaatagaagccaaattcgtaaatttgcacactttcaaccaatctacggcccttcgcgctctatctcatagccaaagagggaacattagtgagatatttgaaacaggctacccgattcacagacctagccttacgatgacggaagcaaacgccataatgtcttcaaaccagacttcaccccagcagatattagaaacgataccgcttgagcatctaccagcatcacattcggtacatgtggcagtattcaaagacgttaataacgcggcgttcttacatgcgcagctgttgagtcggaacgctgctttcgagtatgccttcatagacgcgagtgtgataacatcccgcatacaagtcttaagcgcagtattcaaagccaccacagcccaaacaaccggcgttatgaaaacgccaaacgtccactcagagatcgtgtactcactcagtccgggaaacaacatctcagaagcctaccgccggcacggcataacgcccaccagtcaaaatctcatcatcgtcaaagtcctcatcacgcctcccgccacctcttcaaacacaggatcagaatccaagattcccaacacgccttcagaagtagaagaccacctcttcgctcatgtccagggcataccacaacgcttcactgatgaagtcttacaatccatgacagacaatagcaaaatacgtaagtattacaagctgaacggcatgggttggctggacgggatcaaagatgaagacgcgaagagacacgagaccgagatgctgatagtgggtggaattgctttgcgaggcgtgtgaaaggatacgtgtaccatcctaggagaaactcaaccacacaacgcggacaatgttcaagtcgtaaaaattgctaaacgtgaagtttgtatcaatgctactgctgtctggataaaggataccctctaaagcatgcacacttctctgtcccctctaagaccatatagcaatgcaaagctgaatctttctcgatctctagagcgccataatcatgaattcgtgagttcatacctcataaaggtccctttcctccgccttaccagaaaatatggggaagttcgggaagtttgccctttaagcaaatcccaacttcgcccaaaccctcctcttaacctcattccaagccgcatcccgtccagccctagttctctgcaccgcatccttattctcatgcgcgcgtctcaatagatacgccatgcactctttcgtcgagccccagacgatatacttataagccctcggcgcctcacaaacacccttctccaccagtccactctcctcgcaatctttcttcttgcccaataactcgcagctaacctcgtccgccatgcccatgagctgcgcgatcgcgagttccgtgcctgccgacgcggggctgttgcggatttcccgagccttgcgcacggtctctaggttgtgggatccgagcacgacgctgatgggtgggaatgcagcttcgtgcttcttcaggactgatccccattgccgtgtgatgagagatgcggcgattccgtcgtaggcgttatctgtgttctcctttgtgtcgtggatgatgtgtcgaggatccgagcctagatatgcaccgcgcacaagcttgacacccaatgtgaaaccctccttcgatgctagatcaagatgcgaggtaagaactcggggtgtggccttgagatatgcctggtaggtgttgtagatgatagcgtgaccaggtgtagtgttgtatcgccgctggtagtgcatggcccagtcatcgataccatcttggacggctgtttgttccgcatcgataagcaggggcacatcgcgctccttagccagctcgcagatctcttcaattgccgctgcgaggggttttgtgggaggaaggcggtgggtcagtgcatacagcgcttgccgtccagcaccgctgaacttgacagaaacgaagtcacttttgccggctagacggatcgtctccatggtaccgttcttccaggggatgatttcgttgcggatgcactcttcggccgcttctccttctccacaaggggaaagatcgcgttgctgttgctctgtgagtacaacctcccgtgcatatcctagcagaacaccagtaaatccgatcttcttcagaccatcgacggtgcggcgcacctcggcggcattctcgccggcgcagaactgagcgtaaaatgtctttttgagaaaccagcggagcatagggttttggtctgggtttagaatagctcggttggagtgagcgagcgtagacatgatctttaaagaaggtgggaggaggagaggagaggatgaaatcgtcgtagaggccagtgtcctcagaatagtcgccaatggcaacacggataagggggctgatttgggcatcgtggtggcaatgggcgttgagactcccgggacttctactgctatggggttgatcagcggcgtggcagttgcaacaagctgctccgcaggaggagatggcctcgctgaggaaccatggattttcctcctggtccgtgagtctgtgctgaatttctgtgattgtccatgacggatactgacataaagaagttccgacggcttctttgttgtcggggcaagacagcaaggcaagaccgccctactgccgagcaccccgggggtcttgatcattgtcaggtactccacgtcaagatgagtaatagttctatgacaagccaatactggtaatacttgagccaagagatcggaggaataggagagtaagtttggagtagtttattgatttgtatgcttgagggcggtgaatttggaggggctaccttatatacatggaagatatcggacgagcctaaaacacaggagacgagctttaacttccctttctccaagggattaaggttctgcgcttgagtttgacggatcgtcatggttcaacgtgtctctatctccgaattcgcaactggcttgcccagacgcaacgggcttgttgagcccgaaaaggccttggaatgcatcatgcgggccagtcaagatcaccctgcagaaagcgaacatccactcgattccaccgatatttccaattacgattcaatgacattgtgataatgcggttgtcgaatactggacctgactgcggtcgcggtcttcgcggggaagtcttatcaaacaagggactgacgcacgtgggtccaataagaataccgccagtagccgtgaggcgtgcaggcattgtccaatcaaggaatatgccgtagatttccggcgctcgctaaatccaaaagtagattctcgaatgcgacgaaagtccagggcacgactaagaaaatccgtcaatggcccatagccggatttccatgcgcgccgttacgtagcccacgtccatagcgctattgtagcacatcgcgatgggctcggagcttcattggtgagttccactctgagcctgagaaaaccgactgctatcgtgtcggggtcgtgacggctcatgtgacctgctataatgcaaagatttgcgttgcaaatgatcgcggcataccatcacgtaaaacttttgccagccaccctatagtcagcttgcgcaattccagttctctcatcacgagtggtagaagtataagctaagctgccgtgagaggggacctcggagactcttggcctgccgagcgctaaggtaagcctctatgccgaagcaaggtgcatatccctaccattcgacgagtcggtcgaggggtggcatggtgcgacgcaatcctttattccagtagatcgcgagggcaaccagcaggagaaggtagccgcgtttggctctccaaacagatatggttcaaggtttcccggtttccgggtttccggtcattcgtgtaagatggcgcatcagagcctaccaggtagtattcacatgccgtgcacatcaggcagattgactaggcacttcactgtctggtgcaggttgtccgaagagctgttctcgaatcacctcgacatatctgacaggtcggcccttggcaagagagatcgcgtcctgtacgccaccatacaccagaccaaagacgagccccttttttgccgttctagcggtctctgcagcagagaagcgatctaagccagtcagcgaatgcctcgatttatagctaggatatccttgtgcgggacatactcaacagactgaagccgccggcgacagcgagactggccataacagtactgacaaagtctttcgtgccacgatagacatcgaacaggttctcggcgcaaaacatagcagtactgagcaggccgagcttggcgccgactttgaagccctctttcagcccaccaaatgcgagatgatagttcttgcttttgtggtatagataccagccggtagttgtcttgggcaagcggtgggcatgctcggcgcggaagcgcagcccggccatcttgctaccatgtgctagacccaatgacatgccgatgccaaaggcggtaatggcggcagcggggatgcgtaggagcggcgggatggataggcgggcgtctcttcggagctggtcgtattcttcgcggctcagtttgggagctcgtcgccttccagcagagtttggctgctccatttccaggttggaaccaagtgacatgatccgtagtggagattggtaaggcgtgtcgtagattgcagtcgtgacagggctggcgcgtattgaatagcgcacggcgttgaataccctctgtatagtccggtaagcgtcgcaaggctgtggtccgatgtatttgtgcggagagcttcaccagatggaaacggcaaacagagctttcttaggcgacaggggcagctgcgacccgcctggagaca

SEQ ID NO: 13067 - DNA, 2808 bp, Muscodor strobelii
  misc_feature: SGI cDNA ID NO. 564268
  misc_feature: Encodes the peptide sequence at SEQ ID NO 13068
atgcctccaggccgtccgccaaaacggcctggtgaggcagacgtcgatgtcgacgagaacggctttcacaatggcagcaaggtcaaacttccgcgattagaccgcaccgaacgagccgggccggccgacttctccagcgtcgtcaagagcaaacttcagtcttacacgagaacaggacaagcatgcgaccgttgcaaggtccgcaaaatccgttgcgatgccctgcctgagggttgctctcactgccttaaccagaatctcgagtgttatgtgacagatcgagtttctggaagaacagagcgaagaggatatatgcaagaacttgagcgcgagaagacagatatgatgacccatatacgagagcttgaaaagaggctacagcagaacggcatggaagtgaaaccatggcactcgacttcgtttccggcgactccaactcctgataccaacgggaacggtacattcgacggcgccgcggtcacgccttccacggatccggcttcaaaggacacatggacacatcctcatacgcctgtctgggtcaaagatcgagccggtgtaatgccaatggccgagaacgctcacaacacttctaacaacagacccattaatgcccatctaggggtcagcaccgatcatgaaactctacactccatcaaaggtaccacgctcaccattcttggtagcactattgatatcgggtcatttgatgctccagacatggacgagccacccccttctgcctcaatgcgtgcgccgttatacaataaatcagtaaaggctttaatgatgtctgccatgaacgttaatccgcagatccgtgtcgacttccctcctagatcggatgcctttacctatgcggaatggtacttcgtgatgattcacccttttcatcccgtcctccacaaaccctcttttatgacaatgttagggaaaatatacgatgacgctagtttcaatccaacagctgcagatactgtcacaattcacatggtgttcgccgcaatctatctccaatatggtattcgagggcgggagcagccggaacagagggctcatctgaatgacttatcaaataagcattaccattatgctttgagcaaattgtacgaagtcgacagccttcggacactagaagcggttcaggcattatctatgctatgcacacacacgatgcgtttcccaaagcctgattctagcagtatactagcatcgcatgccttgaatatggcaatagagcttggataccaccgggcttggaagaaaccaggcgagggaacaaatctcgaaaatgagctccggaaaagggttttctggacgatactatctacgacgattgtgcttcgtggacgtatgggcaaaccgatgcctatcaggcttgaagacatcgatgttgaatttcccgagatgattcctgatgaactactaacgaaagatggcgtcgatacaacaaggcagggtcgatgtcccttcgaaattggggttgtctctgcaaaattaagtacattatatcttgagatgtatgccaatatttattgcgcgcggaaagatccgaagcgatacctggccgtcgtcgaaggtctcgaggcacaactacaatcatggcgcgatcacctcccagatggcctcaagatcaaagacacaggctccgcagagagcgaaacaagaatgtcggctatctatgccgactggtcagcgctggaatttcgtctatgcctcaggcacccttcggtcgccgtcacggacgacccagagatgattgccaacaacacaaagatatgcgaggagacagccaagggaatgctcaatagtgtgcgaaagctgtacaaactgaagtgcttggatacgacgtggtactgcaatgccgtgtatgttgctgcaatcttttcggacttggtaggacactgggagagacgacaagcaactacggctgccgaggttcaggctctgcgtgaagatatggaagtatggctcgtcgtgctggctgagacaggtagtttaatgggatctggtacgcgacttcgagacgctgtcagctcaatcgtcgaccgcacaattgcttggatagaacgagaccgcttgcagagtgaaggaaccagatcacggtcacagcccagagtgaagcaagaacccccaacaccaccttacaccaacatatcaaccaattcgaatgcagaccaaatgcagacccatactccggaacggttgaatgattcgaaacaacatatgccacctcaaaatcaagctaactactactccgaaaataaccctgatcctagtacatatcaatctctacattatgccgaaacgaacgcccacactcccagtagtataccctacggccctgacagttcatatgtctactcacaaccgggcgcaacacaagcgcaagctcacgcagaagcacaaattcgagctcaggcacatgcacaagcccaggcacaggcccatgtccaggcccagaatcactcccacaccgctgatcataatcctctcaccacatttgccacgacagctacacagatggcacaacctgacatgatgtggcgcccacaatcctcgggtgggaacacgtggcaggattggacagctgctgtcgtcgacaaccaggatcgctacagtgctgacgctctcatgtcactgggcgcttccaacaactctcgtcctgcagccaacgtgatcaatggacatggtgtcaatggtatggccatgagcacgatgggaatgcaaactccagcgatgacgacgacagcccagatgcagtggccactcatcctcttttcagatggtgttggaaacggtgtctag

SEQ ID NO: 13068 - protein, 935 aa, Muscodor strobelii
  misc_feature: SGI Peptide ID NO. 564268
  misc_feature (60)..(98): Pfam Id: PF00172 Pfam Desc: Fungal Zn(2)-Cys(6) binuclear cluster domain
  misc_feature (377)..(474): Pfam Id: PF04082 Pfam Desc: Fungal specific transcription factor domain
  misc_feature (3)..(934): NCBI GI: 256722648 Blast Desc: NECHADRAFT_49659 [Nectria haematococca mpVI 77-13-4]
  misc_feature (1)..(932): NCBI GI: 116182974 Blast Desc: CHGG_02115 [Chaetomium globosum CBS 148.51] gi|88186412|gb|EAQ93880.1| CHGG_02115 [Chaetomium globosum CBS 148.51]
  misc_feature (3)..(934): NCBI GI: 46120482 Blast Desc: FG04888.1 [Gibberella zeae PH-1]
  misc_feature (1)..(929): NCBI GI: 171694512 Blast Desc: protein product [Podospora anserina] gi|170947498|emb|CAP59659.1| protein product [Podospora anserina]
  misc_feature (1)..(934): NCBI GI: 85119301 Blast Desc: NCU02934 [Neurospora crassa OR74A] gi|28927427|gb|EAA36380.1| [Neurospora crassa OR74A]
  misc_feature (3)..(934): NCBI GI: 145607407 Blast Desc: MGG_12182 [Magnaporthe grisea 70-15] gi|145014969|gb|EDJ99537.1| MGG_12182 [Magnaporthe grisea 70-15]
  misc_feature (1)..(882): NCBI GI: 261361385 Blast Desc: conserved [Verticillium albo-atrum VaMs.102]
  misc_feature (6)..(931): NCBI GI: 154289832 Blast Desc: BC1G_15945 [Botryotinia fuckeliana B05.10] gi|150848744|gb|EDN23937.1| BC1G_15945 [Botryotinia fuckeliana B05.10]
  misc_feature (67)..(930): NCBI GI: 156039910 Blast Desc: SS1G_12091 [Sclerotinia sclerotiorum 1980] gi|154696148|gb|EDN95886.1| SS1G_12091 [Sclerotinia sclerotiorum 1980]
  misc_feature (1)..(727): NCBI GI: 189209365 Blast Desc: conserved [Pyrenophora tritici-repentis Pt-1C-BFP] gi|187977108|gb|EDU43734.1| conserved [Pyrenophora tritici-repentis Pt-1C-BFP]
MPPGRPPKRPGEADVDVDENGFHNGSKVKLPRLDRTERAGPADFSSVVKSKLQSYTRTGQACDRCKVRKIRCDALPEGCSHCLNQNLECYVTDRVSGRTERRGYMQELEREKTDMMTHIRELEKRLQQNGMEVKPWHSTSFPATPTPDTNGNGTFDGAAVTPSTDPASKDTWTHPHTPVWVKDRAGVMPMAENAHNTSNNRPINAHLGVSTDHETLHSIKGTTLTILGSTIDIGSFDAPDMDEPPPSASMRAPLYNKSVKALMMSAMNVNPQIRVDFPPRSDAFTYAEWYFVMIHPFHPVLHKPSFMTMLGKIYDDASFNPTAADTVTIHMVFAAIYLQYGIRGREQPEQRAHLNDLSNKHYHYALSKLYEVDSLRTLEAVQALSMLCTHTMRFPKPDSSSILASHALNMAIELGYHRAWKKPGEGTNLENELRKRVFWTILSTTIVLRGRMGKPMPIRLEDIDVEFPEMIPDELLTKDGVDTTRQGRCPFEIGVVSAKLSTLYLEMYANIYCARKDPKRYLAVVEGLEAQLQSWRDHLPDGLKIKDTGSAESETRMSAIYADWSALEFRLCLRHPSVAVTDDPEMIANNTKICEETAKGMLNSVRKLYKLKCLDTTWYCNAVYVAAIFSDLVGHWERRQATTAAEVQALREDMEVWLVVLAETGSLMGSGTRLRDAVSSIVDRTIAWIERDRLQSEGTRSRSQPRVKQEPPTPPYTNISTNSNADQMQTHTPERLNDSKQHMPPQNQANYYSENNPDPSTYQSLHYAETNAHTPSSIPYGPDSSYVYSQPGATQAQAHAEAQIRAQAHAQAQAQAHVQAQNHSHTADHNPLTTFATTATQMAQPDMMWRPQSSGGNTWQDWTAAVVDNQDRYSADALMSLGASNNSRPAANVINGHGVNGMAMSTMGMQTPAMTTTAQMQWPLILFSDGVGNGV

SEQ ID NO: 13069 - DNA, 4083 bp, Muscodor strobelii
  misc_feature: SGI EST ID NO. CUFF.31098.0
  misc_feature: Variant of the nucleotide sequence at SEQ ID NO 13067
gattgacccaggttcttcaaggctagcgcgcctctcgtggcatcatccgactaggatggcaccaggagacgagacctacatatatactgtataatagcatcaaaagaatgtcaacgggttggcttctgaataaaaagcttaggcaggcgaaacaggccatccaatccgccctttgcgggcgatccccaacacgttttagcatggtagatggcccgatggatgggatgaataaaggtatgatacagtccacagcgacgcgtagatactgtgagtggtcgacaggggacaaactcgaagcgtcctagggctggctgcgcttgatgtctccattccactgtattggtgagataggcgacccatcagccagcgcccattcgaggacgtttcgaggagagggtcgctatcctgtaactcctgtcactagacgaagacgcctctcaagcgttgtccccgatccccaagcgtcccaaggcacagccaagggttgggagtcctcgtctcttccgccttcttaaacttggtgggagacggcaagttccatttggagttgaggttccaattgtctctactccgtgccgcccaattacagccaccatcacccagcctgtcgccagcgctggctctgaggtaatcttcaagtagccgatctccaagtcagccgacgtattgtacatatcataagcgatttataggtagaacttggtatcatagttctatctggtgatgagccgctatactcatctcgaaactaattcgtttgcgaccgattgcgattgcgagaaccgaccgttagaaccgttgcgcagaggggacgacaagctttgaccggccgcacgcctcgcgctatcactatcagctcaccaacgagagcttgcccggaaccgtcatgcctccaggccgtccgccaaaacggcctggtgaggcagacgtcgatgtcgacgagaacggctttcacaatggcagcaaggtcaaacttccgcgattagaccgcaccgaacgagccgggccggccgacttctccagcgtcgtcaagagcaaacttcagtcttacacgagaacaggacaagcatgcgaccgttgcaaggtccgcaaaatccgttgcgatgccctgcctgagggttgctctcactgccttaaccagaatctcgagtgttatgtgacagatcgagtttctggaagaacagagcgaagaggatatatgcaagaacttgagcgcgagaagacagatatgatgacccatatacgagagcttgaaaagaggctacagcagaacggcatggaagtgaaaccatggcactcgacttcgtttccggcgactccaactcctgataccaacgggaacggtacattcgacggcgccgcggtcacgccttccacggatccggcttcaaaggacacatggacacatcctcatacgcctgtctgggtcaaagatcgagccggtgtaatgccaatggccgagaacgctcacaacacttctaacaacagacccattaatgcccatctaggggtcagcaccgatcatgaaactctacactccatcaaaggtaccacgctcaccattcttggtagcactattgatatcgggtcatttgatgctccagacatggacgagccacccccttctgcctcaatgcgtgcgccgttatacaataaatcagtaaaggctttaatgatgtctgccatgaacgttaatccgcagatccgtgtcgacttccctcctagatcggatgcctttacctatgcggaatggtacttcgtgatgattcacccttttcatcccgtcctccacaaaccctcttttatgacaatgttagggaaaatatacgatgacgctagtttcaatccaacagctgcagatactgtcacaattcacatggtgttcgccgcaatctatctccaatatggtattcgagggcgggagcagccggaacagagggctcatctgaatgacttatcaaataagcattaccattatgctttgagcaaattgtacgaagtcgacagccttcggacactagaagcggttcaggcattatctatgctatgcacacacacgatgcgtttcccaaagcctgattctagcagtatactagcatcgcatgccttgaatatggcaatagagcttggataccaccgggcttggaagaaaccaggcgagggaacaaatctcgaaaatgagctccggaaaagggttttctggacgatactatctacgacgattgtgcttcgtggacgtatgggcaaaccgatgcctatcaggcttgaagacatcgatgttgaatttcccgagatgattcctgatgaactactaacgaaagatggcgtcgatacaacaaggcagggtcgatgtcccttcgaaattggggttgtctctgcaaaattaagtacattatatcttgagatgtatgccaatatttattgcgcgcggaaagatccgaagcgatacctggccgtcgtcgaaggtctcgaggcacaactacaatcatggcgcgatcacctcccagatggcctcaagatcaaagacacaggctccgcagagagcgaaacaagaatgtcggctatctatgccgactggtcagcgctggaatttcgtctatgcctcaggcacccttcggtcgccgtcacggacgacccagagatgattgccaacaacacaaagatatgcgaggagacagccaagggaatgctcaatagtgtgcgaaagctgtacaaactgaagtgcttggatacgacgtggtactgcaatgccgtgtatgttgctgcaatcttttcggacttggtaggacactgggagagacgacaagcaactacggctgccgaggttcaggctctgcgtgaagatatggaagtatggctcgtcgtgctggctgagacaggtagtttaatgggatctggtacgcgacttcgagacgctgtcagctcaatcgtcgaccgcacaattgcttggatagaacgagaccgcttgcagagtgaaggaaccagatcacggtcacagcccagagtgaagcaagaacccccaacaccaccttacaccaacatatcaaccaattcgaatgcagaccaaatgcagacccatactccggaacggttgaatgattcgaaacaacatatgccacctcaaaatcaagctaactactactccgaaaataaccctgatcctagtacatatcaatctctacattatgccgaaacgaacgcccacactcccagtagtataccctacggccctgacagttcatatgtctactcacaaccgggcgcaacacaagcgcaagctcacgcagaagcacaaattcgagctcaggcacatgcacaagcccaggcacaggcccatgtccaggcccagaatcactcccacaccgctgatcataatcctctcaccacatttgccacgacagctacacagatggcacaacctgacatgatgtggcgcccacaatcctcgggtgggaacacgtggcaggattggacagctgctgtcgtcgacaaccaggatcgctacagtgctgacgctctcatgtcactgggcgcttccaacaactctcgtcctgcagccaacgtgatcaatggacatggtgtcaatggtatggccatgagcacgatgggaatgcaaactccagcgatgacgacgacagcccagatgcagtggccactcatcctcttttcagatggtgttggaaacggtgtctagagctgtatatcgtcgttttccctttggcgaggtttttatctctctcatttttctgagcaagtagcggcatggcgttctggcttgtgctgcatctgtgactggcctggtggaagcgtcgtctgtttttccgtcggagttcggggtatgacgaatctgtgcttactgatctaaggtagaaattcgtttctaaatacctatttgcatgtattatttcggggatccctaactcggatcgcgttgcatatgaaaagagagaacacatatatacatgtatcatggcgatgacggactttttagagttcatggttaaaaaaggtagactttacgggctgtgctgaacatcacaaaattcgtatatagtggcatacaaattatcacggcgaagccgt

SEQ ID NO: 13070 - DNA, 1665 bp, Muscodor strobelii
  misc_feature: SGI cDNA ID NO. 564269
  misc_feature: Encodes the peptide sequence at SEQ ID NO 13071
atggataccttttcgaaactcaaacgtcgcgggaccgacctcatgaactcgatcccgcaaaacatgccttcaatgcctaaggtccagatgccctctcaaatgccatcgatgccagcaatgcccaatatgccctctatgcctcatttcggcgcggggcacggcctgaagggaacatggcagcatgttcctcttccccagctgcctcggtcttcacactctctcgacgttgtcgcgggcaatgcctatatcttcggcggcgagatgcgcgatcgccaggctgtcgacaatgatatgcatgttgttgtgttgccgtcgagtggggcatcagccgactactatcccatcaaggcgaagccatctcccaagactgcggagcccgagagagttccatcctccatcgccgaggacgacgaagcagagctcaaagaccctctgaccgacgtctcccttagtcccccgcctcaatcaacgccctccagctccgaagcctcaccttcaatcggtaaaggcaagggtcccgaaacccgagacgtgccatcaggacgtatcggccacgctaccgccgtcaccggcacccgcatcttcctcttcggcggtcgatctactgccgatgaatcctcagccctcgacgaacgcggccgtgtctggatcttcgagaccaaaacccaaacatggacatacctcgacccccaccacacaagtcccatcccaccagcccggagttaccacgccgccgtagcaaccgacaagccacgagacttctcgggaattaagcccctccgcctcaagcgaacatccacctggaaagaatgggcagaaggcgactcagccgaagtcggcatcccacagcgccccatcgcaggccacatcgccgagtccgcaaccgacgatgaagcatccggcgccggcttcgggtccttcatcatccacggcggatgtctagcagacggctcccgaaccgcagacgtctggtccttcgacgtccacgcctacacctggaagcaactccccgacgccccctctccagcacgcagcggcgcgagtctcgccctcgcgaaaagccgtctgtaccgtttcggaggggttgacgggacaggggaactaggcggacagctagatgtcctcgagctcggtctcgacgaattcaacgaccagtccagcataggagagatcggcatcgtggcccgaggcacatggcacagcatcgtagcgccgtatactccggaaacgacaggcaccgagtccaacccctggcccgcgccgcgcagcgcctcaaacctatctctcgtccacgcgggtggtggccgtgaatacctcgttctttctctcggcgaatcctcacccgctgctgagggcgcacaagctggatccttccacagcgacgtgtgggcgttccaggtcccgcctctaggcggcacgacggccagtgttaccgatgcattcttccagactgtgggacgcaaaacgggagaggggacttggacgaatgttgcggttggaccctatgatgatgaggagaagatggatgtccgcgggcctggacccaggggctggtgtgctgcgagcccgttgacggatttggaggagaatgctgtgtttatctttggtgggcttgcggagaatggtgcgagattgggggatggttggatctttagacttggctag

SEQ ID NO: 13071 - protein, 554 aa, Muscodor strobelii
  misc_feature: SGI Peptide ID NO. 564269
  misc_feature (181)..(232): Pfam Id: PF01344 Pfam Desc: Kelch motif
  misc_feature (181)..(232): Pfam Id: PF07646 Pfam Desc: Kelch motif
  misc_feature (1)..(554): NCBI GI: 46137433 Blast Desc: FG10232.1 [Gibberella zeae PH-1]
  misc_feature (1)..(554): NCBI GI: 256731813 Blast Desc: NECHADRAFT_69572 [Nectria haematococca mpVI 77-13-4]
  misc_feature (1)..(553): NCBI GI: 164426139 Blast Desc: NCU10360 [Neurospora crassa OR74A] gi|18376248|emb|CAD21362.1| conserved [Neurospora crassa] gi|157071212|gb|EDO65215.1| [Neurospora crassa OR74A]
  misc_feature (1)..(554): NCBI GI: 116180114 Blast Desc: CHGG_00685 [Chaetomium globosum CBS 148.51] gi|88184982|gb|EAQ92450.1| CHGG_00685 [Chaetomium globosum CBS 148.51]
  misc_feature (1)..(553): NCBI GI: 39971973 Blast Desc: MGG_07302 [Magnaporthe grisea 70-15] gi|145019807|gb|EDK04035.1| MGG_07302 [Magnaporthe grisea 70-15]
  misc_feature (49)..(553): NCBI GI: 156055460 Blast Desc: SS1G_05082 [Sclerotinia sclerotiorum 1980] gi|154702866|gb|EDO02605.1| SS1G_05082 [Sclerotinia sclerotiorum 1980]
  misc_feature (49)..(553): NCBI GI: 154310463 Blast Desc: BC1G_07152 [Botryotinia fuckeliana B05.10] gi|150851483|gb|EDN26676.1| BC1G_07152 [Botryotinia fuckeliana B05.10]
  misc_feature (1)..(553): NCBI GI: 171691977 Blast Desc: protein product [Podospora anserina] gi|170945937|emb|CAP72738.1| protein product [Podospora anserina]
  misc_feature (235)..(554): NCBI GI: 261351818 Blast Desc: conserved [Verticillium albo-atrum VaMs.102]
  misc_feature (55)..(553): NCBI GI: 169610493 Blast Desc: SNOG_08346 [Phaeosphaeria nodorum SN15] gi|111063502|gb|EAT84622.1| SNOG_08346 [Phaeosphaeria nodorum SN15]
MDTFSKLKRRGTDLMNSIPQNMPSMPKVQMPSQMPSMPAMPNMPSMPHFGAGHGLKGTWQHVPLPQLPRSSHSLDVVAGNAYIFGGEMRDRQAVDNDMHVVVLPSSGASADYYPIKAKPSPKTAEPERVPSSIAEDDEAELKDPLTDVSLSPPPQSTPSSSEASPSIGKGKGPETRDVPSGRIGHATAVTGTRIFLFGGRSTADESSALDERGRVWIFETKTQTWTYLDPHHTSPIPPARSYHAAVATDKPRDFSGIKPLRLKRTSTWKEWAEGDSAEVGIPQRPIAGHIAESATDDEASGAGFGSFIIHGGCLADGSRTADVWSFDVHAYTWKQLPDAPSPARSGASLALAKSRLYRFGGVDGTGELGGQLDVLELGLDEFNDQSSIGEIGIVARGTWHSIVAPYTPETTGTESNPWPAPRSASNLSLVHAGGGREYLVLSLGESSPAAEGAQAGSFHSDVWAFQVPPLGGTTASVTDAFFQTVGRKTGEGTWTNVAVGPYDDEEKMDVRGPGPRGWCAASPLTDLEENAVFIFGGLAENGARLGDGWIFRLG

SEQ ID NO: 13072 - DNA, 2195 bp, Muscodor strobelii
  misc_feature: SGI EST ID NO. CUFF.31101.0
  misc_feature: Variant of the nucleotide sequence at SEQ ID NO 13070
tgggtaggtagttgtcgtgtgtttatttgtctagcgtaggatgcaatacggtcagcaccagcccagagcagcaatggtgctgacgttggccgttgacagggattccctcccctcacagcagctgtgtcccggcttgtacgtcacagcgtataggtaggcatgtacttgagcatgcggccgaccaagctgaggtttcacgaaaccaaacacctctttctctctcctgccagtgtcgtcaagtctccgtcattcatcggcaggtgtttcaataagctatcgaaagaaactcggcgagtcaattggctgccattaccaccaccgtcatcatggataccttttcgaaactcaaacgtcgcgggaccgacctcatgaactcgatcccgcaaaacatgccttcaatgcctaaggtccagatgccctctcaaatgccatcgatgccagcaatgcccaatatgccctctatgcctcatttcggcgcggggcacggcctgaagggaacatggcagcatgttcctcttccccagctgcctcggtcttcacactctctcgacgttgtcgcgggcaatgcctatatcttcggcggcgagatgcgcgatcgccaggctgtcgacaatgatatgcatgttgttgtgttgccgtcgagtggggcatcagccgactactatcccatcaaggcgaagccatctcccaagactgcggagcccgagagagttccatcctccatcgccgaggacgacgaagcagagctcaaagaccctctgaccgacgtctcccttagtcccccgcctcaatcaacgccctccagctccgaagcctcaccttcaatcggtaaaggcaagggtcccgaaacccgagacgtgccatcaggacgtatcggccacgctaccgccgtcaccggcacccgcatcttcctcttcggcggtcgatctactgccgatgaatcctcagccctcgacgaacgcggccgtgtctggatcttcgagaccaaaacccaaacatggacatacctcgacccccaccacacaagtcccatcccaccagcccggagttaccacgccgccgtagcaaccgacaagccacgagacttctcgggaattaagcccctccgcctcaagcgaacatccacctggaaagaatgggcagaaggcgactcagccgaagtcggcatcccacagcgccccatcgcaggccacatcgccgagtccgcaaccgacgatgaagcatccggcgccggcttcgggtccttcatcatccacggcggatgtctagcagacggctcccgaaccgcagacgtctggtccttcgacgtccacgcctacacctggaagcaactccccgacgccccctctccagcacgcagcggcgcgagtctcgccctcgcgaaaagccgtctgtaccgtttcggaggggttgacgggacaggggaactaggcggacagctagatgtcctcgagctcggtctcgacgaattcaacgaccagtccagcataggagagatcggcatcgtggcccgaggcacatggcacagcatcgtagcgccgtatactccggaaacgacaggcaccgagtccaacccctggcccgcgccgcgcagcgcctcaaacctatctctcgtccacgcgggtggtggccgtgaatacctcgttctttctctcggcgaatcctcacccgctgctgagggcgcacaagctggatccttccacagcgacgtgtgggcgttccaggtcccgcctctaggcggcacgacggccagtgttaccgatgcattcttccagactgtgggacgcaaaacgggagaggggacttggacgaatgttgcggttggaccctatgatgatgaggagaagatggatgtccgcgggcctggacccaggggctggtgtgctgcgagcccgttgacggatttggaggagaatgctgtgtttatctttggtgggcttgcggagaatggtgcgagattgggggatggttggatctttagacttggctaggaatgagctttggtgcgaggctgtggattaggagcgagggatggaaaatgagatcttatgggcttgtgctgtttgatgagttatgatatgtatcattgaaattccgaatctgaggatcgaaaatgtaacaaggtcagggcacaacttaaggtcattttcttctacgttctgagtgatgtcaatcctgtctgaagtgaagctctt

SEQ ID NO: 13073 - DNA, 1740 bp, Muscodor strobelii
  misc_feature: SGI cDNA ID NO. 564270
  misc_feature: Encodes the peptide sequence at SEQ ID NO 13074
atggccgacgacgcatcgataggattgagcgaagatgatctcatcgagctctcgctgctccgagatttcgagaccgatgctctgatcgaggcagatctgctcagcattgatgagcgacaaactcaacctctcgatcgagaattgatattcagatatgaagaagcagatcttcacatcacaccacatacacagtacccagcaggctccatcgaatggcatgtggagaaccacatgctatcacgaacatcagtcatcagcctacgcgaagctctaaaaaccatcgtagaagctgctgagtctacgaataatctaccacgatggcagaaccgggaagaagagtgcgatatgggtatattcgaacccgttcaggttgttctcgcactcgccaaagagacgcgcgagcacatagacggctggcgaacgacccgacctggttatgtcagagagcaagaggagctcgagaagacatatctccccttcgacaccaaactactatcaaatacacgtttagcaacaacgacaaatgacctagcgtatcgactcctcggtcgaacgccgcaggatatatgcaccatgctgccatctaactatcgcgtattgcacgtcgaagagatcatccgaaccgacctcgcatcagctttcgcagcgcgacaagaacaactacgtgagaaactagcaaaatcatcataccaatccctccaatgcttcgttacccctacagaaagaaacgggcgaaaggaagatatcgtcgagcgtctctgcacacccaaagtaacattccacggaacccaacgtcaatttgttccctcaatcgtgcggtacggatttctaaccccagggacaaaaaacccagagacgaaaatggagcacgacgtccgctgcggatcgacatacggccgcggtatttacagttcgcccgacgcaggtttctcactaagctacacggactggtcatgtcaccggacaaaaccaaatgaatacttcggcatcaagctactcgtctgcgctacattgatgggccgccccgcgcaagtatatcgtgcagacaactggcgggaacagaacgaaccgtaccccggtgctgactcacatgttgcgaataacgggtacgagtacatcgtgttctcgcccgcgcagattctgcccgtttatgtgattcatatagactggggttccgagaacgcaaagcatttcatgggcctacctgatgaccccacggcatacgtagctccaaagctatcaaaaacacaccctaagctcctatcccacatccgctggccagcagatatccagcgtgagaaagaactcgcgctcgcgcgggctcgaaagtacttcccctacggcttcggccccgcgacgggaaaaagattcgtcattgaggagattggggaggtagatgacgatgaggaagtctatggtgattaccaagatcttcgcgtcgacggcttagatgagaagaatttgggattttggagctgggtgaaagcaggtcgtgaggaagatgctgcgagagaggaagaagaggcggggcagcgtgagaggcgcgctgatgagtatgttagggagaagataacgaatggtcgggtcgttgttggtgaggatgagaaagatcgtgatgagtatgcgccgactccttggaaccttattccgttgcccattcaggagaatgaggttgctgagagcgaggagggagatgatcttgggctggggaggttgatgatgacggagcatgaagattga

SEQ ID NO: 13074 - protein, 579 aa, Muscodor strobelii
  misc_feature: SGI Peptide ID NO. 564270
  misc_feature (170)..(390): Pfam Id: PF00644 Pfam Desc: Poly(ADP-ribose) polymerase catalytic domain
  misc_feature (195)..(387): NCBI GI: 260793974 Blast Desc: BRAFLDRAFT_122376 [Branchiostoma floridae] gi|229277198|gb|EEN47996.1| BRAFLDRAFT_122376 [Branchiostoma floridae]
  misc_feature (254)..(387): NCBI GI: 281212517 Blast Desc: PARP domain-containing protein [Polysphondylium pallidum PN500]
  misc_feature (198)..(414): NCBI GI: 66810123 Blast Desc: PARP domain-containing protein [Dictyostelium discoideum AX4] gi|60467405|gb|EAL65431.1| PARP domain-containing protein [Dictyostelium discoideum AX4]
  misc_feature (192)..(391): NCBI GI: 284086603 Blast Desc: [Naegleria gruberi]
  misc_feature (244)..(387): NCBI GI: 284088154 Blast Desc: [Naegleria gruberi]
  misc_feature (197)..(391): NCBI GI: 284094143 Blast Desc: PARP-domain-containing protein [Naegleria gruberi]
  misc_feature (259)..(386): NCBI GI: 67480865 Blast Desc: [Entamoeba histolytica HM-1:IMSS] gi|56472942|gb|EAL50396.1| EHI_155600 [Entamoeba histolytica HM-1:IMSS]
MADDASIGLSEDDLIELSLLRDFETDALIEADLLSIDERQTQPLDRELIFRYEEADLHITPHTQYPAGSIEWHVENHMLSRTSVISLREALKTIVEAAESTNNLPRWQNREEECDMGIFEPVQVVLALAKETREHIDGWRTTRPGYVREQEELEKTYLPFDTKLLSNTRLATTTNDLAYRLLGRTPQDICTMLPSNYRVLHVEEIIRTDLASAFAARQEQLREKLAKSSYQSLQCFVTPTERNGRKEDIVERLCTPKVTFHGTQRQFVPSIVRYGFLTPGTKNPETKMEHDVRCGSTYGRGIYSSPDAGFSLSYTDWSCHRTKPNEYFGIKLLVCATLMGRPAQVYRADNWREQNEPYPGADSHVANNGYEYIVFSPAQILPVYVIHIDWGSENAKHFMGLPDDPTAYVAPKLSKTHPKLLSHIRWPADIQREKELALARARKYFPYGFGPATGKRFVIEEIGEVDDDEEVYGDYQDLRVDGLDEKNLGFWSWVKAGREEDAAREEEEAGQRERRADEYVREKITNGRVVVGEDEKDRDEYAPTPWNLIPLPIQENEVAESEEGDDLGLGRLMMTEHED

SEQ ID NO: 13075 - DNA, 879 bp, Muscodor strobelii
  misc_feature: SGI cDNA ID NO. 564271
  misc_feature: Encodes the peptide sequence at SEQ ID NO 13076
atggagcacgacgtccgctgcggatcgacatacggccgcggtatttacagttcgcccgacgcaggtttctcactaagctacacggactggtcatgtcaccggacaaaaccaaatgaatacttcggcatcaagctactcgtctgcgctacattgatgggccgccccgcgcaagtatatcgtgcagacaactggcgggaacagaacgaaccgtaccccggtgctgactcacatgttgcgaataacgggtacgagtacatcgtgttctcgcccgcgcagattctgcccgtttatgtgattcatatagactggggttccgagaacgcaaagcatttcatgggcctacctgatgaccccacggcatacgtagctccaaagctatcaaaaacacaccctaagctcctatcccacatccgctggccagcagatatccagcgtgagaaagaactcgcgctcgcgcgggctcgaaagtacttcccctacggcttcggccccgcgacgggaaaaagattcgtcattgaggagattggggaggtagatgacgatgaggaagtctatggtgattaccaagatcttcgcgtcgacggcttagatgagaagaatttgggattttggagctgggtgaaagcaggtcgtgaggaagatgctgcgagagaggaagaagaggcggggcagcgtgagaggcgcgctgatgagtatgttagggagaagataacgaatggtcgggtcgttgttggtgaggatgagaaagatcgtgatgagtatgcgccgactccttggaaccttattccgttgcccattcaggagaatgaggttgctgagagcgaggagggagatgatcttgggctggggaggttgatgatgacggagcatgaagattga

SEQ ID NO: 13076 - protein, 292 aa, Muscodor strobelii
  misc_feature: SGI Peptide ID NO. 564271
  misc_feature (11)..(127): NCBI GI: 66810123 Blast Desc: PARP domain-containing protein [Dictyostelium discoideum AX4] gi|60467405|gb|EAL65431.1| PARP domain-containing protein [Dictyostelium discoideum AX4]
  misc_feature (6)..(104): NCBI GI: 284086603 Blast Desc: [Naegleria gruberi]
  misc_feature (6)..(100): NCBI GI: 284088154 Blast Desc: [Naegleria gruberi]
  misc_feature (11)..(100): NCBI GI: 281212517 Blast Desc: PARP domain-containing protein [Polysphondylium pallidum PN500]
  misc_feature (11)..(100): NCBI GI: 260793974 Blast Desc: BRAFLDRAFT_122376 [Branchiostoma floridae] gi|229277198|gb|EEN47996.1| BRAFLDRAFT_122376 [Branchiostoma floridae]
MEHDVRCGSTYGRGIYSSPDAGFSLSYTDWSCHRTKPNEYFGIKLLVCATLMGRPAQVYRADNWREQNEPYPGADSHVANNGYEYIVFSPAQILPVYVIHIDWGSENAKHFMGLPDDPTAYVAPKLSKTHPKLLSHIRWPADIQREKELALARARKYFPYGFGPATGKRFVIEEIGEVDDDEEVYGDYQDLRVDGLDEKNLGFWSWVKAGREEDAAREEEEAGQRERRADEYVREKITNGRVVVGEDEKDRDEYAPTPWNLIPLPIQENEVAESEEGDDLGLGRLMMTEHED

SEQ ID NO: 13077 - DNA, 1089 bp, Muscodor strobelii
  misc_feature: SGI cDNA ID NO. 564272
  misc_feature: Elevated expression when VOC is produced
  misc_feature: Encodes the peptide sequence at SEQ ID NO 13078
atggccgccgatgggccatcgcccaacgtccaagtaactggcacctttaacgaagatggcgttaccccttgcagatcaaacgacgcgtgttcgaatcaagctgcaaatctacccgccagtctgctgagtcgcatcgcatctctagatctgcctgacaagggaatgccacatggcggtcatgcatcgtttgaacccggcattgtagagcatgctaatgattcgaagccgacggtgcctcaagaccagacggaatatgtacagcaacatgacacgacgctatgggatgctaaggggaagacccttgaatccagacctgataatccaggtctcacaggaccacctaccgctcattcttctcatagaactgaagataagcctaaacggactagaccaaccattgactacaatgatcctgactgcgtctacgaaccgccggagtcagcctcgtcgatagatggctttcaggacaccatttgtcaacctgggtcaaattctcagcttactagctcatcatcgagtctatgtgaaggtacaatacatagccatctcctgacagatatagatccagccgctgatgcctcggcgcttactgaagcaccaatatctttgaagcagaaaggaaaacaaaaagctactgaaattgagcctgaagtggagccttcagttcgtgcacaagagacatctcgcgaagatggcgctccaggatttcgcccactcagcatagatgatcctgggtgggagagctctgcagggcgaccgccacagaaattacctattaggttcaaagatgcagttggacgtaatttcgcttttccatgggaaagggcaaagcaatggaaggatatggaaatgctcatccgacaatgcttcatccacgttgatgtaatcggtcctcatgtccaagccggtcattacgacttgctagttgacttaccttatgaaacgcaaggcgcgcgacgtgacagccacatcttccgcgggaccatcgacagtttctgcttcgacatcgagcgcgcctgcagtgatagactctgctgtgagtgccgcatcatcatcaacggcggcggaatcatccagcgccaacgttag

SEQ ID NO: 13078 - protein, 362 aa, Muscodor strobelii
  misc_feature: SGI Peptide ID NO. 564272
  misc_feature (256)..(308): NCBI GI: 169601164 Blast Desc: SNOG_03439 [Phaeosphaeria nodorum SN15] gi|160705877|gb|EAT88644.2| SNOG_03439 [Phaeosphaeria nodorum SN15]
  misc_feature (256)..(308): NCBI GI: 189193433 Blast Desc: [Pyrenophora tritici-repentis Pt-1C-BFP] gi|187978619|gb|EDU45245.1| [Pyrenophora tritici-repentis Pt-1C-BFP]
  misc_feature (256)..(308): NCBI GI: 21622317 Blast Desc: related to kinetoplast-associated protein KAP [Neurospora crassa]
  misc_feature (256)..(308): NCBI GI: 164425313 Blast Desc: NCU04650 [Neurospora crassa OR74A] gi|157070878|gb|EAA29957.2| [Neurospora crassa OR74A]
  misc_feature (255)..(308): NCBI GI: 154313416 Blast Desc: BC1G_05405 [Botryotinia fuckeliana B05.10] gi|150849474|gb|EDN24667.1| BC1G_05405 [Botryotinia fuckeliana B05.10]
  misc_feature (257)..(308): NCBI GI: 116206700 Blast Desc: CHGG_02643 [Chaetomium globosum CBS 148.51] gi|88183240|gb|EAQ90708.1| CHGG_02643 [Chaetomium globosum CBS 148.51]
  misc_feature (255)..(308): NCBI GI: 156042908 Blast Desc: SS1G_11253 [Sclerotinia sclerotiorum 1980] gi|154695638|gb|EDN95376.1| SS1G_11253 [Sclerotinia sclerotiorum 1980]
  misc_feature (258)..(308): NCBI GI: 255945249 Blast Desc: Pc20g08960 [Penicillium chrysogenum Wisconsin 54-1255] gi|211588127|emb|CAP86225.1| Pc20g08960 [Penicillium chrysogenum Wisconsin 54-1255]
  misc_feature (253)..(308): NCBI GI: 159123087 Blast Desc: conserved [Aspergillus fumigatus A1163]
  misc_feature (253)..(308): NCBI GI: 70987456 Blast Desc: conserved [Aspergillus fumigatus Af293] gi|66846771|gb|EAL87103.1| conserved [Aspergillus fumigatus Af293]
  misc_feature: Useful for introducing or modulating the production of volatile compounds
MAADGPSPNVQVTGTFNEDGVTPCRSNDACSNQAANLPASLLSRIASLDLPDKGMPHGGHASFEPGIVEHANDSKPTVPQDQTEYVQQHDTTLWDAKGKTLESRPDNPGLTGPPTAHSSHRTEDKPKRTRPTIDYNDPDCVYEPPESASSIDGFQDTICQPGSNSQLTSSSSSLCEGTIHSHLLTDIDPAADASALTEAPISLKQKGKQKATEIEPEVEPSVRAQETSREDGAPGFRPLSIDDPGWESSAGRPPQKLPIRFKDAVGRNFAFPWERAKQWKDMEMLIRQCFIHVDVIGPHVQAGHYDLLVDLPYETQGARRDSHIFRGTIDSFCFDIERACSDRLCCECRIIINGGGIIQRQR

SEQ ID NO: 13079 - DNA, 4388 bp, Muscodor strobelii
  misc_feature: SGI EST ID NO. CUFF.31240.2
  misc_feature: Variant of the nucleotide sequence at SEQ ID NO 13077
cttttccggggcaattgggctctgctgggtcaactagaggaatgtcattagtgatggcatgcaaacctcccatcgtgcaagtatcactgttccaaatgcacgtaatgccaatcacggctacgtcaatccgtgacctcgcttatctataggctcatggttctaactgcgtatcacgaacacattcggctgaacaatcacaagattcctgatgaccaacagtagtattcaacatgacagctcaaatttttgagttgttattggattgcgatcagtgttgagccaggaccgcaggcaggattttggggtaagactcaaggcttggaaagattccccctctttttctcttcaacatgcacctcctccaatttgacctcgagttcttgtgcgcaagctcagccgcaaatttccgtgtcagcccccatctggtggtgcgctacatacgttggaattcacatctgccctctgcctacctttgctttctgcggttctacgtttagaaacaacctacgatcactcgacggcaatcaagccacggcgatctgcgcgctaagtcgggtttcctggccatcaattcgagggacatggtcttgtgtgtctcacggcatctaattccgtctgtcaccgcctgcagccttccatcgctggtcatcggctatccccggtgtttgtctcgctcttatggccgccgatgggccatcgcccaacgtccaagtaactggcacctttaacgaagatggcgttaccccttgcagatcaaacgacgcgtgttcgaatcaagctgcaaatctacccgccagtctgctgagtcgcatcgcatctctagatctgcctgacaagggaatgccacatggcggtcatgcatcgtttgaacccggcattgtagagcatgctaatgattcgaagccgacggtgcctcaagaccagacggaatatgtacagcaacatgacacgacgctatgggatgctaaggggaagacccttgaatccagacctgataatccaggtctcacaggaccacctaccgctcattcttctcatagaactgaagataagcctaaacggactagaccaaccattgactacaatgatcctgactgcgtctacgaaccgccggagtcagcctcgtcgatagatggctttcaggacaccatttgtcaacctgggtcaaattctcagcttactagctcatcatcgagtctatgtgaagcaccaatatctttgaagcagaaaggaaaacaaaaagctactgaaattgagcctgaagtggagccttcagttcgtgcacaagagacatctcgcgaagatggcgctccaggatttcgcccactcagcatagatgatcctgggtgggagagctctgcagggcgaccgccacagaaattacctattaggttcaaagatgcagttggacgtaatttcgcttttccatgggaaagggcaaagcaatggaaggatatggaaatgctcatccgacaatgcttcatccacgttgatgtaatcggtcctcatgtccaagccggtcattacgacttgctagttgacttaccttatgaaacgcaaggcgcgcgacgtgacagccacatcttccgcgggaccatcgacagtttctgcttcgacatcgagcgcgcctgcagtgatagactctgctgtgagtgccgcatcatcatcaacggcggcggaatcatccagcgccaacgttagtaatacgccatcaacttcccaacccaaatcaataccgatgtcaagtttcatcatactaccagagctttgggaagatacggttgagcctggcatgctagtcagccaacatatgtggccaatgcagcagagtccgcctcccccgggggcgatgtattatccaccttatggttctagaggcagaggtcgcggagctatgcccggacgtgggcgcggagtaaatgctaatggaatgggagtaggaaggggaatgccaatgcctcacattattaatgtgaccaggccacgtcgtcataaaagcccagtaccgagaggcaagaccaggagaaggctggaagggatgtaaggagaaagatgcctatgtatgatgtgtgtacgtgaagcattaccagtgtgcagatggaagacgtgttcgagttcacccaggtgtggtatagtctgtttgaaaagattgttcttttgctcccttgtattgggcattcatcatgttctataacaacacacagctgacgaacattgattatcccgcagagcagcctttgaatcatacttacctatcgtctaggaaaaggggcaaaacaagtttgcatggagtttatagcaaattgacactttcataatacaaaatacaaacattattaatcacatagcacttggatagtctcgaacccgcgtcgacgctcctgctcaatcaagaaacctgcggtcataacgtattgttttacatcattattatgatcctcgtcctaatgtacatcaaccataaaatcccgtgagtgccacctcaatcttcatgctccgtcatcatcaacctccccagcccaagatcatctccctcctcgctctcagcaacctcattctcctgaatgggcaacggaataaggttccaaggagtcggcgcatactcatcacgatctttctcatcctcaccaacaacgacccgaccattcgttatcttctccctaacatactcatcagcgcgcctctcacgctgccccgcctcttcttcctctctcgcagcatcttcctcacgacctgctttcacccagctccaaaatcccaaattcttctcatctaagccgtcgacgcgaagatcttggtaatcaccatagacttcctcatcgtcatctacctccccaatctcctcaatgacgaatctttttcccgtcgcggggccgaagccgtaggggaagtactttcgagcccgcgcgagcgcgagttctttctcacgctggatatctgctggccagcggatgtgggataggagcttagggtgtgtttttgatagctttggagctacgtatgccgtggggtcatcaggtaggcccatgaaatgctttgcgttctcggaaccccagtctatatgaatcacataaacgggcagaatctgcgcgggcgagaacacgatgtactcgtacccgttattcgcaacatgtgagtcagcaccggggtacggttcgttctgttcccgccagttgtctgcacgatatacttgcgcggggcggcccatcaatgtagcgcagacgagtagcttgatgccgaagtattcatttggttttgtccggtgacatgaccagtccgtgtagcttagtgagaaacctgcgtcgggcgaactgtaaataccgcggccgtatgtcgatccgcagcggacgtcgtgctccattttcgtctctgggttttttgtccctggggttagaaatccgtaccgcacgattgagggaacaaattgacgttgggttccgtggaatgttactttgggtgtgcagagacgctcgacgatatcttcctttcgcccgtttctttctgtaggggtaacgaagcattggagggattggtatgatgattttgctagtttctcacgtagttgttcttgtcgcgctgcgaaagctgatgcgaggtcggttcggatgatctcttcgacgtgcaatacgcgatagttagatggcagcatggtgcatatatcctgcggcgttcgaccgaggagtcgatacgctaggtcatttgtcgttgttgctaaacgtgtatttgatagtagtttggtgtcgaaggggagatatgtcttctcgagctcctcttgctctctgacataaccaggtcgggtcgttcgccagccgtctatgtgctcgcgcgtctctttggcgagtgcgagaacaacctgaacgggttcgaatatacccatatcgcactcttcttcccggttctgccatcgtggtagattattcgtagactcagcagcttctacgatggtttttagagcttcgcgtaggctgatgactgatgttcgtgatagcatgtggttctccacatgccattcgatggagcctgctgggtactgtgtatgtggtgtgatgtgaagatctgcttcttcatatctgaatatcaattctcgatcgagaggttgagtttgtcgctcatcaatgctgagcagatctgcctcgatcagagcatcggtctcgaaatctcggagcagcgagagctcgatgagatcatcttcgctcaatcctatcgatgcgtcgtcggccatgtcgattgtttgctgcactggagaaatgagttggtgtggttcagtatgtataagagagctaacttgaagtaaagctgaagtatttgaggatggtatgctggctcaattgattccaaacaaatcttgagtttgaaaacaaactgccagaacttttaactgactgaga

SEQ ID NO: 13080 - DNA, 804 bp, Muscodor strobelii
  misc_feature: SGI cDNA ID NO. 564273
  misc_feature: Encodes the peptide sequence at SEQ ID NO 13081
atgaagtttactcaattattcacggccttggcgctgggctcactccatgccgccgcttctcctacacctgagttggtacgccgagcgcctacggtttacctatgtggtgatagcacaatggcgaagaatggcgccaatgacggcgacactgatggctggggccagtatctttcgaaatatgtcacgggaatcactgtcgtgaacgaggcgattggtggccgttcagctcgctcttattggaatgaaggccgattctcgacggtggcgggcctggttaagtccggcgacatcgtagtcatcgaatttgggcacaacgatggcggatcacctacttccaacgacaacgggcgttctgactgccctggtgctggcacggagacatgcatatcagatgccaccggcgaaactgtgtacacctttgttttctatactattcaagccgcaaaactcatgaccgccaagggcgccaccgtcatcttaagctcacagactccgaacaatgtttgggagaccgggactttttctgcggcgccgtcccgattcgttggctatgatgtgaccgcgaagaatgctctcgcctctagctcagtcacatttgtggatcacttccaagcgactgctaatacgtacctgaagctggggtattctgcaacatcggccctatatcccaacgaccacacgcacacaagtcctaccggggcagactacgtcgcgaaagcgttcgttcaggccattcataccgcgatgaatgggacgacacctctggctccttacatcatcgccaaccctcctgttgtgtactga

SEQ ID NO: 13081 - protein, 267 aa, Muscodor strobelii
  misc_feature: SGI Peptide ID NO. 564273
  misc_feature (32)..(241): Pfam Id: PF00657 Pfam Desc: GDSL-like Lipase/Acylhydrolase
  misc_feature (30)..(259): NCBI GI: 256722642 Blast Desc: NECHADRAFT_49778 [Nectria haematococca mpVI 77-13-4]
  misc_feature (5)..(267): NCBI GI: 39972751 Blast Desc: MGG_07677 [Magnaporthe grisea 70-15] gi|145016892|gb|EDK01322.1| MGG_07677 [Magnaporthe grisea 70-15]
  misc_feature (31)..(259): NCBI GI: 46120402 Blast Desc: FG04848.1 [Gibberella zeae PH-1]
  misc_feature (18)..(267): NCBI GI: 85089754 Blast Desc: rhamnogalacturonan acetylesterase precursor [Neurospora crassa OR74A] gi|28919415|gb|EAA28858.1| rhamnogalacturonan acetylesterase precursor [Neurospora crassa
  misc_feature (7)..(267): NCBI GI: 116193993 Blast Desc: CHGG_06714 [Chaetomium globosum CBS 148.51] gi|88182627|gb|EAQ90095.1| CHGG_06714 [Chaetomium globosum CBS 148.51]
  misc_feature (1)..(263): NCBI GI: 171683183 Blast Desc: protein product [Podospora anserina] gi|170941551|emb|CAP67203.1| protein product [Podospora anserina]
  misc_feature (26)..(258): NCBI GI: 154293875 Blast Desc: BC1G_14009 [Botryotinia fuckeliana B05.10] gi|150845164|gb|EDN20357.1| BC1G_14009 [Botryotinia fuckeliana B05.10]
  misc_feature (30)..(258): NCBI GI: 156039711 Blast Desc: SS1G_11992 [Sclerotinia sclerotiorum 1980] gi|154697729|gb|EDN97467.1| SS1G_11992 [Sclerotinia sclerotiorum 1980]
  misc_feature (31)..(245): NCBI GI: 255938415 Blast Desc: Pc13g15830 [Penicillium chrysogenum Wisconsin 54-1255] gi|211584598|emb|CAP92652.1| Pc13g15830 [Penicillium chrysogenum Wisconsin 54-1255]
  misc_feature (1)..(251): NCBI GI: 169609659 Blast Desc: SNOG_07922 [Phaeosphaeria nodorum SN15] gi|111063078|gb|EAT84198.1| SNOG_07922 [Phaeosphaeria nodorum SN15]
MKFTQLFTALALGSLHAAASPTPELVRRAPTVYLCGDSTMAKNGANDGDTDGWGQYLSKYVTGITVVNEAIGGRSARSYWNEGRFSTVAGLVKSGDIVVIEFGHNDGGSPTSNDNGRSDCPGAGTETCISDATGETVYTFVFYTIQAAKLMTAKGATVILSSQTPNNVWETGTFSAAPSRFVGYDVTAKNALASSSVTFVDHFQATANTYLKLGYSATSALYPNDHTHTSPTGADYVAKAFVQAIHTAMNGTTPLAPYIIANPPVVY

SEQ ID NO: 13082 - DNA, 686 bp, Muscodor strobelii
  misc_feature: SGI EST ID NO. CUFF.31138.0
  misc_feature: Variant of the nucleotide sequence at SEQ ID NO 13080
ggaaattcacaacgtcctccgcaccaccggccccgatgcggagccggtgggcctcgaccgaaatggtaggaggttttaaaccatgacaaccatatccaaatacaattacagcgaagggtgtagcatgcatattgatatatagcataataattcgtcactctaggtgaagataaacgttgcgatacttttctatgatcctagagttcaaagccgtaagagtacttgaagtcaccttgaaacaaacaagaaaaatacgagatgaagtttactcaattattcacggccttggcgctgggctcactccatgccgccgcttctcctacacctgagttggtacgccgagcgcctacggtttacctatgtggtgatagcacaatggcgaagaatggcgccaatgacggcgacactgatggctggggccagtatctttcgaaatatgtcacgggaatcactgtcgtgaacgaggcgattggtggccgttcagctcgctcttattggaatgaaggccgattctcgacggtggcgggcctggttaagtccggcgacatcgtagtcatcgaatttgggcacaacgatggcggatcacctacttccaacgacaacgggcgttctgactgccctggtgctggcacggagacatgcatatcagatgccaccggcgaaactgtgtacacctttgttttcta

SEQ ID NO: 13083 - DNA, 1257 bp, Muscodor strobelii
  misc_feature: SGI cDNA ID NO. 564274
  misc_feature: Elevated expression when VOC is produced
  misc_feature: Encodes the peptide sequence at SEQ ID NO 13084
atgggattgcttaaaagcgtattgactttaccgctcttgttcgcgtcgatttcgaagggagaggcgatcgaactccggcagctaacaccgccggtcttccacagcccaacagtctatgatgcagtaattgtgggcggtggcccctctggtctgagtgctttaagtggtttggcgcgcgtacgtcgaaatgtgttgctcattgactctggtgagtatcgcaatggccctacgcgacacatgcacgatgtgatcggctctgatggcttgaaaccgtcatactttcgttggaaagcgcgacagcaaatctcattttatccgaccgtatctgcaatcaatggaactgtggacaaaatcggtgtggatgacaccgcatcaatgggtacactgttcactgttgaagcaacttttccttctggtgagaaggccactattggcgcgcgcaagattgtccttgctacgggccttcgcgatatcttgccgttgacacctggtatacgggagaactggggccaaggcattttctggtgcccttggtgcgacgggtacgaacatgctgacgagagtctgggtctactgtgtgacctccgcggcgttcctcgaaatgtgctcgaaattgaaacgttgaattcggacatcattgcatttgtgaatgggactgatactgaagtcgcgcgcgctgaagtaaatcgaactgttcccgactgggagcggtttcttgccttgcgcaacatcacgatcgagaatcgaacaatcgaaagcgtcactaggcttgctaatggtagcgaagaaagcggcgatcgcaatactgacgccccatctgcacctgaacatgacctatttagagtagattttctggacggtggctcagttgaacgtgcagcattcttcaccggcttcccggaagagcagcattccagtctcggtgccgatatgggtgttcgaattgatggtatcaaaatgttcgcggattcctctaccgggttacagacaaatatcgcaggggtttatgcagttggcgatgcgaattccgacaactcgaccaatgtcccacatgcgatgtactctggcaagagagcggcggtcttcctgcatattcgactatcagaagaagatatggccaccacggtagctaacgactctcttactgagaggagtcgcactcttgaacctcgcgcagtatgggagaagatgaatggaggaagtgcggacttccttgatgctggtgaatttcaggaaagcatagacgatgtttcttaa

SEQ ID NO: 13084 - protein, 418 aa, Muscodor strobelii
  misc_feature: SGI Peptide ID NO. 564274
  misc_feature (40)..(346): Pfam Id: PF07992 Pfam Desc: Pyridine nucleotide-disulphide oxidoreductase
  misc_feature (4)..(412): NCBI GI: 261360607 Blast Desc: sulphydryl oxidase [Verticillium albo-atrum VaMs.102]
  misc_feature (38)..(412): NCBI GI: 145607734 Blast Desc: MGG_13578 [Magnaporthe grisea 70-15] gi|145015251|gb|EDJ99787.1| MGG_13578 [Magnaporthe grisea 70-15]
  misc_feature (15)..(412): NCBI GI: 256724792 Blast Desc: NECHADRAFT_95979 [Nectria haematococca mpVI 77-13-4]
  misc_feature (15)..(412): NCBI GI: 46126357 Blast Desc: FG07556.1 [Gibberella zeae PH-1]
  misc_feature (14)..(412): NCBI GI: 116194540 Blast Desc: CHGG_03868 [Chaetomium globosum CBS 148.51] gi|88179781|gb|EAQ87249.1| CHGG_03868 [Chaetomium globosum CBS 148.51]
  misc_feature (37)..(398): NCBI GI: 67902462 Blast Desc: AN8218.2 [Aspergillus nidulans FGSC A4] gi|40739684|gb|EAA58874.1| AN8218.2 [Aspergillus nidulans FGSC A4] gi|259480999|tpe|CBF74136.1| TPA: thioredoxin reductase, FGSC
  misc_feature (37)..(399): NCBI GI: 115433084 Blast Desc: ATEG_08058 [Aspergillus terreus NIH2624] gi|114189531|gb|EAU31231.1| ATEG_08058 [Aspergillus terreus NIH2624]
  misc_feature (37)..(405): NCBI GI: 121718339 Blast Desc: thioredoxin reductase, [Aspergillus clavatus NRRL 1] gi|119404376|gb|EAW14752.1| thioredoxin reductase, [Aspergillus clavatus NRRL 1]
  misc_feature (37)..(392): NCBI GI: 119498845 Blast Desc: thioredoxin reductase, [Neosartorya fischeri NRRL 181] gi|119414344|gb|EAW24283.1| thioredoxin reductase, [Neosartorya fischeri NRRL 181]
  misc_feature (37)..(395): NCBI GI: 255950816 Blast Desc: Pc22g22810 [Penicillium chrysogenum Wisconsin 54-1255] gi|211593192|emb|CAP99569.1| Pc22g22810 [Penicillium chrysogenum Wisconsin 54-1255]
  misc_feature: Useful for introducing or modulating the production of volatile compounds
MGLLKSVLTLPLLFASISKGEAIELRQLTPPVFHSPTVYDAVIVGGGPSGLSALSGLARVRRNVLLIDSGEYRNGPTRHMHDVIGSDGLKPSYFRWKARQQISFYPTVSAINGTVDKIGVDDTASMGTLFTVEATFPSGEKATIGARKIVLATGLRDILPLTPGIRENWGQGIFWCPWCDGYEHADESLGLLCDLRGVPRNVLEIETLNSDIIAFVNGTDTEVARAEVNRTVPDWERFLALRNITIENRTIESVTRLANGSEESGDRNTDAPSAPEHDLFRVDFLDGGSVERAAFFTGFPEEQHSSLGADMGVRIDGIKMFADSSTGLQTNIAGVYAVGDANSDNSTNVPHAMYSGKRAAVFLHIRLSEEDMATTVANDSLTERSRTLEPRAVWEKMNGGSADFLDAGEFQESIDDVS

SEQ ID NO: 13085 - DNA, 1335 bp, Muscodor strobelii
  misc_feature: SGI EST ID NO. CUFF.31141.0
  misc_feature: Variant of the nucleotide sequence at SEQ ID NO 13083
cacagcccaacagtctatgatgcagtaattgtgggcggtggcccctctggtctgagtgctttaagtggtttggcgcgcgtacgtcgaaatgtgttgctcattgactctggtgagtatcgcaatggccctacgcgacacatgcacgatgtgatcggctctgatggcttgaaaccgtcatactttcgttggaaagcgcgacagcaaatctcattttatccgaccgtatctgcaatcaatggaactgtggacaaaatcggtgtggatgacaccgcatcaatgggtacactgttcactgttgaagcaacttttccttctggtgagaaggccactattggcgcgcgcaagattgtccttgctacgggccttcgcgatatcttgccgttgacacctggtatacgggagaactggggccaaggcattttctggtgcccttggtgcgacgggtacgaacatgctgacgagagtctgggtctactgtgtgacctccgcggcgttcctcgaaatgtgctcgaaattgaaacgttgaattcggacatcattgcatttgtgaatgggactgatactgaagtcgcgcgcgctgaagtaaatcgaactgttcccgactgggagcggtttcttgccttgcgcaacatcacgatcgagaatcgaacaatcgaaagcgtcactaggcttgctaatggtagcgaagaaagcggcgatcgcaatactgacgccccatctgcacctgaacatgacctatttagagtagattttctggacggtggctcagttgaacgtgcagcattcttcaccggcttcccggaagagcagcattccagtctcggtgccgatatgggtgttcgaattgatggtatcaaaatgttcgcggattcctctaccgggttacagacaaatatcgcaggggtttatgcagttggcgatgcgaattccgacaactcgaccaatgtcccacatgcgatgtactctggcaagagagcggcggtcttcctgcatattcgactatcagaagaagatatggccaccacggtagctaacgactctcttactgagaggagtcgcactcttgaacctcgcgcagtatgggagaagatgaatggaggaagtgcggacttccttgatgctggtgaatttcaggaaagcatagacgatgtttcttaaagactattatattgatcgttgtttcagtatctctaactatgtacgtgtcgtatcgttgaatgtcacggatggatggaaattatctcaagcgagtagtcattgccgatgtaccgtatttaccctgcacggcctgttctacaccgaattggtcaaattctggtgtcgattccaagtttc

SEQ ID NO: 13086 - DNA, 2775 bp, Muscodor strobelii
  misc_feature: SGI cDNA ID NO. 564275
  misc_feature: Encodes the peptide sequence at SEQ ID NO 13087
atgcttagaagtgcgcttatgggtttgattcacgacaagaccatgagtttgccaggtgtcgcttatgacgacggtgagacaacgatgctgataagtaccgatgcggatagtttggatggggttgccgagatgttccacgaaacatggggatataccattgaggttctaattggtgttgtacttctcgcgaatgaagttggttcgctgtggcctctgccactctttctcatttacttgtgctcacacatgagtcgatatgtcgcaaaacatctacagcctctccagaaggcctggaatagctcaacaaaagatcgtcttgcagccacgagctcccttttaagcgcgatgaagaatgtcaagatgctcgggcttcagtcaggtattgccagccgcattcgaaacctccgtcaggaggaattgaagatcgcttcaaagctgcgttgggttactgtatatgccaatgcctcagcaaatgcactcgggatattatctcctgctatcacgctagttgtgtttgccttgatatcgcaagctcgtggacatgctttggatgctgaaactgcatttacatctttaagcatcatgttaatggtaactcatcccgcaaatatggttatgactatggttccacgagcggcggcggcatttaccgggtttgagaaggtccaagccttccttctacgagaaagcctgtcagatgtccgcaacatattatccagccctgcaatttcggctcggcaattgaatatcgggtgcaatgaacacatacttaaaaacgtaaacatagaagcagacatcgcgaaagtcaacaacttggtcactgggcaaaggcaacgagtagccctcgcacgagcgctcttttccaagcgaaacatactactgctcgatgatacttttagcggactagatggtgaaaccgagaaatttattttccacaatatctttggacctaaaggatttgtcaagcgcttcaatactaccgttttactcgttacgaactcagcccaacatctcaatacggcggacgagatcttgatcctcggagatcaccaaatccaacaacggagcagttggcgggacatcgatcacgcaggtgcagttactaccaagttctcccactctaacattgctcgagatagcactatagtatctgcgaaatatgattatctcaacaaccaactccgagcacaaaacgagaccaaaaaagacatttcgaggcaaagcggggatatggaaatctatcgtaggttctcttctctggcttctcttaccaacttctatgcgtatggatatgtcttgatctcactcgtagcatgggcaactacgtctactcagatgtggtctgttgtcatacgaatagccccgcgatccggtgtaaagatgcatcatcacctgcttcacatcgtagcgagcgcacgcttgtcctacttctctgaaacagacaccggcgcaattttaagtcgcttcaaccaagatatgcaagcttttgacaaacagttgccttcagccctccaaaccctcgtcactctacagattggtctattgtgcatttcccagagatggcttctgttcactatacctccttgtgcaatctttatctatattattcagaagctttacctcaagacttcgagacagctacggttcttcgagctacagtctaaagcggcgatcttggcagacgttttggagactattgagggaattgagacaatcagagcttttgggtggtctgaaagggccattgtcaacaacgttcagcgtatagaacaagcccaacgtccggaatacctatctttatctctgcaaagatggctcaatctagtattagacttgctaacagcagctgtttccaccattctgatcgccgccgctgttattctacggggaacgatcagcggtggtcaggttggagctgccatgaatgtgttgatggtcacgagtacgacaatacccaggtttgtggagagctggacaacactggaaacatcactggggtctgtggcgcgattgaagactctcgaagagactgtaccttctgaagaacaagaaacagagggctccattgctctcgagaatgttagtctcgatattgctgccggacaaaaacttttcgtctgcggtcggaccgggagtggcaagagcagcctactactaacactcacaaggctcctcgagctacagtcaggccgtatcgagattgatggcgtcgacatacagtgtgtgaaattagatctgctacgcagtcgctgtctcgtcgccgtaacacaagatcctctgcttcttcctcatgagacattgcgcttcaacttagatccaagcatgacagcatctgacaatgatatactggaagccttacagaagactggcctgtcaaagcattttctccctagtcatgtgtcacatgcggtcctctatgagaagctctcatcatttcgggatctatcagttggtcaatgtcaactcttcgcaatctgtcgcgcagtcatcaaagcgggattattaagacgaggaggaatcaaatctgtcatcctcttggatgaagtcacttcatccctggatcatgtcacggaggcgataattcatgatattattgaagacgagtttacgaaatatgggcacacagtggttatagttacccatcgcctcaaactgttaaagagccacacagtcgttaccagggacgcaatagcattgatcgcagatggaaaacttatcgacgtgattaaggactttgggccgaagacactacaacgcttaacttcaggcaaatag

SEQ ID NO: 13087 - protein, 924 aa, Muscodor strobelii
  misc_feature: SGI Peptide ID NO. 564275
  misc_feature (374)..(651): Pfam Id: PF00664 Pfam Desc: ABC transporter transmembrane region
  misc_feature (701)..(903): Pfam Id: PF00005 Pfam Desc: ABC transporter
  misc_feature (185)..(351): Pfam Id: PF00005 Pfam Desc: ABC transporter
  misc_feature (422)..(651): Pfam Id: PF00664 Pfam Desc: ABC transporter transmembrane region
  misc_feature (2)..(202): Pfam Id: PF00664 Pfam Desc: ABC transporter transmembrane region
  misc_feature (254)..(351): Pfam Id: PF00005 Pfam Desc: ABC transporter
  misc_feature (276)..(920): NCBI GI: 119485528 Blast Desc: ABC transporter, [Neosartorya fischeri NRRL 181] gi|119410354|gb|EAW20301.1| ABC transporter, [Neosartorya fischeri NRRL 181]
  misc_feature (248)..(920): NCBI GI: 242784150 Blast Desc: multidrug resistance protein, [Talaromyces stipitatus ATCC 10500] gi|218720476|gb|EED19895.1| multidrug resistance protein, [Talaromyces stipitatus ATCC 10500]
  misc_feature (271)..(920): NCBI GI: 156042470 Blast Desc: SS1G_11032 [Sclerotinia sclerotiorum 1980] gi|154695419|gb|EDN95157.1| SS1G_11032 [Sclerotinia sclerotiorum 1980]
  misc_feature (337)..(920): NCBI GI: 154291998 Blast Desc: BC1G_14926 [Botryotinia fuckeliana B05.10] gi|150846345|gb|EDN21538.1| BC1G_14926 [Botryotinia fuckeliana B05.10]
  misc_feature (271)..(909): NCBI GI: 238507067 Blast Desc: ATP-binding cassette transporter, [Aspergillus flavus NRRL3357] gi|220689448|gb|EED45799.1| ATP-binding cassette transporter, [Aspergillus flavus NRRL3357]
  misc_feature (271)..(905): NCBI GI: 212536923 Blast Desc: ATP-binding cassette transporter, [Penicillium marneffei ATCC 18224] gi|210068359|gb|EEA22450.1| ATP-binding cassette transporter, [Penicillium marneffei ATCC 18224]
  misc_feature (271)..(832): NCBI GI: 238488287 Blast Desc: multidrug resistance protein, [Aspergillus flavus NRRL3357] gi|220697769|gb|EED54109.1| multidrug resistance protein, [Aspergillus flavus NRRL3357]
  misc_feature (271)..(910): NCBI GI: 85114287 Blast Desc: NCU02051 [Neurospora crassa OR74A] gi|28926463|gb|EAA35437.1| [Neurospora crassa OR74A] gi|38566904|emb|CAE76208.1| related to multidrug resistance
  misc_feature (272)..(907): NCBI GI: 119495913 Blast Desc: ABC multidrug transporter, [Neosartorya fischeri NRRL 181] gi|119412894|gb|EAW22835.1| ABC multidrug transporter, [Neosartorya fischeri NRRL 181]
  misc_feature (272)..(907): NCBI GI: 146322566 Blast Desc: ABC multidrug transporter [Aspergillus fumigatus Af293] gi|129557731|gb|EAL90367.2| ABC multidrug transporter, [Aspergillus fumigatus Af293] gi|159131160|gb|EDP56273.1| ABC
  misc_feature (271)..(907): SWISSPROT Homolog: EC 3.6.3.44 Xenobiotic-transporting ATPase
MLRSALMGLIHDKTMSLPGVAYDDGETTMLISTDADSLDGVAEMFHETWGYTIEVLIGVVLLANEVGSLWPLPLFLIYLCSHMSRYVAKHLQPLQKAWNSSTKDRLAATSSLLSAMKNVKMLGLQSGIASRIRNLRQEELKIASKLRWVTVYANASANALGILSPAITLVVFALISQARGHALDAETAFTSLSIMLMVTHPANMVMTMVPRAAAAFTGFEKVQAFLLRESLSDVRNILSSPAISARQLNIGCNEHILKNVNIEADIAKVNNLVTGQRQRVALARALFSKRNILLLDDTFSGLDGETEKFIFHNIFGPKGFVKRFNTTVLLVTNSAQHLNTADEILILGDHQIQQRSSWRDIDHAGAVTTKFSHSNIARDSTIVSAKYDYLNNQLRAQNETKKDISRQSGDMEIYRRFSSLASLTNFYAYGYVLISLVAWATTSTQMWSVVIRIAPRSGVKMHHHLLHIVASARLSYFSETDTGAILSRFNQDMQAFDKQLPSALQTLVTLQIGLLCISQRWLLFTIPPCAIFIYIIQKLYLKTSRQLRFFELQSKAAILADVLETIEGIETIRAFGWSERAIVNNVQRIEQAQRPEYLSLSLQRWLNLVLDLLTAAVSTILIAAAVILRGTISGGQVGAAMNVLMVTSTTIPRFVESWTTLETSLGSVARLKTLEETVPSEEQETEGSIALENVSLDIAAGQKLFVCGRTGSGKSSLLLTLTRLLELQSGRIEIDGVDIQCVKLDLLRSRCLVAVTQDPLLLPHETLRFNLDPSMTASDNDILEALQKTGLSKHFLPSHVSHAVLYEKLSSFRDLSVGQCQLFAICRAVIKAGLLRRGGIKSVILLDEVTSSLDHVTEAIIHDIIEDEFTKYGHTVVIVTHRLKLLKSHTVVTRDAIALIADGKLIDVIKDFGPKTLQRLTSGK

SEQ ID NO: 13088 - DNA, 927 bp, Muscodor strobelii
  misc_feature: SGI EST ID NO. CUFF.31153.0
  misc_feature: Variant of the nucleotide sequence at SEQ ID NO 13086
cggaagtctgctgaaaattctccaagcgtccagggctattggattgtagtctcgaccatcgtaatacatgccggagcagctttctcatcatcaatctaccagcatagtctacataagactaagctaatgcttagaagtgcgcttatgggtttgattcacgacaagaccatgagtttgccaggtgtcgcttatgacgacggtgagacaacgatgctgataagtaccgatgcggatagtttggatggggttgccgagatgttccacgaaacatggggatataccattgaggttctaattggtgttgtacttctcgcgaatgaagttggttcgctgtggcctctgccactctttctcatttacttgtgctcacacatgagtcgatatgtcgcaaaacatctacagcctctccagaaggcctggaatagctcaacaaaagatcgtcttgcagccacgagctcccttttaagcgcgatgaagaatgtcaagatgctcgggcttcagtcaggtattgccagccgcattcgaaacctccgtcaggaggaattgaagatcgcttcaaagctgcgttgggttactgtatatgccaatgcctcagcaaatgcactcgggatattatctcctgctatcacgctagttgtgtttgccttgatatcgcaagctcgtggacatgctttggatgctgaaactgcatttacatctttaagcatcatgttaatggtaactcatcccgcaaatatggttatgactatggttccacgagcggcggcggcatttaccgggtttgagaaggtccaagccttccttctacgagaaagcctgtcagatgtccgcaacatattatccagccctgcaatttcggctcggcaattgaatatcgggtgcaatgaacacatacttaaaaacgtaaacatagaagcagacatcggt

SEQ ID NO: 13089 - DNA, 2451 bp, Muscodor strobelii
  misc_feature: SGI cDNA ID NO. 564276
  misc_feature: Encodes the peptide sequence at SEQ ID NO 13090
atggcctctgtcacacctaggctcttcctcatcgcatttcgctattctcgaccaatattaatcaaagaatccatcaagtaccttcggaagtctgctgaaaattctccaagcgtccagggctattggattgtagtctcgaccatcgtaatacatgccggagcagctttctcatcatcaatctaccagcatagtctacataagactaagctaatgcttagaagtgcgcttatgggtttgattcacgacaagaccatgagtttgccaggtgtcgcttatgacgacggtgagacaacgatgctgataagtaccgatgcggatagtttggatggggttgccgagatgttccacgaaacatggggatataccattgaggttctaattggtgttgtacttctcgcgaatgaagttggttcgctgtggcctctgccactctttctcatttacttgtgctcacacatgagtcgatatgtcgcaaaacatctacagcctctccagaaggcctggaatagctcaacaaaagatcgtcttgcagccacgagctcccttttaagcgcgatgaagaatgtcaagatgctcgggcttcagtcaggtattgccagccgcattcgaaacctccgtcaggaggaattgaagatcgcttcaaagctgcgttgggttactgtatatgccaatgcctcagcaaatgcactcgggatattatctcctgctatcacgctagttgtgtttgccttgatatcgcaagctcgtggacatgctttggatgctgaaactgcatttacatctttaagcatcatgttaatggtaactcatcccgcaaatatggttatgactatggttccacgagcggcggcggcatttaccgggtttgagaaggtccaagccttccttctacgagaaagcctgtcagatgtccgcaacatattatccagccctgcaatttcggctcggcaattgaatatcgggtgcaatgaacacatacttaaaaacgtaaacatagaagcagacatcgcgaaagtcaacaacttggtcactgggcaaaggcaacgagtagccctcgcacgagcgctcttttccaagcgaaacatactactgctcgatgatacttttagcggactagatggtgaaaccgagaaatttattttccacaatatctttggacctaaaggatttgtcaagcgcttcaatactaccgttttactcgttacgaactcagcccaacatctcaatacggcggacgagatcttgatcctcggagatcaccaaatccaacaacggagcagttggcgggacatcgatcacgcaggtgcagttactaccaagttctcccactctaacattgctcgagatagcactatagtatctgcgaaatatgattatctcaacaaccaactccgagcacaaaacgagaccaaaaaagacatttcgaggcaaagcggggatatggaaatctatcgtaggttctcttctctggcttctcttaccaacttctatgcgtatggatatgtcttgatctcactcgtagcatgggcaactacgtctactcagatgtggtctgttgtcatacgaatagccccgcgatccggtgtaaagatgcatcatcacctgcttcacatcgtagcgagcgcacgcttgtcctacttctctgaaacagacaccggcgcaattttaagtcgcttcaaccaagatatgcaagcttttgacaaacagttgccttcagccctccaaaccctcgtcactctacagattggtctattgtgcatttcccagagatggcttctgttcactatacctccttgtgcaatctttatctatattattcagaagctttacctcaagacttcgagacagctacggttcttcgagctacagtctaaagcggcgatcttggcagacgttttggagactattgagggaattgagacaatcagagcttttgggtggtctgaaagggccattgtcaacaacgttcagcgtatagaacaagcccaacgtccggaatacctatctttatctctgcaaagatggctcaatctagtattagacttgctaacagcagctgtttccaccattctgatcgccgccgctgttattctacggggaacgatcagcggtggtcaggttggagctgccatgaatgtgttgatggtcacgagtacgacaatacccaggtttgtggagagctggacaacactggaaacatcactggggtctgtggcgcgattgaagactctcgaagagactgtaccttctgaagaacaagaaacagagggctccattgctctcgagaatgttagtctcgatattgctgccggacaaaaacttttcgtctgcggtcggaccgggagtggcaagagcagcctactactaacactcacaaggctcctcgagctacagtcaggccgtatcgagattgatggcgtcgacatacaatccaagcatgacagcatctga

SEQ ID NO: 13090 - protein, 816 aa, Muscodor strobelii
  misc_feature: SGI Peptide ID NO. 564276
  misc_feature (444)..(721): Pfam Id: PF00664 Pfam Desc: ABC transporter transmembrane region
  misc_feature (2)..(272): Pfam Id: PF00664 Pfam Desc: ABC transporter transmembrane region
  misc_feature (255)..(421): Pfam Id: PF00005 Pfam Desc: ABC transporter
  misc_feature (492)..(721): Pfam Id: PF00664 Pfam Desc: ABC transporter transmembrane region
  misc_feature (41)..(272): Pfam Id: PF00664 Pfam Desc: ABC transporter transmembrane region
  misc_feature (324)..(421): Pfam Id: PF00005 Pfam Desc: ABC transporter
  misc_feature (318)..(811): NCBI GI: 242784150 Blast Desc: multidrug resistance protein, [Talaromyces stipitatus ATCC 10500] gi|218720476|gb|EED19895.1| multidrug resistance protein, [Talaromyces stipitatus ATCC 10500]
  misc_feature (346)..(810): NCBI GI: 119485528 Blast Desc: ABC transporter, [Neosartorya fischeri NRRL 181] gi|119410354|gb|EAW20301.1| ABC transporter, [Neosartorya fischeri NRRL 181]
  misc_feature (1)..(333): NCBI GI: 242784145 Blast Desc: oligomycin resistance ATP-dependent permease yor1, [Talaromyces stipitatus ATCC 10500] gi|218720475|gb|EED19894.1| oligomycin resistance ATP-dependent permease yor1, [Talaromyces
  misc_feature (341)..(811): NCBI GI: 156042470 Blast Desc: SS1G_11032 [Sclerotinia sclerotiorum 1980] gi|154695419|gb|EDN95157.1| SS1G_11032 [Sclerotinia sclerotiorum 1980]
  misc_feature (6)..(333): NCBI GI: 119485528 Blast Desc: ABC transporter, [Neosartorya fischeri NRRL 181] gi|119410354|gb|EAW20301.1| ABC transporter, [Neosartorya fischeri NRRL 181]
  misc_feature (341)..(809): NCBI GI: 238488287 Blast Desc: multidrug resistance protein, [Aspergillus flavus NRRL3357] gi|220697769|gb|EED54109.1| multidrug resistance protein, [Aspergillus flavus NRRL3357]
  misc_feature (341)..(809): NCBI GI: 238507067 Blast Desc: ATP-binding cassette transporter, [Aspergillus flavus NRRL3357] gi|220689448|gb|EED45799.1| ATP-binding cassette transporter, [Aspergillus flavus NRRL3357]
  misc_feature (407)..(810): NCBI GI: 154291998 Blast Desc: BC1G_14926 [Botryotinia fuckeliana B05.10] gi|150846345|gb|EDN21538.1| BC1G_14926 [Botryotinia fuckeliana B05.10]
  misc_feature (341)..(810): NCBI GI: 85114287 Blast Desc: NCU02051 [Neurospora crassa OR74A] gi|28926463|gb|EAA35437.1| [Neurospora crassa OR74A] gi|38566904|emb|CAE76208.1| related to multidrug resistance
  misc_feature (341)..(809): NCBI GI: 212536923 Blast Desc: ATP-binding cassette transporter, [Penicillium marneffei ATCC 18224] gi|210068359|gb|EEA22450.1| ATP-binding cassette transporter, [Penicillium marneffei ATCC 18224]
  misc_feature (341)..(741): SWISSPROT Homolog: EC 3.6.3.44 Xenobiotic-transporting ATPase
MASVTPRLFLIAFRYSRPILIKESIKYLRKSAENSPSVQGYWIVVSTIVIHAGAAFSSSIYQHSLHKTKLMLRSALMGLIHDKTMSLPGVAYDDGETTMLISTDADSLDGVAEMFHETWGYTIEVLIGVVLLANEVGSLWPLPLFLIYLCSHMSRYVAKHLQPLQKAWNSSTKDRLAATSSLLSAMKNVKMLGLQSGIASRIRNLRQEELKIASKLRWVTVYANASANALGILSPAITLVVFALISQARGHALDAETAFTSLSIMLMVTHPANMVMTMVPRAAAAFTGFEKVQAFLLRESLSDVRNILSSPAISARQLNIGCNEHILKNVNIEADIAKVNNLVTGQRQRVALARALFSKRNILLLDDTFSGLDGETEKFIFHNIFGPKGFVKRFNTTVLLVTNSAQHLNTADEILILGDHQIQQRSSWRDIDHAGAVTTKFSHSNIARDSTIVSAKYDYLNNQLRAQNETKKDISRQSGDMEIYRRFSSLASLTNFYAYGYVLISLVAWATTSTQMWSVVIRIAPRSGVKMHHHLLHIVASARLSYFSETDTGAILSRFNQDMQAFDKQLPSALQTLVTLQIGLLCISQRWLLFTIPPCAIFIYIIQKLYLKTSRQLRFFELQSKAAILADVLETIEGIETIRAFGWSERAIVNNVQRIEQAQRPEYLSLSLQRWLNLVLDLLTAAVSTILIAAAVILRGTISGGQVGAAMNVLMVTSTTIPRFVESWTTLETSLGSVARLKTLEETVPSEEQETEGSIALENVSLDIAAGQKLFVCGRTGSGKSSLLLTLTRLLELQSGRIEIDGVDIQSKHDSI

SEQ ID NO: 13091 - DNA, 927 bp, Muscodor strobelii; identical to SEQ ID NO: 13088
  misc_feature: SGI EST ID NO. CUFF.31153.0
  misc_feature: Variant of the nucleotide sequence at SEQ ID NO 13089

SEQ ID NO: 13092 - DNA, 783 bp, Muscodor strobelii
  misc_feature: SGI cDNA ID NO. 564277
  misc_feature: Encodes the peptide sequence at SEQ ID NO 13093
atgtccggcacctgcagtgtctgcggaaaggcagcagagaagaagtgctcgagatgcaacgaggccttatactgctcccgcgactgccagaagatcgactggaagacacacaaaaaggactgcgcccaaatcgccaatatcaatgccgccctcgaccaagttcccaagtacttccgagcgcgatgcatgatgcgctctaaccccgaagaatggttccgaggcctggaagtcgatacccgagaccgagcccttcttgatgccgacttcctttcctttgtccagtacaaccaggcatcttatgttcgcaagatgtacaccatgaaggaaggcaatgatagattccaggatgtcaagtggacttgcgagaacgatgacaattgcaagaagatcgtggcgcaggctggaggcaagttgacaggtttctcctacggagacatcggctctggcaattggaagtccatcaaagtctgcgtcaacatcagtgtgcccaagagcgcagggcgcgatgtcgattggggcatgatgggtgcaagaccctccaacatccgtatcttcaagggccccaatcgtacctgccagacccatccgtgggacgcaatgatcttgagagactgtgttgcctccactgacaacttcatccatcaacccgatatcggtaaacgaaaatgggatattctagccatgaagatgtgtgaggattacgactgtccctgggttctcgtggcgatgagagatgttggcgcctacgaccccgaggagtgcacctgctgctacgcgctgtga

SEQ ID NO: 13093 - protein, 260 aa, Muscodor strobelii
  misc_feature: SGI Peptide ID NO. 564277
  misc_feature (5)..(41): Pfam Id: PF01753 Pfam Desc: MYND finger
  misc_feature (3)..(47): NCBI GI: 169601910 Blast Desc: SNOG_03831 [Phaeosphaeria nodorum SN15] gi|111067916|gb|EAT89036.1| SNOG_03831 [Phaeosphaeria nodorum SN15]
  misc_feature (5)..(47): NCBI GI: 170044634 Blast Desc: zinc finger MYND domain-containing protein 10 [Culex quinquefasciatus] gi|167867700|gb|EDS31083.1| zinc finger MYND domain-containing protein 10 [Culex quinquefasciatus]
  misc_feature (5)..(56): NCBI GI: 118387165 Blast Desc: MYND finger family protein [Tetrahymena thermophila] gi|89308463|gb|EAS06451.1| MYND finger family protein [Tetrahymena thermophila SB210]
  misc_feature (1)..(78): NCBI GI: 116180600 Blast Desc: [Chaetomium globosum CBS 148.51] gi|88185225|gb|EAQ92693.1| [Chaetomium globosum CBS 148.51]
  misc_feature (5)..(50): NCBI GI: 119474305 Blast Desc: MYND domain protein, [Neosartorya fischeri NRRL 181] gi|119407181|gb|EAW17131.1| MYND domain protein, [Neosartorya fischeri NRRL 181]
  misc_feature (5)..(44): NCBI GI: 157125881 Blast Desc: AaeL_AAEL010315 [Aedes aegypti] gi|108873499|gb|EAT37724.1| conserved [Aedes aegypti]
  misc_feature (5)..(78): NCBI GI: 70986270 Blast Desc: MYND domain protein [Aspergillus fumigatus Af293] gi|66846258|gb|EAL86591.1| MYND domain protein, [Aspergillus fumigatus Af293]
  misc_feature (5)..(55): NCBI GI: 156552215 Blast Desc: : similar to conserved [Nasonia vitripennis]
  misc_feature (2)..(50): NCBI GI: 189201165 Blast Desc: [Pyrenophora tritici-repentis Pt-1C-BFP] gi|187984018|gb|EDU49506.1| [Pyrenophora tritici-repentis Pt-1C-BFP]
  misc_feature (8)..(44): NCBI GI: 116059738 Blast Desc: MYND domain protein, (ISS) [Ostreococcus tauri]
MSGTCSVCGKAAEKKCSRCNEALYCSRDCQKIDWKTHKKDCAQIANINAALDQVPKYFRARCMMRSNPEEWFRGLEVDTRDRALLDADFLSFVQYNQASYVRKMYTMKEGNDRFQDVKWTCENDDNCKKIVAQAGGKLTGFSYGDIGSGNWKSIKVCVNISVPKSAGRDVDWGMMGARPSNIRIFKGPNRTCQTHPWDAMILRDCVASTDNFIHQPDIGKRKWDILAMKMCEDYDCPWVLVAMRDVGAYDPEECTCCYAL

SEQ ID NO: 13094 - DNA, 1356 bp, Muscodor strobelii
  misc_feature: SGI cDNA ID NO. 564278
  misc_feature: Encodes the peptide sequence at SEQ ID NO 13095
atgtattacttaaagatccgcgagattcacgagaagtacggacctcttgtccgcgtcacgcctacggagctccactgctcagacccctccgaatattcgaacgtgtatgtgactggtgcggtacgcaaatcgaatacctacccccggttcagcgatggaacaggcttcgaggacatggcacacatctccgagaaacacgatcaccatcgacgtcttcgtcaacccgtcgacaagattttcgtacgcagcagtatgatccacatggagtcccgggtcacttcccgcgtcgagagattaggcgaccgccttgcgatatacaaggggaccggcgaagttgtgaacatgctggacgcgctgagctcactgacgacagatgtgatctcgtccatcattttcgaggagccgagcgattatctgggtgatcccgatttcaaccatgagtggtatgagaccctcaaatatgggactcgaagtgcgtttttgttcaagcatgtgccttgggctgtcacagcgatccttcgaccccttctgaacagtctatcgtctagcacaaacaagatgcgctatgaagtgtgggatgaaaaattccgccgcgagacgctcatcagcaagaagcgtccctcggacggtacgaggacccgcgagaccactacggttctggacggcctcgtgctgagcggaattgctgagaaggacttcgggcccggtggattcccacgattggcccagcttattcaacaggctggcgcccacaatgtctcgttcaccctcggtggcatcatcgtgcatctgttgctgaatcccgccaagaccgcgcgcatgcagcaagagctcgccgtgttctgggcaaaccgtgtggagaaagtctcggccccgacctggatcgagctggagaagctgccgtatttgtcggcggtcattttcgagggccttcgcatggcaatgggcggtatgaatcgcactccccgtgtatttccccaggacgacgttcgattgtgcggacgcatcgtcccccgcggcacgcctgtgggaatgagcccctattggatgcattacgacgccgacgtcttcccccatccacaatccttcgagccggagagatggttgacggccgacaagaacaagctcaagatcatgcagtcatattacgtgccttttgccaaaggaagccggacttgcgtcggtcaaaacctggtgtacatgcagatgtaccacacactcgcgcgcttatttcgtccaggtgctcctaccatgaccctccaccagacgaccgagcgggatattaccgctatccatggacttctgttcccactgccagcattcgactccaagggtgtctgtgtcacactctcttga

SEQ ID NO: 13095 - protein, 451 aa, Muscodor strobelii
  misc_feature: SGI Peptide ID NO. 564278
  misc_feature (1)..(445): Pfam Id: PF00067 Pfam Desc: Cytochrome P450
  misc_feature (248)..(412): Pfam Id: PF00067 Pfam Desc: Cytochrome P450
  misc_feature (2)..(451): NCBI GI: 212530086 Blast Desc: benzoate 4-monooxygenase cytochrome P450, [Penicillium marneffei ATCC 18224] gi|210074598|gb|EEA28685.1| benzoate 4-monooxygenase cytochrome P450, [Penicillium marneffei ATCC
  misc_feature (2)..(450): NCBI GI: 242827325 Blast Desc: cytochrome P450, [Talaromyces stipitatus ATCC 10500] gi|218712066|gb|EED11494.1| cytochrome P450, [Talaromyces stipitatus ATCC 10500]
  misc_feature (2)..(450): NCBI GI: 240106733 Blast Desc: Cytochrome P450 family protein [Coccidioides posadasii C735 delta SOWgp]
  misc_feature (2)..(450): NCBI GI: 242761462 Blast Desc: cytochrome P450, [Talaromyces stipitatus ATCC 10500] gi|218723380|gb|EED22797.1| cytochrome P450, [Talaromyces stipitatus ATCC 10500]
  misc_feature (2)..(450): NCBI GI: 119174212 Blast Desc: CIMG_09088 [Coccidioides immitis RS]
  misc_feature (2)..(451): NCBI GI: 163931309 Blast Desc: cytochrome P450 monooxygenase [Cochliobolus heterostrophus]
  misc_feature (2)..(450): NCBI GI: 270124459 Blast Desc: fusicoccadiene C-8 hydroxylase [Alternaria brassicicola]
  misc_feature (2)..(450): NCBI GI: 46109714 Blast Desc: FG01739.1 [Gibberella zeae PH-1]
  misc_feature (2)..(450): NCBI GI: 66347587 Blast Desc: cytochrome P450 monooxygenase [Gibberella zeae]
  misc_feature (5)..(450): NCBI GI: 33357702 Blast Desc: CND11p [Botryotinia fuckeliana]
  misc_feature (8)..(412): SWISSPROT Homolog: EC 1.14.14.1 Unspecific monooxygenase
MYYLKIREIHEKYGPLVRVTPTELHCSDPSEYSNVYVTGAVRKSNTYPRFSDGTGFEDMAHISEKHDHHRRLRQPVDKIFVRSSMIHMESRVTSRVERLGDRLAIYKGTGEVVNMLDALSSLTTDVISSIIFEEPSDYLGDPDFNHEWYETLKYGTRSAFLFKHVPWAVTAILRPLLNSLSSSTNKMRYEVWDEKFRRETLISKKRPSDGTRTRETTTVLDGLVLSGIAEKDFGPGGFPRLAQLIQQAGAHNVSFTLGGIIVHLLLNPAKTARMQQELAVFWANRVEKVSAPTWIELEKLPYLSAVIFEGLRMAMGGMNRTPRVFPQDDVRLCGRIVPRGTPVGMSPYWMHYDADVFPHPQSFEPERWLTADKNKLKIMQSYYVPFAKGSRTCVGQNLVYMQMYHTLARLFRPGAPTMTLHQTTERDITAIHGLLFPLPAFDSKGVCVTLS

SEQ ID NO: 13096 - DNA, 647 bp, Muscodor strobelii
  misc_feature: SGI EST ID NO. CUFF.31190.0
  misc_feature: Variant of the nucleotide sequence at SEQ ID NO 13094
cccccatgacaatctgctaaccggcgaacttcagcatggcaatgggcggtatgaatcgcactccccgtgtatttccccaggacgacgttcgattgtgcggacgcatcgtcccccgcggcacgcctgtgggaatgagcccctattggatgcattacgacgccgacgtcttcccccatccacaatccttcgagccggagagatggttgacggccgacaagaacaagctcaagatcatgcagtcatattacgtgccttttgccaaaggaagccggacttgcgtcggtcaaaacctggtgtacatgcagatgtaccacacactcgcgcgcttatttcgtccaggtgctcctaccatgaccctccaccagacgaccgagcgggatattaccgctatccatggacttctgttcccactgccagcattcgactccaagggtgtctgtgtcacactctcttgatggcttcgccagcaatagcatttgagctctcttagtggctgcgatatttcaccagtgcgtcgactagatgattaccttaggtgaccttccttttttattgaagctcaaaaagctttggcgataggcatgagtacatagcacaaagtggaatctgatactcctgccgctctctaattattacgtagtgatcac

SEQ ID NO: 13097 - DNA, 1704 bp, Muscodor strobelii
  misc_feature: SGI cDNA ID NO. 564279
  misc_feature: Encodes the peptide sequence at SEQ ID NO 13098
atggtggtctcatctcgttggcagacacccataccagtctgttcacttcaaaaatgggtgttcgggtcttcattcgatccgctccccgatacacctcagtttctcgacccggaccgcgcggaaactcatttcattactcgggctggctatcgcctgtgggcaaaacggatagctcttgggctacagcgcgctggcctcaaaccgggtgaccgtgtgctgttattttccggcaacaacctctttttcccatcaatattcatgggagttctgtgtgccggcggtgtcttcaccggtgcgaatcccagcttcgtcgcccgtgaagtcgcgtatcagttgcaagatagtggggcgtacattctcatcgcggcagacgcgagcatggagattgccatggatgctgcagaacaagctggcttacctaagagccgtgttttcagcttcgatgcgacagctttggatgaggtaccaggtaaggctcgattaggatcacggcattggacagaactgcttgcaaccgaggatgaggctgctaaatttgattggcacgagccagcaaatccgaaagagactacatgttgtttgaattacagctcaggaacgactggtgtaccgaaaggtgtggaagttactcactattcctacgtagcgaatggggtgaatgtcaccttcatggagaacctagatccggagagcaaagaaaaacgaaaagcttatcgacatctttgctttctaccttgctatcatgcctacggtcagacgtatttcgcctcaaactacccacatatgggtattccagtttatattacgacctttgatttcgagaaggtattgcaatacatcgaaaaataccgaatttctcacatcgtggctgtaccacccatcatagtgcttctagcaaagtcaccactatcacgcaagtacgacttgagcagcgtcatgcacgttgggagcggcgcggcacctttgggtcttgaagtctctgacgagatggctaagctatggcctacgggagctatgcacgttcaacaaggatggggaatgacggaattgacttgcacagcaactacgtgggactaccaaaatatgcggcgaagctcggctgttggagaactagtaccgaacaccaaggtccgtatcatgaggacagacggctccggcgaaatcaccgtagcaaatgagaggggtgagctatggatgaccggtcctatactaatgaaaggttattggaaaaagccagaagccacggcaggaactatccacgttgatgccgatggaacgcgctggcttaaaacaggggatgttgcttacattgagaaatatgaagcaggagggacattgcatatagttgaccgaataaaggaactcatcaaggtcaagggaaatcaggtcgcaccagccgaactggaagcagttcttctcgataacgctgctgtggatgacgtagcagtcgtcggagttaccatcaaaggagaagagtatccgcgtgcctacgttgtccaaaatcctgcgcataaacagacagaacaagagatcgccaagtggatggagaagcgtgtcatccgttacaaatggctcagaggcggcgtcaagttcattgatgccataccaaagaatccatccgggaagatcctgcgtaagcacctgagagaccttgctgcaaaggaagtcggcgacaggaaacctacagattcgaagcttgcttag

SEQ ID NO: 13098 - protein, 567 aa, Muscodor strobelii
  misc_feature: SGI Peptide ID NO. 564279
  misc_feature (46)..(483): Pfam Id: PF00501 Pfam Desc: AMP-binding enzyme
  misc_feature (1)..(567): NCBI GI: 171692037 Blast Desc: protein product [Podospora anserina] gi|170945967|emb|CAP72768.1| protein product [Podospora anserina]
  misc_feature (1)..(539): NCBI GI: 28950114 Blast Desc: related to 4-coumarate--CoA ligase [Neurospora crassa]
  misc_feature (1)..(566): NCBI GI: 116180162 Blast Desc: CHGG_00709 [Chaetomium globosum CBS 148.51] gi|88185006|gb|EAQ92474.1| CHGG_00709 [Chaetomium globosum CBS 148.51]
  misc_feature (1)..(555): NCBI GI: 256724042 Blast Desc: NECHADRAFT_51372 [Nectria haematococca mpVI 77-13-4]
  misc_feature (1)..(560): NCBI GI: 164424753 Blast Desc: NCU10546 [Neurospora crassa OR74A] gi|157070646|gb|EAA31676.2| NCU10546 [Neurospora crassa OR74A]
  misc_feature (1)..(566): NCBI GI: 46115494 Blast Desc: FG03589.1 [Gibberella zeae PH-1]
  misc_feature (1)..(566): NCBI GI: 256731814 Blast Desc: NECHADRAFT_93727 [Nectria haematococca mpVI 77-13-4]
  misc_feature (1)..(566): NCBI GI: 46137429 Blast Desc: FG10230.1 [Gibberella zeae PH-1]
  misc_feature (1)..(556): NCBI GI: 261357699 Blast Desc: 4-coumarate-CoA ligase [Verticillium albo-atrum VaMs.102]
  misc_feature (1)..(566): NCBI GI: 238489237 Blast Desc: 4-coumarate-CoA ligase, [Aspergillus flavus NRRL3357] gi|220698244|gb|EED54584.1| 4-coumarate-CoA ligase, [Aspergillus flavus NRRL3357]
  misc_feature (30)..(554): SWISSPROT Homolog: EC 6.2.1.12 4-coumarate--CoA ligase
MVVSSRWQTPIPVCSLQKWVFGSSFDPLPDTPQFLDPDRAETHFITRAGYRLWAKRIALGLQRAGLKPGDRVLLFSGNNLFFPSIFMGVLCAGGVFTGANPSFVAREVAYQLQDSGAYILIAADASMEIAMDAAEQAGLPKSRVFSFDATALDEVPGKARLGSRHWTELLATEDEAAKFDWHEPANPKETTCCLNYSSGTTGVPKGVEVTHYSYVANGVNVTFMENLDPESKEKRKAYRHLCFLPCYHAYGQTYFASNYPHMGIPVYITTFDFEKVLQYIEKYRISHIVAVPPIIVLLAKSPLSRKYDLSSVMHVGSGAAPLGLEVSDEMAKLWPTGAMHVQQGWGMTELTCTATTWDYQNMRRSSAVGELVPNTKVRIMRTDGSGEITVANERGELWMTGPILMKGYWKKPEATAGTIHVDADGTRWLKTGDVAYIEKYEAGGTLHIVDRIKELIKVKGNQVAPAELEAVLLDNAAVDDVAVVGVTIKGEEYPRAYVVQNPAHKQTEQEIAKWMEKRVIRYKWLRGGVKFIDAIPKNPSGKILRKHLRDLAAKEVGDRKPTDSKLA

SEQ ID NO: 13099 - DNA, 2188 bp, Muscodor strobelii
  misc_feature: SGI EST ID NO. CUFF.31213.0
  misc_feature: Variant of the nucleotide sequence at SEQ ID NO 13097
ttgcaattgctcttctgttacattggtccatctcgcattgctcgctgattccagtactttgtagtcgatattttgttttatttgaagtgtctctttcgtcttacggtgtcaaatagaaactatcaacgttttgttaagactggcttacggactacacatgtaatagccaacttgtccttgagagatatcacgacataagaagactgttacatcattagactacactttgacacttgccatttgcaaccatggtggtctcatctcgttggcagacacccataccagtctgttcacttcaaaaatgggtgttcgggtcttcattcgatccgctccccgatacacctcagtttctcgacccggaccgcgcggaaactcatttcattactcgggctggctatcgcctgtgggcaaaacggatagctcttgggctacagcgcgctggcctcaaaccgggtgaccgtgtgctgttattttccggcaacaacctctttttcccatcaatattcatgggagttctgtgtgccggcggtgtcttcaccggtgcgaatcccagcttcgtcgcccgtgaagtcgcgtatcagttgcaagatagtggggcgtacattctcatcgcggcagacgcgagcatggagattgccatggatgctgcagaacaagctggcttacctaagagccgtgttttcagcttcgatgcgacagctttggatgaggtaccaggtaaggctcgattaggatcacggcattggacagaactgcttgcaaccgaggatgaggctgctaaatttgattggcacgagccagcaaatccgaaagagactacatgttgtttgaattacagctcaggaacgactggtgtaccgaaaggtgtggaagttactcactattcctacgtagcgaatggggtgaatgtcaccttcatggagaacctagatccggagagcaaagaaaaacgaaaagcttatcgacatctttgctttctaccttgctatcatgcctacggtcagacgtatttcgcctcaaactacccacatatgggtattccagtttatattacgacctttgatttcgagaaggtattgcaatacatcgaaaaataccgaatttctcacatcgtggctgtaccacccatcatagtgcttctagcaaagtcaccactatcacgcaagtacgacttgagcagcgtcatgcacgttgggagcggcgcggcacctttgggtcttgaagtctctgacgagatggctaagctatggcctacgggagctatgcacgttcaacaaggatggggaatgacggaattgacttgcacagcaactacgtgggactaccaaaatatgcggcgaagctcggctgttggagaactagtaccgaacaccaaggtccgtatcatgaggacagacggctccggcgaaatcaccgtagcaaatgagaggggtgagctatggatgaccggtcctatactaatgaaaggttattggaaaaagccagaagccacggcaggaactatccacgttgatgccgatggaacgcgctggcttaaaacaggggatgttgcttacattgagaaatatgaagcaggagggacattgcatatagttgaccgaataaaggaactcatcaaggtcaagggaaatcaggtcgcaccagccgaactggaagcagttcttctcgataacgctgctgtggatgacgtagcagtcgtcggagttaccatcaaaggagaagagtatccgcgtgcctacgttgtccaaaatcctgcgcataaacagacagaacaagagatcgccaagtggatggagaagcgtgtcatccgttacaaatggctcagaggcggcgtcaagttcattgatgccataccaaagaatccatccgggaagatcctgcgtaagcacctgagagaccttgctgcaaaggaagtcggcgacaggaaacctacagattcgaagcttgcttagatgatgagcctgatgcggctgtatttggtaaagacgaatttctgacgagaaatcgaagaatgatagatctttttgatggcattcaagcgactataaaatatctacaatgtttggcagtttgtataccgagacttgcgtccatattcaccccacgttgagacaaagaaggagatgcactcggcaatcatgacttagacttatagcaccatatattatacaatcgactatacacgcca

SEQ ID NO: 13100 - DNA, 987 bp, Muscodor strobelii
  misc_feature: SGI cDNA ID NO. 564280
  misc_feature: Encodes the peptide sequence at SEQ ID NO 13101
atgcagatccaactcaggcaggcggtcatactcttggcttcggcggcgcctcaagcactcgccctccttcgcttctcatgttctcagcttgttgttgagcgtctagatcctttggtgaacccaggggtgtcagcaagcccccatcttcaccagattatcggaggagacccggcaaccatggacattccttcaactgcaacttgtacgacatgcacgttcggagatgatttttcaaactactggacggccgtgatgtacttccgagcgcgtaacggcacattccatcgcgtcccgcaaaagggaaatgtcaacttcgaggccgccaacggaggtatgactgtgtattacactccggtcatttccggcacgggcaaagtaaccgccttcaagcccggatttcgcatgattgttggcgacccaatgaatcgagacccaaataaagtgcctcgacagctcacatacacatgtcttgacacagcgatgacgcgcactggcgagacaaaggacttccctaagaagccctgtaaagtcggtatcatggcgaacgtgcgatttccaacatgctgggacggcaagactctcgaccctccagatcactcaagccacgtcgcatatcccagcagcggcacgtttgagagcaacggcccatgtcccgcgacacaccccgtcaagattccgcagttattttacgaggtagtctgggacacgaccgccttcaataacccagcggactggccaacggacggctcgcagcctttcgtctggagctttggtgatgctacgggttatggtaatcatggcgattatgtcttcggttggaagggcgatgcgctgcagaaagcgatggacacgaattgcaatatcaattgcccggcgctgaagactcaatcaatacagacaggtaatcaatgttcggtcaaagctactgttgatgagaccatcgacggctggcttacggagcttcctggtggcatgccagtgacctag

SEQ ID NO: 13101 - protein, 328 aa, Muscodor strobelii
  misc_feature: SGI Peptide ID NO. 564280
  misc_feature (36)..(273): Pfam Id: PF09362 Pfam Desc: Domain of function (DUF1996)
  misc_feature (1)..(325): NCBI GI: 116208360 Blast Desc: CHGG_03473 [Chaetomium globosum CBS 148.51] gi|88184070|gb|EAQ91538.1| CHGG_03473 [Chaetomium globosum CBS 148.51]
  misc_feature (17)..(328): NCBI GI: 171685434 Blast Desc: protein product [Podospora anserina] gi|170942678|emb|CAP68330.1| protein product [Podospora anserina]
  misc_feature (1)..(316): NCBI GI: 171680070 Blast Desc: protein product [Podospora anserina] gi|170939661|emb|CAP64888.1| protein product [Podospora anserina]
  misc_feature (8)..(323): NCBI GI: 18376214 Blast Desc: conserved [Neurospora crassa]
  misc_feature (9)..(325): NCBI GI: 189200126 Blast Desc: conserved [Pyrenophora tritici-repentis Pt-1C-BFP] gi|187983499|gb|EDU48987.1| conserved [Pyrenophora tritici-repentis Pt-1C-BFP]
  misc_feature (3)..(327): NCBI GI: 189206938 Blast Desc: conserved [Pyrenophora tritici-repentis Pt-1C-BFP] gi|187975896|gb|EDU42522.1| conserved [Pyrenophora tritici-repentis Pt-1C-BFP]
  misc_feature (16)..(328): NCBI GI: 145604344 Blast Desc: MGG_08511 [Magnaporthe grisea 70-15] gi|145012353|gb|EDJ97009.1| MGG_08511 [Magnaporthe grisea 70-15]
  misc_feature (10)..(324): NCBI GI: 171686640 Blast Desc: protein product [Podospora anserina] gi|170943281|emb|CAP68934.1| protein product [Podospora anserina]
  misc_feature (12)..(324): NCBI GI: 116182716 Blast Desc: CHGG_01986 [Chaetomium globosum CBS 148.51] gi|88186283|gb|EAQ93751.1| CHGG_01986 [Chaetomium globosum CBS 148.51]
  misc_feature (10)..(325): NCBI GI: 116194852 Blast Desc: CHGG_04024 [Chaetomium globosum CBS 148.51] gi|88179937|gb|EAQ87405.1| CHGG_04024 [Chaetomium globosum CBS 148.51]
MQIQLRQAVILLASAAPQALALLRFSCSQLVVERLDPLVNPGVSASPHLHQIIGGDPATMDIPSTATCTTCTFGDDFSNYWTAVMYFRARNGTFHRVPQKGNVNFEAANGGMTVYYTPVISGTGKVTAFKPGFRMIVGDPMNRDPNKVPRQLTYTCLDTAMTRTGETKDFPKKPCKVGIMANVRFPTCWDGKTLDPPDHSSHVAYPSSGTFESNGPCPATHPVKIPQLFYEVVWDTTAFNNPADWPTDGSQPFVWSFGDATGYGNHGDYVFGWKGDALQKAMDTNCNINCPALKTQSIQTGNQCSVKATVDETIDGWLTELPGGMPVT

SEQ ID NO: 13102 - DNA, 219 bp, Muscodor strobelii
  misc_feature: SGI EST ID NO. CUFF.31225.0
  misc_feature: Variant of the nucleotide sequence at SEQ ID NO 13100
atcaatgttcggtcaaagctactgttgatgagaccatcgacggctggcttacggagcttcctggtggcatgccagtgacctagatctagaacattttcatgatattggtctcgtttatcattggtatgggaatgagggatcacagtaggttggtagatcattggcataatcaatgacctcttagttcacccacgtttgatagcgccagcaatgcattcc

SEQ ID NO: 13103 - DNA, 2733 bp, Muscodor strobelii
  misc_feature: SGI cDNA ID NO. 564282
  misc_feature: Elevated expression when VOC is produced
  misc_feature: Encodes the peptide sequence at SEQ ID NO 13104
atgagcttactagacacaccagtgacggctgagagtcaagatctagctgaaggctttcgatacatgggttttcaagacctatccggtgcttcagggatagcacctctcaggacgagggcagctccgcctatgtttgactcgggatcggggcagcaaccatcggcagtaaccagtgtcaaggctagaagatctcctgcagcagtcatgcaaccacacgagagtgccgaagctattcccatgtcggctgtttacaccatcggatcatcccgtaacggtgtcgggagtcctcaggcggatgaggatgacattgatcgattctcgttgcgatacgcgaggccgcctctggactgccattcaaggcgcgatgttcacattaaaagatggagctggctatacgtgacccttatcggcttgtcgatctactctacggttctgagtggagtatggcttgtcgtctcgatctatcaacctcagtatggccgcggcatctctaccggcatcggctggcagcttcaaccatcaacggcaaccctacttgcgaccctgatcgccaagacaatcgaattgtcgtttgtaacagtctttgtggcagttctgggtcaagtgttgacgaggagagctttcagtcgaaattccaaaggtataacactggcagagatcaccatgagaaattgggtcatacagccaggatctttgatcacccattgggaaaatcttcctttcgctggtactacactcttgggcggtctcagtcttaccgcaaccttgtgcgcattattgtacacgacggcatcggatgctatggtaagcccaaaactaaaagtgcagccatggaacatgcgcaccctacagggtcgagtggtcacatcgtacgccaacccttactacgtccaagacacttgccagacacccttaactatattcgacgggaacctatcgggcattgcttgcgaggatgttttgtactcaggccaatcgtaccagagtctcatcacattcatggcggaatggactactgcgcgtaaaaaaggagagtcggccaacattggactgccagagcgaccggctgccaagcataacctttatgacaatacaacaatgatctcggcctggatcgaaaccgaatacggaaatatcgacgacaacttcaacaaatatgatcgcatcataaacaatgtgactttggccatgccccacccaaatgtctatgcagcagcgacagacgccataaacggtattttacaaccgaatgagctctccggttcaggccaatattcgatacgagctggcgttgtttcaccaaccgtaaatgtgctgtgtgtcaatatggatgcagatgagcttaagcctctagtctatccaacatggccagatgctcgaacagaagaaacggagataccaggtcagaaaatcggagtcgcagattggcgcgcggatgtcccgacatggactcaaaccgagtggctaaataagactgccgtcgatgatatatttcattggggagagcagtacggtcgtcctcctccagtgttcccgatgtacccaatcgactacaacatgatcacgtacgtttctgataacttcaccgacccagtttacattctgtcaaagcgcgcaaatatcacagactacactctttgtcaattacagtcatgggtgaccccaaagtgctcgacggaattcgatgtatcaggaaccggtagtttcatgagagcacactgcgaggatcctgaagactcaaacgcatacagaagagtccatcccgaagatacagctgttatacccgccctttccggcgactggaaaaacctcgccagggaatggacacttgcaatcaatctgaatgcgggtgtgtccaatagtaatgcaagcaacgcacgaattttaactgaaatgatcctcgatcaacccagattagacccgctactgccatcgatggctgaagcgatggcagtgctggcgaccagtactctagtggcaggttctattgataccactttcaaatcgaactggacatacggcccagtactccagaacgcctttaataaccatagcgcccccaatgattcactctatgaaccattccacgccgaagttcaaacacaagcttattcctcagcacataccgagagttggcagggtatcttctatccaattcttgtgcttgtatttgtcctgaatctcttgtgcttaatatacttgatcttcggcactggaatcactccaagcgatacaaaggactcgccgaagttcctttctaaggtcaggtcccgactcaactcctcgattctcttttctcgaaagtctggtggcgttactaaggagtcggccacatcgtctgatagtgacagcgaaagtggcacggacatcgatcctaacgacgaggcacccaacgcacatacagatgaaaagacaggaaaatctgcgaatggacttgtcacagactacacagagccgaagaatttgttcgctctggctgtcaactcgcccccatctcaagcattagctggatcgtgtggctgtggaccaaatgctcaggaaatgatagtaccatggcatgttggttatgcggcaggcgcaaatcactatttctttgaggaacatgcttctgcaaaagagattcagaaaagcaagtccagtagtgcggatctgcttggaggcgtggagagcggcgtcaacggacgctacaggaagagttataatcgtctgagcacgactaatcagtggatttga

SEQ ID NO: 13104 - protein, 910 aa, Muscodor strobelii
  misc_feature: SGI Peptide ID NO. 564282
  misc_feature (106)..(740): NCBI GI: 46111523 Blast Desc: FG02643.1 [Gibberella zeae PH-1]
  misc_feature (106)..(757): NCBI GI: 256726251 Blast Desc: NECHADRAFT_42798 [Nectria haematococca mpVI 77-13-4]
  misc_feature (38)..(757): NCBI GI: 261355728 Blast Desc: conserved [Verticillium albo-atrum VaMs.102]
  misc_feature (61)..(744): NCBI GI: 169777963 Blast Desc: [Aspergillus oryzae RIB40] gi|83772184|dbj|BAE62314.1| protein product [Aspergillus oryzae]
  misc_feature (110)..(736): NCBI GI: 11281257 Blast Desc: [Aspergillus oryzae RIB40] gi|83772184|dbj|BAE62314.1| protein product [Aspergillus oryzae]
  misc_feature (115)..(741): NCBI GI: 240105613 Blast Desc: CPC735_051760 [Coccidioides posadasii C735 delta SOWgp]
  misc_feature (115)..(741): NCBI GI: 119193672 Blast Desc: CIMG_01213 [Coccidioides immitis RS]
  misc_feature (115)..(736): NCBI GI: 159128587 Blast Desc: conserved [Aspergillus fumigatus A1163]
  misc_feature (115)..(736): NCBI GI: 70988629 Blast Desc: conserved [Aspergillus fumigatus Af293] gi|66846804|gb|EAL87135.1| conserved [Aspergillus fumigatus Af293]
  misc_feature (113)..(736): NCBI GI: 121710966 Blast Desc: conserved [Aspergillus clavatus NRRL 1] gi|119401249|gb|EAW11673.1| conserved [Aspergillus clavatus NRRL 1]
  misc_feature: Useful for introducing or modulating the production of volatile compounds
MSLLDTPVTAESQDLAEGFRYMGFQDLSGASGIAPLRTRAAPPMFDSGSGQQPSAVTSVKARRSPAAVMQPHESAEAIPMSAVYTIGSSRNGVGSPQADEDDIDRFSLRYARPPLDCHSRRDVHIKRWSWLYVTLIGLSIYSTVLSGVWLVVSIYQPQYGRGISTGIGWQLQPSTATLLATLIAKTIELSFVTVFVAVLGQVLTRRAFSRNSKGITLAEITMRNWVIQPGSLITHWENLPFAGTTLLGGLSLTATLCALLYTTASDAMVSPKLKVQPWNMRTLQGRVVTSYANPYYVQDTCQTPLTIFDGNLSGIACEDVLYSGQSYQSLITFMAEWTTARKKGESANIGLPERPAAKHNLYDNTTMISAWIETEYGNIDDNFNKYDRIINNVTLAMPHPNVYAAATDAINGILQPNELSGSGQYSIRAGVVSPTVNVLCVNMDADELKPLVYPTWPDARTEETEIPGQKIGVADWRADVPTWTQTEWLNKTAVDDIFHWGEQYGRPPPVFPMYPIDYNMITYVSDNFTDPVYILSKRANITDYTLCQLQSWVTPKCSTEFDVSGTGSFMRAHCEDPEDSNAYRRVHPEDTAVIPALSGDWKNLAREWTLAINLNAGVSNSNASNARILTEMILDQPRLDPLLPSMAEAMAVLATSTLVAGSIDTTFKSNWTYGPVLQNAFNNHSAPNDSLYEPFHAEVQTQAYSSAHTESWQGIFYPILVLVFVLNLLCLIYLIFGTGITPSDTKDSPKFLSKVRSRLNSSILFSRKSGGVTKESATSSDSDSESGTDIDPNDEAPNAHTDEKTGKSANGLVTDYTEPKNLFALAVNSPPSQALAGSCGCGPNAQEMIVPWHVGYAAGANHYFFEEHASAKEIQKSKSSSADLLGGVESGVNGRYRKSYNRLSTTNQWI

SEQ ID NO: 13105 - DNA, 5021 bp, Muscodor strobelii
  misc_feature: SGI EST ID NO. CUFF.31608.0
  misc_feature: Variant of the nucleotide sequence at SEQ ID NO 13103
ttctgggtcaagtgttgacgaggagagctttcagtcgaaattccaaaggtataacactggcagagatcaccatgagaaattgggtcatacagccaggatctttgatcacccattgggaaaatcttcctttcgctggtactacactcttgggcggtctcagtcttaccgcaaccttgtgcgcattattgtacacgacggcatcggatgctatggtaagcccaaaactaaaagtgcagccatggaacatgcgcaccctacagggtcgagtggtcacatcgtacgccaacccttactacgtccaagacacttgccagacacccttaactatattcgacgggaacctatcgggcattgcttgcgaggatgttttgtactcaggccaatcgtaccagagtctcatcacattcatggcggaatggactactgcgcgtaaaaaaggagagtcggccaacattggactgccagagcgaccggctgccaagcataacctttatgacaatacaacaatgatctcggcctggatcgaaaccgaatacggaaatatcgacgacaacttcaacaaatatgatcgcatcataaacaatgtgactttggccatgccccacccaaatgtctatgcagcagcgacagacgccataaacggtattttacaaccgaatgagctctccggttcaggccaatattcgatacgagctggcgttgtttcaccaaccgtaaatgtgctgtgtgtcaatatggatgcagatgagcttaagcctctagtctatccaacatggccagatgctcgaacagaagaaacggagataccaggtcagaaaatcggagtcgcagattggcgcgcggatgtcccgacatggactcaaaccgagtggctaaataagactgccgtcgatgatatatttcattggggagagcagtacggtcgtcctcctccagtgttcccgatgtacccaatcgactacaacatgatcacgtacgtttctgataacttcaccgacccagtttacattctgtcaaagcgcgcaaatatcacagactacactctttgtcaattacagtcatgggtgaccccaaagtgctcgacggaattcgatgtatcaggaaccggtagtttcatgagagcacactgcgaggatcctgaagactcaaacgcatacagaagagtccatcccgaagatacagctgttatacccgccctttccggcgactggaaaaacctcgccagggaatggacacttgcaatcaatctgaatgcgggtgtgtccaatagtaatgcaagcaacgcacgaattttaactgaaatgatcctcgatcaacccagattagacccgctactgccatcgatggctgaagcgatggcagtgctggcgaccagtactctagtggcaggttctattgataccactttcaaatcgaactggacatacggcccagtactccagaacgcctttaataaccatagcgcccccaatgattcactctatgaaccattccacgccgaagttcaaacacaagcttattcctcagcacataccgagagttggcagggtatcttctatccaattcttgtgcttgtatttgtcctgaatctcttgtgcttaatatacttgatcttcggcactggaatcactccaagcgatacaaaggactcgccgaagttcctttctaaggtcaggtcccgactcaactcctcgattctcttttctcgaaagtctggtggcgttactaaggagtcggccacatcgtctgatagtgacagcgaaagtggcacggacatcgatcctaacgacgaggcacccaacgcacatacagatgaaaagacaggaaaatctgcgaatggacttgtcacagactacacagagccgaagaatttgttcgctctggctgtcaactcgcccccatctcaagcattagctggatcgtgtggctgtggaccaaatgctcaggaaatgatagtaccatggcatgttggttatgcggcaggcgcaaatcactatttctttgaggaacatgcttctgcaaaagagattcagaaaagcaagtccagtagtgcggatctgcttggaggcgtggagagcggcgtcaacggacgctacaggaagagttataatcgtctgagcacgactaatcagtggatttgagacggggacgcaaggcgaggtgatccgacacaacgacttcgtgtaccatcatggcaggcatgcgatttccttcacgggaaatatttgggcggatggcgaaattgccgaagatcatcagccgggtgacggactgactgggctgcattgcatcataaggagttctatgagataccataaaggcgtgatttactcgccaggctgtgttttcactggttgcataggacggagttagggactatataagagtcgatgtactcgttgattgcagaatcgcaacatagcgataaaatgattaatccattcataatttcaaacctgccaggttctcgattgacgtgatgaattaaatgttcagtctgccaatacactccagcacttttaattttcttaaggtaagccagcacatctccgatgtcttataatgtaggctatcacagtttttgagagaggtgagcacgaaaattttctactttgcatcacaagcaaatatcacgtatcaaatgccattaatcaagcgagaacggttatatgttgggtagcaaatgtgattgcaattcttacaaatcgttcaattttgtcaggatgttgaagtccatgactagtattcattgaagttgaaaaatctgtcatgacctcatatcagacagtgtggctcgaaaggaacaggttgcgagtcgattaagaccaccaaatggttgatgatagtcgcagaggctaccctagaacagcttgtgctccagcgtcatgtcagactcgggctccaaaccgacgcaggcacggaagatgttggtgagtgccgcacgctgcttggcaagagcattgacaaccggggtaccgggaggtgtcagtggtgccttgagcatgtaagacagaatgctgagcacgctgtggaagcccttgaaatcggcagctgcggcctcgccggttgcttgcgcacgccagtggatgcgggtcatgatctctgtgatcaggaccaggtcgatgatcagaggggaggctaagagagagtcctcacagacattgaacaggctgttgaggatatgtgttagtagtcaggcatatgacgtgcgtagaggtgcgacttacgaaatagtctggtgacctcccatgaagatctcagcatagtattcatcgagcgcacgcttgttatcgccaacagcaggcatgtacttgatgaccacagtgtgatcgggatgctcgcccttcttgtatagtaccgtgttggcctcgaccatgtcatcgacgacattagatttggagatctccttggagcggaattgcttttgggaactcaagttcttgccatcattgttgcctaggtggttgtagctggcaatggaagtcaacttgatgccggcgttgattaagaaatcaactagagcggacttcatcttggtctggccagatttgaaatcgtcgccgccgatgaaggcgccgtgcttcgaagcaagttcaatagcacctggcacaaatgtgttctgaggcgatccattgatgaaaggggcgttctcgagaacacaagcaacggcgaagacagtggaaggggatacctcctcgtggccattctcaatagcttttagcaagttatcggcggtgtcgttgataccagggataatgtcagcatatcgctcggtgttggcagtccactgcacaatgactttgtccaggttgttttgtgctttgaagtcactgcagtcaatgtcagtaactatcatagttcacatatggctcgcgtaaataattggtcataccgaatgtcttgacggatcttctcaacatgggccatacatgctttgtcaccggggatcacattgtcggctcggtcttcctggttggctgcaatgaaatcaggatagtagatgctaggaagaggaaccatttgagtcatctccttcttgacctgggctttcaaagtcggttcgagcacagccgcacgatccattgccgcagccatattcataccgctgatatcccaaccaccaatgacaagatcattgggatgaacgagcggcaaaacattgtggaaggggatgttgacatcttgcatggtctgagcatcggtgccaagtttcatagtcgaagccatgagaatagatccatagtagttagcagcccgaggtccttcgcgagtatcccacaccagtcctcgacggttagcgatgataccagcagtgacggtggtaccattattaccaccccatcctactagcatcattcccgtcttaggaatgcggcgttcaactttgaagtcatagattgtctccttgggcgtggcaacgaacttgccgttgtcgcccttagctacacttgtagttcgatacgtgtacttggatcggatttcattgtcagtataggtcacattgggcgagttcactacgaaaatatcgtctttcagttgggatgctggcgagttcgagccgtttgcatgtccttccccgtacgcagtgccaatgtctacctcagcgtgtggcgccatgttgaattagatgatggcggcggtgggttttgtagctagtaattggagccctttacttggtatagggcgagtccgatgcacctccaggggaagagcaacgggctcctgcgtacgggtgatggacgctggcatcgtgtcagtgagctttttacaatggacacggttggaggggtcatacgagttgagaaggttggaaaacgtcttgacggtattgggtgaccgctgctcaagagcgcgatctactttgaaaatggatgactggcaaagttaacggctacagaatacgatggacggatctacagttcacaggagaaagaaagaagaagaggggagtcttgggcataaagtctacaaatactattcctctgacctgaggatagcgatggaggggcagaccgttatcg

SEQ ID NO: 13106 - DNA, 1638 bp, Muscodor strobelii
  misc_feature: SGI cDNA ID NO. 564283
  misc_feature: Elevated expression when VOC is produced
  misc_feature: Encodes the peptide sequence at SEQ ID NO 13107
atggcgccacacgctgaggtagacattggcactgcgtacggggaaggacatgcaaacggctcgaactcgccagcatcccaactgaaagacgatattttcgtagtgaactcgcccaatgtgacctatactgacaatgaaatccgatccaagtacacgtatcgaactacaagtgtagctaagggcgacaacggcaagttcgttgccacgcccaaggagacaatctatgacttcaaagttgaacgccgcattcctaagacgggaatgatgctagtaggatggggtggtaataatggtaccaccgtcactgctggtatcatcgctaaccgtcgaggactggtgtgggatactcgcgaaggacctcgggctgctaactactatggatctattctcatggcttcgactatgaaacttggcaccgatgctcagaccatgcaagatgtcaacatccccttccacaatgttttgccgctcgttcatcccaatgatcttgtcattggtggttgggatatcagcggtatgaatatggctgcggcaatggatcgtgcggctgtgctcgaaccgactttgaaagcccaggtcaagaaggagatgactcaaatggttcctcttcctagcatctactatcctgatttcattgcagccaaccaggaagaccgagccgacaatgtgatccccggtgacaaagcatgtatggcccatgttgagaagatccgtcaagacattcgtgacttcaaagcacaaaacaacctggacaaagtcattgtgcagtggactgccaacaccgagcgatatgctgacattatccctggtatcaacgacaccgccgataacttgctaaaagctattgagaatggccacgaggaggtatccccttccactgtcttcgccgttgcttgtgttctcgagaacgcccctttcatcaatggatcgcctcagaacacatttgtgccaggtgctattgaacttgcttcgaagcacggcgccttcatcggcggcgacgatttcaaatctggccagaccaagatgaagtccgctctagttgatttcttaatcaacgccggcatcaagttgacttccattgccagctacaaccacctaggcaacaatgatggcaagaacttgagttcccaaaagcaattccgctccaaggagatctccaaatctaatgtcgtcgatgacatggtcgaggccaacacggtactatacaagaagggcgagcatcccgatcacactgtggtcatcaagtacatgcctgctgttggcgataacaagcgtgcgctcgatgaatactatgctgagatcttcatgggaggtcaccagactatttccctgttcaatgtctgtgaggactctctcttagcctcccctctgatcatcgacctggtcctgatcacagagatcatgacccgcatccactggcgtgcgcaagcaaccggcgaggccgcagctgccgatttcaagggcttccacagcgtgctcagcattctgtcttacatgctcaaggcaccactgacacctcccggtaccccggttgtcaatgctcttgccaagcagcgtgcggcactcaccaacatcttccgtgcctgcgtcggtttggagcccgagtctgacatgacgctggagcacaagctgttctag

SEQ ID NO: 13107 - protein, 545 aa, Muscodor strobelii
  misc_feature: SGI Peptide ID NO. 564283
  misc_feature (338)..(451): Pfam Id: PF01658 Pfam Desc: Myo-inositol-1-phosphate synthase
  misc_feature (86)..(527): Pfam Id: PF07994 Pfam Desc: Myo-inositol-1-phosphate synthase
  misc_feature (1)..(545): NCBI GI: 169614137 Blast Desc: SNOG_10204 [Phaeosphaeria nodorum SN15] gi|160707285|gb|EAT82539.2| SNOG_10204 [Phaeosphaeria nodorum SN15]
  misc_feature (1)..(545): NCBI GI: 258573191 Blast Desc: inositol-3-phosphate synthase [Uncinocarpus reesii 1704] gi|237901043|gb|EEP75444.1| inositol-3-phosphate synthase [Uncinocarpus reesii 1704]
  misc_feature (1)..(545): NCBI GI: 145256175 Blast Desc: An10g00530 [Aspergillus niger CBS 513.88] gi|134078619|emb|CAK40492.1| protein product [Aspergillus niger]
  misc_feature (1)..(545): NCBI GI: 240106405 Blast Desc: Inositol-3-phosphate synthase , [Coccidioides posadasii C735 delta SOWgp]
  misc_feature (1)..(545): NCBI GI: 189198886 Blast Desc: inositol-3-phosphate synthase [Pyrenophora tritici-repentis Pt-1C-BFP] gi|187982879|gb|EDU48367.1| inositol-3-phosphate synthase [Pyrenophora tritici-repentis
  misc_feature (1)..(545): NCBI GI: 226286289 Blast Desc: inositol-3-phosphate synthase [Paracoccidioides brasiliensis Pb01]
  misc_feature (1)..(545): NCBI GI: 225679975 Blast Desc: inositol-3-phosphate synthase [Paracoccidioides brasiliensis Pb03] gi|226291752|gb|EEH47180.1| myo-inositol-1-phosphate synthase [Paracoccidioides brasiliensis
  misc_feature (12)..(545): NCBI GI: 85100171 Blast Desc: inositol-3-phosphate synthase [Neurospora crassa OR74A] gi|28922445|gb|EAA31677.1| inositol-3-phosphate synthase [Neurospora crassa OR74A] gi|28950116|emb|CAD70896.1| 1-phosphate
  misc_feature (1)..(545): NCBI GI: 145603212 Blast Desc: conserved [Magnaporthe grisea 70-15] gi|145011488|gb|EDJ96144.1| conserved [Magnaporthe grisea 70-15]
  misc_feature (1)..(545): NCBI GI: 225559222 Blast Desc: inositol-3-phosphate synthase [Ajellomyces capsulatus G186AR]
  misc_feature (33)..(544): SWISSPROT Homolog: EC 5.5.1.4 Inositol-3-phosphate synthase
  misc_feature: Useful for introducing or modulating the production of volatile compounds
MAPHAEVDIGTAYGEGHANGSNSPASQLKDDIFVVNSPNVTYTDNEIRSKYTYRTTSVAKGDNGKFVATPKETIYDFKVERRIPKTGMMLVGWGGNNGTTVTAGIIANRRGLVWDTREGPRAANYYGSILMASTMKLGTDAQTMQDVNIPFHNVLPLVHPNDLVIGGWDISGMNMAAAMDRAAVLEPTLKAQVKKEMTQMVPLPSIYYPDFIAANQEDRADNVIPGDKACMAHVEKIRQDIRDFKAQNNLDKVIVQWTANTERYADIIPGINDTADNLLKAIENGHEEVSPSTVFAVACVLENAPFINGSPQNTFVPGAIELASKHGAFIGGDDFKSGQTKMKSALVDFLINAGIKLTSIASYNHLGNNDGKNLSSQKQFRSKEISKSNVVDDMVEANTVLYKKGEHPDHTVVIKYMPAVGDNKRALDEYYAEIFMGGHQTISLFNVCEDSLLASPLIIDLVLITEIMTRIHWRAQATGEAAAADFKGFHSVLSILSYMLKAPLTPPGTPVVNALAKQRAALTNIFRACVGLEPESDMTLEHKLF

SEQ ID NO: 13108 - DNA, 4461 bp, Muscodor strobelii
  misc_feature: SGI EST ID NO. CUFF.31609.1
  misc_feature: Variant of the nucleotide sequence at SEQ ID NO 13106
gttagtttagttcttatcctgcgataacggtctgcccctccatcgctatcctcaggtcagaggaatagtatttgtagactttatgcccaagactcccctcttcttctttctttctcctgtgaactgtagatccgtccatcgtattctgtagccgttaactttgccagtcatccattttcaaagtagatcgcgctcttgagcagcggtcacccaataccgtcaagacgttttccaaccttctcaactccgtccatcacccgtacgcaggagcccgttgctcttcccctggaggtgcatcggactcgccctataccaagtaaagggctccaattactagctacaaaacccaccgccgccatcatctaattcaacatggcgccacacgctgaggtagacattggcactgcgtacggggaaggacatgcaaacggctcgaactcgccagcatcccaactgaaagacgatattttcgtagtgaactcgcccaatgtgacctatactgacaatgaaatccgatccaagtacacgtatcgaactacaagtgtagctaagggcgacaacggcaagttcgttgccacgcccaaggagacaatctatgacttcaaagttgaacgccgcattcctaagacgggaatgatgctagtaggatggggtggtaataatggtaccaccgtcactgctggtatcatcgctaaccgtcgaggactggtgtgggatactcgcgaaggacctcgggctgctaactactatggatctattctcatggcttcgactatgaaacttggcaccgatgctcagaccatgcaagatgtcaacatccccttccacaatgttttgccgctcgttcatcccaatgatcttgtcattggtggttgggatatcagcggtatgaatatggctgcggcaatggatcgtgcggctgtgctcgaaccgactttgaaagcccaggtcaagaaggagatgactcaaatggttcctcttcctagcatctactatcctgatttcattgcagccaaccaggaagaccgagccgacaatgtgatccccggtgacaaagcatgtatggcccatgttgagaagatccgtcaagacattcgtgacttcaaagcacaaaacaacctggacaaagtcattgtgcagtggactgccaacaccgagcgatatgctgacattatccctggtatcaacgacaccgccgataacttgctaaaagctattgagaatggccacgaggaggtatccccttccactgtcttcgccgttgcttgtgttctcgagaacgcccctttcatcaatggatcgcctcagaacacatttgtgccaggtgctattgaacttgcttcgaagcacggcgccttcatcggcggcgacgatttcaaatctggccagaccaagatgaagtccgctctagttgatttcttaatcaacgccggcatcaagttgacttccattgccagctacaaccacctaggcaacaatgatggcaagaacttgagttcccaaaagcaattccgctccaaggagatctccaaatctaatgtcgtcgatgacatggtcgaggccaacacggtactatacaagaagggcgagcatcccgatcacactgtggtcatcaagtacatgcctgctgttggcgataacaagcgtgcgctcgatgaatactatgctgagatcttcatgggaggtcaccagactatttccctgttcaatgtctgtgaggactctctcttagcctcccctctgatcatcgacctggtcctgatcacagagatcatgacccgcatccactggcgtgcgcaagcaaccggcgaggccgcagctgccgatttcaagggcttccacagcgtgctcagcattctgtcttacatgctcaaggcaccactgacacctcccggtaccccggttgtcaatgctcttgccaagcagcgtgcggcactcaccaacatcttccgtgcctgcgtcggtttggagcccgagtctgacatgacgctggagcacaagctgttctagggtagcctctgcgactatcatcaaccatttggtggtcttaatcgactcgcaacctgttcctttcgagccacactgtctgatatgaggtcatgacagatttttcaacttcaatgaatactagtcatggacttcaacatcctgacaaaattgaacgatttgtaagaattgcaatcacatttgctacccaacatataaccgttctcgcttgattaatggcatttgatacgtgatatttgcttgtgatgcaaagtagaaaattttcgtgctcacctctctcaaaaactgtgatagcctacattataagacatcggagatgtgctggcttaccttaagaaaattaaaagtgctggagtgtattggcagactgaacatttaattcatcacgtcaatcgagaacctggcaggtttgaaattatgaatggattaatcattttatcgctatgttgcgattctgcaatcaacgagtacatcgactcttatatagtccctaactccgtcctatgcaaccagtgaaaacacagcctggcgagtaaatcacgcctttatggtatctcatagaactccttatgatgcaatgcagcccagtcagtccgtcacccggctgatgatcttcggcaatttcgccatccgcccaaatatttcccgtgaaggaaatcgcatgcctgccatgatggtacacgaagtcgttgtgtcggatcacctcgccttgcgtccccgtctcaaatccactgattagtcgtgctcagacgattataactcttcctgtagcgtccgttgacgccgctctccacgcctccaagcagatccgcactactggacttgcttttctgaatctcttttgcagaagcatgttcctcaaagaaatagtgatttgcgcctgccgcataaccaacatgccatggtactatcatttcctgagcatttggtccacagccacacgatccagctaatgcttgagatgggggcgagttgacagccagagcgaacaaattcttcggctctgtgtagtctgtgacaagtccattcgcagattttcctgtcttttcatctgtatgtgcgttgggtgcctcgtcgttaggatcgatgtccgtgccactttcgctgtcactatcagacgatgtggccgactccttagtaacgccaccagactttcgagaaaagagaatcgaggagttgagtcgggacctgaccttagaaaggaacttcggcgagtcctttgtatcgcttggagtgattccagtgccgaagatcaagtatattaagcacaagagattcaggacaaatacaagcacaagaattggatagaagataccctgccaactctcggtatgtgctgaggaataagcttgtgtttgaacttcggcgtggaatggttcatagagtgaatcattgggggcgctatggttattaaaggcgttctggagtactgggccgtatgtccagttcgatttgaaagtggtatcaatagaacctgccactagagtactggtcgccagcactgccatcgcttcagccatcgatggcagtagcgggtctaatctgggttgatcgaggatcatttcagttaaaattcgtgcgttgcttgcattactattggacacacccgcattcagattgattgcaagtgtccattccctggcgaggtttttccagtcgccggaaagggcgggtataacagctgtatcttcgggatggactcttctgtatgcgtttgagtcttcaggatcctcgcagtgtgctctcatgaaactaccggttcctgatacatcgaattccgtcgagcactttggggtcacccatgactgtaattgacaaagagtgtagtctgtgatatttgcgcgctttgacagaatgtaaactgggtcggtgaagttatcagaaacgtacgtgatcatgttgtagtcgattgggtacatcgggaacactggaggaggacgaccgtactgctctccccaatgaaatatatcatcgacggcagtcttatttagccactcggtttgagtccatgtcgggacatccgcgcgccaatctgcgactccgattttctgacctggtatctccgtttcttctgttcgagcatctggccatgttggatagactagaggcttaagctcatctgcatccatattgacacacagcacatttacggttggtgaaacaacgccagctcgtatcgaatattggcctgaaccggagagctcattcggttgtaaaataccgtttatggcgtctgtcgctgctgcatagacatttgggtggggcatggccaaagtcacattgtttatgatgcgatcatatttgttgaagttgtcgtcgatatttccgtattcggtttcgatccaggccgagatcattgttgtattgtcataaaggttatgcttggcagccggtcgctctggcagtccaatgttggccgactctccttttttacgcgcagtagtccattccgcc

SEQ ID NO: 13109 - DNA, 2232 bp, Muscodor strobelii
  misc_feature: SGI cDNA ID NO. 564284
  misc_feature: Encodes the peptide sequence at SEQ ID NO 13110
atggcagatttatcacggcagtcggcatttatgccgacaataaaatgctccaactgcggtaatcaagtcgagatttcgatgatgggcgagcacacttgtggaggcgccagcgaggcagcgaatttagaacccgttccacccatcccagatctattaggtggtgccatgtcgtcattgaaactaaatgttttcgacaagttcactcgtgcgcctcctgctgttgacacttccgctgccaacaatgcattcacaaaacaggaacaaccaacaccgatgagtgcatccactgcctctcaagcgatatcaccaaaaacgccaatgagtctacgacctagtgccggatcttcgaacgacgattacttcagcccagccatagcaggatcaccaaggcgacccggtggatatggtgggttttctacggaaccagaatcgtacgagcccgaaccagcctatggaacgagtcctaataaacagaataacatgctcttaacacgaatgaacagcattgctccgggaccattcgatactaggccgcgatcagcgaagaagagctttcctcgaagggtcagcaaggatgaagctattgatccaggtgacgacttgtcgcgattaggcacatctatcgaacgcccaggaaccgcagcttcaggcacttcggctaccagtggaagcatgatggcaccaagagtgccacggaagaacggttacggcggatttgggcctcctcagaaagaaaatgaagaggtggaaccaaagccactggccaagcgctcagatacttttccgaatcaattgctcaaggcccgagacgacgattggcatgttgataccgtggcacgtatgccctcggcacctggccctagaccggaaagaccacgacggccatcagagaaagaagaggcaccagtgatgatcagcgaccgtaagaatagaccctcttacggtctccgagatacatcaagaccgccaccaccacggaagagtttgatacggccaccgacacgcaatggcagtcaaaatctttcgattaatcttgcagatgaatttggagtcggtaacccgtatcactcaccgtctgtgtctcaatcctcgaacaattcgggcttcagccaagaatcacgggccagtcaaccaagttcaacaacaagtccagctcggtcggttagatctgctcctcggagaccttccgagaccgctgcgtatgaagctctcatggatgatatgcggaactccacggagaatttgcgatcagcttccccatcgattgcggccaagccagtgcccataccgaggacggaaagcttatcaccagccgcaattccagtccccatggagaggaaagatagcctatcaccgaacgcacctcggcgtgggcctctccaggatttgagactagatcctgcagtgcagcgcgggcaggacagacttgactcccctgtgtcgccacttgagtccggcagtgcaccatctactcgtttggaccctgctctgtatgaagcacaaggcaggacgcgatcacaaacaacttctaccgtaggctcgagcgcgcataaccgacaaccttctcgaaatcctcgctcaagaggaaactgcagagcatgccgcgagcctattgtaggaaaatccatctcatctgcggatggacgtctaactggtcgatatcataaagcatgtttcgtgtgtacaacatgcgaggagccatttagctcatcaacattctatgttcacgaagatcgaccatattgtgagcaacactatcacaaactcaacggcagtctctgcaagtcgtgcaaccgaggaattgaaggagagtatcttgaggatgaggtgccccagaagtatcaccctggttgcttccgctgtggtgactgcggcatcgtactacgagatggttactacgatgtcaacggcaaatcatactgtgagagggatgcgtggcagaggaggcaacaagctgtccgctctcagcaaatgggtcctccaccatcgagacagccatcacaacgaccttccatgtcagcctcgggtccacgaattgagcgagtcgatgatgttcccaatattccgcagccaccaaggggactcccctcgggccctcagtcgtccctcaaccgcccattcggactaccaacgggcactaggctgatgcctggccaggcacttggccgtggtggtttacgcgccccaattcctaggatggagaagcggatgactaggcttggaatgatgtaa

SEQ ID NO: 13110 - protein, 743 aa, Muscodor strobelii
  misc_feature: SGI Peptide ID NO. 564284
  misc_feature (531)..(590): Pfam Id: PF00412 Pfam Desc: LIM domain
  misc_feature (594)..(649): Pfam Id: PF00412 Pfam Desc: LIM domain
  misc_feature (6)..(743): NCBI GI: 261351897 Blast Desc: LIM domain-containing protein [Verticillium albo-atrum VaMs.102]
  misc_feature (1)..(743): NCBI GI: 39975751 Blast Desc: MGG_06198 [Magnaporthe grisea 70-15] gi|145011486|gb|EDJ96142.1| MGG_06198 [Magnaporthe grisea 70-15]
  misc_feature (6)..(743): NCBI GI: 256731717 Blast Desc: NECHADRAFT_40827 [Nectria haematococca mpVI 77-13-4]
  misc_feature (4)..(743): NCBI GI: 46136851 Blast Desc: FG09941.1 [Gibberella zeae PH-1]
  misc_feature (1)..(652): NCBI GI: 154294976 Blast Desc: BC1G_13354 [Botryotinia fuckeliana B05.10] gi|150844483|gb|EDN19676.1| BC1G_13354 [Botryotinia fuckeliana B05.10]
  misc_feature (527)..(743): NCBI GI: 171691987 Blast Desc: protein product [Podospora anserina] gi|170945942|emb|CAP72743.1| protein product [Podospora anserina]
  misc_feature (527)..(650): NCBI GI: 85100179 Blast Desc: NCU06668 [Neurospora crassa OR74A] gi|28922447|gb|EAA31679.1| NCU06668 [Neurospora crassa OR74A] gi|28950117|emb|CAD70897.1| conserved [Neurospora crassa]
  misc_feature (527)..(647): NCBI GI: 116180158 Blast Desc: CHGG_00707 [Chaetomium globosum CBS 148.51] gi|88185004|gb|EAQ92472.1| CHGG_00707 [Chaetomium globosum CBS 148.51]
  misc_feature (416)..(645): NCBI GI: 189198884 Blast Desc: LIM domain containing protein [Pyrenophora tritici-repentis Pt-1C-BFP] gi|187982878|gb|EDU48366.1| LIM domain containing protein [Pyrenophora tritici-repentis
  misc_feature (11)..(645): NCBI GI: 226286290 Blast Desc: conserved [Paracoccidioides brasiliensis Pb01]
MADLSRQSAFMPTIKCSNCGNQVEISMMGEHTCGGASEAANLEPVPPIPDLLGGAMSSLKLNVFDKFTRAPPAVDTSAANNAFTKQEQPTPMSASTASQAISPKTPMSLRPSAGSSNDDYFSPAIAGSPRRPGGYGGFSTEPESYEPEPAYGTSPNKQNNMLLTRMNSIAPGPFDTRPRSAKKSFPRRVSKDEAIDPGDDLSRLGTSIERPGTAASGTSATSGSMMAPRVPRKNGYGGFGPPQKENEEVEPKPLAKRSDTFPNQLLKARDDDWHVDTVARMPSAPGPRPERPRRPSEKEEAPVMISDRKNRPSYGLRDTSRPPPPRKSLIRPPTRNGSQNLSINLADEFGVGNPYHSPSVSQSSNNSGFSQESRASQPSSTTSPARSVRSAPRRPSETAAYEALMDDMRNSTENLRSASPSIAAKPVPIPRTESLSPAAIPVPMERKDSLSPNAPRRGPLQDLRLDPAVQRGQDRLDSPVSPLESGSAPSTRLDPALYEAQGRTRSQTTSTVGSSAHNRQPSRNPRSRGNCRACREPIVGKSISSADGRLTGRYHKACFVCTTCEEPFSSSTFYVHEDRPYCEQHYHKLNGSLCKSCNRGIEGEYLEDEVPQKYHPGCFRCGDCGIVLRDGYYDVNGKSYCERDAWQRRQQAVRSQQMGPPPSRQPSQRPSMSASGPRIERVDDVPNIPQPPRGLPSGPQSSLNRPFGLPTGTRLMPGQALGRGGLRAPIPRMEKRMTRLGMM

SEQ ID NO: 13111 - DNA, 3295 bp, Muscodor strobelii
  misc_feature: SGI EST ID NO. CUFF.31257.0
  misc_feature: Variant of the nucleotide sequence at SEQ ID NO 13109
gattttcatcttcttcctcctaagtgcaaaaatagagtacgtggcgtggcattgcttgtatcaaagttgaaaaacgctcaccagcttggaatcgtcccgacagcatcactacaaatttcattttgaggcgtctagcatcaactgctcggttaaagctcttgtgaaacggtcgtcaggaagagtggtaaactggtttcgaaggttgtccgcgtcaacgtcacacgacaagatcattgatcatcgatcatcgatgcttgacccaatctcatacattcttcagcttcctgacaaagaggacctccaacgccaacagcaacaatcggccgatacgagactcgattatttggaatattgtataagtcatcgtcaacggattgctctggcgaactatattgagcaccccaccccgcagaacgagaaaataaaccgaagagagcgaaaagcgagggtaccaagaggacatattcgcagttttgagtgaagatggcagatttatcacggcagtcggcatttatgccgacaataaaatgctccaactgcggtaatcaagtcgagatttcgatgatgggcgagcacacttgtggaggcgccagcgaggcagcgaatttagaacccgttccacccatcccagatctattaggtggtgccatgtcgtcattgaaactaaatgttttcgacaagttcactcgtgcgcctcctgctgttgacacttccgctgccaacaatgcattcacaaaacaggaacaaccaacaccgatgagtgcatccactgcctctcaagcgatatcaccaaaaacgccaatgagtctacgacctagtgccggatcttcgaacgacgattacttcagcccagccatagcaggatcaccaaggcgacccggtggatatggtgggttttctacggaaccagaatcgtacgagcccgaaccagcctatggaacgagtcctaataaacagaataacatgctcttaacacgaatgaacagcattgctccgggaccattcgatactaggccgcgatcagcgaagaagagctttcctcgaagggtcagcaaggatgaagctattgatccaggtgacgacttgtcgcgattaggcacatctatcgaacgcccaggaaccgcagcttcaggcacttcggctaccagtggaagcatgatggcaccaagagtgccacggaagaacggttacggcggatttgggcctcctcagaaagaaaatgaagaggtggaaccaaagccactggccaagcgctcagatacttttccgaatcaattgctcaaggcccgagacgacgattggcatgttgataccgtggcacgtatgccctcggcacctggccctagaccggaaagaccacgacggccatcagagaaagaagaggcaccagtgatgatcagcgaccgtaagaatagaccctcttacggtctccgagatacatcaagaccgccaccaccacggaagagtttgatacggccaccgacacgcaatggcagtcaaaatctttcgattaatcttgcagatgaatttggagtcggtaacccgtatcactcaccgtctgtgtctcaatcctcgaacaattcgggcttcagccaagaatcacgggccagtcaaccaagttcaacaacaagtccagctcggtcggttagatctgctcctcggagaccttccgagaccgctgcgtatgaagctctcatggatgatatgcggaactccacggagaatttgcgatcagcttccccatcgattgcggccaagccagtgcccataccgaggacggaaagcttatcaccagccgcaattccagtccccatggagaggaaagatagcctatcaccgaacgcacctcggcgtgggcctctccaggatttgagactagatcctgcagtgcagcgcgggcaggacagacttgactcccctgtgtcgccacttgagtccggcagtgcaccatctactcgtttggaccctgctctgtatgaagcacaaggcaggacgcgatcacaaacaacttctaccgtaggctcgagcgcgcataaccgacaaccttctcgaaatcctcgctcaagaggaaactgcagagcatgccgcgagcctattgtaggaaaatccatctcatctgcggatggacgtctaactggtcgatatcataaagcatgtttcgtgtgtacaacatgcgaggagccatttagctcatcaacattctatgttcacgaagatcgaccatattgtgagcaacactatcacaaactcaacggcagtctctgcaagtcgtgcaaccgaggaattgaaggagagtatcttgaggatgaggtgccccagaagtatcaccctggttgcttccgctgtggtgactgcggcatcgtactacgagatggttactacgatgtcaacggcaaatcatactgtgagagggatgcgtggcagaggaggcaacaagctgtccgctctcagcaaatgggtcctccaccatcgagacagccatcacaacgaccttccatgtcagcctcgggtccacgaattgagcgagtcgatgatgttcccaatattccgcagccaccaaggggactcccctcgggccctcagtcgtccctcaaccgcccattcggactaccaacgggcactaggctgatgcctggccaggcacttggccgtggtggtttacgcgccccaattcctaggatggagaagcggatgactaggcttggaatgatgtaatgaaccaagcctgagatatttccgcgccaccaactcttccagcaacattcatatcgatagtctcatccggtcacagccatcaacttctattttaacactgtcactacttttgtcattttaaacgcatagcaacggcgttaggaggaggcttcagcacgaccgctggcctacatttttgcattctgacgtttatttgacgttgtgctcccttgagcatatatataccattcgctttggtttctattcgattcatctcaactctatatacccatagccctcgacgaggtgcttcccattcatatacgcgtcatgatcctatccctcattgggattaccatcatagataatgtttataccaacttttggcttgcatagatgagcgaaacttattgatacgtggttgacaaggcttgttatctgagtcgacgacgtgagaagcctaggataggaaatggacttggtattggaaaaatcaaataccgaagggaaggaaggacgaaggagtgagcgagccacattctcccactccatagttgaactagtctatgtctgaatatagtacattgacgtctatcctgct

SEQ ID NO: 13112 - DNA, 2193 bp, Muscodor strobelii
  misc_feature: SGI cDNA ID NO. 564285
  misc_feature: Reduced expression when VOC is produced
  misc_feature: Encodes the peptide sequence at SEQ ID NO 13113
atgctggcagtacagcctcgtcgctggctgtctaggccaaagggcctcatagtctttgccttcactgttggcaccctttactgcttactgcttcggacatcgggaggctaccgagatgtgcagcccgactccctcgggactcctaatgagcttgcacccagcgagatcgttgaactcgtgacggaagaaggtgccgacgggaatcatcccagcttcgaagacaagatgagggaggcccaggatgaagaacaagttgctattcgccaacaattcaagattgaatacgaggatctcggccgagtcgcgggagcagatgcgatttacggcaagaccctcagtacactggaccagtccaaacaccgatcctcagtcttcgaagcgcagttaaaatccgctggcaaatcgccctatttcacgacacatactccctacctatataacccctatcccgaccacaacaaggacacgtcgatagcgcagtacgtgccctgtgagggacacgatggcaaccctattaccgacttgacagtattcaaggggatccctaaaggatttcccgagcctggcattggcagctacagtgtcttggatatggatggtgacttgtgcttcgagcgcgagacccggctcggcatgtacggcttccagaatgccaacgacacctccgacgctgaagtgcaatggcacaaggtccactggggcgcattgcaaacgaaatgcgtgcagaagaacgaggcccgatacgaccttaaaggctcgcccaatcccttcgtcagcacagtttatgcgcgacagaacacgagtgcctttgaaggcgccgatagcgactacgaactcgaagacgcacccaaagtgaaagagcacaacgacgagttcagaaggagcgaagccaaggttgaagatctggttgcgcgcgtttccgagagcattggaaagctgccaaccaaggaagcacgaactgccgttctcctgcggacatatactggcaagcaatacaacgaaaatgacaagcaggtgattcgtgctctcatctccgaattagcgctacgaacgggtggtttgtatcaggtgtatttgtttgtacacgtcaaagaagccgactatgctatttgggacgacgaaggtacctatcaatttgttcttcagcaaaatgttcctcctgagttccgtgacattgccatactctggaacgacgaggccgtgcaatccatgtatccaaaacttggtgcggagcagaccgtggtacacatggcgcaatggctctccgttcaaaaattcatgcaagagttcccagagttcgactacgtttggaactgggagatggatgctcgagtaactggtcatcactatgacttcctagaaaagattgtctctttcgccaagaaacaacctcgccgcgggttatgggagcgaagcgagcggtactatattcccactttacatggtgactacgatacggacttccgcaaagaagtcgaggaattggctggagaagataccatctggggtgctccagatcttcccttcatcaaacctgtgggacccagacccccggtgccgaaaccagaattagatgactacacctggggcgttggtgaagaagctgatcttatcacggttgctcctatcatcaacgtcaacaagagtgggtgggttggcgcaaacgacgtgtggggatataatgattcgacgcatgcaacccaacaactaccgcgtcgtgtgactattgttacacactcgagaatctccaagaggctcctcgacatcatgcacgtggagaatttgagaggtaatcacatcgcgtccgagatggcgtgtcagacaaccgccctattgcacggtctcaaagctgtctatgcaccaatgcctatgttcttcgacagaccatggaaaggcaaagacctcggtcggtggttcaaccccggagagaaaggtgaaagtggaggcgacaactctgcgattggttggggacgagaggccagatatggaggtataacgtggtactacagggctggtccccctcagcgactatacaacaatctcatgggatatgaagacacaaaattaggtggtgaggagtgggaaggataccatggacggccctgcctgccacccattctgatgcatccgattaaggatgtcgccccgacagacacgggctacgaaagtgaatccgttctgccttttggctga

SEQ ID NO: 13113 - protein, 730 aa, Muscodor strobelii
  misc_feature: SGI Peptide ID NO. 564285
  misc_feature (86)..(729): NCBI GI: 171691991 Blast Desc: protein product [Podospora anserina] gi|170945944|emb|CAP72745.1| protein product [Podospora anserina]
  misc_feature (65)..(723): NCBI GI: 46136853 Blast Desc: FG09942.1 [Gibberella zeae PH-1]
  misc_feature (73)..(729): NCBI GI: 116180154 Blast Desc: CHGG_00705 [Chaetomium globosum CBS 148.51] gi|88185002|gb|EAQ92470.1| CHGG_00705 [Chaetomium globosum CBS 148.51]
  misc_feature (78)..(729): NCBI GI: 28950118 Blast Desc: [Neurospora crassa]
  misc_feature (78)..(729): NCBI GI: 85100183 Blast Desc: NCU06669 [Neurospora crassa OR74A] gi|28922448|gb|EAA31680.1| [Neurospora crassa OR74A]
  misc_feature (317)..(730): NCBI GI: 256731718 Blast Desc: NECHADRAFT_80371 [Nectria haematococca mpVI 77-13-4]
  misc_feature (41)..(645): NCBI GI: 154299251 Blast Desc: BC1G_11111 [Botryotinia fuckeliana B05.10] gi|150857376|gb|EDN32568.1| BC1G_11111 [Botryotinia fuckeliana B05.10]
  misc_feature (198)..(693): NCBI GI: 156065993 Blast Desc: SS1G_01007 [Sclerotinia sclerotiorum 1980] gi|154691866|gb|EDN91604.1| SS1G_01007 [Sclerotinia sclerotiorum 1980]
  misc_feature (82)..(716): NCBI GI: 242793170 Blast Desc: conserved [Talaromyces stipitatus ATCC 10500] gi|218718696|gb|EED18116.1| conserved [Talaromyces stipitatus ATCC 10500]
  misc_feature (121)..(716): NCBI GI: 212535486 Blast Desc: conserved [Penicillium marneffei ATCC 18224] gi|210070298|gb|EEA24388.1| conserved [Penicillium marneffei ATCC 18224]
  misc_feature: Useful for introducing or modulating the production of volatile compounds
MLAVQPRRWLSRPKGLIVFAFTVGTLYCLLLRTSGGYRDVQPDSLGTPNELAPSEIVELVTEEGADGNHPSFEDKMREAQDEEQVAIRQQFKIEYEDLGRVAGADAIYGKTLSTLDQSKHRSSVFEAQLKSAGKSPYFTTHTPYLYNPYPDHNKDTSIAQYVPCEGHDGNPITDLTVFKGIPKGFPEPGIGSYSVLDMDGDLCFERETRLGMYGFQNANDTSDAEVQWHKVHWGALQTKCVQKNEARYDLKGSPNPFVSTVYARQNTSAFEGADSDYELEDAPKVKEHNDEFRRSEAKVEDLVARVSESIGKLPTKEARTAVLLRTYTGKQYNENDKQVIRALISELALRTGGLYQVYLFVHVKEADYAIWDDEGTYQFVLQQNVPPEFRDIAILWNDEAVQSMYPKLGAEQTVVHMAQWLSVQKFMQEFPEFDYVWNWEMDARVTGHHYDFLEKIVSFAKKQPRRGLWERSERYYIPTLHGDYDTDFRKEVEELAGEDTIWGAPDLPFIKPVGPRPPVPKPELDDYTWGVGEEADLITVAPIINVNKSGWVGANDVWGYNDSTHATQQLPRRVTIVTHSRISKRLLDIMHVENLRGNHIASEMACQTTALLHGLKAVYAPMPMFFDRPWKGKDLGRWFNPGEKGESGGDNSAIGWGREARYGGITWYYRAGPPQRLYNNLMGYEDTKLGGEEWEGYHGRPCLPPILMHPIKDVAPTDTGYESESVLPFG

SEQ ID NO: 13114 - DNA, 3234 bp, Muscodor strobelii
  misc_feature: SGI EST ID NO. CUFF.31428.0
  misc_feature: Variant of the nucleotide sequence at SEQ ID NO 13112
gtttggcaccaccatctcaagttaaggttcgacgtctcaaacggctccgctgcctacctcagatcaaagactgtcttatctgtattctacatactctactatcgctctctccctttcacgacatttacactttcttctcttcctgtttcctcctcctcctgtgttttctcctgttgcctcgccgtcgaacatctgtacatagtgtatctcataataactaacccaacaaccatcacccctcgttcctgcattgtgtatagtgccgttgcctccttctctgtctcccgcattcctttagaaccaactgtcacctcgagaccgcatccgaccccgtccgtcgctcttttatctgctgcatcgccttagtcgcgaacaaacaaccacaacgaccctcgactcgataacccttgataagcattgtccagtacaatcgatactggcccgtttcaagtgttgagaacccgcaagtcgatcgactgctcgttgcgatgtggacgatcttgtaattttaatattggcaattcgggatcgctgagcgaacaccttccgacaccttcattatcatatcacacagacaactcgctgcaatgctggcagtacagcctcgtcgctggctgtctaggccaaagggcctcatagtctttgccttcactgttggcaccctttactgcttactgcttcggacatcgggaggctaccgagatgtgcagcccgactccctcgggactcctaatgagcttgcacccagcgagatcgttgaactcgtgacggaagaaggtgccgacgggaatcatcccagcttcgaagacaagatgagggaggcccaggatgaagaacaagttgctattcgccaacaattcaagattgaatacgaggatctcggccgagtcgcgggagcagatgcgatttacggcaagaccctcagtacactggaccagtccaaacaccgatcctcagtcttcgaagcgcagttaaaatccgctggcaaatcgccctatttcacgacacatactccctacctatataacccctatcccgaccacaacaaggacacgtcgatagcgcagtacgtgccctgtgagggacacgatggcaaccctattaccgacttgacagtattcaaggggatccctaaaggatttcccgagcctggcattggcagctacagtgtcttggatatggatggtgacttgtgcttcgagcgcgagacccggctcggcatgtacggcttccagaatgccaacgacacctccgacgctgaagtgcaatggcacaaggtccactggggcgcattgcaaacgaaatgcgtgcagaagaacgaggcccgatacgaccttaaaggctcgcccaatcccttcgtcagcacagtttatgcgcgacagaacacgagtgcctttgaaggcgccgatagcgactacgaactcgaagacgcacccaaagtgaaagagcacaacgacgagttcagaaggagcgaagccaaggttgaagatctggttgcgcgcgtttccgagagcattggaaagctgccaaccaaggaagcacgaactgccgttctcctgcggacatatactggcaagcaatacaacgaaaatgacaagcaggtgattcgtgctctcatctccgaattagcgctacgaacgggtggtttgtatcaggtgtatttgtttgtacacgtcaaagaagccgactatgctatttgggacgacgaaggtacctatcaatttgttcttcagcaaaatgttcctcctgagttccgtgacattgccatactctggaacgacgaggccgtgcaatccatgtatccaaaacttggtgcggagcagaccgtggtacacatggcgcaatggctctccgttcaaaaattcatgcaagagttcccagagttcgactacgtttggaactgggagatggatgctcgagtaactggtcatcactatgacttcctagaaaagattgtctctttcgccaagaaacaacctcgccgcgggttatgggagcgaagcgagcggtactatattcccactttacatggtgactacgatacggacttccgcaaagaagtcgaggaattggctggagaagataccatctggggtgctccagatcttcccttcatcaaacctgtgggacccagacccccggtgccgaaaccagaattagatgactacacctggggcgttggtgaagaagctgatcttatcacggttgctcctatcatcaacgtcaacaagagtgggtgggttggcgcaaacgacgtgtggggatataatgattcgacgcatgcaacccaacaactaccgcgtcgtgtgactattgttacacactcgagaatctccaagaggctcctcgacatcatgcacgtggagaatttgagaggtaatcacatcgcgtccgagatggcgtgtcagacaaccgccctattgcacggtctcaaagctgtctatgcaccaatgcctatgttcttcgacagaccatggaaaggcaaagacctcggtcggtggttcaaccccggagagaaaggtgaaagtggaggcgacaactctgcgattggttggggacgagaggccagatatggaggtataacgtggtactacagggctggtccccctcagcgactatacaacaatctcatgggatatgaagacacaaaattaggtggtgaggagtgggaaggataccatggacggccctgcctgccacccattctgatgcatccgattaaggatgtcgccccgacagacacgggctacgaaagtgaatccgttctgccttttggctgagattttcatttctggaagatgattcttgttttctttcgtcccaacaagaagagctcttgagggaaacgtccgagacgcgtacgcctattgcgtcatcgggttacacgaacacgaatttctactgcattattggcgtttgcattctacaggcgtaaggcctgctgcacaagatacccgcggtgcattgcctggctctatctaccaggtttcgatgctaccggatggcacaccggatcaggcgtcggccaacgagccacttgcatgtatgaacgatccggagtaaatggtatagacaaatggttgagtcaagaaagacaggcgcggaaacaaatagatggacatggagggggtctgtataccagatgtaccaattacagcattaagaaataacaaatttatttacatattcaaacctcaatggtatgaatcactggcattttaatttatacggcgc

SEQ ID NO: 13115 - DNA, 1158 bp, Muscodor strobelii
  misc_feature: SGI cDNA ID NO. 564286
  misc_feature: Encodes the peptide sequence at SEQ ID NO 13116
atgatgcattatacgtctacagccttatgccttacactcgccgcttcgacggtgaacgcatatttaccctccggcaagatacgaggcgtaaacctcggctcctacttcgtcgtcgaagaatggttcgccaaagatgagtgggcgagcatgggctgcaaagggtactacgacgaatggtcctgcgttgaagctctcggtcaagacaaagccgatgctgccttccaaaagcactggaactcctggatcacgcaaagtgacatcaaagaggttgctagctatggcttgaacactatccgcatccccgttggattctggatcaatgaaaatcttgtctacgacgaggagtgttacccaagaggtggactggcgtatctcgatcgcctcatgggatgggcaaaggacgccgggttgtatgtcatcatggaccttcatggcggcccagggtctcagtcgccgaatgaagaattcactggacacagcactgccaaccccggcttcttcacagcagcaaactacgagcgagcctacaaattcctcgaatggatgacggagcgtatccacaccaacacagcgtacagcactgtcggcatgctagaaatcatcaacgaaccgataaagagacgcgtcaacgccacagacgccgacagcatgctgaaaacattctacccaattgcatgggaccgtgtcaagaaccgggaggcagagctcggcgtttctgccgctaagacacttcatatccagttcatggtctatgttccctacctgttgcaatatgcagcatgcaacttagctaacgataaccagggctccaattggggatccggccatccagagacatatctcaacgacactaccaacatatacttcgacgaccacgtatactggaagttcgacacccgcacaggcgacacacaagaaggctacataaacgcatcctgcacagactactctcccgaagccggcacagttgtcggtgagttctccctcgcagtcgagtccgcactacaaaacaacgacgaattcgggctgcaaggtcatccagagaacaaggccttctacaccgactatttcaacgctcaggtttctgtctacgaaaagagcggcggttgggtattctggagctggaagtgtaactggattggcgggttcaacgactag

SEQ ID NO: 13116 - protein, 385 aa, Muscodor strobelii
  misc_feature: SGI Peptide ID NO. 564286
  misc_feature (8)..(378): NCBI GI: 256724529 Blast Desc: glycoside hydrolase family 5 [Nectria haematococca mpVI 77-13-4]
  misc_feature (21)..(378): NCBI GI: 46109428 Blast Desc: FG01596.1 [Gibberella zeae PH-1]
  misc_feature (11)..(378): NCBI GI: 67526639 Blast Desc: AN3777.2 [Aspergillus nidulans FGSC A4] gi|40740795|gb|EAA59985.1| AN3777.2 [Aspergillus nidulans FGSC A4] gi|95025907|gb|ABF50867.1| endo-beta-1,6-glucanase nidulans]
  misc_feature (7)..(384): NCBI GI: 115443318 Blast Desc: conserved [Aspergillus terreus NIH2624] gi|114188335|gb|EAU30035.1| conserved [Aspergillus terreus NIH2624]
  misc_feature (24)..(377): NCBI GI: 119480803 Blast Desc: cellulase, [Neosartorya fischeri NRRL 181] gi|119408584|gb|EAW18533.1| cellulase, [Neosartorya fischeri NRRL 181]
  misc_feature (24)..(377): NCBI GI: 159129351 Blast Desc: endo-beta-1,6-glucanase, [Aspergillus fumigatus A1163]
  misc_feature (13)..(378): NCBI GI: 256729667 Blast Desc: NECHADRAFT_47058 [Nectria haematococca mpVI 77-13-4]
  misc_feature (21)..(376): NCBI GI: 242768379 Blast Desc: endo-beta-1,6-glucanase, [Talaromyces stipitatus ATCC 10500] gi|218724753|gb|EED24170.1| endo-beta-1,6-glucanase, [Talaromyces stipitatus ATCC 10500]
  misc_feature (21)..(376): NCBI GI: 212542563 Blast Desc: endo-beta-1,6-glucanase, [Penicillium marneffei ATCC 18224] gi|210066343|gb|EEA20436.1| endo-beta-1,6-glucanase, [Penicillium marneffei ATCC 18224]
  misc_feature (24)..(377): NCBI GI: 71001176 Blast Desc: endo-beta-1,6-glucanase [Aspergillus fumigatus Af293] gi|66852907|gb|EAL93231.1| endo-beta-1,6-glucanase, [Aspergillus fumigatus Af293]
  misc_feature (26)..(376): SWISSPROT Homolog: EC 3.2.1.58 Glucan 1,3-beta-glucosidase
MMHYTSTALCLTLAASTVNAYLPSGKIRGVNLGSYFVVEEWFAKDEWASMGCKGYYDEWSCVEALGQDKADAAFQKHWNSWITQSDIKEVASYGLNTIRIPVGFWINENLVYDEECYPRGGLAYLDRLMGWAKDAGLYVIMDLHGGPGSQSPNEEFTGHSTANPGFFTAANYERAYKFLEWMTERIHTNTAYSTVGMLEIINEPIKRRVNATDADSMLKTFYPIAWDRVKNREAELGVSAAKTLHIQFMVYVPYLLQYAACNLANDNQGSNWGSGHPETYLNDTTNIYFDDHVYWKFDTRTGDTQEGYINASCTDYSPEAGTVVGEFSLAVESALQNNDEFGLQGHPENKAFYTDYFNAQVSVYEKSGGWVFWSWKCNWIGGFND

SEQ ID NO: 13117 - DNA, 295 bp, Muscodor strobelii
  misc_feature: SGI EST ID NO. CUFF.31291.0
  misc_feature: Variant of the nucleotide sequence at SEQ ID NO 13115
cgacaagctcaaaaaccgtgtgctgccaaccgctccacagttccaaactatggaatactgcatggaacctgaagaacgccgttctgtgtacacggaaggcgctttagtttggtcaatgacatataaatgtggctggcttttttgtcatgggctcgtgtagtagagactcatcagacgacatcacagacatatagacacataaacggcaaaatgatgcattatacgtctacagccttatgccttacactcgccgcttcgacggtgaacgcatatttaccctccggcaagatacgag

SEQ ID NO: 13118 - DNA, 990 bp, Muscodor strobelii
  misc_feature: SGI cDNA ID NO. 564287
  misc_feature: Elevated expression when VOC is produced
  misc_feature: Encodes the peptide sequence at SEQ ID NO 13119
atgccgtcattttcgtccttaatttacggtgcggtgcttctggcactggccgacgctcatggagctcttcttaatgcccagggcttacaaggctcaccagccagcgtcgggttcaaagtcaatcttgcgcttcctaggaattgcacgaacatcaacccctgccaacaggatacgacgatcataagagatgctgagattaaggctaatgttgtcaacgagtgtggacgcactgagcttgatggaaacattgatattggggaaaatacggagaacgctctggctgccggggctgtcacgcaagtcaaagctggttccgtcgtagatgtgacaatccaccaagtcaacgccgacggagcgggaccatatacctgtgatatcattgctcaaggcaacaacggcgtcatcacttttccgaacgtagacgtggccaacaacgttccgggtgtaaatggattcagtcaagcgaaagaggaagactttgtaatacaggtcagcatgccagataacctgaactgtacaggctcatcggccggcaacgtctgcactgtccgctgccgcaacaacgcgttggctggtcccttcggtggttgtttccctgtgcaacaggtcaatacgccggcgaacatcgacacggccattacactcgagcaggtcgacgcgcaagttgcgcaagacatcaaggccctgccggctgccctcgctgcgaaccaggtccagggtctcgatgagaacgcgcaggccgctgccgtagtcacctctatcttggatattagtatcacgagcttggcggccggaacacagaccctccctactgctagtgccactgcctcttccgctaacgctgctactacctctgctgcttcgcaacagaatgccggtaacggtgccgcggacggaaacaacagcggtaacggtagaaatagtggaaatggtagaggtggaaggaatcgaaattctcagcgctctttcctgtcgcgccggtggcaataa

SEQ ID NO: 13119 - protein, 329 aa, Muscodor strobelii
  misc_feature: SGI Peptide ID NO. 564287
  misc_feature (4)..(278): NCBI GI: 156064331 Blast Desc: SS1G_00173 [Sclerotinia sclerotiorum 1980] gi|154691035|gb|EDN90773.1| SS1G_00173 [Sclerotinia sclerotiorum 1980]
  misc_feature (4)..(269): NCBI GI: 154312162 Blast Desc: BC1G_06114 [Botryotinia fuckeliana B05.10] gi|150850077|gb|EDN25270.1| BC1G_06114 [Botryotinia fuckeliana B05.10]
  misc_feature (13)..(273): NCBI GI: 256728376 Blast Desc: NECHADRAFT_6107 [Nectria haematococca mpVI 77-13-4]
  misc_feature (1)..(271): NCBI GI: 46135675 Blast Desc: FG09353.1 [Gibberella zeae PH-1]
  misc_feature (1)..(268): NCBI GI: 261354439 Blast Desc: VDBG_02976 [Verticillium albo-atrum VaMs.102]
  misc_feature (4)..(246): NCBI GI: 85095139 Blast Desc: NCU06170 [Neurospora crassa OR74A] gi|28921490|gb|EAA30796.1| conserved [Neurospora crassa OR74A]
  misc_feature (20)..(254): NCBI GI: 39974301 Blast Desc: MGG_00703 [Magnaporthe grisea 70-15] gi|145018363|gb|EDK02642.1| MGG_00703 [Magnaporthe grisea 70-15]
  misc_feature (1)..(233): NCBI GI: 169615743 Blast Desc: SNOG_11034 [Phaeosphaeria nodorum SN15] gi|160703035|gb|EAT81533.2| SNOG_11034 [Phaeosphaeria nodorum SN15]
  misc_feature (7)..(230): NCBI GI: 189210108 Blast Desc: PTRG_11055 [Pyrenophora tritici-repentis Pt-1C-BFP] gi|187977479|gb|EDU44105.1| PTRG_11055 [Pyrenophora tritici-repentis Pt-1C-BFP]
  misc_feature (15)..(216): NCBI GI: 171679952 Blast Desc: protein product [Podospora anserina] gi|170939602|emb|CAP64829.1| protein product [Podospora anserina]
  misc_feature: Useful for introducing or modulating the production of volatile compounds
MPSFSSLIYGAVLLALADAHGALLNAQGLQGSPASVGFKVNLALPRNCTNINPCQQDTTIIRDAEIKANVVNECGRTELDGNIDIGENTENALAAGAVTQVKAGSVVDVTIHQVNADGAGPYTCDIIAQGNNGVITFPNVDVANNVPGVNGFSQAKEEDFVIQVSMPDNLNCTGSSAGNVCTVRCRNNALAGPFGGCFPVQQVNTPANIDTAITLEQVDAQVAQDIKALPAALAANQVQGLDENAQAAAVVTSILDISITSLAAGTQTLPTASATASSANAATTSAASQQNAGNGAADGNNSGNGRNSGNGRGGRNRNSQRSFLSRRWQ

SEQ ID NO: 13120 - DNA, 922 bp, Muscodor strobelii
  misc_feature: SGI EST ID NO. CUFF.31296.0
  misc_feature: Variant of the nucleotide sequence at SEQ ID NO 13118
taatgagacaatattcgtgagagagcctacatcgcagcgtgtatcatggaacacgcatcattgtgagtgaggcatcggcagttgaacgaggctggtgtttgagcgaagatgggtcgatgaagggtatatgacttgaaagtctgacagccgtctgataattcttgtccttcattcccttcttgtccatcttcttgttcttttctgcttcgacgatcctgcggatctttttttccccctcgctcttgatttattctattcttattgatattaatagcttgagtacgttgtgctggtcacgtttattcatcttttcagttaccatgccgtcattttcgtccttaatttacggtgcggtgcttctggcactggccgacgctcatggagctcttcttaatgcccagggcttacaaggctcaccagccagcgtcgggttcaaagtcaatcttgcgcttcctaggaattgcacgaacatcaacccctgccaacaggatacgacgatcataagagatgctgagattaaggctaatgttgtcaacgagtgtggacgcactgagcttgatggaaacattgatattggggaaaatacggagaacgctctggctgccggggctgtcacgcaagtcaaagctggttccgtcgtagatgtgacaatccaccaagtcaacgccgacggagcgggaccatatacctgtgatatcattgctcaaggcaacaacggcgtcatcacttttccgaacgtagacgtggccaacaacgttccgggtgtaaatggattcagtcaagcgaaagaggaagactttgtaatacaggtcagcatgccagataacctgaactgtacaggctcatcggccggcaacgtctgcactgtccgctgccgcaacaacgcgttggctggtcccttcggtggttgtttccctgtgca

SEQ ID NO: 13121 - DNA, 3498 bp, Muscodor strobelii
  misc_feature: SGI cDNA ID NO. 564288
  misc_feature: Encodes the peptide sequence at SEQ ID NO 13122
atgaaccaactcggtgcagtgacacgggacacgaacgacgggagtgcgtatcatgaggatgtcacttttaacttgttgcggaatgtgccacagagaaaagcggtgcctaccaagacggcgcaagatagttctgaataccgaacgccatgctcttccatgcgctggagaccgctttatctacgacggcgtgttctcataggttttgccgtggtgtttgctgcattgatcataactatcgaagtgctttttagcctctcagtcaaaaatcaggggttagctaccagctattctggacttcgctatctttggacttacgggccaactgccatccttacccttgtcgcggcattttggactcgcgttgcctatcaagcgagactaatagcgccttggtggcgcatggcaaatggcccatctagtgccgaccagactctcttgctcgattacatctcgatgttccaacccttgacggtcattaaagctcttcgaaacacggactatgttgttgccggcacgagtttcgtctcactattcttcactgttctcattgttctatcgaccggtctgataaatctatcgctcatacctgtagtcaagaattcgatacctctcacacttgcatctaccttcattaatgatgtggcaaaactcaagcagcctggatccattgcctacttcgaaatgctcggctcgagcagcggtggcctaggatcagtgagcggtgtatcttcagagtacgcgtatcagacgatcgacttgaatgtgccgacgaatgcagagatacaggttactgttgacggtttgacgactggtctcgattgtgaatctgctcaggtggaagattataactaccactttgaagcagtcgaagaggacttgcctgtgcaatatgtcaacatgactctgagttcgacaaattgctcgctaatgatcgagaagatcgcgctgaatgacccagctcgtttcctctggctcgatcaaggctcgtgtatagatagacgctcgacaaaggagtcacgcattgtcgtactctacgggttcttaaatgtcactggcgcgccctttcacggaaacgtcacaacgtcattggtcaactcaaccgcattgctatgcaacccaacatacaacatggcgaaagtcgacgttacgtggaaccacactcaggttcaaaatgttgcacaatcccgatcttctgctacctggaagctcaacagtgtcacgccatgggacatcgcccgtgcccattttgagtcatattcgaatgcgttgatcaacgaccctctgacggggattacaatgggtcaggatgacttgatcataaatgtatcctctataaaggtgggagttgatcagtacacgaagcttgctctcgatgattcagccttggacttgaatgatgtcgatgtattatccgacgcgaagactctcgccaactttttcaacaaatactatcgaaaattcacgatattcgtggcacatgaatcacttgttcagggggcgtccatcagccatacaggtagaatcatcgtttacgaagatcgcctagtggttcgtccgctagcagcccacttcatggcgtctatccttggaatcgcgtttaccttcgctctgctagcctgtttcatggttccagcacagagtttcttgccctgtgaccctacgacggttctcggcaaagcagctcttgcggccatcagcccaaagatatggcaatacctgcgggactctggagcggcagatctcaaagcgctgcgtgctgcgataaacgaaagggaatattccacacagcttcattcggtctttcaaggctctctcgcgcgatacccacagttcttcatcgccgataggcgtcgttctcacaatctattcgagccttcgtctctcgccatgcgagcgaagcggatcaatgctatttcgttgaagcctttggttcgattgatcatgcttgtcttagtcactggtcttattgcaactcttgaagctttattacacaagtcgcagagatccaatggtctcgctgacgcaaaagctgaaacggatcttatctttggacaacaattccttctttgctacggtgcacttttgagcaccctaaacctggttctgacatctttgttcacgatattcacgagttccctctttgctgctgcatcagtgccagagacttaccctcttcagctcgacaccttgacatccttcaacactaatgcatcttacgtcgaccagctgacgaactttgatgcaacgcaggccaatgcttccctcgtcctgcggagtaacttaagttttccgtcatttacatacgataatcttgcttttcccggactcatatttcccggtaacttcttggtcgataacgatgtccggacaacaaatctatccgattctaccatagcagcgactataccggcactccaatcaaaactgtcctgcaaattacacagcgcttccgatataacagccgattttgaccccctttcagacggtagcggggggtatctaagcagcaacatcaccagtgaatcctgtagacaggacgagaatgcgtggtttaaggtagatcaaccgtaccccgatgatgctttcttttcgacgagcacttttggacgagagccgtatattggaaatcctatacaaggatgtagcgactggatatggatctggggtcatgtctcgttctctgcctctgatctgaagatcaattccatcgcggccatgagctgcaatgaatccatagacacagtagatgcttcggtgagcttcctaggcacatcccttcaaatcgacccgacccgcccacccgtcgccgacgaagcctcagcccgcgagtctagtgcaactattgacgcggatgacagagtttatctatcactcgtcaacgtaaccatcggaccggaccttctcgactccttctttggcctattaatcagctcacgctacgctatcccaagatcttacctaggagatgaacagaaatcggccgccgttgccgacgccatccgcttccaacacggaatcattcgcgcccaggacctcagcgctcgattccgtgtgcctcctgaccacaccaacgcgaccagcagggacagtgccgccaacgatgcgcgctcctacgatgcggttctcaccgatccattcggccgccggcgtgttatccaggacgtcgcaagtactcgcgtgctagaagtactgctcgccattacccttgtgctgtctgttgcaagctgggcgctgatgccccggacggcattgcttacacgaagcgctggcagcatagcaggggctctagcgttgttggcaggcgggaacatcgtcccgggagagagtcttccggctgacgccgcgtggatgagtgaatatgaaatacgggagcatttccgtaaattagggctggaaagggtttggatgggatgggcaacattagttggagacacgagcggacatccaaacgtagatggggctgagaggttcatgatttgcgctccattaccgcattag

SEQ ID NO: 13122 - protein, 1165 aa, Muscodor strobelii
  misc_feature: SGI Peptide ID NO. 564288
  misc_feature (55)..(1126): NCBI GI: 256725614 Blast Desc: NECHADRAFT_43867 [Nectria haematococca mpVI 77-13-4]
  misc_feature (115)..(1048): NCBI GI: 116201293 Blast Desc: CHGG_08531 [Chaetomium globosum CBS 148.51] gi|88177049|gb|EAQ84517.1| CHGG_08531 [Chaetomium globosum CBS 148.51]
  misc_feature (55)..(1138): NCBI GI: 46116660 Blast Desc: FG04172.1 [Gibberella zeae PH-1]
  misc_feature (23)..(1104): NCBI GI: 171682580 Blast Desc: protein product [Podospora anserina] gi|170941249|emb|CAP66899.1| protein product [Podospora anserina]
  misc_feature (53)..(673): NCBI GI: 145606681 Blast Desc: MGG_09392 [Magnaporthe grisea 70-15] gi|145014354|gb|EDJ98922.1| MGG_09392 [Magnaporthe grisea 70-15]
  misc_feature (55)..(1139): NCBI GI: 145248079 Blast Desc: An13g01490 [Aspergillus niger] gi|134081037|emb|CAK41549.1| protein product [Aspergillus niger]
  misc_feature (10)..(1122): NCBI GI: 240110383 Blast Desc: CPC735_064150 [Coccidioides posadasii C735 delta SOWgp]
  misc_feature (55)..(1144): NCBI GI: 238845466 Blast Desc: conserved [Microsporum canis CBS 113480]
  misc_feature (228)..(673): NCBI GI: 261359933 Blast Desc: conserved [Verticillium albo-atrum VaMs.102]
  misc_feature (41)..(1122): NCBI GI: 119180568 Blast Desc: CIMG_08905 [Coccidioides immitis RS]
MNQLGAVTRDTNDGSAYHEDVTFNLLRNVPQRKAVPTKTAQDSSEYRTPCSSMRWRPLYLRRRVLIGFAVVFAALIITIEVLFSLSVKNQGLATSYSGLRYLWTYGPTAILTLVAAFWTRVAYQARLIAPWWRMANGPSSADQTLLLDYISMFQPLTVIKALRNTDYVVAGTSFVSLFFTVLIVLSTGLINLSLIPVVKNSIPLTLASTFINDVAKLKQPGSIAYFEMLGSSSGGLGSVSGVSSEYAYQTIDLNVPTNAEIQVTVDGLTTGLDCESAQVEDYNYHFEAVEEDLPVQYVNMTLSSTNCSLMIEKIALNDPARFLWLDQGSCIDRRSTKESRIVVLYGFLNVTGAPFHGNVTTSLVNSTALLCNPTYNMAKVDVTWNHTQVQNVAQSRSSATWKLNSVTPWDIARAHFESYSNALINDPLTGITMGQDDLIINVSSIKVGVDQYTKLALDDSALDLNDVDVLSDAKTLANFFNKYYRKFTIFVAHESLVQGASISHTGRIIVYEDRLVVRPLAAHFMASILGIAFTFALLACFMVPAQSFLPCDPTTVLGKAALAAISPKIWQYLRDSGAADLKALRAAINEREYSTQLHSVFQGSLARYPQFFIADRRRSHNLFEPSSLAMRAKRINAISLKPLVRLIMLVLVTGLIATLEALLHKSQRSNGLADAKAETDLIFGQQFLLCYGALLSTLNLVLTSLFTIFTSSLFAAASVPETYPLQLDTLTSFNTNASYVDQLTNFDATQANASLVLRSNLSFPSFTYDNLAFPGLIFPGNFLVDNDVRTTNLSDSTIAATIPALQSKLSCKLHSASDITADFDPLSDGSGGYLSSNITSESCRQDENAWFKVDQPYPDDAFFSTSTFGREPYIGNPIQGCSDWIWIWGHVSFSASDLKINSIAAMSCNESIDTVDASVSFLGTSLQIDPTRPPVADEASARESSATIDADDRVYLSLVNVTIGPDLLDSFFGLLISSRYAIPRSYLGDEQKSAAVADAIRFQHGIIRAQDLSARFRVPPDHTNATSRDSAANDARSYDAVLTDPFGRRRVIQDVASTRVLEVLLAITLVLSVASWALMPRTALLTRSAGSIAGALALLAGGNIVPGESLPADAAWMSEYEIREHFRKLGLERVWMGWATLVGDTSGHPNVDGAERFMICAPLPH

SEQ ID NO: 13123 - DNA, 1080 bp, Muscodor strobelii
  misc_feature: SGI cDNA ID NO. 564289
  misc_feature: Encodes the peptide sequence at SEQ ID NO 13124
atgaccttcttcggtgcatcacagatccgagacgcttaccgaaagtttagagctcggagcagcagaccgggtcaggggattaatcatcagtatactgatcgactgaatgtgcttatgcgatcgtataaagaagttccactttggtggtatatgacgctcttcttagccgcttttacatcgatcattacgattgttgcattggacctcctattcataccttggtggacatatttcatcgccatagccacgggagctatcgttgtagtgcctttaggttggctttacgcagtcagcaactttcaattgccaataggcacgttcaacgagttattgtacggcacaattgtccagaacttcagtactcataggaacccaatcggcgcgagtgtctacggatcgattgctggtgatgcctggtacagagctcaatacatgctccaagatcaaaaaatcgggcattatatgcatgtccctcagcgcgcggtgttcttttcccaggtcttcggcattacacttggagtcccgatcaactatgccgcgatgcgatgggttttgaatacgaagcgtgactatctaacaggagacctagaggacccagctcatatctggactggtcaaagcctcgccggttatctaactatgggagtccaatacgttttgataggaccaacgaagctattccaacagcagcaatggaagccaatcccatatgcctttctgtttggcgcagtgacacctgcgctgatctatttactacatcgcttatttccacgtgcgaaatttcacttatggaatacgacaattttcttcagcggcgcatctatcttctacggtaatgtgtctacgggttatttctctcgtttcatcggaggtttcgttgtcatgtattgggcctacagatatcgctaccaactttgggcaagatataactttatcctggccgcagcttttgatgcgggattcaatctcaatcttttgctaatcttcttattcttcggaagcggcaaaattgttaccatgccacattggtggggggatgacgcccaaagtgtagagaaatgttacgctttagacacttga

SEQ ID NO: 13124 - protein, 359 aa, Muscodor strobelii
  misc_feature: SGI Peptide ID NO. 564289
  misc_feature (1)..(332): Pfam Id: PF03169 Pfam Desc: OPT oligopeptide transporter protein
  misc_feature (1)..(358): NCBI GI: 156039822 Blast Desc: SS1G_12047 [Sclerotinia sclerotiorum 1980] gi|154696104|gb|EDN95842.1| SS1G_12047 [Sclerotinia sclerotiorum 1980]
  misc_feature (3)..(358): NCBI GI: 154295938 Blast Desc: BC1G_13122 [Botryotinia fuckeliana B05.10] gi|150843774|gb|EDN18967.1| BC1G_13122 [Botryotinia fuckeliana B05.10]
  misc_feature (4)..(358): NCBI GI: 145251507 Blast Desc: An15g07460 [Aspergillus niger] gi|134082801|emb|CAK48575.1| protein product [Aspergillus niger]
  misc_feature (4)..(358): NCBI GI: 119467402 Blast Desc: OPT oligopeptide transporter, [Neosartorya fischeri NRRL 181] gi|119405659|gb|EAW15610.1| OPT oligopeptide transporter, [Neosartorya fischeri NRRL 181]
  misc_feature (4)..(358): NCBI GI: 70984511 Blast Desc: oligopeptide transporter [Aspergillus fumigatus Af293] gi|66845389|gb|EAL85724.1| oligopeptide transporter, [Aspergillus fumigatus Af293] gi|159122545|gb|EDP47666.1| OPT oligopeptide
  misc_feature (7)..(357): NCBI GI: 238507610 Blast Desc: oligopeptide transporter, [Aspergillus flavus NRRL3357] gi|220688525|gb|EED44877.1| oligopeptide transporter, [Aspergillus flavus NRRL3357]
  misc_feature (7)..(357): NCBI GI: 169785142 Blast Desc: [Aspergillus oryzae RIB40] gi|83775779|dbj|BAE65899.1| protein product [Aspergillus oryzae]
  misc_feature (4)..(359): NCBI GI: 255948610 Blast Desc: Pc22g11250 [Penicillium chrysogenum Wisconsin 54-1255] gi|211592089|emb|CAP98413.1| Pc22g11250 [Penicillium chrysogenum Wisconsin 54-1255]
  misc_feature (4)..(358): NCBI GI: 126139089 Blast Desc: PICST_33298 [Pichia stipitis CBS 6054] gi|126093349|gb|ABN68038.1| [Pichia stipitis CBS 6054]
  misc_feature (4)..(358): NCBI GI: 87045979 Blast Desc: oligopeptide transporter 7 [Candida albicans]
MTFFGASQIRDAYRKFRARSSRPGQGINHQYTDRLNVLMRSYKEVPLWWYMTLFLAAFTSIITIVALDLLFIPWWTYFIAIATGAIVVVPLGWLYAVSNFQLPIGTFNELLYGTIVQNFSTHRNPIGASVYGSIAGDAWYRAQYMLQDQKIGHYMHVPQRAVFFSQVFGITLGVPINYAAMRWVLNTKRDYLTGDLEDPAHIWTGQSLAGYLTMGVQYVLIGPTKLFQQQQWKPIPYAFLFGAVTPALIYLLHRLFPRAKFHLWNTTIFFSGASIFYGNVSTGYFSRFIGGFVVMYWAYRYRYQLWARYNFILAAAFDAGFNLNLLLIFLFFGSGKIVTMPHWWGDDAQSVEKCYALDT

SEQ ID NO: 13125 - DNA, 1454 bp, Muscodor strobelii
  misc_feature: SGI EST ID NO. CUFF.31327.0
  misc_feature: Variant of the nucleotide sequence at SEQ ID NO 13123
ggtcacaagttgtgctctttgcttcattcgttctatcagcatggatactgctcccagcagccaaatggggtggcctaggcggttacagtcactgtttgatgacgaaccgtgcttgcacagtggacggtgataggtatcctatatcatcgcttgtaacttcttcaaatgctttcaatcagactgcttatgaagagaacgggcccatttacttgggtgttcactacttgtggtcgatctttttcgactatgcatcatatatctcagcatacagttggatgaccttcttcggtgcatcacagatccgagacgcttaccgaaagtttagagctcggagcagcagaccgggtcaggggattaatcatcagtatactgatcgactgaatgtgcttatgcgatcgtataaagaagttccactttggtggtatatgacgctcttcttagccgcttttacatcgatcattacgattgttgcattggacctcctattcataccttggtggacatatttcatcgccatagccacgggagctatcgttgtagtgcctttaggttggctttacgcagtcagcaactttcaattgccaataggcacgttcaacgagttattgtacggcacaattgtccagaacttcagtactcataggaacccaatcggcgcgagtgtgagtagagattcgactaactttgatgtgcacacgctgatatctaaacaggtctacggatcgattgctggtgatgcctggtacagagctcaatacatgctccaagatcaaaaaatcgggcattatatgcatgtccctcagcgcgcggtgttcttttcccaggtcttcggcattacacttggagtcccgatcaactatgccgcgatgcgatgggttttgaatacgaagcgtgactatctaacaggagacctagaggacccagctcatatctggactggtcaaagcctcgccggttatctaactatgggagtccaatacgttttgataggaccaacgaagctattccaacagcagcaatggaagccaatcccatatgcctttctgtttggcgcagtgacacctgcgctgatctatttactacatcgcttatttccacgtgcgaaatttcacttatggaatacgacaattttcttcagcggcgcatctatcttctacggtaatgtgtctacgggttatttctctcgtttcatcggaggtttcgttgtcatgtattgggcctacagatatcgctaccaactttgggcaagatataactttatcctggccgcagcttttgatgcgggattcaatctcaatcttttgctaatcttcttattcttcggaagcggcaaaattgttaccatgccacattggtggggggatgacgcccaaagtgtagagaaatgttacgctttagacacttgattgtgtcatctaccaagcttgaaggttggaagcagtcactgacacgag

SEQ ID NO: 13126 - DNA, 1002 bp, Muscodor strobelii
  misc_feature: SGI cDNA ID NO. 564290
  misc_feature: Encodes the peptide sequence at SEQ ID NO 13127
atgagcaccggcgtcgatttcaacggctccgagccaaagttaaggccgaatccaaccgttcaagatggttcatcagattccattgatgttaacaacgtcaaggaagagcaacacggtattacaactgagagcagtagtaatcgggaacgccacagcgatccggagaagtttgggtttgaagatggcgtcgaagcggatgtagacttagaagttgaaaacgatccagagatctcgcagatccctcccgaagtcagacgtgtcgttagtcttcacgacgacacgacattaccgacgctcacctttagatacttcattttggcaattctcttcgtcgttccgggtgctttcctctcccagattaacacgttccgcaccacttacgcgccctactctgttttcttcgttcagatcgcctctaattatgttggcctatggcttgcacgcgttttgccctcacgccgaatcggaattcccttcacgaatttctcattcaatccgaaccctggaccgtggtctgtcaaggaacatgttctcgttacgattacagcagcttcgggtgctactggtaatctcgcgacaacgccgattgccgtcggcgagctttacttcaacgaatatcttcatccggcggctgcaatcttcttcatgtggtctattgatgcgacaggctatgcatttgccgctatagcacggcagcttctactgtatgaccctgcatacccttggtttcaagctttatgtcaagctgcgctgttcgaaacacagagcaagcagaataagaacccaacgccagctgcacgcaagcagttcaaggtcttctggttggtactgttgggtataactatatggcaatttctccccgaattcgtctttccgtttcttagttctcttgcatttttgtgctgggtcgcgccgcataatcctatcgctaatttcctcggctctggtctgggtggcatggggttcctcaatctctcttttgactgggcaaatggtgtgtag

SEQ ID NO: 13127 - protein, 333 aa, Muscodor strobelii
  misc_feature: SGI Peptide ID NO. 564290
  misc_feature (98)..(329): Pfam Id: PF03169 Pfam Desc: OPT oligopeptide transporter protein
  misc_feature (11)..(331): NCBI GI: 238507610 Blast Desc: oligopeptide transporter, [Aspergillus flavus NRRL3357] gi|220688525|gb|EED44877.1| oligopeptide transporter, [Aspergillus flavus NRRL3357]
  misc_feature (11)..(331): NCBI GI: 169785142 Blast Desc: [Aspergillus oryzae RIB40] gi|83775779|dbj|BAE65899.1| protein product [Aspergillus oryzae]
  misc_feature (17)..(331): NCBI GI: 156039822 Blast Desc: SS1G_12047 [Sclerotinia sclerotiorum 1980] gi|154696104|gb|EDN95842.1| SS1G_12047 [Sclerotinia sclerotiorum 1980]
  misc_feature (22)..(331): NCBI GI: 154295938 Blast Desc: BC1G_13122 [Botryotinia fuckeliana B05.10] gi|150843774|gb|EDN18967.1| BC1G_13122 [Botryotinia fuckeliana B05.10]
  misc_feature (28)..(331): NCBI GI: 70984511 Blast Desc: oligopeptide transporter [Aspergillus fumigatus Af293] gi|66845389|gb|EAL85724.1| oligopeptide transporter, [Aspergillus fumigatus Af293] gi|159122545|gb|EDP47666.1| OPT oligopeptide
  misc_feature (65)..(331): NCBI GI: 119467402 Blast Desc: OPT oligopeptide transporter, [Neosartorya fischeri NRRL 181] gi|119405659|gb|EAW15610.1| OPT oligopeptide transporter, [Neosartorya fischeri NRRL 181]
  misc_feature (21)..(331): NCBI GI: 255948610 Blast Desc: Pc22g11250 [Penicillium chrysogenum Wisconsin 54-1255] gi|211592089|emb|CAP98413.1| Pc22g11250 [Penicillium chrysogenum Wisconsin 54-1255]
  misc_feature (49)..(331): NCBI GI: 87045979 Blast Desc: oligopeptide transporter 7 [Candida albicans]
  misc_feature (49)..(331): NCBI GI: 68485447 Blast Desc: potential plant-like oligopeptide transporter [Candida albicans SC5314] gi|68485542|ref|XP_713354.1| potential plant-like oligopeptide transporter [Candida albicans SC5314] 7
  misc_feature (49)..(331): NCBI GI: 238881775 Blast Desc: conserved [Candida albicans WO-1]
MSTGVDFNGSEPKLRPNPTVQDGSSDSIDVNNVKEEQHGITTESSSNRERHSDPEKFGFEDGVEADVDLEVENDPEISQIPPEVRRVVSLHDDTTLPTLTFRYFILAILFVVPGAFLSQINTFRTTYAPYSVFFVQIASNYVGLWLARVLPSRRIGIPFTNFSFNPNPGPWSVKEHVLVTITAASGATGNLATTPIAVGELYFNEYLHPAAAIFFMWSIDATGYAFAAIARQLLLYDPAYPWFQALCQAALFETQSKQNKNPTPAARKQFKVFWLVLLGITIWQFLPEFVFPFLSSLAFLCWVAPHNPIANFLGSGLGGMGFLNLSFDWANGV

SEQ ID NO: 13128 - DNA, 427 bp, Muscodor strobelii
  misc_feature: SGI EST ID NO. CUFF.31329.0
  misc_feature: Variant of the nucleotide sequence at SEQ ID NO 13126
tcattcaatccgaaccctggaccgtggtctgtcaaggaacatgttctcgttacgattacagcagcttcgggtgctactggtaatctcgcgacaacgccgattgccgtcggcgagctttacttcaacgaatatcttcatccggcggctgcaatcttcttcatgtggtctattgatgcgacaggctatgcatttgccgctatagcacggcagcttctactgtatgaccctgcatacccttggtttcaagctttatgtcaagctgcgctgttcgaaacacagagcaagcagaataagaacccaacgccagctgcacgcaagcagttcaaggtcttctggttggtactgttgggtataactatatggcaatttctccccgaattcgtctttccgtttcttagttctcttgcatttttgtgctgggtcgcgc

SEQ ID NO: 13129 - DNA, 1599 bp, Muscodor strobelii
  misc_feature: SGI cDNA ID NO. 564291
  misc_feature: Elevated expression when VOC is produced
  misc_feature: Encodes the peptide sequence at SEQ ID NO 13130
atggcttgcgctgacattacgcccttgcagctatcgattacggacattcaagtgcttcccgacatttcagactcctttatgagaggtataaaagcaagaatcgggatgccgatccaagatattgttgttctaccgtggcctgaactcaataatacttgggtatacgatagaagcccatattgcgatgagaccataatttggaacgacctgatctgcgacattcggcgtggaaaccaatacgacgagggcaattcaaccacattcgctaaagagaacgatgtcaaatcggcaggaggcgcctcgatagaaacgcagtggaatggctccgaattaggaattagcaaactcctcacatcaagcctcggaggggtagaaacattcggttttgagtccggaaggatgttacatgattttcctattggtatacctcgcttaaattgggaccacgggtacacaatgcttcatgccatgggcatgggagtcaactccacgattttgaacgccttatacgagtctaagcaaattggagcgcacgtctggtctcttttctggggccgagagtcaaccattcatgatggggctcttgatggttctctcgtcgtcggtggatatgatcagcaaaagacgattggggcaaattactcacagactttggattatagcgacaacacgggctgctggactggcatgaaagtcattatcgctagcattcagttgaactttcgtaacggaagtgatattgatatgctcccgcccaatacctcattggacgtgtgcctggtaccacagcgccagctgctattagaagcaccgcaatcactcattgataccttcgaagccctcactggcatgacaaatcgtggaaggtctttcggtctccactggtctgcatatctttatgatgcagtaaactcatttgacggagatctgacaatatctctatccaacggactgagtgtacgagttgataatagtcaatatctcgtcccctttgtcgagatccagcgaaacggttcgcgcgccttcaacacgagcacgcacgagctgttgatcaacggaatcgatgatcagcccgcaactcttggtcggtactttttcacggcagcatatctcatggtgaaccacgatgaaaataccttcacattgtggcaagccaacccttcgacagctagcacgcttgtgtccatgacaaatcttggaacccagtcgtgtgacaataacagcacgcagtccaatgacggagcgagccaccgagtatcttatcatctcgccaaaggcgcaatcgctggtatcgttcttggctcattcgttttggtcctgatttttactgtcatcatgtttctgtatctgagatctcgaaaacgtaaggcagtatctcgatccgagaaggccgcagtcgcaggcgaagaacagcgagacaaggcaattgatgaacagttttcagatcaagggctatttgaaaggagtcaagaactatacgggtcttcccctacaaatgaagcatcggaccgtcaggaaccgctagcattgtatgaacttccgggaggacaaggtcgatgggaaatggaagcgtcatgcaacacatcagtgagccattaa

SEQ ID NO: 13130 - protein, 532 aa, Muscodor strobelii
  misc_feature: SGI Peptide ID NO. 564291
  misc_feature (34)..(508): NCBI GI: 156048746 Blast Desc: SS1G_09105 [Sclerotinia sclerotiorum 1980] gi|154693501|gb|EDN93239.1| SS1G_09105 [Sclerotinia sclerotiorum 1980]
  misc_feature (3)..(396): NCBI GI: 116205585 Blast Desc: CHGG_10676 [Chaetomium globosum CBS 148.51] gi|88176804|gb|EAQ84272.1| CHGG_10676 [Chaetomium globosum CBS 148.51]
  misc_feature (7)..(464): NCBI GI: 85095463 Blast Desc: NCU05835 [Neurospora crassa OR74A] gi|28921554|gb|EAA30859.1| [Neurospora crassa OR74A]
  misc_feature (3)..(396): NCBI GI: 46122821 Blast Desc: FG05788.1 [Gibberella zeae PH-1]
  misc_feature (96)..(514): NCBI GI: 154294705 Blast Desc: BC1G_13479 [Botryotinia fuckeliana B05.10] gi|150844614|gb|EDN19807.1| BC1G_13479 [Botryotinia fuckeliana B05.10]
  misc_feature (67)..(408): NCBI GI: 116205541 Blast Desc: CHGG_10654 [Chaetomium globosum CBS 148.51] gi|88176782|gb|EAQ84250.1| CHGG_10654 [Chaetomium globosum CBS 148.51]
  misc_feature (66)..(473): NCBI GI: 46109590 Blast Desc: FG01677.1 [Gibberella zeae PH-1]
  misc_feature (22)..(513): NCBI GI: 242806195 Blast Desc: aspartic-type endopeptidase, [Talaromyces stipitatus ATCC 10500] gi|218715320|gb|EED14742.1| aspartic-type endopeptidase, [Talaromyces stipitatus ATCC 10500]
  misc_feature (2)..(523): NCBI GI: 119500628 Blast Desc: NFIA_106620 [Neosartorya fischeri NRRL 181] gi|119415236|gb|EAW25174.1| conserved [Neosartorya fischeri NRRL 181]
  misc_feature (138)..(497): NCBI GI: 70994076 Blast Desc: aspartic-type endopeptidase [Aspergillus fumigatus Af293] gi|66849519|gb|EAL89847.1| aspartic-type endopeptidase, [Aspergillus fumigatus Af293]
  misc_feature: Useful for introducing or modulating the production of volatile compounds
MACADITPLQLSITDIQVLPDISDSFMRGIKARIGMPIQDIVVLPWPELNNTWVYDRSPYCDETIIWNDLICDIRRGNQYDEGNSTTFAKENDVKSAGGASIETQWNGSELGISKLLTSSLGGVETFGFESGRMLHDFPIGIPRLNWDHGYTMLHAMGMGVNSTILNALYESKQIGAHVWSLFWGRESTIHDGALDGSLVVGGYDQQKTIGANYSQTLDYSDNTGCWTGMKVIIASIQLNFRNGSDIDMLPPNTSLDVCLVPQRQLLLEAPQSLIDTFEALTGMTNRGRSFGLHWSAYLYDAVNSFDGDLTISLSNGLSVRVDNSQYLVPFVEIQRNGSRAFNTSTHELLINGIDDQPATLGRYFFTAAYLMVNHDENTFTLWQANPSTASTLVSMTNLGTQSCDNNSTQSNDGASHRVSYHLAKGAIAGIVLGSFVLVLIFTVIMFLYLRSRKRKAVSRSEKAAVAGEEQRDKAIDEQFSDQGLFERSQELYGSSPTNEASDRQEPLALYELPGGQGRWEMEASCNTSVSH

SEQ ID NO: 13131 - DNA, 2265 bp, Muscodor strobelii
  misc_feature: SGI EST ID NO. CUFF.31343.0
  misc_feature: Variant of the nucleotide sequence at SEQ ID NO 13129
cgagggcatcgtcaatgaatccgatggaacggagtgatgtttcgtctttcaggtcatggcgcgctgcaagaagcccagcttattagagaagctctgtgtcacgcaaacgattatggacaagcaacaagccgtaactcagtatgcggcaacaggcgaaaccctcgaggagctcatattcggccccgagggctttcgtctttcggagtgtacccaagtcattctgtcgacgtgaatttacatattcattctaactagtgttgattatcaaacttgctctgtgatcgtcatggcttgcgctgacattacgcccttgcagctatcgattacggacattcaagtgcttcccgacatttcagactcctttatgagaggtataaaagcaagaatcgggatgccgatccaagatattgttgttctaccgtggcctgaactcaataatacttgggtatacgatagaagcccatattgcgatgagaccataatttggaacgacctgatctgcgacattcggcgtggaaaccaatacgacgagggcaattcaaccacattcgctaaagagaacgatgtcaaatcggcaggaggcgcctcgatagaaacgcagtggaatggctccgaattaggaattagcaaactcctcacatcaagcctcggaggggtagaaacattcggttttgagtccggaaggatgttacatgattttcctattggtatacctcgcttaaattgggaccacgggtacacaatgcttcatgccatgggcatgggagtcaactccacgattttgaacgccttatacgagtctaagcaaattggagcgcacgtctggtctcttttctggggccgagagtcaaccattcatgatggggctcttgatggttctctcgtcgtcggtggatatgatcagcaaaagacgattggggcaaattactcacagactttggattatagcgacaacacgggctgctggactggcatgaaagtcattatcgctagcattcagttgaactttcgtaacggaagtgatattgatatgctcccgcccaatacctcattggacgtgtgcctggtaccacagcgccagctgctattagaagcaccgcaatcactcattgataccttcgaagccctcactggcatgacaaatcgtggaaggtctttcggtctccactggtctgcatatctttatgatgcagtaaactcatttgacggagatctgacaatatctctatccaacggactgagtgtacgagttgataatagtcaatatctcgtcccctttgtcgagatccagcgaaacggttcgcgcgccttcaacacgagcacgcacgagctgttgatcaacggaatcgatgatcagcccgcaactcttggtcggtactttttcacggcagcatatctcatggtgaaccacgatgaaaataccttcacattgtggcaagccaacccttcgacagctagcacgcttgtgtccatgacaaatcttggaacccagtcgtgtgacaataacagcacgcagtccaatgacggagcgagccaccgagtatcttatcatctcgccaaaggcgcaatcgctggtatcgttcttggctcattcgttttggtcctgatttttactgtcatcatgtttctgtatctgagatctcgaaaacgtaaggcagtatctcgatccgagaaggccgcagtcgcaggcgaagaacagcgagacaaggcaattgatgaacagttttcagatcaagggctatttgaaaggagtcaagaactatacgggtcttcccctacaaatgaagcatcggaccgtcaggaaccgctagcattgtatgaacttccgggaggacaaggtcgatgggaaatggaagcgtcatgcaacacatcagtgagccattaacccctccatttgacgattcgtaattgtttcccttcgattgttcggcatccatcgtcggtcaaagttacgctgttgtatgagttacgcctgatgaacgaatcataatggactatgcaatctatgtgacctaagacgacacatccattggaacggctcagttgatgaacttacacgatacatattggggattgagacctggctataattattgctttagacataattgcggcgctataatcagactctttgtgatctcagtcccagactcttgcattgatctgtaaaatctcaaagcctgagtaccatgcgccggtcatgctactgaatcctatgaagccaaaatgcagcgccaacatacgagccataccgaagctcattta

SEQ ID NO: 13132 - DNA, 1725 bp, Muscodor strobelii
  misc_feature: SGI cDNA ID NO. 564292
  misc_feature: Elevated expression when VOC is produced
  misc_feature: Encodes the peptide sequence at SEQ ID NO 13133
atgtcacccgtgccgcgccgccatacccgtcgagtcgtcacaatcgtttccttgataatattaatctacctcctcgttggattcttgtgtgaaggaaatgatgatagtatcgttgacgccgacaccttcattccaagtagcctggactggtcgactttgccacagaaacatgcccttaaattctccgacttagcaacactacccgcaggcgagcctcgaaagcttcccaaggtccagtttccgttccgtgtcgacacaagcccaaaaggccgggcccgcaaggcaatcattaatgagcgtcgcgaggaggtgaagcgcgcatttgtcaagagctggaaaagctataaggaacgagcatggttgtccgatgagttagctccagtatctggaactggcaaaaacacctttggaggctgggctgcgactcttgttgattctctcgatgcgctttggattttggacctgaaggatgaattctttgaagcagtccgcgccgttgcgattctcgactggtcggcaacagaagaaacggcttgcaattttttcgagacaactattcgccatcttggcggtctcctgagcgcttacgacttaagcggggagactgtattgctcctcaaagcagttgagctcggcgacatgttgtatatggcatttgacacgccgaatcgtatgccgcctttctggttggactttgaaaaggcgcaaaagggccagcttcagccaggcgaccatgacccatccgcatccgtcgcatcctcgtcgttggagttcacaagacttgcacagctgacgggtaatcccaaatactacgatgcgattgaccgaataacaaggcttttggaaaaaacgcaaaactctacaaggctaccaggcatgtggccaacgttctttgatttgcgtaatttaattcttgacgatggggagatgttcacacttggcgcattggcggattcattatacgagctgttaccgaagatgcatgcgctgttgggcggcctcgagcccgtatatgagacattatacatcaatgctatggaagcagtcaaaacccatatgctcttcagaccaatgttaccaggacaagacgatatcttattcacaggcaatgtctatgtcagagatactagtagaattgacctgcagccggaaggacagcatctatcatgctttgttggtggaatgttcgcacttggtggtcagcttctaaatcgcccagatcatgtggagatcggcgcaagaatcacaaaaggctgtgtgtggatgtatgaagcaatgccatctggtataatgccagagatctttggcctttttaactgccctacacttgccgcttgcgactgggaccatgagttatggaagaaagaaggcgatttgaccttgaaagaaggcatccgaaatgctcgtgacccacggtacttgttacgtccagaagcaattgaaagtgtcttcttgatgtacaggatcactggactagaagagtatcaggaaatggcatggaggatgtttcgatctatccgaaaggctacggaaaccgatcttgcattttctgccatctcgaatgtcaccgtgaaaggtggtgagacagaaaaagtcgattccatggagagcttctggcttgctgagaccctgaaatatttctatttgatattctcagagccggacaaaatcagtttggatcaatacgtcctaaataccgaagcccacccccttcgtcggccttga

SEQ ID NO: 13133 - protein, 574 aa, Muscodor strobelii
  misc_feature: SGI Peptide ID NO. 564292
  misc_feature (107)..(573): Pfam Id: PF01532 Pfam Desc: Glycosyl hydrolase family 47
  misc_feature (6)..(574): NCBI GI: 171691058 Blast Desc: protein product [Podospora anserina] gi|170945477|emb|CAP71589.1| protein product [Podospora anserina]
  misc_feature (43)..(574): NCBI GI: 256734566 Blast Desc: NECHADRAFT_90164 [Nectria haematococca mpVI 77-13-4]
  misc_feature (44)..(574): NCBI GI: 261361297 Blast Desc: endoplasmic reticulum mannosyl-oligosaccharide 1,2-alpha-mannosidase [Verticillium albo-atrum VaMs.102]
  misc_feature (42)..(574): NCBI GI: 85095467 Blast Desc: NCU05836 [Neurospora crassa OR74A] gi|28921555|gb|EAA30860.1| conserved [Neurospora crassa OR74A]
  misc_feature (1)..(574): NCBI GI: 46122819 Blast Desc: FG05787.1 [Gibberella zeae PH-1]
  misc_feature (46)..(574): NCBI GI: 261352124 Blast Desc: endoplasmic reticulum mannosyl-oligosaccharide 1,2-alpha-mannosidase [Verticillium albo-atrum VaMs.102]
  misc_feature (1)..(574): NCBI GI: 171687745 Blast Desc: protein product [Podospora anserina] gi|170943834|emb|CAP69486.1| protein product [Podospora anserina]
  misc_feature (36)..(574): NCBI GI: 256730697 Blast Desc: NECHADRAFT_105779 [Nectria haematococca mpVI 77-13-4]
  misc_feature (43)..(537): NCBI GI: 156048744 Blast Desc: SS1G_09104 [Sclerotinia sclerotiorum 1980] gi|154693500|gb|EDN93238.1| SS1G_09104 [Sclerotinia sclerotiorum 1980]
  misc_feature (5)..(574): NCBI GI: 39951343 Blast Desc: MGG_01314 [Magnaporthe grisea 70-15] gi|145020870|gb|EDK04999.1| MGG_01314 [Magnaporthe grisea 70-15]
  misc_feature (97)..(571): SWISSPROT Homolog: EC 3.2.1.113 Mannosyl-oligosaccharide 1,2-alpha-mannosidase
  misc_feature: Useful for introducing or modulating the production of volatile compounds
MSPVPRRHTRRVVTIVSLIILIYLLVGFLCEGNDDSIVDADTFIPSSLDWSTLPQKHALKFSDLATLPAGEPRKLPKVQFPFRVDTSPKGRARKAIINERREEVKRAFVKSWKSYKERAWLSDELAPVSGTGKNTFGGWAATLVDSLDALWILDLKDEFFEAVRAVAILDWSATEETACNFFETTIRHLGGLLSAYDLSGETVLLLKAVELGDMLYMAFDTPNRMPPFWLDFEKAQKGQLQPGDHDPSASVASSSLEFTRLAQLTGNPKYYDAIDRITRLLEKTQNSTRLPGMWPTFFDLRNLILDDGEMFTLGALADSLYELLPKMHALLGGLEPVYETLYINAMEAVKTHMLFRPMLPGQDDILFTGNVYVRDTSRIDLQPEGQHLSCFVGGMFALGGQLLNRPDHVEIGARITKGCVWMYEAMPSGIMPEIFGLFNCPTLAACDWDHELWKKEGDLTLKEGIRNARDPRYLLRPEAIESVFLMYRITGLEEYQEMAWRMFRSIRKATETDLAFSAISNVTVKGGETEKVDSMESFWLAETLKYFYLIFSEPDKISLDQYVLNTEAHPLRRP

SEQ ID NO: 13134 - DNA, 3057 bp, Muscodor strobelii
  misc_feature: SGI EST ID NO. CUFF.31345.0
  misc_feature: Variant of the nucleotide sequence at SEQ ID NO 13132
cgggtgtttgcgtcaaacttcacgtaaaggatgttgaacatttcaattgctttcagagtatcatgcttgaaattctcaatcctttcttcaacgtgatgagtggttccagaaagagcaatctcccagattccgagctgctgcaatgtcacccgtgccgcgccgccatacccgtcgagtcgtcacaatcgtttccttgataatattaatctacctcctcgttggattcttgtgtgaaggaaatgatgatagtatcgttgacgccgacaccttcattccaagtagcctggactggtcgactttgccacagaaacatgcccttaaattctccgacttagcaacactacccgcaggcgagcctcgaaagcttcccaaggtccagtttccgttccgtgtcgacacaagcccaaaaggccgggcccgcaaggcaatcattaatgagcgtcgcgaggaggtgaagcgcgcatttgtcaagagctggaaaagctataaggaacgagcatggttgtccgatgagttagctccagtatctggaactggcaaaaacacctttggaggctgggctgcgactcttgttgattctctcgatgcgctttggattttggacctgaaggatgaattctttgaagcagtccgcgccgttgcgattctcgactggtcggcaacagaagaaacggcttgcaattttttcgagacaactattcgccatcttggcggtctcctgagcgcttacgacttaagcggggagactgtattgctcctcaaagcagttgagctcggcgacatgttgtatatggcatttgacacgccgaatcgtatgccgcctttctggttggactttgaaaaggcgcaaaagggccagcttcagccaggcgaccatgacccatccgcatccgtcgcatcctcgtcgttggagttcacaagacttgcacagctgacgggtaatcccaaatactacgatgcgattgaccgaataacaaggcttttggaaaaaacgcaaaactctacaaggctaccaggcatgtggccaacgttctttgatttgcgtaatttaattcttgacgatggggagatgttcacacttggcgcattggcggattcattatacgagctgttaccgaagatgcatgcgctgttgggcggcctcgagcccgtatatgagacattatacatcaatgctatggaagcagtcaaaacccatatgctcttcagaccaatgttaccaggacaagacgatatcttattcacaggcaatgtctatgtcagagatactagtagaattgacctgcagccggaaggacagcatctatcatgctttgttggtggaatgttcgcacttggtggtcagcttctaaatcgcccagatcatgtggagatcggcgcaagaatcacaaaaggctgtgtgtggatgtatgaagcaatgccatctggtataatgccagagatctttggcctttttaactgccctacacttgccgcttgcgactgggaccatgagttatggaagaaagaaggcgatttgaccttgaaagaaggcatccgaaatgctcgtgacccacggtacttgttacgtccagaagcaattgaaagtgtcttcttgatgtacaggatcactggactagaagagtatcaggaaatggcatggaggatgtttcgatctatccgaaaggctacggaaaccgatcttgcattttctgccatctcgaatgtcaccgtgaaaggtggtgagacagaaaaagtcgattccatggagagcttctggcttgctgagaccctgaaatatttctatttgatattctcagagccggacaaaatcagtttggatcaatacgtcctaaataccgaagcccacccccttcgtcggccttgaacgaacacgatcgactgcagaagtccgttcacatggaattctagaacgtaaatcatccatccaacttcgctctgtcttcatcgctatgtggccagttttacctcggtagaattggcctatagagactctgcgacttcgacatttttcgaccctaaaatgcgatcacgtatgtcgttgccgtcttggacactgctcaaaggcgcgcgtggacaaaatagtgacagattctatcctgtcttgtcttctggggggtcgttaaaagcccgtgactttttcctcgccagcataaagtgatagctgagcgatctgggcagagaagtaatgagaggacattgcgccaaggtgattagattaaaatgggtaccgttgcgaggacaatgcggtaactggaagatatacttccatactattactcgtattctggtcctgcttgacaagactttttcacaaatcggaacagatacaacggtaacaagtccataagcccaagggatgttgatcctatcaggatcaacagggtaacggcagttgacgcgactgtctaggtcctaacaagcgatgcacctgacgatctaaagactcgtcccgttgcacgcccctatttaaaaagtctatgaattgatctaagagcgtcatacatctacgccatttccacgcctggaatgcatattgatgagtaacatgtgggatggaacttgattatagtcagactatacactgtagtagataagacttctgtcgtgaaaaagtatattgaagctggcagaatatgggggactgtgaaccagctgccaatcgaggaaatataacggttcgactacatcggcctcacgacatcgttcgacttccccaaaaggatgactgctcctgtgctacttgagtgtataggcttgggaacctgttatagtagcataagagaagcaatgatgattactgaggacgtacagtgctcgtataggtgtgcctgcccttgattctgttgttgtttacaactgcgaatgcccctcatgttaacaagacttaactttcctctaggctgggttatgtcgccgtcgaccttgaacttgcgacataccttacaccagggattgaaattctgcgaaattaacttcaaccgcacaccctgctagggaatccgtcacatcagtatcgcaatatcgaccatgagaaaatacgcaagcacctttggg

SEQ ID NO: 13135 - DNA, 1443 bp, Muscodor strobelii
  misc_feature: SGI cDNA ID NO. 564293
  misc_feature: Encodes the peptide sequence at SEQ ID NO 13136
atgacttcccacagacaggaagattgcgcggaaggtccaaacggcccaccctttacgtacatttcgcagacgattccgagaatccacagggactctgttatcctgggatttgcacatccggatatcgcccaggcatctccggaagatgatgggtggttcctctccgatttctatgcattcaactatctcttcaaaggcattgggagcgcgcaaacgtggcttacggctgcagatcctgcggttgttctgcaaagatacggaccaatatgggggcatgggctatcacacggagacccttaccaagaccgcaaagttgttttcagtgacgagctgataagagctgcagagctcacgaagccaattgttgtcgaacagagccaaatgatcgagagattcctcacggaggccaaagctgcctcagagaaagcctatgagaatcgcgtgcctttggtcattctagctttctgccacagtataaacggctcagtactactccttgacaagcacaagaaaaaatatctcacggcagcaagactgaggagtcttctgtgtgacgaaactgaaacgatcctaattacttcagcgtgtcactctggccaatgggcaataaaccctggttttaataagacagtaatagcaggagctagcgcaagacgcgactcgactgcttggccaatttctcttagtcctggcaacgcttgtggatctgttttcgctagctctttgatcaatactttgaccagtactacaagtccccttcttaacacatcagaaccgactttgctgccagaaccgtggcatccaactgatgaaaatgaaggagagccccgcggaataatggacctatcccgaagtcttcagcccgaatcgccaaatgaacaacaaactgcggcttactttggattcacaaagaccgtattcgactcttacaggaatattacccgcctttggggcaattacgaaagcgatcgtcatgcccaggaacttgcccatgtgttttatgcacaaagctgtcctggagattgggtcaagggtcagaatgtggcttatggcggtatgcttcgtgagtgtgcagagggtgaaaggccgaataggctaccgaatcccgatctagaggaagactggttcgaattgatagacattctgttgtcgattcagtttcgttgggagatgtgcaatttggttgactacatcgtccggagattcggactgacgatgcctgaccaagaagaatgcctcttctgggatttagatgcgtggaagctcaagacaaggcagaatctatcggatttcgacgaacgttgggacatggtgcttgaggagctgacttatgaagagtttgccttttatcccaggcctgaacaaggaccaagatttgcacggccttggagcggcacttatacaatcggatttctcgtggtccaagacaaaaatagtaattag

SEQ ID NO: 13136 - protein, 480 aa, Muscodor strobelii
  misc_feature: SGI Peptide ID NO. 564293
  misc_feature (7)..(327): NCBI GI: 261355037 Blast Desc: conserved [Verticillium albo-atrum VaMs.102]
  misc_feature (10)..(263): NCBI GI: 238841922 Blast Desc: conserved [Microsporum canis CBS 113480]
  misc_feature (10)..(183): NCBI GI: 255934044 Blast Desc: [Penicillium chrysogenum Wisconsin 54-1255] gi|211582922|emb|CAP81127.1| [Penicillium chrysogenum Wisconsin 54-1255]
  misc_feature (45)..(251): NCBI GI: 238842804 Blast Desc: conserved [Microsporum canis CBS 113480]
  misc_feature (41)..(245): NCBI GI: 169775059 Blast Desc: [Aspergillus oryzae RIB40] gi|83769860|dbj|BAE59995.1| protein product [Aspergillus oryzae]
  misc_feature (47)..(246): NCBI GI: 255935119 Blast Desc: [Penicillium chrysogenum Wisconsin 54-1255] gi|211583206|emb|CAP91210.1| [Penicillium chrysogenum Wisconsin 54-1255]
  misc_feature (17)..(247): NCBI GI: 225556904 Blast Desc: conserved [Ajellomyces capsulatus G186AR]
  misc_feature (43)..(423): NCBI GI: 238842483 Blast Desc: conserved [Microsporum canis CBS 113480]
  misc_feature (45)..(245): NCBI GI: 242808045 Blast Desc: conserved [Talaromyces stipitatus ATCC 10500] gi|218715707|gb|EED15129.1| conserved [Talaromyces stipitatus ATCC 10500]
  misc_feature (221)..(416): NCBI GI: 256725834 Blast Desc: [Nectria haematococca mpVI 77-13-4]
MTSHRQEDCAEGPNGPPFTYISQTIPRIHRDSVILGFAHPDIAQASPEDDGWFLSDFYAFNYLFKGIGSAQTWLTAADPAVVLQRYGPIWGHGLSHGDPYQDRKVVFSDELIRAAELTKPIVVEQSQMIERFLTEAKAASEKAYENRVPLVILAFCHSINGSVLLLDKHKKKYLTAARLRSLLCDETETILITSACHSGQWAINPGFNKTVIAGASARRDSTAWPISLSPGNACGSVFASSLINTLTSTTSPLLNTSEPTLLPEPWHPTDENEGEPRGIMDLSRSLQPESPNEQQTAAYFGFTKTVFDSYRNITRLWGNYESDRHAQELAHVFYAQSCPGDWVKGQNVAYGGMLRECAEGERPNRLPNPDLEEDWFELIDILLSIQFRWEMCNLVDYIVRRFGLTMPDQEECLFWDLDAWKLKTRQNLSDFDERWDMVLEELTYEEFAFYPRPEQGPRFARPWSGTYTIGFLVVQDKNSN

SEQ ID NO: 13137 - DNA, 262 bp, Muscodor strobelii
  misc_feature: SGI EST ID NO. CUFF.31357.0
  misc_feature: Variant of the nucleotide sequence at SEQ ID NO 13135
cggatatcgcccaggcatctccggaagatgatgggtggttcctctccgatttctatgcattcaactatctcttcaaaggcattgggagcgcgcaaacgtggcttacggctgcagatcctgcggttgttctgcaaagatacggaccaatatgggggcatgggctatcacacggagacccttaccaagaccgcaaagttgttttcagtgacgagctgataagagctgcagagctcacgaagccaattgttgtcgaacagagcca

SEQ ID NO: 13138 - DNA, 1032 bp, Muscodor strobelii
  misc_feature: SGI cDNA ID NO. 564294
  misc_feature: Encodes the peptide sequence at SEQ ID NO 13139
atggcacggaagatctcgtacgagatgactggaagacatcgcctagaagggtttcgtttctttagccttccccccgagatccgccttcgcatcttggagcatacgagtctagtggcgcctaggagaaagattgtatggagggctgctgacttcgaggaacaattcgaaggtggacgatttcgaaccgacttcatacatgggaatttcaagcccgacgccgtttgccgtgaacctactcatacaggttgtttctgtgctcgcgtccatgccgcttactcgacgacttgtctttgttggcgaaacccgcagtccctgttccttgtcagcaaggcgttctgcaaagaagcacaagatgtattctacaagagcaactacttccagatatttgaatcttccgcagatctgcgccgcactagcaagcgacctactcatgagctgatatcgccgcgtttcccggccagtcgcttctttacgcacggagttccggtctatgccttcaagagactaagatgtttgcaattctcaatgttcaactcggtcccggggcggacgatacaaccaggacaagctcgtgatgaatggttccagacaatagcattcatcgagagatcgggaggtaccgatctagactttgtggccgcgacctgctgtttggaatcgcttccaccttatgagagttggcgtaccggcgagctcgatgggcttggcactgtccgcgacatcgtctccgccaaattttggccgctaaacgagacaagcggaccacggctgtgtactagacagcttcatgtccgccttagcgacgatagagtagaagtcgaatacaatctgcgcaggagagacgagccactgcgtcgaccgtggacaggtcgaaggctcttctatagcatgggtcccgagctaacgttgtcccgagttgccactttttcatgcttagtctcagacgaagcgattacagtgagcggtacgccgatccttgaatgggtcgagacgatctgggtcaaagatacatccaaccggccggagtattag

SEQ ID NO: 13139 - protein, 343 aa, Muscodor strobelii
  misc_feature: SGI Peptide ID NO. 564294
  misc_feature (19)..(223): NCBI GI: 171685318 Blast Desc: protein product [Podospora anserina] gi|170942620|emb|CAP68272.1| protein product [Podospora anserina]
  misc_feature (20)..(202): NCBI GI: 116200446 Blast Desc: [Chaetomium globosum CBS 148.51] gi|88175482|gb|EAQ82950.1| [Chaetomium globosum CBS 148.51]
  misc_feature (20)..(173): NCBI GI: 171693629 Blast Desc: protein product [Podospora anserina] gi|170946763|emb|CAP73567.1| protein product [Podospora anserina]
  misc_feature (22)..(202): NCBI GI: 116194402 Blast Desc: [Chaetomium globosum CBS 148.51] gi|88179712|gb|EAQ87180.1| [Chaetomium globosum CBS 148.51]
  misc_feature (22)..(201): NCBI GI: 116178980 Blast Desc: [Chaetomium globosum CBS 148.51] gi|88184415|gb|EAQ91883.1| [Chaetomium globosum CBS 148.51]
  misc_feature (20)..(202): NCBI GI: 116191821 Blast Desc: [Chaetomium globosum CBS 148.51] gi|88181541|gb|EAQ89009.1| [Chaetomium globosum CBS 148.51]
  misc_feature (1)..(205): NCBI GI: 121712250 Blast Desc: ACLA_062790 [Aspergillus clavatus NRRL 1] gi|119401892|gb|EAW12314.1| ACLA_062790 [Aspergillus clavatus NRRL 1]
  misc_feature (34)..(202): NCBI GI: 171683000 Blast Desc: protein product [Podospora anserina] gi|170941459|emb|CAP67111.1| protein product [Podospora anserina]
  misc_feature (21)..(130): NCBI GI: 171685318 Blast Desc: protein product [Podospora anserina] gi|170942620|emb|CAP68272.1| protein product [Podospora anserina]
  misc_feature (29)..(174): NCBI GI: 116193115 Blast Desc: [Chaetomium globosum CBS 148.51] gi|88182188|gb|EAQ89656.1| [Chaetomium globosum CBS 148.51]
MARKISYEMTGRHRLEGFRFFSLPPEIRLRILEHTSLVAPRRKIVWRAADFEEQFEGGRFRTDFIHGNFKPDAVCREPTHTGCFCARVHAAYSTTCLCWRNPQSLFLVSKAFCKEAQDVFYKSNYFQIFESSADLRRTSKRPTHELISPRFPASRFFTHGVPVYAFKRLRCLQFSMFNSVPGRTIQPGQARDEWFQTIAFIERSGGTDLDFVAATCCLESLPPYESWRTGELDGLGTVRDIVSAKFWPLNETSGPRLCTRQLHVRLSDDRVEVEYNLRRRDEPLRRPWTGRRLFYSMGPELTLSRVATFSCLVSDEAITVSGTPILEWVETIWVKDTSNRPEY

SEQ ID NO: 13140 - DNA, 1836 bp, Muscodor strobelii
  misc_feature: SGI EST ID NO. CUFF.31360.0
  misc_feature: Variant of the nucleotide sequence at SEQ ID NO 13138
cagaaatcccgatcttctaattttgagtcaacatacacttcctcgatatccttcatatcccgtcatcatgtcttgctcacccgcaaccgacgggtccatcagcatcgcacctttgattctacgggtaccgcacgaaattcgcatgcgcatttgggaccttgttggattgcccatcaacgcactcatttatctagatgtaagtctctataccgttgcgcgacgcaaagcacaacgaaaaaggctgtttggtgagacaccggcttcgatatacaaccttcttttgacttgtcagggaatatatcgcgagctgtcccacgcgttgtactcttgcaacaggatcgttactcatcacctgcaacctcttcactacttgcaaacttcctctttgtccagccttcggtccttaaaaatattcctgcatgctggcagtgggagagaaagtcactcctgcggctctagatacccacacgaactcagcgctttgaactcattgtcggcagaggggcaagctattcttgttaggtggaaggctgcatcaacgctactcagtcgccacattaggccgaacgagcttgacttcagtcttatatgtgatagtgccaacgaacgtaccgcggacgacgtactggaatgcctcggtgatttccccgctctagccagcttccaggtccgattaggctctagaccagacccggcgctcgagcaaatggcacggaagatctcgtacgagatgactggaagacatcgcctagaagggtttcgtttctttagccttccccccgagatccgccttcgcatcttggagcatacgagtctagtggcgcctaggagaaagattgtatggagggctgctgacttcgaggaacaattcgaaggtggacgatttcgaaccgacttcatacatgggaatttcaagcccgacgccgtttgccgtgaacctactcatacaggttgtttctgtgctcgcgtccatgccgcttactcgacgacttgtctttgttggcgaaacccgcagtccctgttccttgtcagcaaggcgttctgcaaagaagcacaagatgtattctacaagagcaactacttccagatatttgaatcttccgcagatctgcgccgcactagcaagcgacctactcatgagctgatatcgccgcgtttcccggccagtcgcttctttacgcacggagttccggtctatgccttcaagagactaagatgtttgcaattctcaatgttcaactcggtcccggggcggacgatacaaccaggacaagctcgtgatgaatggttccagacaatagcattcatcgagagatcgggaggtaccgatctagactttgtggccgcgacctgctgtttggaatcgcttccaccttatgagagttggcgtaccggcgagctcgatgggcttggcactgtccgcgacatcgtctccgccaaattttggccgctaaacgagacaagcggaccacggctgtgtactagacagcttcatgtccgccttagcgacgatagagtagaagtcgaatacaatctgcgcaggagagacgagccactgcgtcgaccgtggacaggtcgaaggctcttctatagcatgggtcccgagctaacgttgtcccgagttgccactttttcatgcttagtctcagacgaagcgattacagtgagcggtacgccgatccttgaatgggtcgagacgatctgggtcaaagatacatccaaccggccggagtattagtacttgctatagatagattgagggctttaccactgcgccaagcatatagaatgagcatacagacaaaaggcttgagctgttatgaaagctcctgttaa

SEQ ID NO: 13141 - DNA, 978 bp, Muscodor strobelii
  misc_feature: SGI cDNA ID NO. 564295
  misc_feature: Encodes the peptide sequence at SEQ ID NO 13142
atggagacagagacgctagacgcgatgcaagcccgccatcgcaaagaggcacgggatctacagtcgcagatcacgaacaaaaagaagaacgccacgaagaaaacacggaagggcatcaacgatgagtgtgatttcttagagcgtgagcttaaagaaaggcaggagcgagagatcgacggtctgaatggggacggcgaagtagcagatgaagtcgcagagccggaacagagtgaaaatacgacggttgagatgaatggagatacaaacggcattacgaaacagctcaaggaaaccacgatatcaccaccggtgcaatctgcgtcacaatcgcaaagtgagggaggagggaagaagcgaaaccgccagaaagagcgcatggcgaggaggaaggctgaacaagaagctgctgctgacaaggcggctgaagaagcgatgggtatgacggatcatcggacgcttgaacggtcggggttggagaagatcttcaacgagaatgggctcacggaacatgagattatgcctgatgggcattgtttgtttaatgctgttgctgatcaactttcacaacacaatatctctctctttccgccggggtctggatttgatggtgtggacggagatggggacgggcagaagataccgagctatagagtcgtgaggagagtcgctacgaagtacatgcaagatcaccctgatgatttcgcgccgttcctggatgaggagctcgaagggtatgtgaggaagattagggatacggccgagtggggtggacaacttgagttgatggctattgctagggtgtatggggttaggattaaggttgtgcagagtgggaggacggagagcattgagcctagtgcgggaggagagggtgagggggacaaggaggaaaaggaaacgaagacgatttggttggcgtattatagacatgggtttgggcttggtgaacattataattctttgagggttcaggggtga

SEQ ID NO: 13142 - protein, 325 aa, Muscodor strobelii
  misc_feature: SGI Peptide ID NO. 564295
  misc_feature (173)..(318): Pfam Id: PF02338 Pfam Desc: OTU-like cysteine protease
  misc_feature (1)..(322): NCBI GI: 85098535 Blast Desc: NCU01397 [Neurospora crassa OR74A] gi|28922135|gb|EAA31390.1| [Neurospora crassa OR74A]
  misc_feature (3)..(322): NCBI GI: 256731791 Blast Desc: NECHADRAFT_40750 [Nectria haematococca mpVI 77-13-4]
  misc_feature (3)..(322): NCBI GI: 46137189 Blast Desc: FG10110.1 [Gibberella zeae PH-1]
  misc_feature (4)..(322): NCBI GI: 156059664 Blast Desc: SS1G_03844 [Sclerotinia sclerotiorum 1980] gi|154701631|gb|EDO01370.1| SS1G_03844 [Sclerotinia sclerotiorum 1980]
  misc_feature (4)..(322): NCBI GI: 154291338 Blast Desc: BC1G_15316 [Botryotinia fuckeliana B05.10] gi|150847008|gb|EDN22201.1| BC1G_15316 [Botryotinia fuckeliana B05.10]
  misc_feature (4)..(322): NCBI GI: 145611018 Blast Desc: MGG_11505 [Magnaporthe grisea 70-15] gi|145018368|gb|EDK02647.1| MGG_11505 [Magnaporthe grisea 70-15]
  misc_feature (6)..(321): NCBI GI: 240281765 Blast Desc: OTU domain-containing protein 6B [Ajellomyces capsulatus H143]
  misc_feature (3)..(321): NCBI GI: 225558842 Blast Desc: OTU domain-containing protein 6B [Ajellomyces capsulatus G186AR]
  misc_feature (6)..(321): NCBI GI: 145230087 Blast Desc: An01g09320 [Aspergillus niger] gi|134055467|emb|CAK43982.1| protein product [Aspergillus niger]
  misc_feature (6)..(321): NCBI GI: 154275450 Blast Desc: [Ajellomyces capsulatus NAm1] gi|150415016|gb|EDN10378.1| [Ajellomyces capsulatus NAm1]
METETLDAMQARHRKEARDLQSQITNKKKNATKKTRKGINDECDFLERELKERQEREIDGLNGDGEVADEVAEPEQSENTTVEMNGDTNGITKQLKETTISPPVQSASQSQSEGGGKKRNRQKERMARRKAEQEAAADKAAEEAMGMTDHRTLERSGLEKIFNENGLTEHEIMPDGHCLFNAVADQLSQHNISLFPPGSGFDGVDGDGDGQKIPSYRVVRRVATKYMQDHPDDFAPFLDEELEGYVRKIRDTAEWGGQLELMAIARVYGVRIKVVQSGRTESIEPSAGGEGEGDKEEKETKTIWLAYYRHGFGLGEHYNSLRVQG

SEQ ID NO: 13143 - DNA, 1831 bp, Muscodor strobelii
  misc_feature: SGI EST ID NO. CUFF.31366.0
  misc_feature: Variant of the nucleotide sequence at SEQ ID NO 13141
tttctcctcataacctgacggagggtggtccatcgctgtgtggcctgaggtcaccaccgaaaccccactataatcagtgaaaatcgaccccacgttcagagcttcaacatcaccctcacatctcatctgtttcgtcaacaggattgtctgcaaatccactgctctggtcgcaaatactcgattcctcgttctatactaaggcctctaccagccaatcaccaagtcttataccaaatcgcttgtcgtctattcataggtgtaaggctcccagaattctcgccatggagacagagacgctagacgcgatgcaagcccgccatcgcaaagaggcacgggatctacagtcgcagatcacgaacaaaaagaagaacgccacgaagaaaacacggaagggcatcaacgatgagtgtgatttcttagagcgtgagcttaaagaaaggcaggagcgagagatcgacggtctgaatggggacggcgaagtagcagatgaagtcgcagagccggaacagagtgaaaatacgacggttgagatgaatggagatacaaacggcattacgaaacagctcaaggaaaccacgatatcaccaccggtgcaatctgcgtcacaatcgcaaagtgagggaggagggaagaagcgaaaccgccagaaagagcgcatggcgaggaggaaggctgaacaagaagctgctgctgacaaggcggctgaagaagcgatgggtatgacggatcatcggacgcttgaacggtcggggttggagaagatcttcaacgagaatgggctcacggaacatgagattatgcctgatgggcattgtttgtttaatgctgttgctgatcaactttcacaacacaatatctctctctttccgccggggtctggatttgatggtgtggacggagatggggacgggcagaagataccgagctatagagtcgtgaggagagtcgctacgaagtacatgcaagatcaccctgatgatttcgcgccgttcctggatgaggagctcgaagggtatgtgaggaagattagggatacggccgagtggggtggacaacttgagttgatggctattgctagggtgtatggggttaggattaaggttgtgcagagtgggaggacggagagcattgagcctagtgcgggaggagagggtgagggggacaaggaggaaaaggaaacgaagacgatttggttggcgtattatagacatgggtttgggcttggtgaacattataattctttgagggttcaggggtgagggtggtgatgggaggctgtgttgaagttgtgtgttaggaggtcttcgtgggtcttgagatactggagaagcgatgacatgggaaagggggcctacttgaggacatagataaaagcagacatggtcgcgatggcggtctgtttaagcatctcttaggagaagccgtgttcatatacagcagttaccacatctctcgcatggtataacttgatgtaacgggcctgattattcgggtacttgctcacactatgtaatgaatggagaatgagtagtgtttgccatttaggtttatcgagatgttcaactagtatcgcacctgaattgcgatattggtcctgcattggtgtggtagcgcaaacaggcaggtctgttggaataggggttgatgcattttgtcgggtccttcggaaccagtttatagcgtgtcttttcttatccggaatgcgtgcgatctctaacctcctctcgcatacactacgtggatatagaataaatgcagtggttgagatacagttacaattatacagcttgaatcggcgatgctccaggtgactaatagtcttcgaaatcgg

SEQ ID NO: 13144 - DNA, 2706 bp, Muscodor strobelii
  misc_feature: SGI cDNA ID NO. 564296
  misc_feature: Reduced expression when VOC is produced
  misc_feature: Encodes the peptide sequence at SEQ ID NO 13145
atggcctacaacaatccccacggccatcacaatgacttcgaggaccacaacctccaggacctgcctgcaaacagcacttatcacatccctcccgccgaccaggacgatgaggaatcccacagacagctgctcggccagtacgagcatgaccggctgggcgcccatacgcctcctgtccggcccgtctctgcctacagcttgaccgagtcgtacgcgaccacggctgtcccaatgacctcaactccccagccctacggagctggaaacgagtatcagagtggctacggcggccaccccggtgacgagacgggtggttttggttatggtggccccagacctgcttcaaccgtagattcagacgagagctgggttcgtcgccaacagccaggtggtgcgccaggtggtctgaagcgatatgccacgcgtaaggtcaagctcgttcagggttccgtcctcagtgtcgagtaccctgtgcccagtgccatcaagaatgctgtccaggccaaataccgcgatgcggaacacggctctactgagttcactaacatgcgatataccgctgctacatgcgatcccaatgacttcaccttgaagaatggctacgatttgcgccctcgcatgtataacagacataccgagctgctcattgccatcacctactacaacgaggacaaggttctcttctccagaaccatgcacggtgtcatgcagaacatccgcgatattgtcaacctgaagaagtctactttctggaacaaaggcggtcccgcctggcagaagattgtcgtctgcttcgtcttcgacggtattgagaaagctgacaaagagaccctcgacgtcttggcgactctcggtgtcttccaggacggtgtcgtcaagaagcaagtcaacggcaaggagacggtcgcccacatcttcgagtacacctcgcagctctccgtgacccccaaccagcagctcatccgacctaccgatgacagccctcagacgctgcctcctgtccagatgattttctgcctgaagcagaagaacaccaagaagatcaactcgcatcgttggctcttcaacgcttttggccgtatcttgaatcccgaagtctgcattctacttgatgctggtactaagcctgggtcaaagtcgctgctcgcgctctgggaaggcttttacaacgacaaggatctgggtggtgcttgtggtgagattcacgctatgttagggaagggcggtaagaagctgcttaatcccctcgtcgctgtgcaaaacttcgagtacaagatctcgaacattcttgacaagcctctggaaagttcattcggatacgtctctgtgcttcctggtgctttctctgcttaccggttccgggctattatgggtcgccctctggagcagtatttccacggtgatcacacgctgtctaagattctcggaaagaagggtatcgaaggcatgaacatcttcaagaagaacatgtttttggccgaagatcgtattctgtgtttcgagcttgtcgccaaggcgggctcgaaatggcacttgacatacatcaaggcagctaagggtgaaaccgatgtgcccgaaggcgcccccgaattcatcggccagcgtcgtcggtggctcaacggttcttttgctgcctcgatctactccctcatgcatttcggtcggatgtacaagagcgggcataacattctgcgcatgttcttcttccacgtccaactcatctacaacatcgcgaacgtcatctttacctggttttctctggcttcatactacctcactactactgttatcatggatcttgtcggttctgacgaaggatggcctttcggtgataaaggttcgcctattgtcaacgtcatcctgcagtacctctacatcgccttcgtcgtccttcagttcatccttgcgctcggcaatcgacccaaaggtactaaatggcagtatattgcttcgtttgcaatatttggcttgatccaattctatatcatcatcctctcactgtacctggtcgtcaacgcattcaccaatccggataacaaactgactggcgatttcggcaacgaattgaaacaactgttcaccactagaagtgagatcggtattatcatcgttgcgctgctcgccactttcggtttgtactatatcgcgtccttcttgtacctggacccgtggcacatgttccactcgttcccggcttacttgatcttggcctccacctatatcaacattctcaatgtctatgctttcaacaactggcacgatgtgtcttggggtacgaaaggttccgacaaagcggaagctttgccggaagcaaagatagtgaaagacgaaaagggtgaagtagcgattgaagaagtcgacaagccccaagaagatatcgatagccagtttgaggctaccgttaaacgtgccctcgcaccattcaagcctgtacccgaaaatgagaagcctgatctggaagactcctacaaggcattcagaacttcgctggtcattctgtggctgttcaccaacgttgccctcatcattggtgttaccagcgagagcctagctgtttttggtattaatggtaccaccactgccagatctgcggcctttttcaagttcctcctcatcgccactgccgtcttatcactcgtccgcttcatcggttgtttgtggttcctcggaaagaccggtatcatgtgctgctttgctagacgataa

SEQ ID NO: 13145 - protein, 901 aa, Muscodor strobelii
  misc_feature: SGI Peptide ID NO. 564296
  misc_feature (220)..(388): Pfam Id: PF01644 Pfam Desc: Chitin synthase
  misc_feature (137)..(219): Pfam Id: PF08407 Pfam Desc: Chitin synthase N-terminal
  misc_feature (192)..(707): Pfam Id: PF03142 Pfam Desc: Chitin synthase
  misc_feature (418)..(455): Pfam Id: PF03142 Pfam Desc: Chitin synthase
  misc_feature (1)..(901): NCBI GI: 19068024 Blast Desc: chitin synthase B [Glomerella graminicola]
  misc_feature (1)..(901): NCBI GI: 261351769 Blast Desc: chitin synthase [Verticillium albo-atrum VaMs.102]
  misc_feature (12)..(901): NCBI GI: 145613215 Blast Desc: chitin synthase 2 [Magnaporthe grisea 70-15] gi|145020341|gb|EDK04470.1| chitin synthase 2 [Magnaporthe grisea 70-15]
  misc_feature (1)..(901): NCBI GI: 116179936 Blast Desc: chitin synthase 1 [Chaetomium globosum CBS 148.51] gi|88184893|gb|EAQ92361.1| chitin synthase 1 [Chaetomium globosum CBS 148.51]
  misc_feature (1)..(901): NCBI GI: 164426762 Blast Desc: chitin synthase 1 [Neurospora crassa OR74A] gi|67476617|sp|P29070.2|CHS1_NEUCR RecName: Full=Chitin synthase 1; AltName: Full=Chitin-UDP acetyl-glucosaminyl transferase 1; 3
  misc_feature (1)..(901): NCBI GI: 256732181 Blast Desc: [Nectria haematococca mpVI 77-13-4]
  misc_feature (1)..(901): NCBI GI: 262069070 Blast Desc: chitin synthase 3a [Gibberella moniliformis]
  misc_feature (1)..(901): NCBI GI: 171691847 Blast Desc: protein product [Podospora anserina] gi|170945872|emb|CAP72673.1| protein product [Podospora anserina]
  misc_feature (1)..(900): NCBI GI: 46137201 Blast Desc: FG10116.1 [Gibberella zeae PH-1]
  misc_feature (1)..(901): NCBI GI: 225554957 Blast Desc: chitin synthase [Ajellomyces capsulatus G186AR]
  misc_feature (1)..(901): SWISSPROT Homolog: EC 2.4.1.16 Chitin synthase
  misc_feature: Useful for introducing or modulating the production of volatile compounds
MAYNNPHGHHNDFEDHNLQDLPANSTYHIPPADQDDEESHRQLLGQYEHDRLGAHTPPVRPVSAYSLTESYATTAVPMTSTPQPYGAGNEYQSGYGGHPGDETGGFGYGGPRPASTVDSDESWVRRQQPGGAPGGLKRYATRKVKLVQGSVLSVEYPVPSAIKNAVQAKYRDAEHGSTEFTNMRYTAATCDPNDFTLKNGYDLRPRMYNRHTELLIAITYYNEDKVLFSRTMHGVMQNIRDIVNLKKSTFWNKGGPAWQKIVVCFVFDGIEKADKETLDVLATLGVFQDGVVKKQVNGKETVAHIFEYTSQLSVTPNQQLIRPTDDSPQTLPPVQMIFCLKQKNTKKINSHRWLFNAFGRILNPEVCILLDAGTKPGSKSLLALWEGFYNDKDLGGACGEIHAMLGKGGKKLLNPLVAVQNFEYKISNILDKPLESSFGYVSVLPGAFSAYRFRAIMGRPLEQYFHGDHTLSKILGKKGIEGMNIFKKNMFLAEDRILCFELVAKAGSKWHLTYIKAAKGETDVPEGAPEFIGQRRRWLNGSFAASIYSLMHFGRMYKSGHNILRMFFFHVQLIYNIANVIFTWFSLASYYLTTTVIMDLVGSDEGWPFGDKGSPIVNVILQYLYIAFVVLQFILALGNRPKGTKWQYIASFAIFGLIQFYIIILSLYLVVNAFTNPDNKLTGDFGNELKQLFTTRSEIGIIIVALLATFGLYYIASFLYLDPWHMFHSFPAYLILASTYINILNVYAFNNWHDVSWGTKGSDKAEALPEAKIVKDEKGEVAIEEVDKPQEDIDSQFEATVKRALAPFKPVPENEKPDLEDSYKAFRTSLVILWLFTNVALIIGVTSESLAVFGINGTTTARSAAFFKFLLIATAVLSLVRFIGCLWFLGKTGIMCCFARR

SEQ ID NO: 13146 - DNA, 3413 bp, Muscodor strobelii
  misc_feature: SGI EST ID NO. CUFF.31402.0
  misc_feature: Variant of the nucleotide sequence at SEQ ID NO 13144
tgcatgtccctgtgctttcttttctgaaacaattattctggccgccgcttctgcctcctgcgatcagatttttccccaacttaaccaatcgtcgaataagcatgagtatggccatcgaatgatcttatcatagcatcgccatagtcatcgtctttcccccttctttcatctcctgtcactgcagtcctttgcaaacaggccctagccctcttcatctccccaagctctttgtctgcgtgtgggggagactagcatcgtcgatccaagagctctcgcgcgctctctccttaacccgacgtcaacgaagtcccgccccttacatgtcttttccttcagtagagtagagtttttcacaatcttccatcacggtccatcccgtcgaccgcaaccatggcctacaacaatccccacggccatcacaatgacttcgaggaccacaacctccaggacctgcctgcaaacagcacttatcacatccctcccgccgaccaggacgatgaggaatcccacagacagctgctcggccagtacgagcatgaccggctgggcgcccatacgcctcctgtccggcccgtctctgcctacagcttgaccgagtcgtacgcgaccacggctgtcccaatgacctcaactccccagccctacggagctggaaacgagtatcagagtggctacggcggccaccccggtgacgagacgggtggttttggttatggtggccccagacctgcttcaaccgtagattcagacgagagctgggttcgtcgccaacagccaggtggtgcgccaggtggtctgaagcgatatgccacgcgtaaggtcaagctcgttcagggttccgtcctcagtgtcgagtaccctgtgcccagtgccatcaagaatgctgtccaggccaaataccgcgatgcggaacacggctctactgagttcactaacatgcgatataccgctgctacatgcgatcccaatgacttcaccttgaagaatggctacgatttgcgccctcgcatgtataacagacataccgagctgctcattgccatcacctactacaacgaggacaaggttctcttctccagaaccatgcacggtgtcatgcagaacatccgcgatattgtcaacctgaagaagtctactttctggaacaaaggcggtcccgcctggcagaagattgtcgtctgcttcgtcttcgacggtattgagaaagctgacaaagagaccctcgacgtcttggcgactctcggtgtcttccaggacggtgtcgtcaagaagcaagtcaacggcaaggagacggtcgcccacatcttcgagtacacctcgcagctctccgtgacccccaaccagcagctcatccgacctaccgatgacagccctcagacgctgcctcctgtccagatgattttctgcctgaagcagaagaacaccaagaagatcaactcgcatcgttggctcttcaacgcttttggccgtatcttgaatcccgaagtctgcattctacttgatgctggtactaagcctgggtcaaagtcgctgctcgcgctctgggaaggcttttacaacgacaaggatctgggtggtgcttgtggtgagattcacgctatgttagggaagggcggtaagaagctgcttaatcccctcgtcgctgtgcaaaacttcgagtacaagatctcgaacattcttgacaagcctctggaaagttcattcggatacgtctctgtgcttcctggtgctttctctgcttaccggttccgggctattatgggtcgccctctggagcagtatttccacggtgatcacacgctgtctaagattctcggaaagaagggtatcgaaggcatgaacatcttcaagaagaacatgtttttggccgaagatcgtattctgtgtttcgagcttgtcgccaaggcgggctcgaaatggcacttgacatacatcaaggcagctaagggtgaaaccgatgtgcccgaaggcgcccccgaattcatcggccagcgtcgtcggtggctcaacggttcttttgctgcctcgatctactccctcatgcatttcggtcggatgtacaagagcgggcataacattctgcgcatgttcttcttccacgtccaactcatctacaacatcgcgaacgtcatctttacctggttttctctggcttcatactacctcactactactgttatcatggatcttgtcggttctgacgaaggatggcctttcggtgataaaggttcgcctattgtcaacgtcatcctgcagtacctctacatcgccttcgtcgtccttcagttcatccttgcgctcggcaatcgacccaaaggtactaaatggcagtatattgcttcgtttgcaatatttggcttgatccaattctatatcatcatcctctcactgtacctggtcgtcaacgcattcaccaatccggataacaaactgactggcgatttcggcaacgaattgaaacaactgttcaccactagaagtgagatcggtattatcatcgttgcgctgctcgccactttcggtttgtactatatcgcgtccttcttgtacctggacccgtggcacatgttccactcgttcccggcttacttgatcttggcctccacctatatcaacattctcaatgtctatgctttcaacaactggcacgatgtgtcttggggtacgaaaggttccgacaaagcggaagctttgccggaagcaaagatagtgaaagacgaaaagggtgaagtagcgattgaagaagtcgacaagccccaagaagatatcgatagccagtttgaggctaccgttaaacgtgccctcgcaccattcaagcctgtacccgaaaatgagaagcctgatctggaagactcctacaaggcattcagaacttcgctggtcattctgtggctgttcaccaacgttgccctcatcattggtgttaccagcgagagcctagctgtttttggtattaatggtaccaccactgccagatctgcggcctttttcaagttcctcctcatcgccactgccgtcttatcactcgtccgcttcatcggttgtttgtggttcctcggaaagaccggtatcatgtgctgctttgctagacgataaagctcggaaagcgctccattgttctacaattgcatcctggtgtaaaccacacctggctaatgtataaaatttgtctcctgaggacctggcgtcatacccgtttgtttaattgatttttcgtttgatgtgctggatagagggagagcctgagagaccgagatctggagtaaacaatgttgattctatacaaaagttcatagggcagcattatgaagacaggctacctagataaaccaatgtgtcgagaccaaagggctctcgatgagtttgatatgttttaataggcgagaattaaagatcaacccaaattacgtaca

SEQ ID NO: 13147 - DNA, 1359 bp, Muscodor strobelii
  misc_feature: SGI cDNA ID NO. 564297
  misc_feature: Encodes the peptide sequence at SEQ ID NO 13148
atggccggtctccctggtttcgtcggcttcgcagtcgatgaggatgttggaacgtcgctcaatccgcgacagaatgggtgttatcagtgtccagacactcctccagactgcccagcgagctgcccgaaaggccagagctgccaaattacgagtcagagttgttatgagtgtgcccaagctaaatgtcaagacgacccgactctatctagcagttctagctcagggccaaatgccggagctattgcaggcggtgtgattggaggccttgtaatcatcgcagccgcatcttatttgatctggaggttctgcgtcaagagcaagagagggagtcatcccgagcaacaatggcaggccaagggtgacgaagggctggagcaacaggacaatgacttcgcctccaggcgttcgaagagagaatccacacatactgtgcactccatagcctcgacggtgcttacgcgagcttccaatatcatccagatcgcctacatccccggtgtcacgaacagagcggcacccacatcgccaaccctattggttccgcccgttccgccgattcccatcgcccatgcggagagcagcacttcatcaccctacgaagaccagcatttctttgttccaggcgacctacgtgactccacatactctggtttctccgcctacaccgacaggacatcgtatgctcgcacgtcgtatgctcctcgctccagcgtggcctctacgatctacggcaaaaacgctgttgtatcgccgatgccagcccaaaagggtaactttttgaggcctacgatggttagcgtcaagtcgcgcgccgccagtacgaacagtgatggatccacaccacccgttcctgaggtcgactttgaaaaatacgacaacatgaagccacctccttcgccagctttcagcattggcgcaacattcttgaagaatgccagcgcatctactgccactgcagtaaggccgcaggtcgttcgtgttggcagtggaccccgaactgtgggtatcaagtcatctggatcaaagtcatcatcgacatcaagaggctctgggtcgacagtggttgcagagctggaaagtaaggaaaagctgatcgagctggacgacacatccacacctggcaaagatcgagaatctgctgccgtcacaattattgaagacagcacgccggtgatcgatcaaggtcctttctctgatccacctaagaagaaagatcagtcgaaacgagacagctcgctgagtgccgtcattgaggaatcagcaaaaagagcatcccagattgacctgcatcgtcaatctgctttagaagctgctaggaatcacagcccatttggtgacgaaaatgtgatccgcgactaa

SEQ ID NO: 13148 - protein, 452 aa, Muscodor strobelii
  misc_feature: SGI Peptide ID NO. 564297
  misc_feature (27)..(62): Pfam Id: PF09463 Pfam Desc: Opy2 protein
  misc_feature (18)..(448): NCBI GI: 171691845 Blast Desc: protein product [Podospora anserina] gi|170945871|emb|CAP72672.1| protein product [Podospora anserina]
  misc_feature (47)..(448): NCBI GI: 116179940 Blast Desc: CHGG_00598 [Chaetomium globosum CBS 148.51] gi|88184895|gb|EAQ92363.1| CHGG_00598 [Chaetomium globosum CBS 148.51]
  misc_feature (40)..(452): NCBI GI: 261351770 Blast Desc: conserved [Verticillium albo-atrum VaMs.102]
  misc_feature (19)..(452): NCBI GI: 145602598 Blast Desc: MGG_09497 [Magnaporthe grisea 70-15] gi|145010995|gb|EDJ95651.1| MGG_09497 [Magnaporthe grisea 70-15]
  misc_feature (9)..(452): NCBI GI: 256731788 Blast Desc: NECHADRAFT_61266 [Nectria haematococca mpVI 77-13-4]
  misc_feature (20)..(452): NCBI GI: 46137199 Blast Desc: FG10115.1 [Gibberella zeae PH-1]
  misc_feature (11)..(452): NCBI GI: 164426764 Blast Desc: NCU03613 [Neurospora crassa OR74A] gi|157071468|gb|EAA32104.2| [Neurospora crassa OR74A]
  misc_feature (23)..(452): NCBI GI: 18376398 Blast Desc: related to OPY2 protein [Neurospora crassa]
  misc_feature (80)..(424): NCBI GI: 156059692 Blast Desc: SS1G_03859 [Sclerotinia sclerotiorum 1980] gi|154701645|gb|EDO01384.1| SS1G_03859 [Sclerotinia sclerotiorum 1980]
  misc_feature (27)..(430): NCBI GI: 154315734 Blast Desc: BC1G_04439 [Botryotinia fuckeliana B05.10] gi|150846835|gb|EDN22028.1| BC1G_04439 [Botryotinia fuckeliana B05.10]
MAGLPGFVGFAVDEDVGTSLNPRQNGCYQCPDTPPDCPASCPKGQSCQITSQSCYECAQAKCQDDPTLSSSSSSGPNAGAIAGGVIGGLVIIAAASYLIWRFCVKSKRGSHPEQQWQAKGDEGLEQQDNDFASRRSKRESTHTVHSIASTVLTRASNIIQIAYIPGVTNRAAPTSPTLLVPPVPPIPIAHAESSTSSPYEDQHFFVPGDLRDSTYSGFSAYTDRTSYARTSYAPRSSVASTIYGKNAVVSPMPAQKGNFLRPTMVSVKSRAASTNSDGSTPPVPEVDFEKYDNMKPPPSPAFSIGATFLKNASASTATAVRPQVVRVGSGPRTVGIKSSGSKSSSTSRGSGSTVVAELESKEKLIELDDTSTPGKDRESAAVTIIEDSTPVIDQGPFSDPPKKKDQSKRDSSLSAVIEESAKRASQIDLHRQSALEAARNHSPFGDENVIRD

SEQ ID NO: 13149 - DNA, 2437 bp, Muscodor strobelii
  misc_feature: SGI EST ID NO. CUFF.31833.1
  misc_feature: Variant of the nucleotide sequence at SEQ ID NO 13147
cccatatcctgtctgcgcctcctcttgtgtctccccttccttcctcgtcggtcggcttgccctccacatcccatcacgcctacgcccgcattgcacattgtacattgcactcacacacagattcccgccgtctcgaaacacaagcgatctcgtcgacgccagagatcatcgtcgcccgctcaccgacgactccttcatcgcgctggttcgagattgctctgatgtcgctgtgaatatcgcctcccactccctggccaaccgctgcatcgttctgttcctctttacttgagctagtctctcagtcactcgtttcatccatttcaactttccgtacacgccgacatccatcaacaacgcctggatttgttcttcaactcatagcaacttagcaccgagataccctatcaccattgctctgtcgtcggattgatcattgcttcttaacgccattcagttgcccccacgctctagtcgctaggatcggcaacgcacagattcacggctgtcttgtctcattctacagcagaacaccagttcataccgacgtagcatactcaagctcaacaccgagcaatttttatttgaagcgcctgttatcccacatttaccatggccggtctccctggtttcgtcggcttcgcagtcgatgaggatgttggaacgtcgctcaatccgcgacagaatgggtgttatcagtgtccagacactcctccagactgcccagcgagctgcccgaaaggccagagctgccaaattacgagtcagagttgttatgagtgtgcccaagctaaatgtcaagacgacccgactctatctagcagttctagctcagggccaaatgccggagctattgcaggcggtgtgattggaggccttgtaatcatcgcagccgcatcttatttgatctggaggttctgcgtcaagagcaagagagggagtcatcccgagcaacaatggcaggccaagggtgacgaagggctggagcaacaggacaatgacttcgcctccaggcgttcgaagagagaatccacacatactgtgcactccatagcctcgacggtgcttacgcgagcttccaatatcatccagatcgcctacatccccggtgtcacgaacagagcggcacccacatcgccaaccctattggttccgcccgttccgccgattcccatcgcccatgcggagagcagcacttcatcaccctacgaagaccagcatttctttgttccaggcgacctacgtgactccacatactctggtttctccgcctacaccgacaggacatcgtatgctcgcacgtcgtatgctcctcgctccagcgtggcctctacgatctacggcaaaaacgctgttgtatcgccgatgccagcccaaaagggtaactttttgaggcctacgatggttagcgtcaagtcgcgcgccgccagtacgaacagtgatggatccacaccacccgttcctgaggtcgactttgaaaaatacgacaacatgaagccacctccttcgccagctttcagcattggcgcaacattcttgaagaatgccagcgcatctactgccactgcagtaaggccgcaggtcgttcgtgttggcagtggaccccgaactgtgggtatcaagtcatctggatcaaagtcatcatcgacatcaagaggctctgggtcgacagtggttgcagagctggaaagtaaggaaaagctgatcgagctggacgacacatccacacctggcaaagatcgagaatctgctgccgtcacaattattgaagacagcacgccggtgatcgatcaaggtcctttctctgatccacctaagaagaaagatcagtcgaaacgagacagctcgctgagtgccgtcattgaggaatcagcaaaaagagcatcccagattgacctgcatcgtcaatctgctttagaagctgctaggaatcacagcccatttggtgacgaaaatgtgatccgcgactaaaaggctcttgcctcaaattcttcaacttctttgcacataattttcatgagatatgggtcacgggatttctgaactagaaatggaacggacaaattgcttttatctaacattttgtctttgtcgggtcaaaaacctatcagcagtagcagaccattttatcttctctcacgtccctcgcgatagctagatgtgttggatatttttcattttcgagtatctccttgtattatcccctgaacgctgttggaaatcccgacacgtttctttggcacctatctctgtcaacaggggcaggctacggcaggctattgctattctccttctaggcgtctggactgccactactgtagagagtggcaaaacttttggaggagaggatcttgtatgtacttacatagtttggattggtagatgcacgttcgtgctcaaaattcattcgtacataccatactactttgatatgtgcttg

SEQ ID NO: 13150 - DNA, 1086 bp, Muscodor strobelii
  misc_feature: SGI cDNA ID NO. 564298
  misc_feature: Encodes the peptide sequence at SEQ ID NO 13151
atgtttacctctacctttgaagtcccagcgggtgcaaccgctcaggtgtccatcattgatacaggtgtacacttacgggaccttcccacaagcatgatttttaatccaggcgtcgaaggatttgacaagttttatcctctaggaacatggtcattcttggttcaaagttcgaaaggcgaaaaggtgcttttcgaccttggaatccctccggatgtgaagagctatcctccctccttacaccaattgcttagcgcaactggttcttcaatcgaagggactaaaaatgttgcggatgtactcaaagagcacggaacagatcctgcggagatccgaagtgtcatatggagccaccaccattttgaccatattggcgatgtcacaactttcccgaaaggcacagaaatagttgttggtcctggcttcaagcaagcctttctgccagcgtacccggccgcgcctgagaactggcttgaggaacgccatttcgaaggtcgaaacttacgtgagatcaacttttccgaaccaacttcatcggtgaaagttggtgctttccgggccctcgacttcttcggggacggttcattctaccttcttgatgcaccgggccatacagttggccatctcgccggactggctcgaacaagcagcaatcctgacaccttcatcctcatgggtgccgatatctgccatcacggtggggaaatccgtccatctcctggtcttcccattccagagaatgtccagttccctctgagcgacgcccttaaagctcgaatctcagtttgtcctggagctccgcaatttcgcaatctaaacatcagccgaggtcataaagcagacgaacctttttttgatccgtattacgtggacgatgttacccagtctattcaaacgatcaaggacactcaatcggcagacgcgcagagtaatgtgtttttcatcttcgctcatgatatgtccatcgaaggtgtcgtcgacttcttccctaagtcagcgaatgaatggcaggcaaagggttggagagagaaggccttgtggaagttcttagcggatcttgcacctgctgccatctctgcaagtccatag

SEQ ID NO: 13151 - protein, 361 aa, Muscodor strobelii
  misc_feature: SGI Peptide ID NO. 564298
  misc_feature (48)..(241): Pfam Id: PF00753 Pfam Desc: Metallo-beta-lactamase superfamily
  misc_feature (2)..(358): NCBI GI: 242769283 Blast Desc: TSTA_077180 [Talaromyces stipitatus ATCC 10500] gi|218724934|gb|EED24351.1| TSTA_077180 [Talaromyces stipitatus ATCC 10500]
  misc_feature (4)..(355): NCBI GI: 255940180 Blast Desc: Pc16g05120 [Penicillium chrysogenum Wisconsin 54-1255] gi|211585482|emb|CAP93182.1| Pc16g05120 [Penicillium chrysogenum Wisconsin 54-1255]
  misc_feature (1)..(356): NCBI GI: 115384558 Blast Desc: conserved [Aspergillus terreus NIH2624] gi|114196518|gb|EAU38218.1| conserved [Aspergillus terreus NIH2624]
  misc_feature (28)..(356): NCBI GI: 46115196 Blast Desc: FG03440.1 [Gibberella zeae PH-1]
  misc_feature (6)..(352): NCBI GI: 238497333 Blast Desc: AFLA_138910 [Aspergillus flavus NRRL3357] gi|220694782|gb|EED51126.1| AFLA_138910 [Aspergillus flavus NRRL3357]
  misc_feature (6)..(352): NCBI GI: 169774169 Blast Desc: [Aspergillus oryzae RIB40] gi|83769415|dbj|BAE59550.1| protein product [Aspergillus oryzae]
  misc_feature (1)..(352): NCBI GI: 259489787 Blast Desc: TPA: conserved [Aspergillus nidulans FGSC A4]
  misc_feature (1)..(352): NCBI GI: 261360916 Blast Desc: metallo-beta-lactamase superfamily protein [Verticillium albo-atrum VaMs.102]
  misc_feature (13)..(359): NCBI GI: 256722260 Blast Desc: NECHADRAFT_52365 [Nectria haematococca mpVI 77-13-4]
  misc_feature (6)..(354): NCBI GI: 255940520 Blast Desc: Pc16g06950 [Penicillium chrysogenum Wisconsin 54-1255] gi|211585652|emb|CAP93365.1| Pc16g06950 [Penicillium chrysogenum Wisconsin 54-1255]
MFTSTFEVPAGATAQVSIIDTGVHLRDLPTSMIFNPGVEGFDKFYPLGTWSFLVQSSKGEKVLFDLGIPPDVKSYPPSLHQLLSATGSSIEGTKNVADVLKEHGTDPAEIRSVIWSHHHFDHIGDVTTFPKGTEIVVGPGFKQAFLPAYPAAPENWLEERHFEGRNLREINFSEPTSSVKVGAFRALDFFGDGSFYLLDAPGHTVGHLAGLARTSSNPDTFILMGADICHHGGEIRPSPGLPIPENVQFPLSDALKARISVCPGAPQFRNLNISRGHKADEPFFDPYYVDDVTQSIQTIKDTQSADAQSNVFFIFAHDMSIEGVVDFFPKSANEWQAKGWREKALWKFLADLAPAAISASP

SEQ ID NO: 13152 - DNA, 1465 bp, Muscodor strobelii
  misc_feature: SGI EST ID NO. CUFF.31398.0
  misc_feature: Variant of the nucleotide sequence at SEQ ID NO 13150
ttgagctactatgttgcttacaaaggtatggtgagaacggagttccacggttgcttgcgtgccgtctcggcccgtctcgtcgaccgatatcagttagccccaacgtttagtgccgggacgcaatatacacgtaagtataagttatgtttacaagtatataaactattaaacaagtcaactccttatgcagacaacatcgctactttactcgcctatctttaggaaaatgtttacctctacctttgaagtcccagcgggtgcaaccgctcaggtgtccatcattgatacaggtgtacacttacgggaccttcccacaagcatgatttttaatccaggcgtcgaaggatttgacaagttttatcctctaggaacatggtcattcttggttcaaagttcgaaaggcgaaaaggtgcttttcgaccttggaatccctccggatgtgaagagctatcctccctccttacaccaattgcttagcgcaactggttcttcaatcgaagggactaaaaatgttgcggatgtactcaaagagcacggaacagatcctgcggagatccgaagtgtcatatggagccaccaccattttgaccatattggcgatgtcacaactttcccgaaaggcacagaaatagttgttggtcctggcttcaagcaagcctttctgccagcgtacccggccgcgcctgagaactggcttgaggaacgccatttcgaaggtcgaaacttacgtgagatcaacttttccgaaccaacttcatcggtgaaagttggtgctttccgggccctcgacttcttcggggacggttcattctaccttcttgatgcaccgggccatacagttggccatctcgccggactggctcgaacaagcagcaatcctgacaccttcatcctcatgggtgccgatatctgccatcacggtggggaaatccgtccatctcctggtcttcccattccagagaatgtccagttccctctgagcgacgcccttaaagctcgaatctcagtttgtcctggagctccgcaatttcgcaatctaaacatcagccgaggtcataaagcagacgaacctttttttgatccgtattacgtggacgatgttacccagtctattcaaacgatcaaggacactcaatcggcagacgcgcagagtaatgtgtttttcatcttcgctcatgatatgtccatcgaaggtgtcgtcgacttcttccctaagtcagcgaatgaatggcaggcaaagggttggagagagaaggccttgtggaagttcttagcggatcttgcacctgctgccatctctgcaagtccatagttttttctcatatcttcgagccggctcggtcctcgaaacggcctatatcgaatacgcgcaatattgatagatttaccacattaggcggaaaacttacatgtcgcgtgaatacttctcctacttattgaatagtcattgcatcttacatatccc

SEQ ID NO: 13153 - DNA, 1065 bp, Muscodor strobelii
  misc_feature: SGI cDNA ID NO. 564299
  misc_feature: Encodes the peptide sequence at SEQ ID NO 13154
atggcttcaaacaggatcaacgagcttcggccggacatagctgctaggatcgatccagtgtatctagatatttacaaccgataccaagcctcgagcctacgtgccgatcaggtaccctacgagacatacaaattagacccggcaacatacagttttccgacggccaaagtaacaggtcccaagccggaggtcgctagcaacatcatctaccgtgtgcctgtgacacatccggcgggcgagatcgacgttgaagtatacacaccaacggccgacgcaatttcagcaggaggactggcaaaggacaacttgttaccagcgctagttaactatcacggcggaggttttgtcatcggtgacctcacatcagatatacccctccttaggcaaatatgtcagcgcgtcggttgtatcgttgtcaatgtcgactatcgaacagcaccggagttccctcacccaacatcagcacttgacagttgggatgcgctgaagtgggtgttttcaaacgctgagaaactcaagatcgacccctctcgtgttgcagtgagcgggctatcggctggcgggtgcctcgcggctgtcctctcgcttatggctagagatgaaccctccatgccacctctgaagctccagttgctcattgtgcctttggttgatgtgcgatacatcccgcgcgagggctcttgtactgaaggtccatatgagagctacagaacttgcgagtttgcaccgatgctaccgcttgctcgtctcgtctggttctacaagtactggcttggccttggtccggagcgcgaagacagagccaatgattggagagcctcgcctcttctcgctcagtcgcacgccaatctagcaccaacgtctatccgctctgctgaagttgacccgttggtatcagaggccgaggcgtatcatgagaaattgacagctgctgggtcgcagagcaaaatcaagatttacaagggacaagctcatacgtttccacagtgggatggagagaatcctggctcaaaggagttcgtgcaagattgtattgatgatctgaaggaggccttcaagttatga

SEQ ID NO: 13154 - protein, 354 aa, Muscodor strobelii
  misc_feature: SGI Peptide ID NO. 564299
  misc_feature (107)..(329): Pfam Id: PF07859 Pfam Desc: alpha/beta hydrolase fold
  misc_feature (6)..(352): NCBI GI: 240108984 Blast Desc: lipase, [Coccidioides posadasii C735 delta SOWgp]
  misc_feature (9)..(343): NCBI GI: 169611074 Blast Desc: SNOG_08646 [Phaeosphaeria nodorum SN15] gi|111062694|gb|EAT83814.1| SNOG_08646 [Phaeosphaeria nodorum SN15]
  misc_feature (6)..(351): NCBI GI: 119181545 Blast Desc: CIMG_05873 [Coccidioides immitis RS]
  misc_feature (17)..(353): NCBI GI: 255932223 Blast Desc: Pc12g08380 [Penicillium chrysogenum Wisconsin 54-1255] gi|211582287|emb|CAP80465.1| Pc12g08380 [Penicillium chrysogenum Wisconsin 54-1255]
  misc_feature (6)..(352): NCBI GI: 261198761 Blast Desc: esterase [Ajellomyces dermatitidis SLH14081] gi|239594934|gb|EEQ77515.1| esterase [Ajellomyces dermatitidis SLH14081]
  misc_feature (6)..(352): NCBI GI: 239609944 Blast Desc: esterase [Ajellomyces dermatitidis ER-3]
  misc_feature (6)..(343): NCBI GI: 242801685 Blast Desc: esterase, [Talaromyces stipitatus ATCC 10500] gi|218717163|gb|EED16584.1| esterase, [Talaromyces stipitatus ATCC 10500]
  misc_feature (6)..(352): NCBI GI: 238838010 Blast Desc: carboxylesterase [Microsporum canis CBS 113480]
  misc_feature (7)..(343): NCBI GI: 212540470 Blast Desc: esterase, [Penicillium marneffei ATCC 18224] gi|210067689|gb|EEA21781.1| esterase, [Penicillium marneffei ATCC 18224]
  misc_feature (7)..(349): NCBI GI: 119467260 Blast Desc: esterase, [Neosartorya fischeri NRRL 181] gi|119405588|gb|EAW15539.1| esterase, [Neosartorya fischeri NRRL 181]
  misc_feature (106)..(327): SWISSPROT Homolog: EC 3.1.1.3 Triacylglycerol lipase
MASNRINELRPDIAARIDPVYLDIYNRYQASSLRADQVPYETYKLDPATYSFPTAKVTGPKPEVASNIIYRVPVTHPAGEIDVEVYTPTADAISAGGLAKDNLLPALVNYHGGGFVIGDLTSDIPLLRQICQRVGCIVVNVDYRTAPEFPHPTSALDSWDALKWVFSNAEKLKIDPSRVAVSGLSAGGCLAAVLSLMARDEPSMPPLKLQLLIVPLVDVRYIPREGSCTEGPYESYRTCEFAPMLPLARLVWFYKYWLGLGPEREDRANDWRASPLLAQSHANLAPTSIRSAEVDPLVSEAEAYHEKLTAAGSQSKIKIYKGQAHTFPQWDGENPGSKEFVQDCIDDLKEAFKL

SEQ ID NO: 13155 - DNA, 3517 bp, Muscodor strobelii
  misc_feature: SGI EST ID NO. CUFF.31462.0
  misc_feature: Variant of the nucleotide sequence at SEQ ID NO 13153
aatggcatcacaatatattggcccctcgtttttggacattgagtgcaacatgacccccactaagggcaagatgacgcgccctgtccatcgtataatcacaaggtgatctgaggggttgagtggatcgtgttaccctcaaaacagcagcttgagaaagtacgccagaaggtgcggccatccgattgtaccctttctgaatataaggaaaggctggcccttcgcaaagacgtcacgacacttgcatcactgactcatgttgcggcaagggaacccaagagccacgttgcttcctccaccatccgcgactaccgcatacctatgataaagactatctacagtgacgatatcgtgagtcaacacactcatttataaacaccgagcacgctcgagtttctacgaggcctcataagcacatagtgcagtgccatcttgcccagaactaccgagcacttgaaaatacagcgtaaaaagttattaacaagcaagccgtagcttctcatctccagtacccctatatctgctcggtcatcatcgtgacgctcgatcacgcgattgcaaaatggcttcaaacaggatcaacgagcttcggccggacatagctgctaggatcgatccagtgtatctagatatttacaaccgataccaagcctcgagcctacgtgccgatcaggtaccctacgagacatacaaattagacccggcaacatacagttttccgacggccaaagtaacaggtcccaagccggaggtcgctagcaacatcatctaccgtgtgcctgtgacacatccggcgggcgagatcgacgttgaagtatacacaccaacggccgacgcaatttcagcaggaggactggcaaaggacaacttgttaccagcgctagttaactatcacggcggaggttttgtcatcggtgacctcacatcagatatacccctccttaggcaaatatgtcagcgcgtcggttgtatcgttgtcaatgtcgactatcgaacagcaccggagttccctcacccaacatcagcacttgacagttgggatgcgctgaagtgggtgttttcaaacgctgagaaactcaagatcgacccctctcgtgttgcagtgagcgggctatcggctggcgggtgcctcgcggctgtcctctcgcttatggctagagatgaaccctccatgccacctctgaagctccagttgctcattgtgcctttggttgatgtgcgatacatcccgcgcgagggctcttgtactgaaggtccatatgagagctacagaacttgcgagtttgcaccgatgctaccgcttgctcgtctcgtctggttctacaagtactggcttggccttggtccggagcgcgaagacagagccaatgattggagagcctcgcctcttctcgctcagtcgcacgccaatctagcaccaacgtctatccgctctgctgaagttgacccgttggtatcagaggccgaggcgtatcatgagaaattgacagctgctgggtcgcagagcaaaatcaagatttacaagggacaagctcatacgtttccacagtgggatggagagaatcctggctcaaaggagttcgtgcaagattgtattgatgatctgaaggaggccttcaagttatgagcacatgatatcaggagagcactgggctaaacccgggttcttgaagtagagaaagggacttgggtcacagtttgccagtgagcagttctttcactagactaaggctaacctgctgataagctattatgaatcctacacgttggaactgtgaggtccctgattactattgttatggtgcccttcgtatctccaattcctcgttctgactctcactctcgtctccctccacgttcgccctctcgggacctcgcatgcgcaccagttctgggcgagaagagctcatgtggcgggtcccgggattcgtcctggatgatcctggcatagatactgggggtacaggacgaccagatggccgcgatggcatagagacatgcctttccacaatatgcgggagctcttttccttttttcctaaggtcagaaagtggtcgatggtcatcccttgggttcagacgaacatgcgttggtggtggagggatcggattagttgagtagctatgaatgggtaatgtttcatgaccaggaccacctgggcgtggaccaccttctggcggccgttctatttcaattccgtctcctgacgaatcatctgagtctgtatcgctctccctgaccgagaatcccgatgagagtgtttttccctttctcgtcggtggcacatacggaccttcaggaaatggagggatcggaggaggaggaactgggggaccgcctccgccgggagggcctggtggtcctgggggaccaggtggccctcgcggtccctgaggaccttgcccttccgattgtatagtaatgcttccaccggttgcgtttccgcccgtgactgtaacactccggccgtcttgcccgacgtgaacatgaacctctatgggttgctggccccgcccacttcgcctccgacggcttgacgaagatgacttttcgtaactatagctatatctgctctcacgactactgctccgccgactccccgattgcgagaatatgcttgtcccgctttggcttcggcaaatgattatcagcaatgcgatgacgaaaactggtaccagaaccccgataacaatgcgtactgtcgtatctgtcttttgatctctcctcaatatgattgagatctcatcccgtgtctcagatgcttcacgatatggtaattcgtggatatacatttagagctcgagttttgtcttttcttggaggtgggacaaagagatggcccagagtgaaaaccccgaaatgtaacttcagattcgtctcactattgcgttgtagctttcttgcagagcctcgagtctaatatgattatcgagagttagcaataggttatcgcagtgtagaacgcgaagttggacgcattgttgtagaatatcgttgttataagcacatccttgtagacttcacgattaagatatgaggcattctaccgtaagataaccaagcaggtcacttgtgttttggaggtcagaaggcggctcaagtctagcagcccctctcggtgtgggagatgcgacagccaccctgaacagatcccggcttcatcttgcagtactcaatggcgcgagcgaggccacacctttgtcgattgcgggactgtttaggtcacactcatcaagaattatcatgacggagacgagcgaatcttggatccgcacatcagaaatgatgtagttttcctcctttcagcacacaaagaactcgttcgtatcaaagacatctgggtcgcggactaagatattgaggatcttgttatcgtcgtacttccagagctcattaagccattcgcagtacagaccctgcattcagccgaccgcagcaatgcagctcatcccaactcggctcgatactactaccttgcattcggcccccaataccactccacaaccccgcgcataagcag

SEQ ID NO: 13156 - DNA, 474 bp, Muscodor strobelii
  misc_feature: SGI cDNA ID NO. 564300
  misc_feature: Encodes the peptide sequence at SEQ ID NO 13157
atgcgtttccttgagttctcctggctgttgtgttcagctgcaatttttgcggcttcgatcccacccgaatacagccaagagactcttgcacttgaaccgagcgccgatggattcacctgccagtggaaactggcattcactggtggcgcgctcttcggcgccggattcggtggcatcgctggctacgcctgtgtggtcaccccagacggtcgtgctgatcgacagcattgtcaagaaatcggcatattagttggacttacaacgggcgtagcaatcacacttggtcttggacttagtggctggagacccggtatgagtcgtggcgctgcttcgcaagacctctctggagaaggacaactcacggaactggaactagcgttaagtgcagttggactcgaacttgatagcatcaatgcgtcacagttagtaacgcgagatgccgagaatatccaggttttagagggaatttactaa

SEQ ID NO: 13157 - protein, 157 aa, Muscodor strobelii
  misc_feature: SGI Peptide ID NO. 564300
MRFLEFSWLLCSAAIFAASIPPEYSQETLALEPSADGFTCQWKLAFTGGALFGAGFGGIAGYACVVTPDGRADRQHCQEIGILVGLTTGVAITLGLGLSGWRPGMSRGAASQDLSGEGQLTELELALSAVGLELDSINASQLVTRDAENIQVLEGIY

SEQ ID NO: 13158 - DNA, 1464 bp, Muscodor strobelii
  misc_feature: SGI cDNA ID NO. 564301
  misc_feature: Reduced expression when VOC is produced
  misc_feature: Encodes the peptide sequence at SEQ ID NO 13159
atgctcatccctacgacatcgttcgaagtccttgaggactccagggcagacgatgtctccctgccagcatttatggcgtcgaccagtcgtgggtttctaccacggatggatcccatcgtcactcttccctctgaatttgatgcagtcgagagcttgcttcaggctatgcccgtcacaacactgtcaggcaaacctgggctcctcgccacaggagatctaggtgacgaagtagagaagcttgccgacttaacagatgcagtcgagaaatatagtgataatcttcctatgatgaatgcgttgtatcgcgattactcgtttctggcttcggcatacctactagaaccttgccacatgaggttcatcaagggtgaaccatatgggcttggcagatctttcttgcctgcccaactttcccgtccgattgcacgatgtgcagaactcaccggcttcaaacccttcatggagtatgccggctcttatgccctttttaactatcgtcttcaagattccgacaggggcttggactacgacaatctgcggctcatcagagcttttgagcacggtctcgatcctacatcatcagaggccggattcgttctcgtgcacgtcgacatggtgaagaactctggacctataatatctggtgtcatgtcagcagtatcagcactcgcggataaggtcaatgacgcaattgctcagcgaacagctttcaatgaaggtcttcgcactacattgaacgcaatgcaaaaagtcaacgatgtgatggagacaatgtggggaaagtcaaagccaagatcctacacaagcttccggaccttcatcttcggtattacctcacagtctatgttcccagacggcgttgtgtacgagggaatcaacgacgggaagccattaagcttccgtggtgagagtggtgcaaacgactccatgattccgctcatggacaatttcctccagatccagatgccaaacacaccgctcacggagattttgaaagacttcagagagtaccggccaagtaaccatcgtcagttcctagctgctgttaaacagtgctccgaggagctggagctgagagattatgcgcttgcaaagccggcctcatcgacggatgaggagaagaaactcctgattgattcacgaagcctttggatccagctactggaccaggtccgtgacttcagatggcgacattggtgtttcgctagggaatacattctcaagcagacgtcgcacccgacggcaacaggcggcagccctattgtgacttggctccccaatcagcttcaggccgtgatggaggaaatgcaggagatctacgataatgtaggaggtcggagcggccccacggatcttggagataggtgtcgagacatcatggaccttgttggtcgccagcgtgagacgctgcgaaaagaggttgataagtactgccaagagcgtggcgttaatgcgagcaagtga

SEQ ID NO: 13159 - protein, 487 aa, Muscodor strobelii
  misc_feature: SGI Peptide ID NO. 564301
  misc_feature (5)..(486): NCBI GI: 261351760 Blast Desc: indoleamine 2,3-dioxygenase family protein [Verticillium albo-atrum VaMs.102]
  misc_feature (8)..(486): NCBI GI: 85098217 Blast Desc: NCU01402 [Neurospora crassa OR74A] gi|28922083|gb|EAA31346.1| conserved [Neurospora crassa OR74A] gi|38566822|emb|CAE76129.1| related to indoleamine 2, [Neurospora
  misc_feature (2)..(487): NCBI GI: 39974197 Blast Desc: conserved [Magnaporthe grisea 70-15] gi|145018313|gb|EDK02592.1| conserved [Magnaporthe grisea 70-15]
  misc_feature (2)..(487): NCBI GI: 58257395 Blast Desc: indoleamine 2,3-dioxygenase-like protein [Magnaporthe grisea]
  misc_feature (4)..(486): NCBI GI: 154304893 Blast Desc: BC1G_09032 [Botryotinia fuckeliana B05.10] gi|150853894|gb|EDN29086.1| BC1G_09032 [Botryotinia fuckeliana B05.10]
  misc_feature (8)..(486): NCBI GI: 156065695 Blast Desc: SS1G_00858 [Sclerotinia sclerotiorum 1980] gi|154691717|gb|EDN91455.1| SS1G_00858 [Sclerotinia sclerotiorum 1980]
  misc_feature (1)..(486): NCBI GI: 189207581 Blast Desc: indoleamine 2,3-dioxygenase family protein [Pyrenophora tritici-repentis Pt-1C-BFP] gi|187976217|gb|EDU42843.1| indoleamine 2,3-dioxygenase family
  misc_feature (10)..(482): NCBI GI: 238844988 Blast Desc: indoleamine 2,3-dioxygenase family protein [Microsporum canis CBS 113480]
  misc_feature (8)..(486): NCBI GI: 169615274 Blast Desc: SNOG_10794 [Phaeosphaeria nodorum SN15] gi|160702926|gb|EAT82188.2| SNOG_10794 [Phaeosphaeria nodorum SN15]
  misc_feature (3)..(483): NCBI GI: 242824682 Blast Desc: indoleamine 2,3-dioxygenase family protein [Talaromyces stipitatus ATCC 10500] gi|218713228|gb|EED12653.1| indoleamine 2,3-dioxygenase family protein [Talaromyces ATCC
  misc_feature (38)..(346): SWISSPROT Homolog: EC 1.13.11.52 Indoleamine 2,3-dioxygenase
  misc_feature: Useful for introducing or modulating the production of volatile compounds
MLIPTTSFEVLEDSRADDVSLPAFMASTSRGFLPRMDPIVTLPSEFDAVESLLQAMPVTTLSGKPGLLATGDLGDEVEKLADLTDAVEKYSDNLPMMNALYRDYSFLASAYLLEPCHMRFIKGEPYGLGRSFLPAQLSRPIARCAELTGFKPFMEYAGSYALFNYRLQDSDRGLDYDNLRLIRAFEHGLDPTSSEAGFVLVHVDMVKNSGPIISGVMSAVSALADKVNDAIAQRTAFNEGLRTTLNAMQKVNDVMETMWGKSKPRSYTSFRTFIFGITSQSMFPDGVVYEGINDGKPLSFRGESGANDSMIPLMDNFLQIQMPNTPLTEILKDFREYRPSNHRQFLAAVKQCSEELELRDYALAKPASSTDEEKKLLIDSRSLWIQLLDQVRDFRWRHWCFAREYILKQTSHPTATGGSPIVTWLPNQLQAVMEEMQEIYDNVGGRSGPTDLGDRCRDIMDLVGRQRETLRKEVDKYCQERGVNASK

SEQ ID NO: 13160 - DNA, 2531 bp, Muscodor strobelii
  misc_feature: SGI EST ID NO. CUFF.31417.0
  misc_feature: Variant of the nucleotide sequence at SEQ ID NO 13158
tgcaatcatttcaaaattcgaagaacaagtctgcggaatagaagacactgtcaattgtcttcaccataacttacatcttttgttccttaccccttttctcatcatcatgctcatccctacgacatcgttcgaagtccttgaggactccagggcagacgatgtctccctgccagcatttatggcgtcgaccagtcgtgggtttctaccacggatggatcccatcgtcactcttccctctgaatttgatgcagtcgagagcttgcttcaggctatgcccgtcacaacactgtcaggcaaacctgggctcctcgccacaggagatctaggtgacgaagtagagaagcttgccgacttaacagatgcagtcgagaaatatagtgataatcttcctatgatgaatgcgttgtatcgcgattactcgtttctggcttcggcatacctactagaaccttgccacatgaggttcatcaagggtgaaccatatgggcttggcagatctttcttgcctgcccaactttcccgtccgattgcacgatgtgcagaactcaccggcttcaaacccttcatggagtatgccggctcttatgccctttttaactatcgtcttcaagattccgacaggggcttggactacgacaatctgcggctcatcagagcttttgagcacggtctcgatcctacatcatcagaggccggattcgttctcgtgcacgtcgacatggtgaagaactctggacctataatatctggtgtcatgtcagcagtatcagcactcgcggataaggtcaatgacgcaattgctcagcgaacagctttcaatgaaggtcttcgcactacattgaacgcaatgcaaaaagtcaacgatgtgatggagacaatgtggggaaagtcaaagccaagatcctacacaagcttccggaccttcatcttcggtattacctcacagtctatgttcccagacggcgttgtgtacgagggaatcaacgacgggaagccattaagcttccgtggtgagagtggtgcaaacgactccatgattccgctcatggacaatttcctccagatccagatgccaaacacaccgctcacggagattttgaaagacttcagagagtaccggccaagtaaccatcgtcagttcctagctgctgttaaacagtgctccgaggagctggagctgagagattatgcgcttgcaaagccggcctcatcgacggatgaggagaagaaactcctgattgattcacgaagcctttggatccagctactggaccaggtccgtgacttcagatggcgacattggtgtttcgctagggaatacattctcaagcagacgtcgcacccgacggcaacaggcggcagccctattgtgacttggctccccaatcagcttcaggccgtgatggaggaaatgcaggagatctacgataatgtaggaggtcggagcggccccacggatcttggagataggtgtcgagacatcatggaccttgttggtcgccagcgtgagacgctgcgaaaagaggttgataagtactgccaagagcgtggcgttaatgcgagcaagtgaggtggaagactattataattacttaagctgtggacttgcattcccggtacctaggcgaataccaaaaaaaattcatgaaccatatcgtgctacctaactgtgctggaaggcctggcgtgctagagcgcctggtggcgatggcttcatgactgatggggtgtctttacgccaagttcgatggaatcaggcaagctcgagtaaagtcatccatccctgagcttcccacagttgttgtcagcccattcttcaaatggtctgatgtgcaacttaccgcagttctgtctctggcatgacatattgcagtggtacacaattgcggccccggctttagcaaagagaattccttgttgccccttgcagagaaggcccttctttttacgggctggaacctgctgcctggcgcacatatcgctaaatacccacactgccagtatgtaatcggcagcgtgcataacgttatagggagggcaccaagagtctcgtcgatggtggatgaagtcgtcgcgatgtgtgaccggactggtttggctgccttctgtgatattggtcaggcctccgagacgaacaaggccgctgtgctcaaagcctgatgcaaacttagaggatttcgcggtttccatagtaggatctagcatgtagacaccgtcttccagattgacggaaagccgataggcaagacacagagccatttagagcgagggtaagaagatctggagtagatacattgtgctaaggattggatgttgataaggtgcttccagaatgaggttaggtctagacggcttctgtatgcacagcagaatagatgttaggaaacaagatgtgtttgatagcttggaaggagacacggaagagaagataaagaatcgggttgaagagggcgagctggagctccttatgtagttgtattgtggatgatataattgttctcagttctacctattcaacaaatatatcgcct

SEQ ID NO: 13161 - DNA, 816 bp, Muscodor strobelii
  misc_feature: SGI cDNA ID NO. 564302
  misc_feature: Encodes the peptide sequence at SEQ ID NO 13162
atggctcctaacagcaagagtaccgctccctcgaaggagaaggaccgtaggaagtcgggcggcaagacatcgaccacatcgaccaccacggtcaccatgaaagtgtcggccgacaagcttcgcaagatcatcgatccctcttccgtcaaagaagagtcgcccgtcaagagttctccagctcccgtcgcacccgcagccagcgagactcctgctccggctgcctcgcaggacgagaacgccaccccttcgagccctggtggcactccagctgcaagtggcacaccctcacagacacccatgggccctcctgtcgatggactgaagaagaagggagtcaagagaaactctgctgctgtgaatgggaatgacccgaccgctaagatccgaggcaaaccgggccccaagaagagagccagacttgaggacggcaccatcgatccgaacggacgagctggcggaagcacgtatcacaaactcggacccaaggccaaccagggcgctatcaacgccggtctccgagccctggaccgctccggtgccccgtgccgcaaatggaccaagggcggcttcaagctcaagtccttcactggcgtgctctgggagataccccgatggacggcacctcccaagcagaagcccgagacggctacggaagaagccgctgccgcttctgcagagagcagcaacaaggagaacaaagacggtagtcagatgaagagcgagaacagcaccagcaacgtggaaggtgaacagcgaagtgctgctcccagcgtcaatcccagttcgcccgctcctgtccccgtcgctgcggcttga

SEQ ID NO: 13162 - protein, 271 aa, Muscodor strobelii
  misc_feature: SGI Peptide ID NO. 564302
  misc_feature (1)..(271): Pfam Id: PF08193 Pfam Desc: Fungal protein of function (DUF1711)
  misc_feature (1)..(233): Pfam Id: PF08193 Pfam Desc: Fungal protein of function (DUF1711)
  misc_feature (1)..(271): NCBI GI: 116179924 Blast Desc: CHGG_00590 [Chaetomium globosum CBS 148.51] gi|88184887|gb|EAQ92355.1| CHGG_00590 [Chaetomium globosum CBS 148.51]
  misc_feature (1)..(271): NCBI GI: 256732186 Blast Desc: NECHADRAFT_100598 [Nectria haematococca mpVI 77-13-4]
  misc_feature (1)..(253): NCBI GI: 85099703 Blast Desc: NCU01410 [Neurospora crassa OR74A] gi|28922360|gb|EAA31597.1| [Neurospora crassa OR74A] gi|28950001|emb|CAD70886.1| conserved [Neurospora crassa]
  misc_feature (15)..(258): NCBI GI: 171691827 Blast Desc: protein product [Podospora anserina] gi|170945862|emb|CAP72663.1| protein product [Podospora anserina]
  misc_feature (10)..(271): NCBI GI: 46137177 Blast Desc: FG10104.1 [Gibberella zeae PH-1]
  misc_feature (1)..(270): NCBI GI: 39974199 Blast Desc: MGG_00754 [Magnaporthe grisea 70-15] gi|145018314|gb|EDK02593.1| MGG_00754 [Magnaporthe grisea 70-15]
  misc_feature (3)..(248): NCBI GI: 156044230 Blast Desc: SS1G_10218 [Sclerotinia sclerotiorum 1980] gi|154694607|gb|EDN94345.1| SS1G_10218 [Sclerotinia sclerotiorum 1980]
  misc_feature (16)..(248): NCBI GI: 154305458 Blast Desc: BC1G_08498 [Botryotinia fuckeliana B05.10] gi|150853285|gb|EDN28477.1| BC1G_08498 [Botryotinia fuckeliana B05.10]
  misc_feature (109)..(263): NCBI GI: 240107576 Blast Desc: CPC735_041990 [Coccidioides posadasii C735 delta SOWgp]
  misc_feature (27)..(258): NCBI GI: 115385324 Blast Desc: [Aspergillus terreus NIH2624] gi|114196901|gb|EAU38601.1| [Aspergillus terreus NIH2624]
MAPNSKSTAPSKEKDRRKSGGKTSTTSTTTVTMKVSADKLRKIIDPSSVKEESPVKSSPAPVAPAASETPAPAASQDENATPSSPGGTPAASGTPSQTPMGPPVDGLKKKGVKRNSAAVNGNDPTAKIRGKPGPKKRARLEDGTIDPNGRAGGSTYHKLGPKANQGAINAGLRALDRSGAPCRKWTKGGFKLKSFTGVLWEIPRWTAPPKQKPETATEEAAAASAESSNKENKDGSQMKSENSTSNVEGEQRSAAPSVNPSSPAPVPVAAA

SEQ ID NO: 13163 - DNA, 2247 bp, Muscodor strobelii
  misc_feature: SGI EST ID NO. CUFF.31455.0
  misc_feature: Variant of the nucleotide sequence at SEQ ID NO 13161
cgaaaagcacacgcaccacacagcaccacaccattcaacacactcatcccgtctggtctccgtcccattgtgcgcgctggccgccagagtgaatgcaaaatgagaccaaagccccaaaccaaacctaccaaacggcaacaatggccgcccccataataataaccatcctctctcccatcatccatcgccgccccttccatccctccgactcttcttcttgactgtcaccgtcgccatcatcaacatcaccatcgtcacccccgtgcactgcaccctgcagttctgccatactaatttctgcccagcccgcaccaccgcacaccagcatcaccaccaccaggggctgtcgtctggcctaggtcagcggagcaacgccaaacttgcaccgctgcgagcatcaccaggccacgaacttgcactaaacccatcactagcccaggtgactgagtgcagtaacaatttctgccagtgacgctttcgcaacatcaacacagccttgacaactcaacgactggatacgagggcttcacttagccatcttgcatctttttcactatcaacacgctgtgtgcatttcgcaccgcccaccgaaattcccaacgcggtgtgccatcgctggctgacaaacaccacgtcaacctatctccggaccgggacttgattgaccgactagaagccggtggaccattctttgcatcttagatataaggtgcccggagcgaacagcatcaccatcttcgcctagttcatcgaggacacaccaaatcatttgggctccttgatattgaccgtgtcacagcaccctaagttctacaaggtcatcggtgtcgatctactctcaacaccgacacatttaacacttacgaacccgacacatcaacaccaacccatccgaaacaatggctcctaacagcaagagtaccgctccctcgaaggagaaggaccgtaggaagtcgggcggcaagacatcgaccacatcgaccaccacggtcaccatgaaagtgtcggccgacaagcttcgcaagatcatcgatccctcttccgtcaaagaagagtcgcccgtcaagagttctccagctcccgtcgcacccgcagccagcgagactcctgctccggctgcctcgcaggacgagaacgccaccccttcgagccctggtggcactccagctgcaagtggcacaccctcacagacacccatgggccctcctgtcgatggactgaagaagaagggagtcaagagaaactctgctgctgtgaatgggaatgacccgaccgctaagatccgaggcaaaccgggccccaagaagagagccagacttgaggacggcaccatcgatccgaacggacgagctggcggaagcacgtatcacaaactcggacccaaggccaaccagggcgctatcaacgccggtctccgagccctggaccgctccggtgccccgtgccgcaaatggaccaagggcggcttcaagctcaagtccttcactggcgtgctctgggagataccccgatggacggcacctcccaagcagaagcccgagacggctacggaagaagccgctgccgcttctgcagagagcagcaacaaggagaacaaagacggtagtcagatgaagagcgagaacagcaccagcaacgtggaaggtgaacagcgaagtgctgctcccagcgtcaatcccagttcgcccgctcctgtccccgtcgctgcggcttgagcacctctgtacaattactgtcatttgatccatcagtgcacttgcgctgccactgcactgacagcggatatgtatttgatctggcatgggttatgggcataggtcgttacgaggggaaaaaaagagaaaagcacggcgttctggttctcatttgcaactataaagagcattgtcctcaggtaattagggtgtacagtcacgccatttgaggacagctccgccatggcgttacagagtgtttgcggtgcctacaagcttcagtgcttagaacgctacctagatggagcgtttagttacagaattgtacattacaatctactagtatccctgaagagactgggaagagtctaatggcacagatactaaggtaggctatggacatcgtgaaagtagaggaagaggaataaaccatgtttccttcacagaaaatgaacgccgtagcaaaccattagccagtaggcagtggagaaacaaaatgatacctgcgacatacaattatcatacttagtacagtgaatgcaatagacttctg

SEQ ID NO: 13164 - DNA, 2445 bp, Muscodor strobelii
  misc_feature: SGI cDNA ID NO. 564303
  misc_feature: Encodes the peptide sequence at SEQ ID NO 13165
atggcttcttctaccgataaccaggagccttggttccttcgatatacggcacctgtcatgtttcccacacatgatggcttctctccctcaatgtcacagtccgcattcgatgcgttagtcagtgatattatcaacagcaaaaaagaagttcaagaggacgttgatgttgatgatgctgaggaggctatcaccgagaccgagacctctgccactttcgtctcgcttccgtcggaggtctcaaccacacatgatattcgcgacactatgatgcacgtcgacctgggatcatcagacgaggtccaaacggataccaccgttgcggaggaacagaagcaccccttcattgctggcattttatcctatgagaaggatgcatcttcgtttccggaggacatcgacatggagaacaagatgttcaccgagaaccaggacgtcgccttccgatccaccaaatcgccacttgtcgacctgttccacgaactcgagactgtggtgtccggacccagactgcgcgatttgctcaacgccgcttggtcggataatcccctggccacgttgaagatcatcttcaacgctcgttccatccatcttggcaaggcttcacaagacacattctaccgctctgctggatggcttgcagagaaccatccccacactctaatcgtcaatctacgttggttgagccgccccatcattgcgaagaaagcagagaagaaggacgcagaggacgaggacatggttctggtcaatgtcgagcctgaaaaggatgatcccgatgatgtaacccgattcgatatcaagaatggcgtcgcacacggttattggaaggacattctcaatatcctggctcttgccgtcaatgagaagttggatgtcctttctaatcccaaagacatcctgaacacctccaaggaacttaagcgccagcgtggaagactgacgcaagatgccgccaagacaatccgccacgagactcgagatgagcgtcacgacagagctgtaaccgcattcaactctaacccagtctatcgagcccttcatcttaccgtcactcgtctcttctctgagcagctcaaagccgacttggcactgctcaacggtgacaacgccaaagctaagaatggcatctcgatttgtggcaagtgggctccttcccacgaccgcttccatgataagcataccttcatcgtatcgagcattgcggaggcactttatcctatagagactatcaccggcggctcttcagacatggaccgagagctatatgtacgccatgctcgagagcgctaccgtaaggacattgcggcactccgagctcacctcgacatcgttgagcgcaacctcagtgcaaagtctcttgataagattaaatacgaccgtgtcccctcgattgccatgaacaactattccaagatctttgctgagaaagacaccgaacgcttcgagaaatatttggacgatgtagccagtggtcagaagcgcatcagcggcgccgtgctactaccgtcacttttggtatcaaaggcactgcattctctgcctgctagcgctccacccaaggatctcaggacagctcttgcggccaggaagcaagcacttgatattaaggtcattaatggacaatggaggtctattgttcagcgaatcaaagactctggcactttggagtccagcattgcagtctgtgatgtttctggatcaatgaacagccccgtattcccagatggcacttgccccatggactcagctattggactatcactcctgttagccgaggtcacggcgcctccctttggtggtcattttatcaccttcagcgaacgccctagagttcaggacattgatttatcgactacctttgaggagaagattggtaaaatggcaactgcacattggagcatgtctaccaactttgtaagcgtcttcgaggatctgattctgcccatggctatccgcaataagttgtctcaagaagatatggtaaagcgcatcttcgtcttcagcgacatgcagttcaaccaagcccaggactactcatctctccctggcagcgattctcgttttacctcgtctttcgagcgtattcagagcaaatatcgtgaggcgggctacgagatgcccgagcttgtcttctggaacctagccggtggacgttctggctacaatccgtggtctactggagatgcaactgcgcccaagcctgtgacatcagagcaggagggcaccgcgctagttagtggttactcacaggctatgctcaagatgttcctcgacaatggaaatttcgacgatgctgacgaggaggaggtcaagacgaccgaggaaggtgaggatactgtcgtcgttgacgcccagccggctaagaagcagaagatggatccgatcagcatggtgaataaggccattggacacaaagcttacgatcccctgaaggtgattgattaa

SEQ ID NO: 13165 - protein, 814 aa, Muscodor strobelii
  misc_feature: SGI Peptide ID NO. 564303
  misc_feature (1)..(814): NCBI GI: 256727345 Blast Desc: NECHADRAFT_33068 [Nectria haematococca mpVI 77-13-4]
  misc_feature (9)..(813): NCBI GI: 39977829 Blast Desc: MGG_06799 [Magnaporthe grisea 70-15] gi|145013662|gb|EDJ98303.1| MGG_06799 [Magnaporthe grisea 70-15]
  misc_feature (1)..(814): NCBI GI: 46121307 Blast Desc: FG05032.1 [Gibberella zeae PH-1]
  misc_feature (1)..(814): NCBI GI: 171677221 Blast Desc: protein product [Podospora anserina] gi|170936678|emb|CAP61337.1| protein product [Podospora anserina]
  misc_feature (91)..(814): NCBI GI: 189202158 Blast Desc: conserved [Pyrenophora tritici-repentis Pt-1C-BFP] gi|187984514|gb|EDU50002.1| conserved [Pyrenophora tritici-repentis Pt-1C-BFP]
  misc_feature (18)..(814): NCBI GI: 169596618 Blast Desc: SNOG_01074 [Phaeosphaeria nodorum SN15] gi|160701352|gb|EAT92569.2| SNOG_01074 [Phaeosphaeria nodorum SN15]
  misc_feature (136)..(814): NCBI GI: 226283047 Blast Desc: conserved [Paracoccidioides brasiliensis Pb01]
  misc_feature (136)..(814): NCBI GI: 226292757 Blast Desc: conserved [Paracoccidioides brasiliensis Pb18]
  misc_feature (72)..(814): NCBI GI: 261205194 Blast Desc: conserved [Ajellomyces dermatitidis SLH14081] gi|239592393|gb|EEQ74974.1| conserved [Ajellomyces dermatitidis SLH14081]
  misc_feature (72)..(814): NCBI GI: 239611448 Blast Desc: conserved [Ajellomyces dermatitidis ER-3]
MASSTDNQEPWFLRYTAPVMFPTHDGFSPSMSQSAFDALVSDIINSKKEVQEDVDVDDAEEAITETETSATFVSLPSEVSTTHDIRDTMMHVDLGSSDEVQTDTTVAEEQKHPFIAGILSYEKDASSFPEDIDMENKMFTENQDVAFRSTKSPLVDLFHELETVVSGPRLRDLLNAAWSDNPLATLKIIFNARSIHLGKASQDTFYRSAGWLAENHPHTLIVNLRWLSRPIIAKKAEKKDAEDEDMVLVNVEPEKDDPDDVTRFDIKNGVAHGYWKDILNILALAVNEKLDVLSNPKDILNTSKELKRQRGRLTQDAAKTIRHETRDERHDRAVTAFNSNPVYRALHLTVTRLFSEQLKADLALLNGDNAKAKNGISICGKWAPSHDRFHDKHTFIVSSIAEALYPIETITGGSSDMDRELYVRHARERYRKDIAALRAHLDIVERNLSAKSLDKIKYDRVPSIAMNNYSKIFAEKDTERFEKYLDDVASGQKRISGAVLLPSLLVSKALHSLPASAPPKDLRTALAARKQALDIKVINGQWRSIVQRIKDSGTLESSIAVCDVSGSMNSPVFPDGTCPMDSAIGLSLLLAEVTAPPFGGHFITFSERPRVQDIDLSTTFEEKIGKMATAHWSMSTNFVSVFEDLILPMAIRNKLSQEDMVKRIFVFSDMQFNQAQDYSSLPGSDSRFTSSFERIQSKYREAGYEMPELVFWNLAGGRSGYNPWSTGDATAPKPVTSEQEGTALVSGYSQAMLKMFLDNGNFDDADEEEVKTTEEGEDTVVVDAQPAKKQKMDPISMVNKAIGHKAYDPLKVID

SEQ ID NO: 13166 - DNA, 3147 bp, Muscodor strobelii
  misc_feature: SGI EST ID NO. CUFF.31440.0
  misc_feature: Variant of the nucleotide sequence at SEQ ID NO 13164
ctcaacgtcactcgctgaaacagcaaacaacaaagcacggagttgggcacatgcatatcattcaatataagtacatcagtgcttagggaatttgcaagtttcaatatttcttggtcttgtccacgatattgtaccccgcattccatttcgtttgcaggttctcttctcctccgttttaccaagtcaagctcgccctgatgcttgaagacttgtcttactgccactgaggtctagtccaccctcagttgatacctcgcacattacattcatatcttctactacttgtgcctcttgttcgtcgaccatggcttcttctaccgataaccaggagccttggttccttcgatatacggcacctgtcatgtttcccacacatgatggcttctctccctcaatgtcacagtccgcattcgatgcgttagtcagtgatattatcaacagcaaaaaagaagttcaagaggacgttgatgttgatgatgctgaggaggctatcaccgagaccgagacctctgccactttcgtctcgcttccgtcggaggtctcaaccacacatgatattcgcgacactatgatgcacgtcgacctgggatcatcagacgaggtccaaacggataccaccgttgcggaggaacagaagcaccccttcattgctggcattttatcctatgagaaggatgcatcttcgtttccggaggacatcgacatggagaacaagatgttcaccgagaaccaggacgtcgccttccgatccaccaaatcgccacttgtcgacctgttccacgaactcgagactgtggtgtccggacccagactgcgcgatttgctcaacgccgcttggtcggataatcccctggccacgttgaagatcatcttcaacgctcgttccatccatcttggcaaggcttcacaagacacattctaccgctctgctggatggcttgcagagaaccatccccacactctaatcgtcaatctacgttggttgagccgccccatcattgcgaagaaagcagagaagaaggacgcagaggacgaggacatggttctggtcaatgtcgagcctgaaaaggatgatcccgatgatgtaacccgattcgatatcaagaatggcgtcgcacacggttattggaaggacattctcaatatcctggctcttgccgtcaatgagaagttggatgtcctttctaatcccaaagacatcctgaacacctccaaggaacttaagcgccagcgtggaagactgacgcaagatgccgccaagacaatccgccacgagactcgagatgagcgtcacgacagagctgtaaccgcattcaactctaacccagtctatcgagcccttcatcttaccgtcactcgtctcttctctgagcagctcaaagccgacttggcactgctcaacggtgacaacgccaaagctaagaatggcatctcgatttgtggcaagtgggctccttcccacgaccgcttccatgataagcataccttcatcgtatcgagcattgcggaggcactttatcctatagagactatcaccggcggctcttcagacatggaccgagagctatatgtacgccatgctcgagagcgctaccgtaaggacattgcggcactccgagctcacctcgacatcgttgagcgcaacctcagtgcaaagtctcttgataagattaaatacgaccgtgtcccctcgattgccatgaacaactattccaagatctttgctgagaaagacaccgaacgcttcgagaaatatttggacgatgtagccagtggtcagaagcgcatcagcggcgccgtgctactaccgtcacttttggtatcaaaggcactgcattctctgcctgctagcgctccacccaaggatctcaggacagctcttgcggccaggaagcaagcacttgatattaaggtcattaatggacaatggaggtctattgttcagcgaatcaaagactctggcactttggagtccagcattgcagtctgtgatgtttctggatcaatgaacagccccgtattcccagatggcacttgccccatggactcagctattggactatcactcctgttagccgaggtcacggcgcctccctttggtggtcattttatcaccttcagcgaacgccctagagttcaggacattgatttatcgactacctttgaggagaagattggtaaaatggcaactgcacattggagcatgtctaccaactttgtaagcgtcttcgaggatctgattctgcccatggctatccgcaataagttgtctcaagaagatatggtaaagcgcatcttcgtcttcagcgacatgcagttcaaccaagcccaggactactcatctctccctggcagcgattctcgttttacctcgtctttcgagcgtattcagagcaaatatcgtgaggcgggctacgagatgcccgagcttgtcttctggaacctagccggtggacgttctggctacaatccgtggtctactggagatgcaactgcgcccaagcctgtgacatcagagcaggagggcaccgcgctagttagtggttactcacaggctatgctcaagatgttcctcgacaatggaaatttcgacgatgctgacgaggaggaggtcaagacgaccgaggaaggtgaggatactgtcgtcgttgacgcccagccggctaagaagcagaagatggatccgatcagcatggtgaataaggccattggacacaaagcttacgatcccctgaaggtgattgattaaggattaggttatccgcctcctcacagcgatagatgataatccaattccggtacacagcagcttttcaggagaccactaatgattcatgattcatgatggatacctcaccagttggccatagcgagatgcatgtaatatttggccatagcgacaaaaaataatgacaaaattgataccccacatgaatcacactgtgatacgataactgggtggatcggtcgcgatagagaggacgcttcgtatgctctctcctaacgcgcaagacatgagtatgtctcgtgtgtactcgttgacgttgtgcaacatgatatcatgcagctgtcaggcaggaaacaaaatgaatggcattaccgaataagacaatacttagaaaattgaattctacagcgacctattct

SEQ ID NO: 13167 - DNA, 1413 bp, Muscodor strobelii
  misc_feature: SGI cDNA ID NO. 564304
  misc_feature: Encodes the peptide sequence at SEQ ID NO 13168
atgtttgcaacaacctctaccaaagccttcataggcttatccttcgcgctccacgcaagcgcattctggcgtctaccatgctcgtcgccagtcgtcgtcgaacgaattgatcctatcatcgatccgggcacggtatcgaaacatacccatactgtcatgggatcgaacgccctgaacttcacgatggattatgatctcactcaaactgcaacatgttcgacttgcaaagcaaaggaggacctttcgagctactgggttccgagcctatactatcacgctgagaacgggagcttcatcccagtgcctcagagcggaggtgcactaatctactacctgcaacggaccgatcaagatgaccccaacccggaagaaggtctcattgccttccccaaagatctacgaattgtcgccggcgacccgatgaaccgcaactacaccgatacccctgagcaaaacgcagtgtctttcgtctgtctcggtgtcgaaggacccgcgacattcgacctccccaagcaaaactgtcccaacggcttgcgaacccaactaactatgccatcatgctgggatggcaagaacctcgattccgaagatcacaaaagccacatggcctacccaagtggcgtcgaccacggtccatgccctaaaactcacccgaagcgattcatcacgatcttctacgaagtaacatggagcgtcgacacattcaaagacatgtggtacggcgacggtcaacctttcgtgttctcaaacggagatccaacaggctacggataccacggcgactttctgaatggatgggacatcccgaccttgcagaaagctatcaacgaatgtaacgcagatagcggcgtgatcgaagaatgcgctgccttcacattccgcacggacgaagatatggcagcttgcaaagtccttccccgcgtcaacgaagaggtctctggtgtacttggtgcactaccaggctgtaaccccgtccaagacggacccgagatggcagtcatggagacaaactgtggcgccgtaacagagataggagatcccgtgctccctttcacagatgtcacggagaaattgggatggaaatacgtcgcatgtgccaaagaccccgctggacaaagtcggactctggatggtttcagtctcgaccaaactaacatgactatcgactattgcattgaaacttgcagtaaccagaactacaagtacgccggtctggagtataaaacgcagtgtttctgcggaaacgacgtcgccgaggaccgtatgccgactaatggtacgattggggattgtagtctaccttgttcaggtgatgcgacgcagttatgtggtggcgcggcaatggtctcggtttatacgcattgtgatgattctaagaactgtcataatggtgggataccagactcgccctga

SEQ ID NO: 13168 - protein, 470 aa, Muscodor strobelii
  misc_feature: SGI Peptide ID NO. 564304
  misc_feature (37)..(266): Pfam Id: PF09362 Pfam Desc: Domain of function (DUF1996)
  misc_feature (362)..(445): Pfam Id: PF01822 Pfam Desc: WSC domain
  misc_feature (20)..(467): NCBI GI: 156065935 Blast Desc: SS1G_00978 [Sclerotinia sclerotiorum 1980] gi|154691837|gb|EDN91575.1| SS1G_00978 [Sclerotinia sclerotiorum 1980]
  misc_feature (19)..(467): NCBI GI: 154305550 Blast Desc: BC1G_08544 [Botryotinia fuckeliana B05.10] gi|150853331|gb|EDN28523.1| BC1G_08544 [Botryotinia fuckeliana B05.10]
  misc_feature (21)..(456): NCBI GI: 67901766 Blast Desc: AN7870.2 [Aspergillus nidulans FGSC A4] gi|40739725|gb|EAA58915.1| AN7870.2 [Aspergillus nidulans FGSC A4] gi|259480615|tpe|CBF73423.1| TPA: WSC domain protein, FGSC
  misc_feature (1)..(470): NCBI GI: 119473885 Blast Desc: WSC domain protein [Neosartorya fischeri NRRL 181] gi|119406971|gb|EAW16921.1| WSC domain protein [Neosartorya fischeri NRRL 181]
  misc_feature (1)..(470): NCBI GI: 70985964 Blast Desc: WSC domain protein [Aspergillus fumigatus Af293] gi|66846115|gb|EAL86448.1| WSC domain protein, [Aspergillus fumigatus Af293]
  misc_feature (1)..(470): NCBI GI: 119472312 Blast Desc: WSC domain protein [Neosartorya fischeri NRRL 181] gi|119406463|gb|EAW16414.1| WSC domain protein [Neosartorya fischeri NRRL 181]
  misc_feature (1)..(470): NCBI GI: 159128380 Blast Desc: WSC domain protein, [Aspergillus fumigatus A1163]
  misc_feature (1)..(452): NCBI GI: 70992455 Blast Desc: WSC domain protein [Aspergillus fumigatus Af293] gi|66848709|gb|EAL89038.1| WSC domain protein, [Aspergillus fumigatus Af293]
  misc_feature (20)..(466): NCBI GI: 212543843 Blast Desc: WSC domain protein, [Penicillium marneffei ATCC 18224] gi|210066983|gb|EEA21076.1| WSC domain protein, [Penicillium marneffei ATCC 18224]
  misc_feature (20)..(466): NCBI GI: 242787893 Blast Desc: WSC domain protein, [Talaromyces stipitatus ATCC 10500] gi|218721256|gb|EED20675.1| WSC domain protein, [Talaromyces stipitatus ATCC 10500]
MFATTSTKAFIGLSFALHASAFWRLPCSSPVVVERIDPIIDPGTVSKHTHTVMGSNALNFTMDYDLTQTATCSTCKAKEDLSSYWVPSLYYHAENGSFIPVPQSGGALIYYLQRTDQDDPNPEEGLIAFPKDLRIVAGDPMNRNYTDTPEQNAVSFVCLGVEGPATFDLPKQNCPNGLRTQLTMPSCWDGKNLDSEDHKSHMAYPSGVDHGPCPKTHPKRFITIFYEVTWSVDTFKDMWYGDGQPFVFSNGDPTGYGYHGDFLNGWDIPTLQKAINECNADSGVIEECAAFTFRTDEDMAACKVLPRVNEEVSGVLGALPGCNPVQDGPEMAVMETNCGAVTEIGDPVLPFTDVTEKLGWKYVACAKDPAGQSRTLDGFSLDQTNMTIDYCIETCSNQNYKYAGLEYKTQCFCGNDVAEDRMPTNGTIGDCSLPCSGDATQLCGGAAMVSVYTHCDDSKNCHNGGIPDSP

SEQ ID NO: 13169 - DNA, 645 bp, Muscodor strobelii
  misc_feature: SGI EST ID NO. CUFF.31446.0
  misc_feature: Variant of the nucleotide sequence at SEQ ID NO 13167
ccgagcctatactatcacgctgagaacgggagcttcatcccagtgcctcagagcggaggtgcactaatctactacctgcaacggaccgatcaagatgaccccaacccggaagaaggtctcattgccttccccaaagatctacgaattgtcgccggcgacccgatgaaccgcaactacaccgatacccctgagcaaaacgcagtgtctttcgtctgtctcggtgtcgaaggacccgcgacattcgacctccccaagcaaaactgtcccaacggcttgcgaacccaactaactatgccatcatgctgggatggcaagaacctcgattccgaagatcacaaaagccacatggcctacccaagtggcgtcgaccacggtccatgccctaaaactcacccgaagcgattcatcacgatcttctacgaagtaacatggagcgtcgacacattcaaagacatgtggtacggcgacggtcaacctttcgtgttctcaaacggagatccaacaggctacggataccacggcgactttctgaatggatgggacatcccgaccttgcagaaagctatcaacgaatgtaacgcagatagcggcgtgatcgaagaatgcgctgccttcacattccgcacggacgaagatatggcagct

SEQ ID NO: 13170 - DNA, 948 bp, Muscodor strobelii
  misc_feature: SGI cDNA ID NO. 564305
  misc_feature: Reduced expression when VOC is produced
  misc_feature: Encodes the peptide sequence at SEQ ID NO 13171
atggcacctggaattcttgtcgacgacactactaaccgtgatggtgctcagcttgaggccacctcggacaaaattgacgaggtcaatgttataaaggaccagttgaagaagaaacaacagaaggatcaggccaattttaactctgagtctaagttcgactctgagaaagacaagactcagttcagacaatacgaggacgcttgcgacagagtcaagaacttctacaaggagcagcacaccaagcagactgttgcctacaacttgaaagtacgaaaccacttgaaaactcgcaagcgggaggagatgaccatctggcaagccatggagaagttaaacactttgattgacgagtccgacccagacacaagcctctcccagattcagcatctactccagtccgcagaggctattcgcaaggatggtaagcctcgatggatgcaacttacaggcctgattcacgatcttggaaagctcctgttcttttacggatccgagggtcaatgggatgtcgttggtgacactttccccgttggctgtgcctttgacgagcgaatcatctaccccggctcattctccgagaaccgagacatagacgaccccgtctacagcaccaagtacggtatctactcgcccggttgcggtctcgacaacgtcatgctctcatggggtcacgacgagtacctttaccacattgtcaaggaccagtccaacttgcccgctgagtcgctggctatgatccgataccactctttctacccttggcacaaggagggtgcttaccgcgagttcatggatgagcacgacgagaagatgctcgaagctgttcgcgcattcaacccttacgacttgtacagcaagagcgacggtctccccgatatcgaggagctcaagccttactaccttgagttgatcgacgagtacttccctcagaaggtcatcaagtggtaa

SEQ ID NO: 13171 - protein, 315 aa, Muscodor strobelii
  misc_feature: SGI Peptide ID NO. 564305
  misc_feature (64)..(315): Pfam Id: PF05153 Pfam Desc: Family of function (DUF706)
  misc_feature (1)..(315): NCBI GI: 145602552 Blast Desc: myo-inositol oxygenase [Magnaporthe grisea 70-15] gi|145010956|gb|EDJ95612.1| myo-inositol oxygenase [Magnaporthe grisea 70-15]
  misc_feature (10)..(315): NCBI GI: 119480953 Blast Desc: inositol oxygenase, [Neosartorya fischeri NRRL 181] gi|119408659|gb|EAW18608.1| inositol oxygenase, [Neosartorya fischeri NRRL 181]
  misc_feature (1)..(315): NCBI GI: 71001350 Blast Desc: inositol oxygenase [Aspergillus fumigatus Af293] gi|66852994|gb|EAL93318.1| inositol oxygenase, [Aspergillus fumigatus Af293] gi|159129431|gb|EDP54545.1| inositol oxygenase,
  misc_feature (1)..(315): NCBI GI: 145252542 Blast Desc: An16g04760 [Aspergillus niger] gi|134083336|emb|CAK42903.1| protein product [Aspergillus niger]
  misc_feature (11)..(315): NCBI GI: 259479832 Blast Desc: TPA: inositol oxygenase, (AFU_orthologue; AFUA_2G10230) [Aspergillus nidulans FGSC A4]
  misc_feature (1)..(315): NCBI GI: 121715426 Blast Desc: inositol oxygenase, [Aspergillus clavatus NRRL 1] gi|119403479|gb|EAW13896.1| inositol oxygenase, [Aspergillus clavatus NRRL 1]
  misc_feature (1)..(315): NCBI GI: 169783518 Blast Desc: [Aspergillus oryzae RIB40] gi|238493331|ref|XP_002377902.1| inositol oxygenase, [Aspergillus flavus NRRL3357] gi|83774965|dbj|BAE65088.1| protein product
  misc_feature (10)..(315): NCBI GI: 115395990 Blast Desc: inositol oxygenase 1 [Aspergillus terreus NIH2624] gi|114193203|gb|EAU34903.1| inositol oxygenase 1 [Aspergillus terreus NIH2624]
  misc_feature (1)..(315): NCBI GI: 256721959 Blast Desc: [Nectria haematococca mpVI 77-13-4]
  misc_feature (1)..(315): NCBI GI: 225562021 Blast Desc: myo-inositol oxygenase [Ajellomyces capsulatus G186AR]
  misc_feature (61)..(315): SWISSPROT Homolog: EC 1.13.99.1 Inositol oxygenase
  misc_feature: Useful for introducing or modulating the production of volatile compounds
MAPGILVDDTTNRDGAQLEATSDKIDEVNVIKDQLKKKQQKDQANFNSESKFDSEKDKTQFRQYEDACDRVKNFYKEQHTKQTVAYNLKVRNHLKTRKREEMTIWQAMEKLNTLIDESDPDTSLSQIQHLLQSAEAIRKDGKPRWMQLTGLIHDLGKLLFFYGSEGQWDVVGDTFPVGCAFDERIIYPGSFSENRDIDDPVYSTKYGIYSPGCGLDNVMLSWGHDEYLYHIVKDQSNLPAESLAMIRYHSFYPWHKEGAYREFMDEHDEKMLEAVRAFNPYDLYSKSDGLPDIEELKPYYLELIDEYFPQKVIKW

SEQ ID NO: 13172 - DNA, 3666 bp, Muscodor strobelii
  misc_feature: SGI EST ID NO. CUFF.31483.1
  misc_feature: Variant of the nucleotide sequence at SEQ ID NO 13170
tcgggagcatcatctgaaatgtgatcgagaaacgccgagatgtggacgctgcgttcgcgcaggccgcgaatgcaaaatcgccttcaaatttaaatcaggcaaaggaaatacattcacgaagagccacaaatggcttcgtcctccgagaaaattgatctatgtcgacgagacccattatcttatggcgggaagctctcttgatgaggacgcgtcgcctcatcatttctattccgaagaaggtcccacagatatactagattcaggttcccccggaggctcaatcgcgacgtctggagattctggggcccctaggaagccgggccattccctagtggcgccagctggggagagacgatcgcctgagggttaccacccagtctcgaaaatagatccgttgttgctacctgaccatcattcacactccgaatcgccggtgcgaaatccccataatggtacaatttcggagccttcgggagaagcacagtctgcttacaaggtcattaactcacatccaccattccatggcaatgtacccgcttcaagcttttatgatacagcagcacttccacttaaagatcggacagaggctacactttttcgtcactacgttcaggtaatcggcccatgtttggattgttgtgatccactcagacatttcgagctggtcgtacccgagcgaagcagcacatgtcacatgttactaaacgccatctttgctatatcggccaggcatcttagtcacacaaccgactttgaccccatagcatcgaacaggtatcatgacgaatgcttgaaggatcttatacccatgatgaaccacgtctctgctgtatcagacgaaaacttgtttgcagctaccatcattctacgtatgctagaagaaatggaaggctcctacactggccacgataactatcgacatctactcggaattcatgcgtttgtcaatgctggggaccagtacatgattccaggtagcttaagtgctgcatctttctgggttgggcttcggcaggagatttatattgctattgtcactcagcagccactcaaagtcaacttggaccattacgtggtcgacaggtcactagagccggcagatgattacacgtggtctaatcgcgctgttgtacttattgcggatgttctaaattcctgttttggtgacgaccccttaacaccaagccgatgggctgctctcaacgaggctgccgaaaactggaccctggctagacctccttctttcaaccccttttacaggaaaggtacagggtcggcggcttttccagaaatctggcatggatccagctgtcacataatgggtatccagcatcatatgctagctcagttgtttctgattcagttcgacccatctgttccgcgagttggtacaaatcgacgcgcagcaatgcaacgtatgtcggtaagtgacaattaacagcataacaagcgagtgccgagctaggcctaacttcgtaacagcaacgtatcgatagtctcatgcgcgagctttgtggtataggcataagtaacgaatggaccccgcctgccatgttcaatgcttgtatgggcatcgcgatgtttggtgatcaattcagcgataagaaagatcaagaagcattagctgagtttctgagaaagactgaggctgctcatgctcgacccacgagagcgatacaacaccaactaatgaaggcttggggatggaccctggatgttggagattgagatctaactggtgattatcagctcatcactaaggaatggccccactgagttttgagaggacataagtcaacgggcagttcagaatcgagaacgggaataattaccaagtcgagtaccgtgcctcatatgatcagaggctggctcgaaggccctatctggctctgccgcaatgcggcttctgatgacatgcgaagaaaagcataccgagaacacatcaaccccgcaaaattctaggcctaacagatcgaagaatatttcccgtcctgcaagatcttgcaatgacgtgggtacgagatacatgggttgccggaagccaaattggcgtttaacggccgttagcagagggtatgcaaaaccttgtatcgtcactttcggggaataatgccttcttctcacgcttgtagactgtctagccacgggttgagtccacctgacatggagaaaatgctctccatcgcattgcttttacttatttgggcgacgagagaagcttgtatcggcgatttttaccctagcgccttctccggattttggccccgaaaaagtgggacatgagatcacttacatgcggatgtctcgttgcactataaacaccaaaggctatatatgaacccttgactttagtatttgaagatgtttctattaagcatcaacatcggttcaactatctcagagtatttcgaagtattctgaagccatctcctgaaaataacaagaaactcacacgcaaacacttcacaatggcacctggaattcttgtcgacgacactactaaccgtgatggtgctcagcttgaggccacctcggacaaaattgacgaggtcaatgttataaaggaccagttgaagaagaaacaacagaaggatcaggccaattttaactctgagtctaagttcgactctgagaaagacaagactcagttcagacaatacgaggacgcttgcgacagagtcaagaacttctacaaggagcagcacaccaagcagactgttgcctacaacttgaaagtacgaaaccacttgaaaactcgcaagcgggaggagatgaccatctggcaagccatggagaagttaaacactttgattgacgagtccgacccagacacaagcctctcccagattcagcatctactccagtccgcagaggctattcgcaaggatggtaagcctcgatggatgcaacttacaggcctgattcacgatcttggaaagctcctgttcttttacggatccgagggtcaatgggatgtcgttggtgacactttccccgttggctgtgcctttgacgagcgaatcatctaccccggctcattctccgagaaccgagacatagacgaccccgtctacagcaccaagtacggtatctactcgcccggttgcggtctcgacaacgtcatgctctcatggggtcacgacgagtacctttaccacattgtcaaggaccagtccaacttgcccgctgagtcgctggctatgatccgataccactctttctacccttggcacaaggagggtgcttaccgcgagttcatggatgagcacgacgagaagatgctcgaagctgttcgcgcattcaacccttacgacttgtacagcaagagcgacggtctccccgatatcgaggagctcaagccttactaccttgagttgatcgacgagtacttccctcagaaggtcatcaagtggtaaacaatctctactttttacgactgtacgaaatgggtgagaaaatgagatgattggtgtattcatgatttggatcggatgacgattgcgcagttggcatgctgctgctacgataccgcactggttgaacaacttcttttatacaagcgttgatttttttaattacgaaacaaaagctctggaaatatgagtatagacataatgacaaacatgaaatcgggatcaaatgtgtccccgagacgatattccaaca

SEQ ID NO: 13173 - DNA, 858 bp, Muscodor strobelii
  misc_feature: SGI cDNA ID NO. 564306
  misc_feature: Reduced expression when VOC is produced
  misc_feature: Encodes the peptide sequence at SEQ ID NO 13174
atgaaccacgtctctgctgtatcagacgaaaacttgtttgcagctaccatcattctacgtatgctagaagaaatggaaggctcctacactggccacgataactatcgacatctactcggaattcatgcgtttgtcaatgctggggaccagtacatgattccaggtagcttaagtgctgcatctttctgggttgggcttcggcaggagatttatattgctattgtcactcagcagccactcaaagtcaacttggaccattacgtggtcgacaggtcactagagccggcagatgattacacgtggtctaatcgcgctgttgtacttattgcggatgttctaaattcctgttttggtgacgaccccttaacaccaagccgatgggctgctctcaacgaggctgccgaaaactggaccctggctagacctccttctttcaaccccttttacaggaaaggtacagggtcggcggcttttccagaaatctggcatggatccagctgtcacataatgggtatccagcatcatatgctagctcagttgtttctgattcagttcgacccatctgttccgcgagttggtacaaatcgacgcgcagcaatgcaacgtatgtcgcaacgtatcgatagtctcatgcgcgagctttgtggtataggcataagtaacgaatggaccccgcctgccatgttcaatgcttgtatgggcatcgcgatgtttggtgatcaattcagcgataagaaagatcaagaagcattagctgagtttctgagaaagactgaggctgctcatgctcgacccacgagagcgatacaacaccaactaatgaaggcttggggatggaccctggatgttggagattga

SEQ ID NO: 13174 - protein, 285 aa, Muscodor strobelii
  misc_feature: SGI Peptide ID NO. 564306
  misc_feature (1)..(279): NCBI GI: 261359966 Blast Desc: conserved [Verticillium albo-atrum VaMs.102]
  misc_feature (8)..(282): NCBI GI: 145602554 Blast Desc: MGG_09463 [Magnaporthe grisea 70-15] gi|145010957|gb|EDJ95613.1| MGG_09463 [Magnaporthe grisea 70-15]
  misc_feature (8)..(280): NCBI GI: 85100555 Blast Desc: NCU08857 [Neurospora crassa OR74A] gi|28922522|gb|EAA31751.1| [Neurospora crassa OR74A]
  misc_feature (5)..(279): NCBI GI: 256719857 Blast Desc: NECHADRAFT_56680 [Nectria haematococca mpVI 77-13-4]
  misc_feature (5)..(279): NCBI GI: 46118333 Blast Desc: FG04701.1 [Gibberella zeae PH-1]
  misc_feature (10)..(278): NCBI GI: 116200476 Blast Desc: CHGG_10783 [Chaetomium globosum CBS 148.51] gi|88175497|gb|EAQ82965.1| CHGG_10783 [Chaetomium globosum CBS 148.51]
  misc_feature (8)..(280): NCBI GI: 18375961 Blast Desc: related to ARCA protein [Neurospora crassa]
  misc_feature (10)..(279): NCBI GI: 171676398 Blast Desc: protein product [Podospora anserina] gi|170936265|emb|CAP60924.1| protein product [Podospora anserina]
  misc_feature (1)..(279): NCBI GI: 189195028 Blast Desc: conserved [Pyrenophora tritici-repentis Pt-1C-BFP] gi|187979731|gb|EDU46357.1| conserved [Pyrenophora tritici-repentis Pt-1C-BFP]
  misc_feature (1)..(279): NCBI GI: 169597715 Blast Desc: SNOG_01645 [Phaeosphaeria nodorum SN15] gi|111070174|gb|EAT91294.1| SNOG_01645 [Phaeosphaeria nodorum SN15]
  misc_feature: Useful for introducing or modulating the production of volatile compounds
MNHVSAVSDENLFAATIILRMLEEMEGSYTGHDNYRHLLGIHAFVNAGDQYMIPGSLSAASFWVGLRQEIYIAIVTQQPLKVNLDHYVVDRSLEPADDYTWSNRAVVLIADVLNSCFGDDPLTPSRWAALNEAAENWTLARPPSFNPFYRKGTGSAAFPEIWHGSSCHIMGIQHHMLAQLFLIQFDPSVPRVGTNRRAAMQRMSQRIDSLMRELCGIGISNEWTPPAMFNACMGIAMFGDQFSDKKDQEALAEFLRKTEAAHARPTRAIQHQLMKAWGWTLDVGD

SEQ ID NO: 13175 - DNA, 3666 bp, Muscodor strobelii; identical to SEQ ID NO: 13172
  misc_feature: SGI EST ID NO. CUFF.31483.1
  misc_feature: Variant of the nucleotide sequence at SEQ ID NO 13173

SEQ ID NO: 13176 - DNA, 1752 bp, Muscodor strobelii
  misc_feature: SGI cDNA ID NO. 564307
  misc_feature: Encodes the peptide sequence at SEQ ID NO 13177
atggctgtggatactaatgagaagaagatctatccggtagacgacgaaaagccatcaaccatgcatccgcaggaacagcccccgagcccggccaatggccccggagacgacgagcacggggccgggagcaaaggcactatgagcgaggtgatccgcaatgcgcgccgggccacggagaacgagcacaagatgaccctattgcagggcatcaagctctatcccaaggctataggatggagtatactcatctccacctgtattgttatggagggttatgatgtctccctcatcaataacttctacggttttacacagtttaataagaaatatggtacgccgtatatcgacgaccagggcgtaacgcaataccaggtttctgcggcctggcaatcgggccttagcaatggtgctacagtaggtgaaatcattggattgctcatcaacggctatgtctccgagcgttttggatatcgctacacagtcatcggctgtctgaccctggtcgccgcctttacggcaatcttcttcaccgcgcaaaccgttgttcacctacaggttgccgaaatcctatgcggtatcccttggggtatattccaaaccctcaccattacatatgcctcggaagtctgcccagttgctctccgtggatatctcaccacgtacgtgaactgctgctggggcttcggtcagctcatcggcatcggcgctatcgtgggtaatctttggagaacagatgagtgggcatatcggattccgtacgcgctacaatggatctggcctttacctcttgccattggcattttcctggcaccagagagcccctggtggcaggtacgaagaggacgcatagatgaggctaagaagtctttgctgcgcctcacgagtttgaaccgagagacggattttgatgccgatgagacgattgccatgatggtgcatactgctgctttggaagataaaatcacaaagggtgcgagctattgggattgctttaagggcactgatctgcgccgcacggaaattgtgtgcgcttgttgggccattcagaatcttgctggaaactcgttctctaattactcgacttacttccttgagcaagccggcctagctgaaagagattcgtattactttgctcttggccagtatgccatcaacagcgttggagtgtttggtgcttgggctttgatcactcttggtgtaggacgaagaactctctatgtctacggtcttgccgggctcttcctcattcttctggtcctcggcttcttaggtctccctccagaccgaaatgccgcatcgttggcaaccggcagtatccttcttgtctgggccttgatctatcagctcaccgttggcaccgtgtgctattctcttgtggctgagatttccactcgtcgcttgcagatcaagactgtcgtactagggcgtgtattctacaacatcgtcggtatcatctgtggtgttctaacgccctacatgctcaatcccactaaatgggattggggcaactatgctggattcttctgggctggttcttgcttcctctgcctgatctacgcgtacttcagaatcccggagccaagaggacgaacctttgctgagttagatctgctattcgagaaaggcattagcgctcgaaagttcgcttctaccgatgtcgatgtctttgccgaagaggttgagggcgatgcgctgcttcgctatagggaccaaattgctatttctcatgttgagcatggaaagcaggcttag

SEQ ID NO: 13177 - protein, 583 aa, Muscodor strobelii
  misc_feature: SGI Peptide ID NO. 564307
  misc_feature (83)..(491): Pfam Id: PF07690 Pfam Desc: Major Facilitator Superfamily
  misc_feature (79)..(539): Pfam Id: PF00083 Pfam Desc: Sugar (and other) transporter
  misc_feature (83)..(233): Pfam Id: PF07690 Pfam Desc: Major Facilitator Superfamily
  misc_feature (33)..(571): NCBI GI: 240106453 Blast Desc: Sugar transporter family protein [Coccidioides posadasii C735 delta SOWgp]
  misc_feature (5)..(576): NCBI GI: 212541202 Blast Desc: MFS alpha-glucoside transporter, [Penicillium marneffei ATCC 18224] gi|210068055|gb|EEA22147.1| MFS alpha-glucoside transporter, [Penicillium marneffei ATCC 18224]
  misc_feature (6)..(570): NCBI GI: 256728972 Blast Desc: [Nectria haematococca mpVI 77-13-4]
  misc_feature (33)..(571): NCBI GI: 119191488 Blast Desc: CIMG_00121 [Coccidioides immitis RS]
  misc_feature (25)..(571): NCBI GI: 171676396 Blast Desc: protein product [Podospora anserina] gi|170936264|emb|CAP60923.1| protein product [Podospora anserina]
  misc_feature (18)..(571): NCBI GI: 145231904 Blast Desc: An02g02810 [Aspergillus niger] gi|134056330|emb|CAK47565.1| protein product [Aspergillus niger]
  misc_feature (14)..(570): NCBI GI: 46138465 Blast Desc: FG10747.1 [Gibberella zeae PH-1]
  misc_feature (1)..(575): NCBI GI: 258573065 Blast Desc: UREG_00227 [Uncinocarpus reesii 1704] gi|237900980|gb|EEP75381.1| UREG_00227 [Uncinocarpus reesii 1704]
  misc_feature (26)..(578): NCBI GI: 18375960 Blast Desc: alpha-glucoside transport protein [Neurospora crassa]
  misc_feature (19)..(571): NCBI GI: 115384608 Blast Desc: ATEG_01486 [Aspergillus terreus NIH2624] gi|114196543|gb|EAU38243.1| ATEG_01486 [Aspergillus terreus NIH2624]
MAVDTNEKKIYPVDDEKPSTMHPQEQPPSPANGPGDDEHGAGSKGTMSEVIRNARRATENEHKMTLLQGIKLYPKAIGWSILISTCIVMEGYDVSLINNFYGFTQFNKKYGTPYIDDQGVTQYQVSAAWQSGLSNGATVGEIIGLLINGYVSERFGYRYTVIGCLTLVAAFTAIFFTAQTVVHLQVAEILCGIPWGIFQTLTITYASEVCPVALRGYLTTYVNCCWGFGQLIGIGAIVGNLWRTDEWAYRIPYALQWIWPLPLAIGIFLAPESPWWQVRRGRIDEAKKSLLRLTSLNRETDFDADETIAMMVHTAALEDKITKGASYWDCFKGTDLRRTEIVCACWAIQNLAGNSFSNYSTYFLEQAGLAERDSYYFALGQYAINSVGVFGAWALITLGVGRRTLYVYGLAGLFLILLVLGFLGLPPDRNAASLATGSILLVWALIYQLTVGTVCYSLVAEISTRRLQIKTVVLGRVFYNIVGIICGVLTPYMLNPTKWDWGNYAGFFWAGSCFLCLIYAYFRIPEPRGRTFAELDLLFEKGISARKFASTDVDVFAEEVEGDALLRYRDQIAISHVEHGKQA

SEQ ID NO: 13178 - DNA, 7033 bp, Muscodor strobelii
  misc_feature: SGI EST ID NO. CUFF.31884.0
  misc_feature: Variant of the nucleotide sequence at SEQ ID NO 13176
cacgcattttctttcccaaatacggagtcgcatattttcatttggtgaagccgtgccggtgttctcagggactgtccacaacccacaactgcgaccggtattttataccgcattgctaaccaaaccggcgaaaacgataaagacagcccacattagataggccattttcgccgatttcatcgccatcacgatcctgcttcctgcaggaccacacggagacaccatggctgtggatactaatgagaagaagatctatccggtagacgacgaaaagccatcaaccatgcatccgcaggaacagcccccgagcccggccaatggccccggagacgacgagcacggggccgggagcaaaggcactatgagcgaggtgatccgcaatgcgcgccgggccacggagaacgagcacaagatgaccctattgcagggcatcaagctctatcccaaggctataggatggagtatactcatctccacctgtattgttatggagggttatgatgtctccctcatcaataacttctacggttttacacagtttaataagaaatatggtacgccgtatatcgacgaccagggcgtaacgcaataccaggtttctgcggcctggcaatcgggccttagcaatggtgctacagtaggtgaaatcattggattgctcatcaacggctatgtctccgagcgttttggatatcgctacacagtcatcggctgtctgaccctggtcgccgcctttacggcaatcttcttcaccgcgcaaaccgttgttcacctacaggttgccgaaatcctatgcggtatcccttggggtatattccaaaccctcaccattacatatgcctcggaagtctgcccagttgctctccgtggatatctcaccacgtacgtgaactgctgctggggcttcggtcagctcatcggcatcggcgctatcgtgggtaatctttggagaacagatgagtgggcatatcggattccgtacgcgctacaatggatctggcctttacctcttgccattggcattttcctggcaccagagagcccctggtggcaggtacgaagaggacgcatagatgaggctaagaagtctttgctgcgcctcacgagtttgaaccgagagacggattttgatgccgatgagacgattgccatgatggtgcatactgctgctttggaagataaaatcacaaagggtgcgagctattgggattgctttaagggcactgatctgcgccgcacggaaattgtgtgcgcttgttgggccattcagaatcttgctggaaactcgttctctaattactcgacttacttccttgagcaagccggcctagctgaaagagattcgtattactttgctcttggccagtatgccatcaacagcgttggagtgtttggtgcttgggctttgatcactcttggtgtaggacgaagaactctctatgtctacggtcttgccgggctcttcctcattcttctggtcctcggcttcttaggtctccctccagaccgaaatgccgcatcgttggcaaccggcagtatccttcttgtctgggccttgatctatcagctcaccgttggcaccgtgtgctattctcttgtggctgagatttccactcgtcgcttgcagatcaagactgtcgtactagggcgtgtattctacaacatcgtcggtatcatctgtggtgttctaacgccctacatgctcaatcccactaaatgggattggggcaactatgctggattcttctgggctggttcttgcttcctctgcctgatctacgcgtacttcagaatcccggagccaagaggacgaacctttgctgagttagatctgctattcgagaaaggcattagcgctcgaaagttcgcttctaccgatgtcgatgtctttgccgaagaggttgagggcgatgcgctgcttcgctatagggaccaaattgctatttctcatgttgagcatggaaagcaggcttagaatagagttgacggcaatgatgcgaagggaagcggatgtgttggcatatacggcgtgcttacggcatgatacccatttgtgcggatgagaggagaatcatgacgaagatgacatatgacggatgatggatagcttacaaaaatactgtctaatttgataatccttctgcaaaagtgctggcagtgaagagcatattcttcaataagtcattggcgtcgttgtaaaagctctctcgccattcgcgcacatcaagcttcatgccgacgcgaaaacccggggaaatttggacaccaccgtaacaccgcattaagctactgcatccggtatcgatcagtcaatcagctacagaagcttcatgcacccttaatagaattcaactctaattttactatgtttctctttcggggcacgtatatgaccgcaatgagactcgctagagatgcggggcgcttgcggaggtaagggcagtggtgtcttcgggatgagaactcgggagcgtcgttggagggtttgttggcgggtctaattatcttccccggcttttgtatataagaatgcaatggttaaacaattttgtagcttatagggaagagatggttcatcaaactttaggtctttgcattacctaccttagtattcgcaattgtgtataaactgcgaaaccccctactcaagctcaagtcagaccatcaagtccgattttcgctattacaaaatctcccattaacaacacttttttaaatatcaaatcgcacatcgcaaatggacggaccccaggacaaacgagcaggaggccaagccgcgattctagacctctccaaatggcccacggcacagaaactagtcgaccgctgtcgtgaatttttcgcagagattgaagacctaacaccaggcaaagacctagaaacccgactaaacaccacctacggacgaggcaacccatactacgaagacttctgctccctagtcctccaaggtctaaaagaaggctgggtcgccgagacggagctcaacggccgtatgtaccgccggggtaaaatcgcattaccaactgccgagaataggttctttagtattacgacggtgtatatggattctcaggaggagttctcgggacagtaccatgcgcatccgtatggggagattaattgtgttgttcaggttgatgatacggcggagttggagggtatgagtggatggcagggagctgggtggacgagtccgggacccgggacgcatcattatcctagggttaggaagggtgcgcttgttgcgctgttctttctacctgcgggacggatctcgtataaggctacgccggatatgaagcagcctgtttgtgtttagtggttgggcagtggtcttattaatggctgttgtgtcattgctgaagcccaagcaaagagatgagggttacgtgagaaggtttctgtcattatgttattgttacagtagtatatgtacatgattatatgaacacatgtatgatacagctcgagaatcaaatcgttggatagaagcttcagatctacgcttcggtcgacgcagtaaggtgaccgacatggagatagtcgtttccatgtctagatgtcgatctgatttccctcgaaagcgaaggaatgagcttgcagcagcgctgtgtccgagttctctcggtgggatattcgacctgaattaataagcctcagcctatgggctgacttgtattcctgctagtagacgggaggtcaaataaaaacatcgtctggaatttgatatatgcaataattccagtagggcccagatgtcatgtatcgctgaaagttgcctcctgctctgccgactgcaatgcgctgcggtgtgcaaaagtcgatagattactaccgattcggtgggatcttgtccgggagttcaacggcgacctgagagacggtctgtcccttcttgtattcctcctcgagagctttctgcaggtcgaaatcggcttggcgttcgcgttttatccgctgttgttccatgtctctgacaacaccttggtgcatggcctgagtgcacggaattagcaagagtccggattatggcgaaatcatcatggcagtattgtcgctagtctgccgtcagggaagtctgggtttgcctacatctttttcggatttctgctggaagtgcacgaagacgacagttgtcgccgcgaacagcgaggtgccgagcagggtgagtttcgaggcgcgcgacatattggattgtagaaagaggaaggcaaatcaacgtgcaattatacaattctcaagtatataacgaatgagcgaatgtctcacgccgccatgctgcgctgccgtttagagatgggaatccaaacgccgtgattgctcggatggaaaaagtcgattgcgaccctgacagcttcagcaatgacgtgggaccacctgcaggattcagtgctacggtagctctcgcgtagctctccatacagtggtcagacacgctgtagctgagccacagctgccctgagaaaccccgccgatctcagctcggagcaggctgaagcttccaatgtgatgcaggctagacagccccctgttaggtcaggcgggcgcatctgatatcggcgaccatcgacatcatcctcagttaccacccagctctctacacaacttgataccctacgtccgcctcactgtcgccctcaactctggcggtcgatcgcgagctagctgtagcatttccatttaactcgtttgcaaccctcagatccatagtgcgcagccacgatgtcggcccagaactcgcagggaatccagacccttctcgatgccgagagagatgcctccaagatcgtccagaaggctcgcgaacaccgaaccaagcgagtacgagaggcccgtgacgaagccaagaaggagatagacgcctaccgccagtcgaaagaggaggaattcaaaaagttcgaatcagagcacacgcaaggcaacaagcaagccgaagacgaagccaacaaagaggccgacgccaagatcaaggagatccaggccgccggtaagaagacccagagcaaagtcgtcgacgacctgctcaaggccgtgctcgacgtcaagcccgtcgcccccaccgccgcatagaaccagcagcgtcgagactcgtgctgtacgacacaagccgcgtaacggagaccggacaatgatggaatatccggggtcgttgtaggaggaggagaggactatggaaagcctggaatagggggttaacgagttgctggcaaacgccagactacaaacctagatggatgcaagcatgagtaatctatgcatgaagcattattagaaaatgcagttgaaagcccgtgcggtaatacattcatatcacaactatacaattccgccgagtctcaatcataacttcataagttcctatcaaaagcccaccctttactgcaggaactcgaccagcgtagacagcatctctttcgtatccttgccgtctgcatcttccgtgtctatgccctcgagctgctcctgtatcgtccctttgatgacgtctagagactcgtcacggtctgcaagtagtttctgtatcgtcctcttggcccctccgtcctcggctacaagccatgcgagaactacgtccagggtttggagggagaagagcccggcatccagacgccgcgagaaccactcatctgccatatcgctcctttcttcagcagacatttgtgcctgttcgacgcggatggcatcttcgacgaagcctaatctcgtagacagttcacgccgtaacttgacgagtttctccgtcttttcgtagtccttctcgacgaatttggcgagtaaccgtatccgttctggcgagtctgcaggcaataaccgcagcatcgaagcagatatcccaatcagatgttcagccgtccgatgatccgtactcttcttcatgaagagcgtaaatatgttcttcaaaccaccagcctcaacgatcttctggcacacttctgcccctgaagaaccaccggccgcatgatcgagcagtcgtaatgaagccgccttgctcagtttcccttctttcagcatgatgagacataactccacgccctcagcctccacgaacttcgcttttccctccggttcgtcggtgatgcacgtcagcgcctcgaagagattctcaacatactcttcctcctctccgcctttctcggggtctcgttttcgatatggtgcgacgagctgcagtatgatatccgcggcgtcgagctgcgcgaacttcctcctgttcttctgcgaagtctggacaagaatcgcgatgatctccgcggcatactgcgtattctgccccacctctttttctttcacttgtatcctcttcaataaccacttaagcaacccatcctgctccgcaatgcgctccgctatcgtcgtgcgtccgcagagattctcgatcacgcctagtgctcgataaactccatctctatcctcctccttcccctcatccaacctctcgagattcgagaccagaagactgagtaaatcagcctcaaacagtgcctcaacaaacttatcccacatatcctcctcggccgtaacatcctcatcagtcaactcatcaataatctcaatagcatcaatagcaatatccgtattctcatgcgccaaaagtccaaccagagaccccacacatcctatcctagcgaactccccatagagctcagggtgctcagcgagaatactcagccccttgatctcagcgtcgagctccgcctcggaggcaatgaacttcgcgggttcgtcctcgaatttcgcccgctgcgtggcgttcttgctgatcttcttttcgaagctgagggctgttcggcggagccatgcgacgtcgaatttctcgggtgcgaggtccggtgcgatgtcttcgacgtagtctaggaattcggcttcgcgcgtgctcacgccgccgccgaagaagcgcccgccttcttcgtcgtcttctggtatggaggggccgtagtcaccttcttcgtcgtctagtgggagggagggcccagcttccgtgtcggagtcgtctgcggtgggtgtttcgtcttcgacgcgtgcatgtcgg

SEQ ID NO: 13179 - DNA, 585 bp, Muscodor strobelii
  misc_feature: SGI cDNA ID NO. 564308
  misc_feature: Encodes the peptide sequence at SEQ ID NO 13180
atggacggaccccaggacaaacgagcaggaggccaagccgcgattctagacctctccaaatggcccacggcacagaaactagtcgaccgctgtcgtgaatttttcgcagagattgaagacctaacaccaggcaaagacctagaaacccgactaaacaccacctacggacgaggcaacccatactacgaagacttctgctccctagtcctccaaggtctaaaagaaggctgggtcgccgagacggagctcaacggccgtatgtaccgccggggtaaaatcgcattaccaactgccgagaataggttctttagtattacgacggtgtatatggattctcaggaggagttctcgggacagtaccatgcgcatccgtatggggagattaattgtgttgttcaggttgatgatacggcggagttggagggtatgagtggatggcagggagctgggtggacgagtccgggacccgggacgcatcattatcctagggttaggaagggtgcgcttgttgcgctgttctttctacctgcgggacggatctcgtataaggctacgccggatatgaagcagcctgtttgtgtttag

SEQ ID NO: 13180 - protein, 194 aa, Muscodor strobelii
  misc_feature: SGI Peptide ID NO. 564308
  misc_feature (5)..(194): NCBI GI: 169620978 Blast Desc: SNOG_13692 [Phaeosphaeria nodorum SN15] gi|111058019|gb|EAT79139.1| SNOG_13692 [Phaeosphaeria nodorum SN15]
  misc_feature (17)..(194): NCBI GI: 115400401 Blast Desc: ATEG_06611 [Aspergillus terreus NIH2624] gi|114191455|gb|EAU33155.1| ATEG_06611 [Aspergillus terreus NIH2624]
  misc_feature (22)..(194): NCBI GI: 67904044 Blast Desc: AN9009.2 [Aspergillus nidulans FGSC A4] gi|40745185|gb|EAA64341.1| AN9009.2 [Aspergillus nidulans FGSC A4] gi|259486540|tpe|CBF84469.1| TPA: conserved [Aspergillus FGSC
  misc_feature (22)..(168): NCBI GI: 121715318 Blast Desc: conserved [Aspergillus clavatus NRRL 1] gi|119403425|gb|EAW13842.1| conserved [Aspergillus clavatus NRRL 1]
  misc_feature (12)..(150): NCBI GI: 261357130 Blast Desc: p-hydroxylaminobenzoate lyase [Verticillium albo-atrum VaMs.102]
  misc_feature (26)..(182): NCBI GI: 6014665 Blast Desc: AF187880_3 p-hydroxylaminobenzoate lyase [Pseudomonas sp. YH102]
  misc_feature (25)..(186): NCBI GI: 220919764 Blast Desc: Mnod_8468 [Methylobacterium nodulans ORS 2060] gi|219952184|gb|ACL62575.1| conserved [Methylobacterium nodulans ORS 2060]
  misc_feature (26)..(182): NCBI GI: 9885818 Blast Desc: AF292094_4 PnbB [Pseudomonas putida]
  misc_feature (23)..(192): NCBI GI: 186471709 Blast Desc: Bphy_6975 [Burkholderia phymatum STM815] gi|184198018|gb|ACC75981.1| conserved [Burkholderia phymatum STM815]
  misc_feature (25)..(186): NCBI GI: 254255620 Blast Desc: BDAG_04966 [Burkholderia dolosa AUO158] gi|124901357|gb|EAY72107.1| BDAG_04966 [Burkholderia dolosa AUO158]
MDGPQDKRAGGQAAILDLSKWPTAQKLVDRCREFFAEIEDLTPGKDLETRLNTTYGRGNPYYEDFCSLVLQGLKEGWVAETELNGRMYRRGKIALPTAENRFFSITTVYMDSQEEFSGQYHAHPYGEINCVVQVDDTAELEGMSGWQGAGWTSPGPGTHHYPRVRKGALVALFFLPAGRISYKATPDMKQPVCV

SEQ ID NO: 13181 - DNA, 7033 bp, Muscodor strobelii; identical to SEQ ID NO: 13178
  misc_feature: SGI EST ID NO. CUFF.31884.0
  misc_feature: Variant of the nucleotide sequence at SEQ ID NO 13179

SEQ ID NO: 13182 - DNA, 261 bp, Muscodor strobelii
  misc_feature: SGI cDNA ID NO. 564309
  misc_feature: Reduced expression when VOC is produced
  misc_feature: Encodes the peptide sequence at SEQ ID NO 13183
atgtcgcgcgcctcgaaactcaccctgctcggcacctcgctgttcgcggcgacaactgtcgtcttcgtgcacttccagcagaaatccgaaaaagatgccatgcaccaaggtgttgtcagagacatggaacaacagcggataaaacgcgaacgccaagccgatttcgacctgcagaaagctctcgaggaggaatacaagaagggacagaccgtctctcaggtcgccgttgaactcccggacaagatcccaccgaatcggtag

SEQ ID NO: 13183 - protein, 86 aa, Muscodor strobelii
  misc_feature: SGI Peptide ID NO. 564309
  misc_feature (1)..(86): NCBI GI: 39945466 Blast Desc: MGG_04715 [Magnaporthe grisea 70-15] gi|145011261|gb|EDJ95917.1| MGG_04715 [Magnaporthe grisea 70-15]
  misc_feature (1)..(86): NCBI GI: 171677672 Blast Desc: protein product [Podospora anserina] gi|170936904|emb|CAP61563.1| protein product [Podospora anserina]
  misc_feature (1)..(71): NCBI GI: 261355779 Blast Desc: conserved [Verticillium albo-atrum VaMs.102]
  misc_feature (1)..(72): NCBI GI: 156065751 Blast Desc: SS1G_00886 [Sclerotinia sclerotiorum 1980] gi|154691745|gb|EDN91483.1| SS1G_00886 [Sclerotinia sclerotiorum 1980]
  misc_feature (1)..(72): NCBI GI: 154304835 Blast Desc: BC1G_09003 [Botryotinia fuckeliana B05.10] gi|150853865|gb|EDN29057.1| BC1G_09003 [Botryotinia fuckeliana B05.10]
  misc_feature (1)..(85): NCBI GI: 85083347 Blast Desc: NCU05119 [Neurospora crassa OR74A] gi|28881403|emb|CAD70444.1| related to cytochrome c oxidase assembly factor [Neurospora crassa] gi|28918190|gb|EAA27869.1|
  misc_feature (1)..(84): NCBI GI: 238843436 Blast Desc: conserved [Microsporum canis CBS 113480]
  misc_feature (1)..(72): NCBI GI: 154279536 Blast Desc: conserved [Ajellomyces capsulatus NAm1] gi|150412524|gb|EDN07911.1| conserved [Ajellomyces capsulatus NAm1]
  misc_feature (1)..(72): NCBI GI: 225562598 Blast Desc: conserved [Ajellomyces capsulatus G186AR] gi|240280976|gb|EER44479.1| cytochrome c oxidase assembly protein [Ajellomyces capsulatus H143]
  misc_feature (1)..(72): NCBI GI: 261199087 Blast Desc: cytochrome c oxidase assembly protein [Ajellomyces dermatitidis SLH14081] gi|239595097|gb|EEQ77678.1| cytochrome c oxidase assembly protein [Ajellomyces dermatitidis SLH14081] c
  misc_feature: Useful for introducing or modulating the production of volatile compounds
MSRASKLTLLGTSLFAATTVVFVHFQQKSEKDAMHQGVVRDMEQQRIKRERQADFDLQKALEEEYKKGQTVSQVAVELPDKIPPNR

SEQ ID NO: 13184 - DNA, 6204 bp, Muscodor strobelii
  misc_feature: SGI EST ID NO. CUFF.31885.1
  misc_feature: Variant of the nucleotide sequence at SEQ ID NO 13182
cttcaacatcttcaacatttagtcatgctttaatgcccattgcagcagcataagagccttgattcatcaggcactcaaacatcatgtctacaagcattgacgacctgttcaaggcgtcgagcgccagtaacaagcgcaagcttgcgcctccacgagatcccaatgagatctacaaatcgccccgcttaaacggcagcggccactctggccgacatgcacgcgtcgaagacgaaacacccaccgcagacgactccgacacggaagctgggccctccctcccactagacgacgaagaaggtgactacggcccctccataccagaagacgacgaagaaggcgggcgcttcttcggcggcggcgtgagcacgcgcgaagccgaattcctagactacgtcgaagacatcgcaccggacctcgcacccgagaaattcgacgtcgcatggctccgccgaacagccctcagcttcgaaaagaagatcagcaagaacgccacgcagcgggcgaaattcgaggacgaacccgcgaagttcattgcctccgaggcggagctcgacgctgagatcaaggggctgagtattctcgctgagcaccctgagctctatggggagttcgctaggataggatgtgtggggtctctggttggacttttggcgcatgagaatacggatattgctattgatgctattgagattattgatgagttgactgatgaggatgttacggccgaggaggatatgtgggataagtttgttgaggcactgtttgaggctgatttactcagtcttctggtctcgaatctcgagaggttggatgaggggaaggaggaggatagagatggagtttatcgagcactaggcgtgatcgagaatctctgcggacgcacgacgatagcggagcgcattgcggagcaggatgggttgcttaagtggttattgaagaggatacaagtgaaagaaaaagaggtggggcagaatacgcagtatgccgcggagatcatcgcgattcttgtccagacttcgcagaagaacaggaggaagttcgcgcagctcgacgccgcggatatcatactgcagctcgtcgcaccatatcgaaaacgagaccccgagaaaggcggagaggaggaagagtatgttgagaatctcttcgaggcgctgacgtgcatcaccgacgaaccggagggaaaagcgaagttcgtggaggctgagggcgtggagttatgtctcatcatgctgaaagaagggaaactgagcaaggcggcttcattacgactgctcgatcatgcggccggtggttcttcaggggcagaagtgtgccagaagatcgttgaggctggtggtttgaagaacatatttacgctcttcatgaagaagagtacggatcatcggacggctgaacatctgattgggatatctgcttcgatgctgcggttattgcctgcagactcgccagaacggatacggttactcgccaaattcgtcgagaaggactacgaaaagacggagaaactcgtcaagttacggcgtgaactgtctacgagattaggcttcgtcgaagatgccatccgcgtcgaacaggcacaaatgtctgctgaagaaaggagcgatatggcagatgagtggttctcgcggcgtctggatgccgggctcttctccctccaaaccctggacgtagttctcgcatggcttgtagccgaggacggaggggccaagaggacgatacagaaactacttgcagaccgtgacgagtctctagacgtcatcaaagggacgatacaggagcagctcgagggcatagacacggaagatgcagacggcaaggatacgaaagagatgctgtctacgctggtcgagttcctgcagtaaagggtgggcttttgataggaacttatgaagttatgattgagactcggcggaattgtatagttgtgatatgaatgtattaccgcacgggctttcaactgcattttctaataatgcttcatgcatagattactcatgcttgcatccatctaggtttgtagtctggcgtttgccagcaactcgttaaccccctattccaggctttccatagtcctctcctcctcctacaacgaccccggatattccatcattgtccggtctccgttacgcggcttgtgtcgtacagcacgagtctcgacgctgctggttctatgcggcggtgggggcgacgggcttgacgtcgagcacggccttgagcaggtcgtcgacgactttgctctgggtcttcttaccggcggcctggatctccttgatcttggcgtcggcctctttgttggcttcgtcttcggcttgcttgttgccttgcgtgtgctgtttgacctctatatcagcttggttcttcgttatggttcggcagtatgatttggtttatgtatggtttggggatgtggctgacctctgattcgaactttttgaattcctcctctttcgactggcggtaggcgtctatctccttcttggcttcgtcacgggcctctcgtactcgcttggttcggtctgttcgtggggaagtgatacgtcagtcttgctatcttgagaagcacggtcggtgggaataagtcgagctctctggatatcagagcggtattagacatacgttcgcgagctatgatatgtcagtctgtactttgtctgctttgaaacctgcgttgcgactcgtacccttctggacgatcttggaggcatctctctcggcctatgaagtcccgttttagcaccatatctcggcctgtagcagtatcttcgatcgttgtagctacatgtcggatgggaggttcgtacatcgagaagggtctggattccctgcgagttctgggccgactgtcgaggcggcgttagctcagaggcagcaggtaacggggcggataacgtaccatcgtggctgcgcactatggatctgagggttgcaaacgagttaaatggaaatgctacagctagctcgcgatcgaccgccagagttgagggcgacagtgaggcggacgtagggtatcaagttgtgtagagagctgggtggtaactgaggatgatgtcgatggtcgccgatatcagatgcgcccgcctgacctaacagggggctgtctagcctgcatcacattggaagcttcagcctgctccgagctgagatcggcggggtttctcagggcagctgtggctcagctacagcgtgtctgaccactgtatggagagctacgcgagagctaccgtagcactgaatcctgcaggtggtcccacgtcattgctgaagctgtcagggtcgcaatcgactttttccatccgagcaatcacggcgtttggattcccatctctaaacggcagcgcagcatggcggcgtgagacattcgctcattcgttatatacttgagaattgtataattgcacgttgatttgccttcctctttctacaatccaatatgtcgcgcgcctcgaaactcaccctgctcggcacctcgctgttcgcggcgacaactgtcgtcttcgtgcacttccagcagaaatccgaaaaagatgccatgcaccaaggtgttgtcagagacatggaacaacagcggataaaacgcgaacgccaagccgatttcgacctgcagaaagctctcgaggaggaatacaagaagggacagaccgtctctcaggtcgccgttgaactcccggacaagatcccaccgaatcggtagtaatctatcgacttttgcacaccgcagcgcattgcagtcggcagagcaggaggcaactttcagcgatacatgacatctgggccctactggaattattgcatatatcaaattccagacgatgtttttatttgacctcccgtctactagcaggaatacaagtcagcccataggctgaggcttattaattcaggtcgaatatcccaccgagagaactcggacacagcgctgctgcaagctcattccttcgctttcgagggaaatcagatcgacatctagacatggaaacgactatctccatgtcggtcaccttactgcgtcgaccgaagcgtagatctgaagcttctatccaacgatttgattctcgagctgtatcatacatgtgttcatataatcatgtacatatactactgtaacaataacataatgacagaaaccttctcacgtaaccctcatctctttgcttgggcttcagcaatgacacaacagccattaataagaccactgcccaaccactaaacacaaacaggctgcttcatatccggcgtagccttatacgagatccgtcccgcaggtagaaagaacagcgcaacaagcgcacccttcctaaccctaggataatgatgcgtcccgggtcccggactcgtccacccagctccctgccatccactcataccctccaactccgccgtatcatcaacctgaacaacacaattaatctccccatacggatgcgcatggtactgtcccgagaactcctcctgagaatccatatacaccgtcgtaatactaaagaacctattctcggcagttggtaatgcgattttaccccggcggtacatacggccgttgagctccgtctcggcgacccagccttcttttagaccttggaggactagggagcagaagtcttcgtagtatgggttgcctcgtccgtaggtggtgtttagtcgggtttctaggtctttgcctggtgttctagtggtgatgtcttagctggaaactcgtggaggagagaacagaatggtcggtttggacttacaggtcttcaatctctgcgaaaaattcacgacagcggtcgactagtttctgtgccgtgggccatttggagaggtctagaatcgcggcttggcctcctgctcgtttgtcctggggtccgtccatttgcgatgtgcgatttgatatttaaaaaagtgttgttaatgggagattttgtaatagcgaaaatcggacttgatggtctgacttgagcttgagtagggggtttcgcagtttatacacaattgcgaatactaaggtaggtaatgcaaagacctaaagtttgatgaaccatctcttccctataagctacaaaattgtttaaccattgcattcttatatacaaaagccggggaagataattagacccgccaacaaaccctccaacgacgctcccgagttctcatcccgaagacaccactgcccttacctccgcaagcgccccgcatctctagcgagtctcattgcggtcatatacgtgccccgaaagagaaacatagtaaaattagagttgaattctattaagggtgcatgaagcttctgtagctgattgactgatcgataccggatgcagtagcttaatgcggtgttacggtggtgtccaaatttccccgggttttcgcgtcggcatgaagcttgatgtgcgcgaatggcgagagagcttttacaacgacgccaatgacttattgaagaatatgctcttcactgccagcacttttgcagaaggattatcaaattagacagtatttttgtaagctatccatcatccgtcatatgtcatcttcgtcatgattctcctctcatccgcacaaatgggtatcatgccgtaagcacgccgtatatgccaacacatccgcttcccttcgcatcattgccgtcaactctattctaagcctgctttccatgctcaacatgagaaatagcaatttggtccctatagcgaagcagcgcatcgccctcaacctcttcggcaaagacatcgacatcggtagaagcgaactttcgagcgctaatgcctttctcgaatagcagatctaactcagcaaaggttcgtcctcttggctccgggattctgaagtacgcgtagatcaggcagaggaagcaagaaccagcccagaagaatccagcatagttgccccaatcccatttagtgggattgagcatgtagggcgttagaacaccacagatgataccgacgatgttgctacgtaatgttagatgaagacagtaaacgctagaacaaggacacaacacttactagaatacacgccctagtacgacagtcttgatctgcaagcgacgagtggaaatctcagccacaagagaatagcacacggtgccaacggtgagctgatagatcaaggcccagacaagaaggatactgccggttgccaacgatgcggcatttcggtctggagggagacctaagaagccgaggaccagaagaatgaggaagagcccggcaagaccgtagacat

SEQ ID NO: 13185 - DNA, 348 bp, Muscodor strobelii
  misc_feature: SGI cDNA ID NO. 564310
  misc_feature: Encodes the peptide sequence at SEQ ID NO 13186
atgtcggcccagaactcgcagggaatccagacccttctcgatgccgagagagatgcctccaagatcgtccagaaggctcgcgaacaccgaaccaagcgagtacgagaggcccgtgacgaagccaagaaggagatagacgcctaccgccagtcgaaagaggaggaattcaaaaagttcgaatcagagcacacgcaaggcaacaagcaagccgaagacgaagccaacaaagaggccgacgccaagatcaaggagatccaggccgccggtaagaagacccagagcaaagtcgtcgacgacctgctcaaggccgtgctcgacgtcaagcccgtcgcccccaccgccgcatag

SEQ ID NO: 13186 - protein, 115 aa, Muscodor strobelii
  misc_feature: SGI Peptide ID NO. 564310
  misc_feature (4)..(108): Pfam Id: PF03179 Pfam Desc: Vacuolar (H+)-ATPase G subunit
  misc_feature (1)..(115): NCBI GI: 261355780 Blast Desc: vacuolar ATPase [Verticillium albo-atrum VaMs.102]
  misc_feature (1)..(112): NCBI GI: 154304833 Blast Desc: BC1G_09002 [Botryotinia fuckeliana B05.10] gi|150853864|gb|EDN29056.1| BC1G_09002 [Botryotinia fuckeliana B05.10]
  misc_feature (2)..(115): NCBI GI: 256726244 Blast Desc: NECHADRAFT_43033 [Nectria haematococca mpVI 77-13-4]
  misc_feature (1)..(112): NCBI GI: 119177731 Blast Desc: CIMG_07768 [Coccidioides immitis RS] gi|240107585|gb|EER25764.1| vacuolar ATP synthase subunit G, [Coccidioides posadasii C735 delta SOWgp]
  misc_feature (1)..(115): NCBI GI: 145602903 Blast Desc: vacuolar ATPase [Magnaporthe grisea 70-15] gi|145011260|gb|EDJ95916.1| vacuolar ATPase [Magnaporthe grisea 70-15]
  misc_feature (1)..(112): NCBI GI: 56480691 Blast Desc: vacuolar ATPase [Trichophyton rubrum]
  misc_feature (1)..(109): NCBI GI: 238498886 Blast Desc: vacuolar ATP synthase subunit G, [Aspergillus flavus NRRL3357] gi|220693952|gb|EED50297.1| vacuolar ATP synthase subunit G, [Aspergillus flavus NRRL3357]
  misc_feature (1)..(112): NCBI GI: 154279538 Blast Desc: [Ajellomyces capsulatus NAm1] gi|150412525|gb|EDN07912.1| [Ajellomyces capsulatus NAm1]
  misc_feature (1)..(112): NCBI GI: 226280894 Blast Desc: PAAG_06878 [Paracoccidioides brasiliensis Pb01]
  misc_feature (1)..(113): NCBI GI: 46111559 Blast Desc: FG02661.1 [Gibberella zeae PH-1]
MSAQNSQGIQTLLDAERDASKIVQKAREHRTKRVREARDEAKKEIDAYRQSKEEEFKKFESEHTQGNKQAEDEANKEADAKIKEIQAAGKKTQSKVVDDLLKAVLDVKPVAPTAA

SEQ ID NO: 13187 - DNA, 7033 bp, Muscodor strobelii; identical to SEQ ID NO: 13178
  misc_feature: SGI EST ID NO. CUFF.31884.0
  misc_feature: Variant of the nucleotide sequence at SEQ ID NO 13185

SEQ ID NO: 13188 - DNA, 1779 bp, Muscodor strobelii
  misc_feature: SGI cDNA ID NO. 564311
  misc_feature: Encodes the peptide sequence at SEQ ID NO 13189
atgtctacaagcattgacgacctgttcaaggcgtcgagcgccagtaacaagcgcaagcttgcgcctccacgagatcccaatgagatctacaaatcgccccgcttaaacggcagcggccactctggccgacatgcacgcgtcgaagacgaaacacccaccgcagacgactccgacacggaagctgggccctccctcccactagacgacgaagaaggtgactacggcccctccataccagaagacgacgaagaaggcgggcgcttcttcggcggcggcgtgagcacgcgcgaagccgaattcctagactacgtcgaagacatcgcaccggacctcgcacccgagaaattcgacgtcgcatggctccgccgaacagccctcagcttcgaaaagaagatcagcaagaacgccacgcagcgggcgaaattcgaggacgaacccgcgaagttcattgcctccgaggcggagctcgacgctgagatcaaggggctgagtattctcgctgagcaccctgagctctatggggagttcgctaggataggatgtgtggggtctctggttggacttttggcgcatgagaatacggatattgctattgatgctattgagattattgatgagttgactgatgaggatgttacggccgaggaggatatgtgggataagtttgttgaggcactgtttgaggctgatttactcagtcttctggtctcgaatctcgagaggttggatgaggggaaggaggaggatagagatggagtttatcgagcactaggcgtgatcgagaatctctgcggacgcacgacgatagcggagcgcattgcggagcaggatgggttgcttaagtggttattgaagaggatacaagtgaaagaaaaagaggtggggcagaatacgcagtatgccgcggagatcatcgcgattcttgtccagacttcgcagaagaacaggaggaagttcgcgcagctcgacgccgcggatatcatactgcagctcgtcgcaccatatcgaaaacgagaccccgagaaaggcggagaggaggaagagtatgttgagaatctcttcgaggcgctgacgtgcatcaccgacgaaccggagggaaaagcgaagttcgtggaggctgagggcgtggagttatgtctcatcatgctgaaagaagggaaactgagcaaggcggcttcattacgactgctcgatcatgcggccggtggttcttcaggggcagaagtgtgccagaagatcgttgaggctggtggtttgaagaacatatttacgctcttcatgaagaagagtacggatcatcggacggctgaacatctgattgggatatctgcttcgatgctgcggttattgcctgcagactcgccagaacggatacggttactcgccaaattcgtcgagaaggactacgaaaagacggagaaactcgtcaagttacggcgtgaactgtctacgagattaggcttcgtcgaagatgccatccgcgtcgaacaggcacaaatgtctgctgaagaaaggagcgatatggcagatgagtggttctcgcggcgtctggatgccgggctcttctccctccaaaccctggacgtagttctcgcatggcttgtagccgaggacggaggggccaagaggacgatacagaaactacttgcagaccgtgacgagtctctagacgtcatcaaagggacgatacaggagcagctcgagggcatagacacggaagatgcagacggcaaggatacgaaagagatgctgtctacgctggtcgagttcctgcagtaa

SEQ ID NO: 13189 - protein, 592 aa, Muscodor strobelii
  misc_feature: SGI Peptide ID NO. 564311
  misc_feature (93)..(201): Pfam Id: PF08216 Pfam Desc: Eukaryotic domain of function (DUF1716)
  misc_feature (95)..(201): Pfam Id: PF08216 Pfam Desc: Eukaryotic domain of function (DUF1716)
  misc_feature (3)..(592): NCBI GI: 116201241 Blast Desc: CHGG_08505 [Chaetomium globosum CBS 148.51] gi|88177023|gb|EAQ84491.1| CHGG_08505 [Chaetomium globosum CBS 148.51]
  misc_feature (3)..(591): NCBI GI: 156065873 Blast Desc: SS1G_00947 [Sclerotinia sclerotiorum 1980] gi|154691806|gb|EDN91544.1| SS1G_00947 [Sclerotinia sclerotiorum 1980]
  misc_feature (3)..(591): NCBI GI: 154301725 Blast Desc: BC1G_10014 [Botryotinia fuckeliana B05.10] gi|150855676|gb|EDN30868.1| BC1G_10014 [Botryotinia fuckeliana B05.10]
  misc_feature (4)..(592): NCBI GI: 225680526 Blast Desc: conserved [Paracoccidioides brasiliensis Pb03]
  misc_feature (3)..(532): NCBI GI: 256725839 Blast Desc: [Nectria haematococca mpVI 77-13-4]
  misc_feature (3)..(533): NCBI GI: 46111561 Blast Desc: FG02662.1 [Gibberella zeae PH-1]
  misc_feature (3)..(591): NCBI GI: 255955081 Blast Desc: Pc21g12660 [Penicillium chrysogenum Wisconsin 54-1255] gi|211590004|emb|CAP96163.1| Pc21g12660 [Penicillium chrysogenum Wisconsin 54-1255]
  misc_feature (4)..(591): NCBI GI: 226280869 Blast Desc: DNA-directed RNA polymerase II 138 kDa polypeptide [Paracoccidioides brasiliensis Pb01]
  misc_feature (4)..(591): NCBI GI: 261196846 Blast Desc: DUF1716 domain-containing protein [Ajellomyces dermatitidis SLH14081] gi|239596071|gb|EEQ78652.1| DUF1716 domain-containing protein [Ajellomyces dermatitidis SLH14081]
  misc_feature (4)..(591): NCBI GI: 239609655 Blast Desc: DUF1716 domain-containing protein [Ajellomyces dermatitidis ER-3]
MSTSIDDLFKASSASNKRKLAPPRDPNEIYKSPRLNGSGHSGRHARVEDETPTADDSDTEAGPSLPLDDEEGDYGPSIPEDDEEGGRFFGGGVSTREAEFLDYVEDIAPDLAPEKFDVAWLRRTALSFEKKISKNATQRAKFEDEPAKFIASEAELDAEIKGLSILAEHPELYGEFARIGCVGSLVGLLAHENTDIAIDAIEIIDELTDEDVTAEEDMWDKFVEALFEADLLSLLVSNLERLDEGKEEDRDGVYRALGVIENLCGRTTIAERIAEQDGLLKWLLKRIQVKEKEVGQNTQYAAEIIAILVQTSQKNRRKFAQLDAADIILQLVAPYRKRDPEKGGEEEEYVENLFEALTCITDEPEGKAKFVEAEGVELCLIMLKEGKLSKAASLRLLDHAAGGSSGAEVCQKIVEAGGLKNIFTLFMKKSTDHRTAEHLIGISASMLRLLPADSPERIRLLAKFVEKDYEKTEKLVKLRRELSTRLGFVEDAIRVEQAQMSAEERSDMADEWFSRRLDAGLFSLQTLDVVLAWLVAEDGGAKRTIQKLLADRDESLDVIKGTIQEQLEGIDTEDADGKDTKEMLSTLVEFLQ

SEQ ID NO: 13190 - DNA, 6204 bp, Muscodor strobelii; identical to SEQ ID NO: 13184
  misc_feature: SGI EST ID NO. CUFF.31885.1
  misc_feature: Variant of the nucleotide sequence at SEQ ID NO 13188

SEQ ID NO: 13191 - DNA, 780 bp, Muscodor strobelii
  misc_feature: SGI cDNA ID NO. 564312
  misc_feature: Encodes the peptide sequence at SEQ ID NO 13192
atgcctcctacactaattctcatacgacatggtcaggcactccataacgtaccagactccaatggcaaaaaactctatactctccatgatccagcccttaccgagcatggactagttgattgcgctcaaggtttacgggaaactattaaaaatgaacctttggctcaagaagcagagcttataatcacatcgcctatgctccgcacgtgcgagaccactcttgctgcactcgactggctcattgaaaccggtgtaaaggtagttgccgatggtgactggcaagagaattccgagaagccatccgatacaggtagcgacgtcaatcaagtcaaagctaagatatctcacatcaaacacgcctcatgcatcgacttttccaatgtggatccggcttggaccgaaaaaacaacagcaaacagtccatatcacttcaccaagacggccatcctcaaacgtggtcagagagtcctagagaagttatattcgcgaaaggaaggcgtcatcatcgtcgtatcccattcaggcttcatgaggctcggcgtgacaggcgctcagtaccgtaatgccgattatcgcattttcacctttgcagatagggatgatgccgatccagaggccccgtaccggctggtgcaagacgaaaagacgttggcttcaactgatgagacgaagcatctgacattagaagaacagaagagtggaggaaggggcatcagtccagcggcgccggttatattcgggtttggattgcttgatcctgaggaggagccagcgaactga

SEQ ID NO: 13192 - protein, 259 aa, Muscodor strobelii
  misc_feature: SGI Peptide ID NO. 564312
  misc_feature (4)..(180): Pfam Id: PF00300 Pfam Desc: Phosphoglycerate mutase family
  misc_feature (1)..(256): NCBI GI: 256725838 Blast Desc: NECHADRAFT_43252 [Nectria haematococca mpVI 77-13-4]
  misc_feature (1)..(250): NCBI GI: 145602901 Blast Desc: MGG_04718 [Magnaporthe grisea 70-15] gi|145011258|gb|EDJ95914.1| MGG_04718 [Magnaporthe grisea 70-15]
  misc_feature (1)..(259): NCBI GI: 261355782 Blast Desc: conserved [Verticillium albo-atrum VaMs.102]
  misc_feature (1)..(252): NCBI GI: 154299071 Blast Desc: BC1G_11848 [Botryotinia fuckeliana B05.10] gi|150857551|gb|EDN32743.1| BC1G_11848 [Botryotinia fuckeliana B05.10]
  misc_feature (26)..(258): NCBI GI: 171677666 Blast Desc: protein product [Podospora anserina] gi|170936901|emb|CAP61560.1| protein product [Podospora anserina]
  misc_feature (1)..(258): NCBI GI: 189205431 Blast Desc: phosphoglycerate mutase [Pyrenophora tritici-repentis Pt-1C-BFP] gi|187975143|gb|EDU41769.1| phosphoglycerate mutase [Pyrenophora tritici-repentis Pt-1C-BFP]
  misc_feature (66)..(247): NCBI GI: 169602126 Blast Desc: SNOG_03941 [Phaeosphaeria nodorum SN15] gi|160706089|gb|EAT89146.2| SNOG_03941 [Phaeosphaeria nodorum SN15]
  misc_feature (38)..(252): NCBI GI: 156058139 Blast Desc: SS1G_04801 [Sclerotinia sclerotiorum 1980] gi|154702586|gb|EDO02325.1| SS1G_04801 [Sclerotinia sclerotiorum 1980]
  misc_feature (1)..(225): NCBI GI: 212531965 Blast Desc: conserved [Penicillium marneffei ATCC 18224] gi|210071503|gb|EEA25592.1| conserved [Penicillium marneffei ATCC 18224]
  misc_feature (1)..(250): NCBI GI: 168830922 Blast Desc: CtnF [Monascus aurantiacus]
  misc_feature (4)..(179): SWISSPROT Homolog: EC 5.4.2.1 Phosphoglycerate mutase
MPPTLILIRHGQALHNVPDSNGKKLYTLHDPALTEHGLVDCAQGLRETIKNEPLAQEAELIITSPMLRTCETTLAALDWLIETGVKVVADGDWQENSEKPSDTGSDVNQVKAKISHIKHASCIDFSNVDPAWTEKTTANSPYHFTKTAILKRGQRVLEKLYSRKEGVIIVVSHSGFMRLGVTGAQYRNADYRIFTFADRDDADPEAPYRLVQDEKTLASTDETKHLTLEEQKSGGRGISPAAPVIFGFGLLDPEEEPAN

SEQ ID NO: 13193 - DNA, 1090 bp, Muscodor strobelii
  misc_feature: SGI EST ID NO. CUFF.31464.0
  misc_feature: Variant of the nucleotide sequence at SEQ ID NO 13191
ttccttttgagcattcatgtctgttcagtcgttatttctccttgattctagctttatagaatttccttatatatagaactgctctgtatagactccagaattttgagcttcattactcattcgctatttgaaatacactttttcttcaactccagcatagaatatcgatccacatagacgaacgactctcaatatgcctcctacactaattctcatacgacatggtcaggcactccataacgtaccagactccaatggcaaaaaactctatactctccatgatccagcccttaccgagcatggactagttgattgcgctcaaggtttacgggaaactattaaaaatgaacctttggctcaagaagcagagcttataatcacatcgcctatgctccgcacgtgcgagaccactcttgctgcactcgactggctcattgaaaccggtgtaaaggtagttgccgatggtgactggcaagagaattccgagaagccatccgatacaggtagcgacgtcaatcaagtcaaagctaagatatctcacatcaaacacgcctcatgcatcgacttttccaatgtggatccggcttggaccgaaaaaacaacagcaaacagtccatatcacttcaccaagacggccatcctcaaacgtggtcagagagtcctagagaagttatattcgcgaaaggaaggcgtcatcatcgtcgtatcccattcaggcttcatgaggctcggcgtgacaggcgctcagtaccgtaatgccgattatcgcattttcacctttgcagatagggatgatgccgatccagaggccccgtaccggctggtgcaagacgaaaagacgttggcttcaactgatgagacgaagcatctgacattagaagaacagaagagtggaggaaggggcatcagtccagcggcgccggttatattcgggtttggattgcttgatcctgaggaggagccagcgaactgaggttaggagggtgtagactatagacatagatacttagatattagacaacgtagactcgtttctcatttcttgttccatgcttatgtgatggcatatactgttgattacgtgttttta

SEQ ID NO: 13194 - DNA, 1359 bp, Muscodor strobelii
  misc_feature: SGI cDNA ID NO. 564313
  misc_feature: Reduced expression when VOC is produced
  misc_feature: Encodes the peptide sequence at SEQ ID NO 13195
atgcattcctcactcgtttccctgctttcgctcacaacagccgttctgggcgcgttaaccgttgacttcaacgataatgattccatcaaagccgccgcaaagctcgtagccgaagacttgttgaacgattactaccccccatggaaaggcacgctgggttggacgctgggcattcttcccggaccaccgccagacggtgactactactggtggcaaggtggtgcgatgtgggggactcttctcgattactaccgctggaccggcgatgacacattcaacaacgtcacttatcaagctttacttgcccaggctggccccggacatgatttcaagaacaaaaattggacggcttcgctcggaaacgatgaccaggctttctggggcatgtcagctatgatcgcagcagagatcgctttcgaggaccctccggctgaccagccgcaatggcttgccttggcccagggcgtgttcaacgatcagacatccgatcagcttcgcgatggtggctgcggtattggtctgcgatggcagatctctccctacaacaatggtttcaactacaagaacacaattgccaacgcttgtttctttaacatcggcgcccgactcgctcgctacaccggtaacaatacgtatgagcagtgggccaacgagacctacagctggctcctagacgtcggctatgtcacgtccaactacagcgtttacgatggtggatatatcgaggataactgcacacacccgactcaacagcagttctcatacaacactggcactctgcttcaaggagcagctgtcctctacgactacacaaaatcggattactggctgcaggaggttaaaaaactcatcaccgctatcgaggcgcgcttcttcaagaatggtatcgggcacgaacctgaatgcgaagactcccagacctgcacttccgacatgacgacatacaagggcttcgtagcacgctggatggcgtataccgcgaagcttgttcccgacacggcagacgacattatggcattgctcaagacctccgcagaagccgccgtcaagacctgcactggtggagacaacggtagagcatgcgggttcgcctggtccgagggcaagttcgacgaggctggtgcaggccagcagatggacgtcatctccgctttgaccgctctactggcccttgatgcgccagggcccgtgacgaattctacaggtggtaccagtaagggtgatcccaacgctggtgatagtaacacggacacggaaacattggctcctatcaccactggtgataaggccggcgcggctattctgacgattttggctatcgttgtggcttccggctctctgtggtggatgattaagtaa

SEQ ID NO: 13195 - protein, 452 aa, Muscodor strobelii
  misc_feature: SGI Peptide ID NO. 564313
  misc_feature (20)..(401): Pfam Id: PF03663 Pfam Desc: Glycosyl hydrolase family 76
  misc_feature (29)..(450): NCBI GI: 164426438 Blast Desc: NCU04262 [Neurospora crassa OR74A] gi|157071335|gb|EAA32017.2| conserved [Neurospora crassa OR74A]
  misc_feature (29)..(450): NCBI GI: 16944622 Blast Desc: DFG5 protein [Neurospora crassa]
  misc_feature (2)..(450): NCBI GI: 171693745 Blast Desc: protein product [Podospora anserina] gi|170946821|emb|CAP73625.1| protein product [Podospora anserina]
  misc_feature (28)..(450): NCBI GI: 116205744 Blast Desc: CHGG_02165 [Chaetomium globosum CBS 148.51] gi|88182762|gb|EAQ90230.1| CHGG_02165 [Chaetomium globosum CBS 148.51]
  misc_feature (27)..(451): NCBI GI: 85093327 Blast Desc: NCU08127 [Neurospora crassa OR74A] gi|28921118|gb|EAA30434.1| conserved [Neurospora crassa OR74A]
  misc_feature (8)..(450): NCBI GI: 256729380 Blast Desc: glycoside hydrolase family 76 [Nectria haematococca mpVI 77-13-4]
  misc_feature (5)..(450): NCBI GI: 171678183 Blast Desc: protein product [Podospora anserina] gi|170937161|emb|CAP61818.1| protein product [Podospora anserina]
  misc_feature (1)..(451): NCBI GI: 145610715 Blast Desc: MGG_00951 [Magnaporthe grisea 70-15] gi|145018095|gb|EDK02374.1| MGG_00951 [Magnaporthe grisea 70-15]
  misc_feature (6)..(450): NCBI GI: 46137743 Blast Desc: FG10387.1 [Gibberella zeae PH-1]
  misc_feature (8)..(450): NCBI GI: 46117484 Blast Desc: FG04584.1 [Gibberella zeae PH-1]
  misc_feature (22)..(429): SWISSPROT Homolog: EC 3.2.1.101 Mannan endo-1,6-alpha-mannosidase
  misc_feature: Useful for introducing or modulating the production of volatile compounds
MHSSLVSLLSLTTAVLGALTVDFNDNDSIKAAAKLVAEDLLNDYYPPWKGTLGWTLGILPGPPPDGDYYWWQGGAMWGTLLDYYRWTGDDTFNNVTYQALLAQAGPGHDFKNKNWTASLGNDDQAFWGMSAMIAAEIAFEDPPADQPQWLALAQGVFNDQTSDQLRDGGCGIGLRWQISPYNNGFNYKNTIANACFFNIGARLARYTGNNTYEQWANETYSWLLDVGYVTSNYSVYDGGYIEDNCTHPTQQQFSYNTGTLLQGAAVLYDYTKSDYWLQEVKKLITAIEARFFKNGIGHEPECEDSQTCTSDMTTYKGFVARWMAYTAKLVPDTADDIMALLKTSAEAAVKTCTGGDNGRACGFAWSEGKFDEAGAGQQMDVISALTALLALDAPGPVTNSTGGTSKGDPNAGDSNTDTETLAPITTGDKAGAAILTILAIVVASGSLWWMIK

SEQ ID NO: 13196 - DNA, 2714 bp, Muscodor strobelii
  misc_feature: SGI EST ID NO. CUFF.32001.0
  misc_feature: Variant of the nucleotide sequence at SEQ ID NO 13194
ccgttctcagcgtgcgcagtggccttccagtccctttaatgatagcataacctacactcaactgtatcatttcacacacggaagcaaggcgaggagacgctgcaactcctgatttccgacgtcactcagcgagacagacgtcaaccgcgacattccacgcgccctctcgttatcctctctcgctcactacttggatggttctggatgggtttggatgctcattaattcaaaatttgttgctacatgaaccgtcgcaatgcattcctcactcgtttccctgctttcgctcacaacagccgttctgggcgcgttaaccgttgacttcaacgataatgattccatcaaagccgccgcaaagctcgtagccgaagacttgttgaacgattactaccccccatggaaaggcacgctgggttggacgctgggcattcttcccggaccaccgccagacggtgactactactggttcgcagcaccgtgcgtttcgaaagccgttctttcatattgaccaacatctcaggtggcaaggtggtgcgatgtgggggactcttctcgattactaccgctggaccggcgatgacacattcaacaacgtcacttatcaagctttacttgcccaggctggccccggacatgatttcaagaacaaaaattggacggcttcgctcggaaacgatgaccaggctttctggggcatgtcagctatgatcgcagcagagatcgctttcgaggaccctccggctgaccagccgcaatggcttgccttggcccagggcgtgttcaacgatcagacatccgatcagcttcgcgatggtggctgcggtattggtctgcgatggcagatctctccctacaacaatggtttcaactacaagaacacaattgccaacgcttgtttctttaacatcggcgcccgactcgctcgctacaccggtaacaatacgtatgagcagtgggccaacgagacctacagctggctcctagacgtcggctatgtcacgtccaactacagcgtttacgatggtggatatatcgaggataactgcacacacccgactcaacagcagttctcatacaacactggcactctgcttcaaggagcagctgtcctctacgactacacaaaatcggattactggctgcaggaggttaaaaaactcatcaccgctatcgaggcgcgcttcttcaagaatggtatcgggcacgaacctgaatgcgaagactcccagacctgcacttccgacatgacgacatacaagggcttcgtagcacgctggatggcgtataccgcgaagcttgttcccgacacggcagacgacattatggcattgctcaagacctccgcagaagccgccgtcaagacctgcactggtggagacaacggtagagcatgcgggttcgcctggtccgagggcaagttcgacgaggctggtgcaggccagcagatggacgtcatctccgctttgaccgctctactggcccttgatgcgccagggcccgtgacgaattctacaggtggtaccagtaagggtgatcccaacgctggtgatagtaacacggacacggaaacattggctcctatcaccactggtgataaggccggcgcggctattctgacgattttggctatcgttgtggcttccggctctctgtggtggatgattaagtaaggtgttgtcaatacatcaagaagctgagcccttcttttaggtttgtatgtatattttggcatgtaatgtcaagcgtgaaaagaaatcttgttgtggttttctcaagttttatatcaggcatatcatgggcgggtcaaggttttatgtcttctcttttgcaagagaaatgcacttgcttcatattttaatatgttcttcgatgttgcatctatgttatgtctatgatacctaaatattgcgattacgattgaagcctagttcatccttgaaactattccagtgcgagctcgtacagcgtcttataagaacgcagcgcctgccatcacgccaacagcaacacccaaggctcctctcataccagtcggtagtggagcagcacccgtcgatacactgctcgaagacgcaccagagcttgttgacgctgtcaatgtttcaacggtaccgctcaaaacagtggtcgacgcagatgtcacatcaggcgcagaagtgatcgtggctgaagactcggtcattgccgccgaagaagatgacgtagaagtagcaggagccgcagtagaagagccgaaaccaggtaagtaactggggctgtatgtggcagttccggaatagtctgcgcaaccgggaaccgtcgtctttggtggtgccattccaccaccacagtcgagaaatgcgcagatctcgcctgtgtctggcacgtaccagattatactcgcgccgccgtaggctacggtggatgaggatgtgcagccttcgagatcggtttttgctgctgctagtgcagcgagggagagtacgaccgaagcgatgaagtgcattttaagcgtatgtctgttagagtaccaagtgttttatgttgtggttattagatattaagcgttattttatgtcgattatttttatgtcgttgttctctgcccggtgagtgagtgacaaagcagcaagtgcaaacgagtgactgagagctccttcaagtggcgaattaagatgcgaaaagaagcgaacccccgaatgaacaaagggttcctcttataaaggggcgttgag

SEQ ID NO: 13197 - DNA, 516 bp, Muscodor strobelii
  misc_feature: SGI cDNA ID NO. 564314
  misc_feature: Encodes the peptide sequence at SEQ ID NO 13198
atgcacttcatcgcttcggtcgtactctccctcgctgcactagcagcagcaaaaaccgatctcgaaggctgcacatcctcatccaccgtagcctacggcggcgcgagtataatctggtacgtgccagacacaggcgagatctgcgcatttctcgactgtggtggtggaatggcaccaccaaagacgacggttcccggttgcgcagactattccggaactgccacatacagccccagttacttacctggtttcggctcttctactgcggctcctgctacttctacgtcatcttcttcggcggcaatgaccgagtcttcagccacgatcacttctgcgcctgatgtgacatctgcgtcgaccactgttttgagcggtaccgttgaaacattgacagcgtcaacaagctctggtgcgtcttcgagcagtgtatcgacgggtgctgctccactaccgactggtatgagaggagccttgggtgttgctgttggcgtgatggcaggcgctgcgttcttataa

SEQ ID NO: 13198 - protein, 171 aa, Muscodor strobelii
  misc_feature: SGI Peptide ID NO. 564314
  misc_feature (7)..(120): NCBI GI: 238505816 Blast Desc: siderophore biosynthesis enzyme, [Aspergillus flavus NRRL3357] gi|220690225|gb|EED46575.1| siderophore biosynthesis enzyme, [Aspergillus flavus NRRL3357]
  misc_feature (7)..(120): NCBI GI: 169780126 Blast Desc: [Aspergillus oryzae RIB40] gi|83773267|dbj|BAE63394.1| protein product [Aspergillus oryzae]
  misc_feature (11)..(152): NCBI GI: 115391493 Blast Desc: [Aspergillus terreus NIH2624] gi|114194175|gb|EAU35875.1| [Aspergillus terreus NIH2624]
  misc_feature (1)..(128): NCBI GI: 146323229 Blast Desc: cell surface protein [Aspergillus fumigatus Af293] gi|129556529|gb|EAL86619.2| cell surface protein, [Aspergillus fumigatus Af293] gi|159128200|gb|EDP53315.1| cell surface A1163]
  misc_feature (17)..(169): NCBI GI: 258575179 Blast Desc: [Uncinocarpus reesii 1704] gi|237902037|gb|EEP76438.1| [Uncinocarpus reesii 1704]
  misc_feature (18)..(118): NCBI GI: 256727137 Blast Desc: NECHADRAFT_99375 [Nectria haematococca mpVI 77-13-4]
  misc_feature (1)..(140): NCBI GI: 261361476 Blast Desc: conserved [Verticillium albo-atrum VaMs.102]
  misc_feature (1)..(128): NCBI GI: 119474425 Blast Desc: cell surface protein, [Neosartorya fischeri NRRL 181] gi|119407241|gb|EAW17191.1| cell surface protein, [Neosartorya fischeri NRRL 181]
  misc_feature (1)..(85): NCBI GI: 121711964 Blast Desc: cell surface protein, [Aspergillus clavatus NRRL 1] gi|119401749|gb|EAW12171.1| cell surface protein, [Aspergillus clavatus NRRL 1]
  misc_feature (10)..(111): NCBI GI: 255946834 Blast Desc: Pc22g01400 [Penicillium chrysogenum Wisconsin 54-1255] gi|211591201|emb|CAP97428.1| Pc22g01400 [Penicillium chrysogenum Wisconsin 54-1255]
MHFIASVVLSLAALAAAKTDLEGCTSSSTVAYGGASIIWYVPDTGEICAFLDCGGGMAPPKTTVPGCADYSGTATYSPSYLPGFGSSTAAPATSTSSSSAAMTESSATITSAPDVTSASTTVLSGTVETLTASTSSGASSSSVSTGAAPLPTGMRGALGVAVGVMAGAAFL

SEQ ID NO: 13199 - DNA, 870 bp, Muscodor strobelii
  misc_feature: SGI cDNA ID NO. 564315
  misc_feature: Encodes the peptide sequence at SEQ ID NO 13200
atgtcttcgaaacttccaaattattaccctgaaggatgggatcatgagcgcttgctcaacgttggagcaacgaatgaagcggacaaggtgacacccgaggaatgggaaacatttcgagagggcttaagagccgacaaaggtgaacaaggcttcgaagagttctttgacgaaatgtttaatcgagagaagatcgctaaaggtattaagatgcccgtcagtgaaccgcccttcatggagatcatgcggcttcgtgagcagcgcataggttcaagtgcccagtgggatccatggggcttcgtcgtcttcaaaagccccaaaattcaagatgatgcgaggtggcaagctggcagacaacgttttgacgagatcttgaaacattatattgataactatgccgactatcctgggattgatgagtgcgtatcgaggatgaagttcaagtggattgaggatacaggtgatgctgagggaatcatcgcgtctattgctaaagcccgcgcaacgctagctttacctcctggtctagaccactctttgtgtctgtatatcactccaaagtcactggactcgatattagaatctccagttccctggtcagcgaagcgaaaattcagaaagcagatcccgttcgtcgtcgcagtctctcaagtagctgctgaagagtcgaaccccacagccatcgaagaagactgggctggagcagggtggagaggatggttcaatgtggctgttgagtcgttgcttgattcctttttcagcactattgtgaacgattcgaggtctcctttcgaacttggtggccgtgtctctggcgaggatgtctactgtgatcatacgagatggggtatacataaggccagtatcacatag

SEQ ID NO: 13200 - protein, 289 aa, Muscodor strobelii
  misc_feature: SGI Peptide ID NO. 564315
  misc_feature (7)..(284): NCBI GI: 121711559 Blast Desc: ACLA_007280 [Aspergillus clavatus NRRL 1] gi|119401546|gb|EAW11969.1| ACLA_007280 [Aspergillus clavatus NRRL 1]
  misc_feature (6)..(273): NCBI GI: 212544768 Blast Desc: PMAA_003860 [Penicillium marneffei ATCC 18224] gi|210065507|gb|EEA19601.1| PMAA_003860 [Penicillium marneffei ATCC 18224]
  misc_feature (6)..(273): NCBI GI: 242813418 Blast Desc: conserved [Talaromyces stipitatus ATCC 10500] gi|218714503|gb|EED13926.1| conserved [Talaromyces stipitatus ATCC 10500]
  misc_feature (171)..(283): NCBI GI: 242805724 Blast Desc: TSTA_041160 [Talaromyces stipitatus ATCC 10500] gi|218715216|gb|EED14638.1| TSTA_041160 [Talaromyces stipitatus ATCC 10500]
  misc_feature (7)..(271): NCBI GI: 238846000 Blast Desc: conserved [Microsporum canis CBS 113480]
  misc_feature (7)..(277): NCBI GI: 39968187 Blast Desc: MGG_02186 [Magnaporthe grisea 70-15] gi|145013067|gb|EDJ97708.1| MGG_02186 [Magnaporthe grisea 70-15]
MSSKLPNYYPEGWDHERLLNVGATNEADKVTPEEWETFREGLRADKGEQGFEEFFDEMFNREKIAKGIKMPVSEPPFMEIMRLREQRIGSSAQWDPWGFVVFKSPKIQDDARWQAGRQRFDEILKHYIDNYADYPGIDECVSRMKFKWIEDTGDAEGIIASIAKARATLALPPGLDHSLCLYITPKSLDSILESPVPWSAKRKFRKQIPFVVAVSQVAAEESNPTAIEEDWAGAGWRGWFNVAVESLLDSFFSTIVNDSRSPFELGGRVSGEDVYCDHTRWGIHKASIT

SEQ ID NO: 13201 - DNA, 1068 bp, Muscodor strobelii
  misc_feature: SGI EST ID NO. CUFF.32034.1
  misc_feature: Variant of the nucleotide sequence at SEQ ID NO 13199
atgcccgtcagtgaaccgcccttcatggagatcatgcggcttcgtgagcagcgcataggttcaagtgcccagtgggatccatggggcttcgtcgtcttcaaaagccccaaaattcaagatgatgcgaggtggcaagctggcagacaacgttttgacgagatcttgaaacattatattgataactatgccgactatcctgggattgatgagtgcgtatcgaggatgaagttcaagtggattgaggatacaggtgatgctgagggaatcatcgcgtctattgctaaagcccgcgcaacgctagctttacctcctggtctagaccactctttgtgtctgtatatcactccaaagtcactggactcgatattagaatctccagttccctggtcagcgaagcgaaaattcagaaagcagatcccgttcgtcgtcgcagtctctcaagtagctgctgaagagtcgaaccccacagccatcgaagaagactgggctggagcagggtggagaggatggttcaatgtggctgttgagtcgttgcttgattcctttttcagcactattgtgaacgattcgaggtctcctttcgaacttggtggccgtgtctctggcgaggatgtctactgtgatcatacgagatggggtatacataaggccagtatcacataggacgaaagtgaacaagacgaatcacctgaagccttgtttgtatcggtttctttcacatgtcccctttatctatttccaggtcccttgtatccctgttgatcacctgaaagtgtcgttggcgacgaagagctattgtatggaggcgggctgtcgtctgggcctgattcgtcttcaacaagatagtatcgatagtctgagccgcctctgtatcgcgtggcacgaagttcattgcccattccgtcgtcgcggactggctgcgcttcgatgatatcgtgttcaagatgtcgggttcgactgagtctgaaccgatgtccaaatgggcatggaattccacaccaaatacctttggacacccattccattccaatgccccataatgtaaccagaggaacccatgccgccagg

SEQ ID NO: 13202 - DNA, 843 bp, Muscodor strobelii
  misc_feature: SGI cDNA ID NO. 564316
  misc_feature: Encodes the peptide sequence at SEQ ID NO 13203
atgcagatcaacaacatcatcgcgtcgttcctgctggcgactgctgtctccgcgaaggggcacaacaaggacaaccttaatagcaccactctcgcaactgcctcagtcaagactcagtgcgcagctatcgatgagatgagcaagatcattgatctggcaaataacgacactctactagagaagcataccaagaacaatgagaccaagatcgctaagatcaaggagaaagcggcgaacctcacctccgagcttacgacgctgacgtccaatgcgactctcatgggagagtgcaatgtcatcactgcacatcatgaagccaagcaggcatgcggtcaaatggaagacttagcaaaggacattgccaccgcagcaaatgacacaaagctagaggacaaattcgatggaaatgccacgaagatctccgaattcaaggcgaaggcggagagcaaagctaccaagctcgctgatttgtcaggcaactcaaccctaactacattctgtgctgtacaggcggacaagtcgacatgcaagagcatttctaagatgcaaaaggaaattgcaaaggctatgaacaccaccagacttaatgagaagtttgatggaaacgagactaaaatcgccaagcaacaggcgaaggcagccaaactacagacgaagctcgatgcactcatggcgaacacgacactgttggatacttgttcatcaatgaacatctcagttgcttccgcatccacttcctcgaacggcacaactacggaggatgcaaattctcctgctagtagactacagacggcttcctcggccatgcttgtgctactaggtagtgccatgtttatgctctga

SEQ ID NO: 13203 - protein, 280 aa, Muscodor strobelii
  misc_feature: SGI Peptide ID NO. 564316
  misc_feature (1)..(257): NCBI GI: 156059744 Blast Desc: SS1G_03885 [Sclerotinia sclerotiorum 1980] gi|154701671|gb|EDO01410.1| SS1G_03885 [Sclerotinia sclerotiorum 1980]
  misc_feature (107)..(236): NCBI GI: 154316075 Blast Desc: [Botryotinia fuckeliana B05.10] gi|150846409|gb|EDN21602.1| [Botryotinia fuckeliana B05.10]
  misc_feature (1)..(168): NCBI GI: 169614027 Blast Desc: SNOG_10148 [Phaeosphaeria nodorum SN15] gi|160707262|gb|EAT82483.2| SNOG_10148 [Phaeosphaeria nodorum SN15]
  misc_feature (172)..(237): NCBI GI: 154316075 Blast Desc: [Botryotinia fuckeliana B05.10] gi|150846409|gb|EDN21602.1| [Botryotinia fuckeliana B05.10]
  misc_feature (26)..(168): NCBI GI: 189188392 Blast Desc: [Pyrenophora tritici-repentis Pt-1C-BFP] gi|187972141|gb|EDU39640.1| [Pyrenophora tritici-repentis Pt-1C-BFP]
  misc_feature (110)..(263): NCBI GI: 169614027 Blast Desc: SNOG_10148 [Phaeosphaeria nodorum SN15] gi|160707262|gb|EAT82483.2| SNOG_10148 [Phaeosphaeria nodorum SN15]
MQINNIIASFLLATAVSAKGHNKDNLNSTTLATASVKTQCAAIDEMSKIIDLANNDTLLEKHTKNNETKIAKIKEKAANLTSELTTLTSNATLMGECNVITAHHEAKQACGQMEDLAKDIATAANDTKLEDKFDGNATKISEFKAKAESKATKLADLSGNSTLTTFCAVQADKSTCKSISKMQKEIAKAMNTTRLNEKFDGNETKIAKQQAKAAKLQTKLDALMANTTLLDTCSSMNISVASASTSSNGTTTEDANSPASRLQTASSAMLVLLGSAMFML

SEQ ID NO: 13204 - DNA, 1701 bp, Muscodor strobelii
  misc_feature: SGI cDNA ID NO. 564317
  misc_feature: Encodes the peptide sequence at SEQ ID NO 13205
atggccttccttcggcttaacaacctcaagacggcgttgcctcttgtcctttctgtgtcctcgactttcgtccaagcaaactcctttcctcatttgcgatctccatatgcaagcggagttcaatgggaatcgtgcccggattatgttgtggagcaattcaccataaagaatcatatcatacaatgcggcaacttaactgttccgctcgattatctttcgcccaacagtaccgaaacccttgatctacaattggcgagagtaccagctttgaaggggccggccaataacagtatcattttcaactttggaggtcccggcccaggctgccgtgattcgcttgccaccctagcagaacagttgatggcgatgactggtagcgagtatgatctcgtcacttgggatccacgcggtactgcctatacaatgaccttttcgtgttttgacaaccaaacagaacgcgattctttcatgaaaactcaagctgtttacgggaactcttcagatgttgcacgaggacttgcgtggacaagtggaacaaactatgctgaattatgtgcaaattaccctggtgcacagaagacggggcgttatatcggcactgcatctacggttcgcgacgcagtgagaataagtgaagtcttgaacgaggatgggctcgtccgatattggggtttctcgtatggaacggtaattggtgccactctggcggcgatgtttccagagaaagttgaaaaagtccttatcgacggcgttgtcaacacaaattcgtactactatgatcatattgacattccagagctagtcgccgcagatcctacattttctgagttcttccgccaatgtgtgtctacgcctgacgcttgtgttttggccgccaacaacccggacgtaacagcagagcggctagagtctgcagcctacgacctcattgacgaactgaaataccaccctgttgctgtcgagggcgccgttatagattactcagcgatcaaaacagcaattcgctttagcttatacgcacctgcagggtggctcaatcttgcggagattttcaatggctttctatcccagccgcgcgacttgactaaagctggcccactagtgctacatgctcctgacgggatatctggcgaaactgatcataacgatgccgctgttggcatcaactgtgctgatattgagcctcgcactaacaattacgaagatgtcaagtcatcttggaacgaagccgactctaccagtcgcacgcagggagacagtctcaactatctgagtgctgcctgcgcgcaatggaaaattgagccggtcgagagatatgagggccatttggtggacgtcaagcctcggaaacctctgctcgtaatcggaaactctttcgatcctgccacgcccctccagtctgcgagaaacgtatccgaaacaatcaagggtagcgttttacttgaacatggcggtgtcggtcatgcgagcactagttctgcttctgtttgcaccgccaaagctattgaggctttcttcctccatggtacatatcccgaacctaatacagtttgcccaaccgtagcgcccccgttcgagtgggcgaaagcgaattcgtcttgggaagaggtttacgctgctaccgggtacaagccgcccagtaacacaacaggtgtaccctgcagctcaaagcgaagcgtttcaagtcttctgacacgatag

SEQ ID NO: 13205 - protein, 566 aa, Muscodor strobelii
  misc_feature: SGI Peptide ID NO. 564317
  misc_feature (181)..(504): Pfam Id: PF00561 Pfam Desc: alpha/beta hydrolase fold
  misc_feature (414)..(518): Pfam Id: PF08386 Pfam Desc: TAP-like protein
  misc_feature (181)..(250): Pfam Id: PF00561 Pfam Desc: alpha/beta hydrolase fold
  misc_feature (60)..(508): NCBI GI: 238845947 Blast Desc: conserved [Microsporum canis CBS 113480]
  misc_feature (31)..(487): NCBI GI: 238485384 Blast Desc: conserved [Aspergillus flavus NRRL3357] gi|220698809|gb|EED55148.1| conserved [Aspergillus flavus NRRL3357]
  misc_feature (61)..(537): NCBI GI: 238500650 Blast Desc: conserved [Aspergillus flavus NRRL3357] gi|220691796|gb|EED48143.1| conserved [Aspergillus flavus NRRL3357]
  misc_feature (40)..(525): NCBI GI: 238492397 Blast Desc: conserved [Aspergillus flavus NRRL3357] gi|220695929|gb|EED52271.1| conserved [Aspergillus flavus NRRL3357]
  misc_feature (71)..(538): NCBI GI: 242815417 Blast Desc: conserved [Talaromyces stipitatus ATCC 10500] gi|218714903|gb|EED14326.1| conserved [Talaromyces stipitatus ATCC 10500]
  misc_feature (37)..(545): NCBI GI: 256720823 Blast Desc: NECHADRAFT_85518 [Nectria haematococca mpVI 77-13-4]
  misc_feature (40)..(490): NCBI GI: 169782750 Blast Desc: [Aspergillus oryzae RIB40] gi|83774581|dbj|BAE64704.1| protein product [Aspergillus oryzae]
  misc_feature (62)..(538): NCBI GI: 145248299 Blast Desc: An13g02620 [Aspergillus niger] gi|134081149|emb|CAK41659.1| protein product [Aspergillus niger]
  misc_feature (6)..(518): NCBI GI: 39974645 Blast Desc: MGG_00531 [Magnaporthe grisea 70-15] gi|145018569|gb|EDK02848.1| MGG_00531 [Magnaporthe grisea 70-15]
  misc_feature (15)..(525): NCBI GI: 116197343 Blast Desc: CHGG_06827 [Chaetomium globosum CBS 148.51] gi|88178106|gb|EAQ85574.1| CHGG_06827 [Chaetomium globosum CBS 148.51]
MAFLRLNNLKTALPLVLSVSSTFVQANSFPHLRSPYASGVQWESCPDYVVEQFTIKNHIIQCGNLTVPLDYLSPNSTETLDLQLARVPALKGPANNSIIFNFGGPGPGCRDSLATLAEQLMAMTGSEYDLVTWDPRGTAYTMTFSCFDNQTERDSFMKTQAVYGNSSDVARGLAWTSGTNYAELCANYPGAQKTGRYIGTASTVRDAVRISEVLNEDGLVRYWGFSYGTVIGATLAAMFPEKVEKVLIDGVVNTNSYYYDHIDIPELVAADPTFSEFFRQCVSTPDACVLAANNPDVTAERLESAAYDLIDELKYHPVAVEGAVIDYSAIKTAIRFSLYAPAGWLNLAEIFNGFLSQPRDLTKAGPLVLHAPDGISGETDHNDAAVGINCADIEPRTNNYEDVKSSWNEADSTSRTQGDSLNYLSAACAQWKIEPVERYEGHLVDVKPRKPLLVIGNSFDPATPLQSARNVSETIKGSVLLEHGGVGHASTSSASVCTAKAIEAFFLHGTYPEPNTVCPTVAPPFEWAKANSSWEEVYAATGYKPPSNTTGVPCSSKRSVSSLLTR

SEQ ID NO: 13206 - DNA, 1857 bp, Muscodor strobelii
  misc_feature: SGI cDNA ID NO. 564318
  misc_feature: Elevated expression when VOC is produced
  misc_feature: Encodes the peptide sequence at SEQ ID NO 13207
atgttggcaagcttgttgggactggtctccctgggctctttagccttgggttatcaagttcagacgccgcctctggacacgccatggacatacaaggttggcacagacccttggcctgagtatccgcgacctcaactccagagagattcgttccagagcttgaacggcatttggcaatggggtccgggccaaacttctgttggtggttatcagactgggcgcgatattcttgtgccatcatgcatggagagtggtctctcgggtgtgatgacatattctaggtattcgtggtgggctcgggagttcgaaatctcgaggagcttgaagcacaagaaacatgaccgaatccttatcaatttcgaagccgttgattatgaggctactgtttatgtgaacgacaagctggctggaaacaacaccggcggctattggcgtttcagcttcgatatcaccgacctcgttaaggatggcaaaaacacactgcgcgttgatgtttttgacccaactgaggatggtgccaatattcccttcggaaagcagcgaaacgctccttcgcacatcttctacacttcctgctccggaatctggcaaaccgtttggctagagtctgtcccaacagaacatgttactcagctcgatgttgccgcaggcatggatggcaaagtcaacgtaactgtcaacacaaacaagggctcgaaggaagcagtaaccgtcactgtaacggatgagcatggctcgagagtcgggcgtggacgtggaacggccaacaagcccttcatctttactgtcgactcccctgatctgtggtcccctgacagcccaactctttataacttgaccgttactgccggagatgacactgttgagtcgtacactggtttccgtaccatctcttccggagtggtcggcggcattcagcggccactcctcaacgatgaattctttttccacttcggaaccctcgatcagggattctggcccgatggcatttacactccgccaaattacgaggccatggttttcgacctgaaacagctcaaggatctcggattcaacatggtccgaaagcatattaaggttgagcctgacctgttctatcgtgcttgcgatgagctcggcttgctcgttctgcaagatatgccagcgatgaacgcggatgatagaatcatccccaccgctgatcagcaggctgaatgggaacggcaacttttcatcatggttgagcagcacaagaactaccccagcatttacacttgggtgatttacaatgaaggctggggtcaactccgcagtacttattaccccgaggcaggcttgacagctcaagtgaagtctatcgaccccacaagactggtggacgctgttactggatggtacgatcacggctatggcgattactccgataaccaccactacgccaaccctcaatgcggaacgcctttctactccattcagtctagcccttatgatcccaagcgcattgcaatccaaggtgaatttggtggtactggaaataatgtttccgccgagcatctgtggaaagtacaggccgcaatcgatacgattaatcagacctatgagttggacctgactagagacgcctggaattatcgtggtcacgttctcttgagcgaattgcttgaccaagtcaagatgtatgcttgctctgctgccgtctggacccaaacgactgacgtagaaggcgaggtgaacggtctgctcacctacgatcgccgaattcttcgtactgatgtcggccaatggaagtctgacatccaggctctcaaggatgccgcagccgctcgagcgggcaaaataataactgcaaacgagcatctcggtcttcgtgaactctaa

SEQ ID NO: 13207 - protein, 618 aa, Muscodor strobelii
  misc_feature: SGI Peptide ID NO. 564318
  misc_feature (207)..(295): Pfam Id: PF00703 Pfam Desc: Glycosyl hydrolases family 2, immunoglobulin-like beta-sandwich domain
  misc_feature (48)..(205): Pfam Id: PF02837 Pfam Desc: Glycosyl hydrolases family 2, sugar binding domain
  misc_feature (219)..(295): Pfam Id: PF00703 Pfam Desc: Glycosyl hydrolases family 2, immunoglobulin-like beta-sandwich domain
  misc_feature (18)..(602): NCBI GI: 146323010 Blast Desc: hydrolase [Aspergillus fumigatus Af293] gi|129558571|gb|EAL93747.2| hydrolase, [Aspergillus fumigatus Af293] gi|159129840|gb|EDP54954.1| hydrolase, [Aspergillus A1163]
  misc_feature (15)..(604): NCBI GI: 238490248 Blast Desc: hydrolase, [Aspergillus flavus NRRL3357] gi|220696774|gb|EED53115.1| hydrolase, [Aspergillus flavus NRRL3357]
  misc_feature (18)..(602): NCBI GI: 145231437 Blast Desc: An02g00610 [Aspergillus niger] gi|134056101|emb|CAK96276.1| protein product [Aspergillus niger]
  misc_feature (32)..(602): NCBI GI: 119481763 Blast Desc: glycosyl hydrolase family 2, [Neosartorya fischeri NRRL 181] gi|119409064|gb|EAW19013.1| glycosyl hydrolase family 2, [Neosartorya fischeri NRRL 181]
  misc_feature (1)..(603): NCBI GI: 67523879 Blast Desc: AN2395.2 [Aspergillus nidulans FGSC A4] gi|40745350|gb|EAA64506.1| AN2395.2 [Aspergillus nidulans FGSC A4] gi|259487799|tpe|CBF86756.1| TPA: hydrolase, (AFU_orthologue;
  misc_feature (2)..(604): NCBI GI: 256724232 Blast Desc: NECHADRAFT_106524 [Nectria haematococca mpVI 77-13-4]
  misc_feature (16)..(607): NCBI GI: 145607876 Blast Desc: MGG_13610 [Magnaporthe grisea 70-15] gi|145015360|gb|EDJ99896.1| MGG_13610 [Magnaporthe grisea 70-15]
  misc_feature (18)..(597): NCBI GI: 171684699 Blast Desc: protein product [Podospora anserina] gi|170942310|emb|CAP67962.1| protein product [Podospora anserina]
  misc_feature (1)..(614): NCBI GI: 46114956 Blast Desc: FG03320.1 [Gibberella zeae PH-1]
  misc_feature (18)..(582): NCBI GI: 115383698 Blast Desc: conserved [Aspergillus terreus NIH2624] gi|114196088|gb|EAU37788.1| conserved [Aspergillus terreus NIH2624]
  misc_feature (52)..(579): SWISSPROT Homolog: EC 3.2.1.23 Beta-galactosidase
  misc_feature: Useful for introducing or modulating the production of volatile compounds
MLASLLGLVSLGSLALGYQVQTPPLDTPWTYKVGTDPWPEYPRPQLQRDSFQSLNGIWQWGPGQTSVGGYQTGRDILVPSCMESGLSGVMTYSRYSWWAREFEISRSLKHKKHDRILINFEAVDYEATVYVNDKLAGNNTGGYWRFSFDITDLVKDGKNTLRVDVFDPTEDGANIPFGKQRNAPSHIFYTSCSGIWQTVWLESVPTEHVTQLDVAAGMDGKVNVTVNTNKGSKEAVTVTVTDEHGSRVGRGRGTANKPFIFTVDSPDLWSPDSPTLYNLTVTAGDDTVESYTGFRTISSGVVGGIQRPLLNDEFFFHFGTLDQGFWPDGIYTPPNYEAMVFDLKQLKDLGFNMVRKHIKVEPDLFYRACDELGLLVLQDMPAMNADDRIIPTADQQAEWERQLFIMVEQHKNYPSIYTWVIYNEGWGQLRSTYYPEAGLTAQVKSIDPTRLVDAVTGWYDHGYGDYSDNHHYANPQCGTPFYSIQSSPYDPKRIAIQGEFGGTGNNVSAEHLWKVQAAIDTINQTYELDLTRDAWNYRGHVLLSELLDQVKMYACSAAVWTQTTDVEGEVNGLLTYDRRILRTDVGQWKSDIQALKDAAAARAGKIITANEHLGLREL

SEQ ID NO: 13208 - DNA, 2670 bp, Muscodor strobelii
  misc_feature: SGI EST ID NO. CUFF.31507.0
  misc_feature: Variant of the nucleotide sequence at SEQ ID NO 13206
ggtaccacagcattgttttccgggttccattgaatattccccatccttcgatcccttcccgagtctcggtctacgagcgaagatcttgtaatcagagctaggtgacacgccttagcctagtcaccaaccccatagttcaccaagaataggaaggtaagaatacgctctattgcggactgatccacaacggacaaaaattacactgggagcttttttatataaaggtgagccgggtaagctttcgatctaccaaccttgaggacgacaagcgtggtttccttgccggctcgtcaatttctcggatcaggcctctagctgggtaaaacttgctcagagcactctctcccaaccgaaaacaattgcctatcggttcgaatatctcaattgatatcacgatgttggcaagcttgttgggactggtctccctgggctctttagccttgggttatcaagttcagacgccgcctctggacacgccatggacatacaaggttggcacagacccttggcctgagtatccgcgacctcaactccagagagattcgttccagagcttgaacggcatttggcaatggggtccgggccaaacttctgttggtggttatcagactgggcgcgatattcttgtgccatcatgcatggagagtggtctctcgggtgtgatgacatattctaggtattcgtggtgggctcgggagttcgaaatctcgaggagcttgaagcacaagaaacatgaccgaatccttatcaatttcgaagccgttgattatgaggctactgtttatgtgaacgacaagctggctggaaacaacaccggcggctattggcgtttcagcttcgatatcaccgacctcgttaaggatggcaaaaacacactgcgcgttgatgtttttgacccaactgaggatggtgccaatattcccttcggaaagcagcgaaacgctccttcgcacatcttctacacttcctgctccggaatctggcaaaccgtttggctagagtctgtcccaacagaacatgttactcagctcgatgttgccgcaggcatggatggcaaagtcaacgtaactgtcaacacaaacaagggctcgaaggaagcagtaaccgtcactgtaacggatgagcatggctcgagagtcgggcgtggacgtggaacggccaacaagcccttcatctttactgtcgactcccctgatctgtggtcccctgacagcccaactctttataacttgaccgttactgccggagatgacactgttgagtcgtacactggtttccgtaccatctcttccggagtggtcggcggcattcagcggccactcctcaacgatgaattctttttccacttcggaaccctcgatcagggattctggcccgatggcatttacactccgccaaattacgaggccatggttttcgacctgaaacagctcaaggatctcggattcaacatggtccgaaagcatattaaggttgagcctgacctgttctatcgtgcttgcgatgagctcggcttgctcgttctgcaagatatgccagcgatgaacgcggatgatagaatcatccccaccgctgatcagcaggctgaatgggaacggcaacttttcatcatggttgagcagcacaagaactaccccagcatttacacttgggtgatttacaatgaaggctggggtcaactccgcagtacttattaccccgaggcaggcttgacagctcaagtgaagtctatcgaccccacaagactggtggacgctgttactggatggtacgatcacggctatggcgattactccgataaccaccactacgccaaccctcaatgcggaacgcctttctactccattcagtctagcccttatgatcccaagcgcattgcaatccaaggtgaatttggtggtactggaaataatgtttccgccgagcatctgtggaaagtacaggccgcaatcgatacgattaatcagacctatgagttggacctgactagagacgcctggaattatcgtggtcacgttctcttgagcgaattgcttgaccaagtcaagatgtatgcttgctctgctgccgtctggacccaaacgactgacgtagaaggcgaggtgaacggtctgctcacctacgatcgccgaattcttcgtactgatgtcggccaatggaagtctgacatccaggctctcaaggatgccgcagccgctcgagcgggcaaaagtaagaactaaatgactctcaagtaccaaatacgcactcacaaatggaggcgatattgagtaacttggcttcattgcagtagacattaactaatataattaaaagtaataactgcaaacgagcatctcggtcttcgtgaactctaaagcgacataaacgatccgctatgcgatgtatgataccgagctgtaatcgtgatgcttgtaatgcgtatcggaccatttcgacaacttcaagattgcatccttccgaccgaatagagcgagataaagataccgattaggatatgccaaggcggcagggttattttgagtataatggtggagaggctgaagcaagtcagatgaagtcagatgaagttagatgggcgtcaaaccaggaaaagacaacttatgtatagctaggtatagtacacgtagatacttggataatcaagtgctacatgtttgtatagtctcg

SEQ ID NO: 13209 - DNA, 927 bp, Muscodor strobelii
  misc_feature: SGI cDNA ID NO. 564319
  misc_feature: Encodes the peptide sequence at SEQ ID NO 13210
atgcagggcaatggtgcagtcgccgcacctggcgccatggcggtgggccctactcccgccagccaccaggccgagctgaatctcatctacggcatggttgaagagctgtcgcgccagcttgctgagaaccgccgagtcaccgaagacattgtctccggcttgggccgtgtcagaacccgagctcacgatcgtggcttgaccaacgacgagcttctcggcgaggctgcagacgatctgtttgcccaggagcccaacctcgaagctatgatctccattctgaccgagtccctcgaccgcgccaaacagtccagagacgccaacttcaccctcctcgcgtcctacgccaaggctttggagaacatgatcaatcagttccacgcctacaagcagaagcacgtcgcagacatcgccgcctggcaccattcctaccgcaaccagctggccgaagcacgtgccgagaactgtcgcctgagagagcagatgtggggcatgcaggagcatgcaagccgcgcgaacgacatgctgcgtatcttccgcaagaagatcgacgaagacgaaggacgctgggacaagcgggtgcgcgaacgagccagaaaacaagagctgcgcttctggaagcgcatggccatgcccgagatcgaagacgacgaggaaggcttctggagcgacgacgacgatctggtcgacccggcagagaaagagagactcaagagggtcgagcgcgaggttgcggaacaggccatggctgggctgggcagtgagagcagccagcagagcgaggactcggagggcgagagcggtgatacccactccctttctagcatgatgggaggaattgctatggagagagatcgcgatggaggctccctgcccatccccccaccccgaccggccagcacgggaagcacggccggacagactggatag

SEQ ID NO: 13210 - protein, 308 aa, Muscodor strobelii
  misc_feature: SGI Peptide ID NO. 564319
  misc_feature (4)..(308): NCBI GI: 256725858 Blast Desc: NECHADRAFT_62268 [Nectria haematococca mpVI 77-13-4]
  misc_feature (4)..(272): NCBI GI: 261355724 Blast Desc: conserved [Verticillium albo-atrum VaMs.102]
  misc_feature (4)..(297): NCBI GI: 46111483 Blast Desc: FG02623.1 [Gibberella zeae PH-1]
  misc_feature (1)..(297): NCBI GI: 116197733 Blast Desc: CHGG_07022 [Chaetomium globosum CBS 148.51] gi|88178301|gb|EAQ85769.1| CHGG_07022 [Chaetomium globosum CBS 148.51]
  misc_feature (1)..(241): NCBI GI: 85100466 Blast Desc: NCU04324 [Neurospora crassa OR74A] gi|28922504|gb|EAA31734.1| [Neurospora crassa OR74A] gi|28950184|emb|CAD71052.1| conserved [Neurospora crassa]
  misc_feature (1)..(297): NCBI GI: 171694317 Blast Desc: protein product [Podospora anserina] gi|170947107|emb|CAP73912.1| protein product [Podospora anserina]
  misc_feature (11)..(261): NCBI GI: 145612153 Blast Desc: MGG_08128 [Magnaporthe grisea 70-15] gi|145019375|gb|EDK03603.1| MGG_08128 [Magnaporthe grisea 70-15]
  misc_feature (1)..(225): NCBI GI: 156066013 Blast Desc: SS1G_01017 [Sclerotinia sclerotiorum 1980] gi|154691876|gb|EDN91614.1| SS1G_01017 [Sclerotinia sclerotiorum 1980]
  misc_feature (1)..(223): NCBI GI: 154294972 Blast Desc: BC1G_13352 [Botryotinia fuckeliana B05.10] gi|150844481|gb|EDN19674.1| BC1G_13352 [Botryotinia fuckeliana B05.10]
  misc_feature (1)..(223): NCBI GI: 154294974 Blast Desc: BC1G_13353 [Botryotinia fuckeliana B05.10] gi|150844482|gb|EDN19675.1| BC1G_13353 [Botryotinia fuckeliana B05.10]
MQGNGAVAAPGAMAVGPTPASHQAELNLIYGMVEELSRQLAENRRVTEDIVSGLGRVRTRAHDRGLTNDELLGEAADDLFAQEPNLEAMISILTESLDRAKQSRDANFTLLASYAKALENMINQFHAYKQKHVADIAAWHHSYRNQLAEARAENCRLREQMWGMQEHASRANDMLRIFRKKIDEDEGRWDKRVRERARKQELRFWKRMAMPEIEDDEEGFWSDDDDLVDPAEKERLKRVEREVAEQAMAGLGSESSQQSEDSEGESGDTHSLSSMMGGIAMERDRDGGSLPIPPPRPASTGSTAGQTG

SEQ ID NO: 13211 - DNA, 1797 bp, Muscodor strobelii
  misc_feature: SGI EST ID NO. CUFF.31528.0
  misc_feature: Variant of the nucleotide sequence at SEQ ID NO 13209
cggcatgtaggtatctaccacatgtgattgtgattatcaacatcgttccgagctgtctcttatctttccgtcaagccgccctccgattctagcagccgaccgggccttggagcaacttgtcaatttgtcttgcttctataccactagccattatccgcaccccgcgccatacgaacatcatacatcacaaatagccaccagagacacccgtcacgatgcagggcaatggtgcagtcgccgcacctggcgccatggcggtgggccctactcccgccagccaccaggccgagctgaatctcatctacggcatggttgaagagctgtcgcgccagcttgctgagaaccgccgagtcaccgaagacattgtctccggcttgggccgtgtcagaacccgagctcacgatcgtggcttgaccaacgacgagcttctcggcgaggctgcagacgatctgtttgcccaggagcccaacctcgaagctatgatctccattctgaccgagtccctcgaccgcgccaaacagtccagagacgccaacttcaccctcctcgcgtcctacgccaaggctttggagaacatgatcaatcagttccacgcctacaagcagaagcacgtcgcagacatcgccgcctggcaccattcctaccgcaaccagctggccgaagcacgtgccgagaactgtcgcctgagagagcagatgtggggcatgcaggagcatgcaagccgcgcgaacgacatgctgcgtatcttccgcaagaagatcgacgaagacgaaggacgctgggacaagcgggtgcgcgaacgagccagaaaacaagagctgcgcttctggaagcgcatggccatgcccgagatcgaagacgacgaggaaggcttctggagcgacgacgacgatctggtcgacccggcagagaaagagagactcaagagggtcgagcgcgaggttgcggaacaggccatggctgggctgggcagtgagagcagccagcagagcgaggactcggagggcgagagcggtgatacccactccctttctagcatgatgggaggaattgctatggagagagatcgcgatggaggctccctgcccatccccccaccccgaccggccagcacgggaagcacggccggacagactggatagaaaacgaaggatccggacccgagattttcgtcgcggccaagcgccacaaccgacaatacgaacaattgcgcggtagtatgagttcagaaagtgctcattgtctcgtctcattgcagatctttgcgatccatatcttgagacccagagagcaatccttcgcccgaagtacgacccagaagaagtccccgaaattacaggactctttcaacaatcaacttcacagatattatggcttgtgtgctcacctagagctcatagttcagtgcactctacgacgaacgctagataagacgacgtggggaggtttgagcgactggagtacaacctgcgagagtgtacatgcccaagtatgaagtctatgagcatagcacattatgtacattaaacgcggcgcggcttcgccgttatggatgatgagggcatattggcaggagcaggtgctgtatgattatgccacgagcgatatatgctgaataccagcacgtaaggaacagaagcgcctgatcacctgttgaatgatcggcaggcaggcttactgaatgactagcaagagaattatgaagatacccaatatgatccattataccaatttaatatctcagcattagcagtgcgatggattttagatagtactccatcttgtttttgaggcaga

SEQ ID NO: 13212 - DNA, 1587 bp, Muscodor strobelii
  misc_feature: SGI cDNA ID NO. 564320
  misc_feature: Encodes the peptide sequence at SEQ ID NO 13213
atggcccctatgtcggaggtacaagatgtcgaaggcggtgcacctaacgaatccgaaaccctcaaaaaggtgatcacaacacggcacttcatactcatggccttggggtcttccatcggcgccgggctcctcgtctcaacaggtcaagctctatccgtcagcggtccagctccattactcctagcatacctcgtcctcggcttcgccgtctggataacaatgtgcaatctaggcgaactcgccacaaactatccggtccgcggttcgttctacgagttctcagtgcgtttcatatctcctgcgtggggattcgccatgggctggaactacgtcctgaacttcatctttgtcttaccctttgagataatcgtcatgattatgctcgcacggtattggaaccctgatatcaacgccgcctgcctggcgccgatcttcatcgttgcgctgatgttcatatacctattccgcgcgaattggtacgcggagtcagagaatgtgtttggtgtgatgaagatgactgtcctcgcgattttcgtaatgacctctatcttcatactagcacgtgcggttccgacggatcatagaccaaaagcagacctcgggtacgatgattggcaacatcacccgtttaagaatggtcctgaaggctttcttttcgcattcatgagcgcaggtatggcttacggcggcacggagatgttgggtctcacggctgcggagtgccaaaatccgagacaagtgatgagattagcgagtaaacttgtcgcgttcaggatcgggctgttgtatctcttgcccattcttatacttggattggtcttgaaactcaataaaatctcgagcgaacataacttcactagtccctttgttgtcgcgattgccgaggcgaaaatcccggtcttgccagacattatcaacgccatcattgtcatctcgatattctccatggcaaatgcagcgatctttgcttcatcgcgggctttgcgagcgatctcttctcgaggcatgggccctaaattctgcactaaagtatacaaagaccggcccgtcggatctctcatcgtcgtattcttattctctttcctatcactcatcaaagcctctccaaacggtgatcagattttcacttggctccttgctctcgcttcttgctccaattacctaacatggggctccatctgcgtatgtcaagtccgctgtcgactggcggcacggaaacagaatcacgtattgaataaccccgaaaggtatcgatctcctttcggaaccataggatcttgttttgcagtcggcgtatttctgttcagtctcattgcacagattgccgctgctgctaaatctccactgccgagcccaccgccactactgagtagtttcttgggcttgttagtggcagtgatcacgtggggtgggtacacactctggaaacgagagtggcagcttattatcccgctcgaaaagattgatctcagacagagtcatgaaggtcgattcatcctcagtactattgaagaggaggaagagggggaaaacagggatgcggagaaaggcgtctcagacaagaatattgaggttcgagtggaataa

SEQ ID NO: 13213 - protein, 528 aa, Muscodor strobelii
  misc_feature: SGI Peptide ID NO. 564320
  misc_feature (29)..(485): Pfam Id: PF00324 Pfam Desc: Amino acid permease
  misc_feature (9)..(512): NCBI GI: 156044714 Blast Desc: SS1G_10461 [Sclerotinia sclerotiorum 1980] gi|154694849|gb|EDN94587.1| SS1G_10461 [Sclerotinia sclerotiorum 1980]
  misc_feature (8)..(518): NCBI GI: 145614258 Blast Desc: MGG_11327 [Magnaporthe grisea 70-15] gi|145021199|gb|EDK05328.1| MGG_11327 [Magnaporthe grisea 70-15]
  misc_feature (3)..(511): NCBI GI: 169786157 Blast Desc: [Aspergillus oryzae RIB40] gi|83776287|dbj|BAE66406.1| protein product [Aspergillus oryzae]
  misc_feature (3)..(511): NCBI GI: 238507097 Blast Desc: amino acid transporter, [Aspergillus flavus NRRL3357] gi|220689463|gb|EED45814.1| amino acid transporter, [Aspergillus flavus NRRL3357]
  misc_feature (17)..(521): NCBI GI: 63054678 Blast Desc: amino acid permease, 6 [Schizosaccharomyces pombe 972h-] gi|30913531|sp|Q9URZ4.2|YI0B_SCHPO RecName: Full=Uncharacterized amino-acid permease C869.11 cationic amino
  misc_feature (8)..(507): NCBI GI: 256729863 Blast Desc: [Nectria haematococca mpVI 77-13-4]
  misc_feature (5)..(516): NCBI GI: 50426505 Blast Desc: DEHA0G07579g [Debaryomyces hansenii CBS767]
  misc_feature (5)..(516): NCBI GI: 199433988 Blast Desc: DEHA2G06930p [Debaryomyces hansenii]
  misc_feature (3)..(490): NCBI GI: 212539442 Blast Desc: general amino-acid permease GAP1, [Penicillium marneffei ATCC 18224] gi|210067175|gb|EEA21267.1| general amino-acid permease GAP1, [Penicillium marneffei ATCC 18224]
  misc_feature (16)..(515): NCBI GI: 19115228 Blast Desc: amino acid permease, 4 [Schizosaccharomyces pombe 972h-] gi|74665377|sp|Q9P768.1|YI26_SCHPO RecName: Full=Uncharacterized amino-acid permease P7G5.06 amino acid 4
MAPMSEVQDVEGGAPNESETLKKVITTRHFILMALGSSIGAGLLVSTGQALSVSGPAPLLLAYLVLGFAVWITMCNLGELATNYPVRGSFYEFSVRFISPAWGFAMGWNYVLNFIFVLPFEIIVMIMLARYWNPDINAACLAPIFIVALMFIYLFRANWYAESENVFGVMKMTVLAIFVMTSIFILARAVPTDHRPKADLGYDDWQHHPFKNGPEGFLFAFMSAGMAYGGTEMLGLTAAECQNPRQVMRLASKLVAFRIGLLYLLPILILGLVLKLNKISSEHNFTSPFVVAIAEAKIPVLPDIINAIIVISIFSMANAAIFASSRALRAISSRGMGPKFCTKVYKDRPVGSLIVVFLFSFLSLIKASPNGDQIFTWLLALASCSNYLTWGSICVCQVRCRLAARKQNHVLNNPERYRSPFGTIGSCFAVGVFLFSLIAQIAAAAKSPLPSPPPLLSSFLGLLVAVITWGGYTLWKREWQLIIPLEKIDLRQSHEGRFILSTIEEEEEGENRDAEKGVSDKNIEVRVE

SEQ ID NO: 13214 - DNA, 1548 bp, Muscodor strobelii
  misc_feature: SGI cDNA ID NO. 564321
  misc_feature: Encodes the peptide sequence at SEQ ID NO 13215
atgctgctgagtccgactctatcagatttattcgaagtggtgaagaaagcgaaactcgagaaaggcgggcaacgcgaattcagtgtttggatcgatgcgctgtgtatcaaccagagcgatccggtcgagagagggactcaagtaagcatgatggatagaatctactcctctgcattagcggtcaccgtgtggctcggcacaagccatcctgcgacgaagcgtgcgttccgcttcatgagatccaaacgcagaatgaagtggccagacgactggggcgacgagttatcggaacaagatcacgccggactggatatgttactgcgattcctaggcaacccatggttccgccgcacatgggtagtccaggaagtgacgctcagcaacaacgtgtggatgcgatgtgggaatgacgctgagggatttgccatcttcaccatgtgcgtgtgggcaatttggaagttcttccgtaattgggatgcatacgatgatgacagtccagcgatgcttggcttgtggagtgctacacggctgctcgatatccgcgaccggttcatcgatcggaatccgctgaagtgggacttactcctacagtcagcttttcgctgggagacaacagaccatagggactctgttttcgctcttagaggcatagcggatcgtgcaccgcccattcctgcaccctcctattctgtcccgatcggaaaggagccagagtacagcgaagcagtcgagaaggtttatcgagagacggctgaggcgctgctttgtcacggaacctcgctcgacctcctcgcgctcgccggtttggagagaacccgatcccccagtctcgcatcatgggtgccggattaccgtcacttcagtttctcagagccgtatgtcgtgtgtgacgcggcaaattgggacgccggtggacccttgagagagcaaccgcgattactatcgcccgactgtttgatgattcaagtaaactccctcgatactatagagacaatgtgccccgagtttgatgtatactccgttttagaccagcaggagacgatgaggcagatactgaagttgagagaagcacagcaggatgaggctcctcgaagtatctggctcgatcagctagccatggatttgatattcggactcgatattgatgagcaaccggccgggcctgaatacgttagacttttccatgagtggcttcactggctagagtctagcacgtcccagtcggacctgaatgagattaagaataacgcatacattcgggcgcttggccagcgagtgggattatggaaagcctttgggacgcggcgaggtttcttctgcatcggtccaccaaacatcgaggctggagatatgttgtgcctcgtgccaggctgccggctgccacttgtactaagaaagatgaatgaagaagaggtcaccagcaatgagttcaatcttgtcggttggtgttttgcggccggtctcatgaatcatagaatagatcaacagtccaatgctttgaatttgaaacatactagtagtagtacaatagacgttatcttgagatag

SEQ ID NO: 13215 - protein, 515 aa, Muscodor strobelii
  misc_feature: SGI Peptide ID NO. 564321
  misc_feature (29)..(66): Pfam Id: PF06985 Pfam Desc: Heterokaryon incompatibility protein (HET)
  misc_feature (20)..(490): NCBI GI: 256721874 Blast Desc: NECHADRAFT_88090 [Nectria haematococca mpVI 77-13-4]
  misc_feature (26)..(490): NCBI GI: 256722564 Blast Desc: NECHADRAFT_49740 [Nectria haematococca mpVI 77-13-4]
  misc_feature (29)..(490): NCBI GI: 256731925 Blast Desc: NECHADRAFT_80792 [Nectria haematococca mpVI 77-13-4]
  misc_feature (5)..(304): NCBI GI: 171686082 Blast Desc: protein product [Podospora anserina] gi|170943002|emb|CAP68655.1| protein product [Podospora anserina]
  misc_feature (29)..(489): NCBI GI: 119179507 Blast Desc: CIMG_08498 [Coccidioides immitis RS]
  misc_feature (18)..(489): NCBI GI: 226287224 Blast Desc: conserved [Paracoccidioides brasiliensis Pb18]
  misc_feature (18)..(489): NCBI GI: 225683598 Blast Desc: [Paracoccidioides brasiliensis Pb03]
  misc_feature (21)..(285): NCBI GI: 169614059 Blast Desc: SNOG_10164 [Phaeosphaeria nodorum SN15] gi|111061379|gb|EAT82499.1| SNOG_10164 [Phaeosphaeria nodorum SN15]
  misc_feature (9)..(492): NCBI GI: 256722966 Blast Desc: NECHADRAFT_86875 [Nectria haematococca mpVI 77-13-4]
  misc_feature (29)..(471): NCBI GI: 256724643 Blast Desc: NECHADRAFT_84407 [Nectria haematococca mpVI 77-13-4]
MLLSPTLSDLFEVVKKAKLEKGGQREFSVWIDALCINQSDPVERGTQVSMMDRIYSSALAVTVWLGTSHPATKRAFRFMRSKRRMKWPDDWGDELSEQDHAGLDMLLRFLGNPWFRRTWVVQEVTLSNNVWMRCGNDAEGFAIFTMCVWAIWKFFRNWDAYDDDSPAMLGLWSATRLLDIRDRFIDRNPLKWDLLLQSAFRWETTDHRDSVFALRGIADRAPPIPAPSYSVPIGKEPEYSEAVEKVYRETAEALLCHGTSLDLLALAGLERTRSPSLASWVPDYRHFSFSEPYVVCDAANWDAGGPLREQPRLLSPDCLMIQVNSLDTIETMCPEFDVYSVLDQQETMRQILKLREAQQDEAPRSIWLDQLAMDLIFGLDIDEQPAGPEYVRLFHEWLHWLESSTSQSDLNEIKNNAYIRALGQRVGLWKAFGTRRGFFCIGPPNIEAGDMLCLVPGCRLPLVLRKMNEEEVTSNEFNLVGWCFAAGLMNHRIDQQSNALNLKHTSSSTIDVILR

SEQ ID NO: 13216 - DNA, 1128 bp, Muscodor strobelii
  misc_feature: SGI EST ID NO. CUFF.31545.0
  misc_feature: Variant of the nucleotide sequence at SEQ ID NO 13214
tgacagtccagcgatgcttggcttgtggagtgctacacggctgctcgatatccgcgaccggttcatcgatcggaatccgctgaagtgggacttactcctacagtcagcttttcgctgggagacaacagaccatagggactctgttttcgctcttagaggcatagcggatcgtgcaccgcccattcctgcaccctcctattctgtcccgatcggaaaggagccagagtacagcgaagcagtcgagaaggtttatcgagagacggctgaggcgctgctttgtcacggaacctcgctcgacctcctcgcgctcgccggtttggagagaacccgatcccccagtctcgcatcatgggtgccggattaccgtcacttcagtttctcagagccgtatgtcgtgtgtgacgcggcaaattgggacgccggtggacccttgagagagcaaccgcgattactatcgcccgactgtttgatgattcaagtaaactccctcgatactatagagacaatgtgccccgagtttgatgtatactccgttttagaccagcaggagacgatgaggcagatactgaagttgagagaagcacagcaggatgaggctcctcgaagtatctggctcgatcagctagccatggatttgatattcggactcgatattgatgagcaaccggccgggcctgaatacgttagacttttccatgagtggcttcactggctagagtctagcacgtcccagtcggacctgaatgagattaagaataacgcatacattcgggcgcttggccagcgagtgggattatggaaagcctttgggacgcggcgaggtttcttctgcatcggtccaccaaacatcgaggctggagatatgttgtgcctcgtgccaggctgccggctgccacttgtactaagaaagatgaatgaagaagaggtcaccagcaatgagttcaatcttgtcggttggtgttttgcggccggtctcatgaatcatagaatagatcaacagtccaatgctttgaatttgaaacatactagtagtagtacaatagacgttatcttgagataggaaggcataccctttcagtcctgtgcggatgtcatggcttcgcgcctacccatataggtaatatcttg

SEQ ID NO: 13217 - DNA, 1080 bp, Muscodor strobelii
  misc_feature: SGI cDNA ID NO. 564322
  misc_feature: Encodes the peptide sequence at SEQ ID NO 13218
atgtccacgttcacagagcacgatgtctcatacgcggatggcaccaagaacatccattatatcgcagctggcccgtcttcaggtccattgatcgtctttcttcacggctggccagccatcggtctgacatggagggatcaattaaaggcgttcgctctactagacttccgcgccgttgccccggatatgcccggatggggcaaatctagcagtcgtcgggaggttgccgactactctcaagaggcacttgtggaaggcatgctggccctcctttcggcctgtcaccgctctgctgccgtatgggtgggacacgactggggtgctgtcgtggcatcttcattggccgcccagcacccgacagtcgttcaggcgctcgtgcttctctgtattccatacaaatctggtgagttaggcctcgaccagctcgtgtcactcgtcgaccgtaccatctaccccgaggacgagaatccgtttggccaatgggaatatatggcctactacgaggagagcttcgataaggctgtcgctgagtacgatctcaacattcgcggcctcttcaagatactctacgcggctccgcggggatacgatgtggccgacgcattcaaaccggcattcacctctaaggttcgcgccacgggcgggctgttcggtgggaacggcgcaccgccggccgacgagcttcctgctccactgctcgagggcgaaatattcgatacgctcgtcgaagcgacagaggcaactggcttatgggccccaacagcctactacttgaaccacaaagcaaacgcggcttacaacagccaggcgccatccggtgggcgcctgggaaaagacaagccggtgctcttcatccacgccagacatgactacgcatgcaacacgctcacgagccggttgtcggagccgatgcgccaggcatgcgagaatctgaccgaggtgacaatcgagacgggccataactcgtacttcgagcaacccgaggccgtgaacgcggccatctcgaggttcctcgtgctggagggtcgggagtgttggcctggttatgcagattccgggtatagcaagaaggctgtttga

SEQ ID NO: 13218 - protein, 359 aa, Muscodor strobelii
  misc_feature: SGI Peptide ID NO. 564322
  misc_feature (56)..(336): Pfam Id: PF00561 Pfam Desc: alpha/beta hydrolase fold
  misc_feature (56)..(128): Pfam Id: PF00561 Pfam Desc: alpha/beta hydrolase fold
  misc_feature (253)..(336): Pfam Id: PF00561 Pfam Desc: alpha/beta hydrolase fold
  misc_feature (1)..(357): NCBI GI: 238484711 Blast Desc: epoxide hydrolase, [Aspergillus flavus NRRL3357] gi|220701644|gb|EED57982.1| epoxide hydrolase, [Aspergillus flavus NRRL3357]
  misc_feature (11)..(347): NCBI GI: 115374157 Blast Desc: epoxide hydrolase [Stigmatella aurantiaca DW4/3-1] gi|115368824|gb|EAU67772.1| epoxide hydrolase [Stigmatella aurantiaca DW4/3-1]
  misc_feature (1)..(338): NCBI GI: 226974019 Blast Desc: epoxide hydrolase [uncultured organism]
  misc_feature (1)..(358): NCBI GI: 39976501 Blast Desc: MGG_05826 [Magnaporthe grisea 70-15] gi|145011932|gb|EDJ96588.1| MGG_05826 [Magnaporthe grisea 70-15]
  misc_feature (3)..(352): NCBI GI: 227978884 Blast Desc: hydrolase or acyltransferase of alpha/beta superfamily [Tsukamurella paurometabola DSM 20162] gi|227966242|gb|EEK01551.1| hydrolase or acyltransferase of DSM
  misc_feature (1)..(338): NCBI GI: 189202956 Blast Desc: epoxide hydrolase 2 [Pyrenophora tritici-repentis Pt-1C-BFP] gi|187984913|gb|EDU50401.1| epoxide hydrolase 2 [Pyrenophora tritici-repentis Pt-1C-BFP]
  misc_feature (1)..(342): NCBI GI: 169623504 Blast Desc: SNOG_14994 [Phaeosphaeria nodorum SN15] gi|111056417|gb|EAT77537.1| SNOG_14994 [Phaeosphaeria nodorum SN15]
  misc_feature (16)..(320): NCBI GI: 170736402 Blast Desc: alpha/beta hydrolase fold [Burkholderia cenocepacia MC0-3] gi|169818590|gb|ACA93172.1| alpha/beta hydrolase fold [Burkholderia cenocepacia MC0-3]
  misc_feature (1)..(338): NCBI GI: 196012445 Blast Desc: expressed [Trichoplax adhaerens] gi|190581408|gb|EDV21485.1| expressed [Trichoplax adhaerens]
  misc_feature (21)..(338): NCBI GI: 119478396 Blast Desc: epoxide hydrolase [marine gamma proteobacterium HTCC2143] gi|119448605|gb|EAW29851.1| epoxide hydrolase [marine gamma proteobacterium HTCC2143]
  misc_feature (18)..(343): SWISSPROT Homolog: EC 3.3.2.10 Soluble epoxide hydrolase
MSTFTEHDVSYADGTKNIHYIAAGPSSGPLIVFLHGWPAIGLTWRDQLKAFALLDFRAVAPDMPGWGKSSSRREVADYSQEALVEGMLALLSACHRSAAVWVGHDWGAVVASSLAAQHPTVVQALVLLCIPYKSGELGLDQLVSLVDRTIYPEDENPFGQWEYMAYYEESFDKAVAEYDLNIRGLFKILYAAPRGYDVADAFKPAFTSKVRATGGLFGGNGAPPADELPAPLLEGEIFDTLVEATEATGLWAPTAYYLNHKANAAYNSQAPSGGRLGKDKPVLFIHARHDYACNTLTSRLSEPMRQACENLTEVTIETGHNSYFEQPEAVNAAISRFLVLEGRECWPGYADSGYSKKAV

SEQ ID NO: 13219 - DNA, 1020 bp, Muscodor strobelii
  misc_feature: SGI cDNA ID NO. 564323
  misc_feature: Encodes the peptide sequence at SEQ ID NO 13220
atgcctgtcgagtatcggggatcaaaagtgccgacatgctacgcaacatgtagtattggccacaatgagtcgcacacgttgcctttgaagcttaaggctatcgccgatgctggcttcgacgccattgagctatcaatgccagatatcatagcctacggcaaattactaaatggaaatgaaccaaatcctaaggactacgatactctcgttaatatcgccagagatatcaggacacaagtccaagagcacaacttgaagatcctcatgttgcagccttttgcgaatttcgaaggctggccaagggacagcaaggagcgcgaagacgcattcgacagggcaaggggatggctacggatcatggaggcagcaggaaccgacatgttgcaggtcggatcttcagatgccgaagggatatcatcgtctttcgatgatcttgccagcgaccttgccgagcttgcagacatgtgcgcaagcaaaggacagcgcatcgcgtacgagaactggtgctgggcgactcatgcgccaaattggaaagatgtttggcagattgtgcgaaaggcggacaggccgaatatcggattatgccttgacacgtttcagagtgcgggaggcgaatgggctgatccgaccacacagtcgggtcttgttgaggtcctttctcgagaggagctgggtgcgaaatggagtgaaagtctgaccgagttaaccagaacagtgcccccagaaaagatctacctgcttcaaatctcagatgcgtacaggatggagaaacctcttggatcagaaccgaacagcgagggcctgaggccaagaggacaatggagccatgattatcgccctttgccctacgacggaggctacctaccagtccaagacttcctcaatgccgttttagaaacaggcttcagaggctggttgtcgatagaagtattcgatgggaatgcacccgagaaatatgaagatatgggagaatttagcaagaaggccatgacgtctctcaagagacttttacaagaataa

SEQ ID NO: 13220 - protein, 339 aa, Muscodor strobelii
  misc_feature: SGI Peptide ID NO. 564323
  misc_feature (31)..(287): Pfam Id: PF01261 Pfam Desc: Xylose isomerase-like TIM barrel
  misc_feature (31)..(199): Pfam Id: PF01261 Pfam Desc: Xylose isomerase-like TIM barrel
  misc_feature (1)..(337): NCBI GI: 46138119 Blast Desc: FG10574.1 [Gibberella zeae PH-1]
  misc_feature (10)..(339): NCBI GI: 85111484 Blast Desc: NCU00838 [Neurospora crassa OR74A] gi|28925712|gb|EAA34722.1| NCU00838 [Neurospora crassa OR74A]
  misc_feature (10)..(338): NCBI GI: 159124325 Blast Desc: 3-dehydroshikimate dehydratase, [Aspergillus fumigatus A1163]
  misc_feature (8)..(337): NCBI GI: 171685290 Blast Desc: protein product [Podospora anserina] gi|170942606|emb|CAP68258.1| protein product [Podospora anserina]
  misc_feature (10)..(338): NCBI GI: 70991829 Blast Desc: 3-dehydroshikimate dehydratase [Aspergillus fumigatus Af293] gi|66848396|gb|EAL88725.1| 3-dehydroshikimate dehydratase, [Aspergillus fumigatus Af293]
  misc_feature (10)..(338): NCBI GI: 119469905 Blast Desc: 3-dehydroshikimate dehydratase, [Neosartorya fischeri NRRL 181] gi|119406142|gb|EAW16093.1| 3-dehydroshikimate dehydratase, [Neosartorya fischeri NRRL 181]
  misc_feature (8)..(338): NCBI GI: 238501622 Blast Desc: 3-dehydroshikimate dehydratase, [Aspergillus flavus NRRL3357] gi|220692282|gb|EED48629.1| 3-dehydroshikimate dehydratase, [Aspergillus flavus NRRL3357]
  misc_feature (8)..(338): NCBI GI: 169769178 Blast Desc: [Aspergillus oryzae RIB40] gi|83766917|dbj|BAE57057.1| protein product [Aspergillus oryzae]
  misc_feature (10)..(338): NCBI GI: 255932325 Blast Desc: Pc12g08910 [Penicillium chrysogenum Wisconsin 54-1255] gi|211582338|emb|CAP80518.1| Pc12g08910 [Penicillium chrysogenum Wisconsin 54-1255]
  misc_feature (9)..(338): NCBI GI: 212531447 Blast Desc: 3-dehydroshikimate dehydratase, [Penicillium marneffei ATCC 18224] gi|210071244|gb|EEA25333.1| 3-dehydroshikimate dehydratase, [Penicillium marneffei ATCC 18224]
MPVEYRGSKVPTCYATCSIGHNESHTLPLKLKAIADAGFDAIELSMPDIIAYGKLLNGNEPNPKDYDTLVNIARDIRTQVQEHNLKILMLQPFANFEGWPRDSKEREDAFDRARGWLRIMEAAGTDMLQVGSSDAEGISSSFDDLASDLAELADMCASKGQRIAYENWCWATHAPNWKDVWQIVRKADRPNIGLCLDTFQSAGGEWADPTTQSGLVEVLSREELGAKWSESLTELTRTVPPEKIYLLQISDAYRMEKPLGSEPNSEGLRPRGQWSHDYRPLPYDGGYLPVQDFLNAVLETGFRGWLSIEVFDGNAPEKYEDMGEFSKKAMTSLKRLLQE

SEQ ID NO: 13221 - DNA, 1326 bp, Muscodor strobelii
  misc_feature: SGI EST ID NO. CUFF.31572.0
  misc_feature: Variant of the nucleotide sequence at SEQ ID NO 13219
aacgccgggtgtgttactcccttgaatatttggtttaaagaggattcatttcacaggtatccaatttacacattcaatttcgtgcaaacaccagccattgttgcaacatgcctgtcgagtatcggggatcaaaagtgccgacatgctacgcaacatgtagtattggccacaatgagtcgcacacgttgcctttgaagcttaaggctatcgccgatgctggcttcgacgccattgagctatcaatgccagatatcatagcctacggcaaattactaaatggaaatgaaccaaatcctaaggactacgatactctcgttaatatcgccagagatatcaggacacaagtccaagagcacaacttgaagatcctcatgttgcagccttttgcgaatttcgaaggctggccaagggacagcaaggagcgcgaagacgcattcgacagggcaaggggatggctacggatcatggaggcagcaggaaccgacatgttgcaggtcggatcttcagatgccgaagggatatcatcgtctttcgatgatcttgccagcgaccttgccgagcttgcagacatgtgcgcaagcaaaggacagcgcatcgcgtacgagaactggtgctgggcgactcatgcgccaaattggaaagatgtttggcagattgtgcgaaaggcggacaggccgaatatcggattatgccttgacacgtttcagagtgcgggaggcgaatgggctgatccgaccacacagtcgggtcttgttgaggtcctttctcgagaggagctgggtgcgaaatggagtgaaagtctgaccgagttaaccagaacagtgcccccagaaaagatctacctgcttcaaatctcagatgcgtacaggatggagaaacctcttggatcagaaccgaacagcgagggcctgaggccaagaggacaatggagccatgattatcgccctttgccctacgacggaggctacctaccagtccaagacttcctcaatgccgttttagaaacaggcttcagaggctggttgtcgatagaagtattcgatgggaatgcacccgagaaatatgaagatatgggagaatttagcaagaaggccatgacgtctctcaagagacttttacaagaataacaacatgaaacgcaaggttgagtcttctgacgtaacaagttctctctacacttgtctcgtgtcgcgaagtggcttgcttattcgggtcaccacctgaagcaatacggtgcgccccatgcagcatgatacaggggttcagatgtgtatatataacagcgttattcggcacgttatttggaagataggtagaaagtcatcc

SEQ ID NO: 13222 - DNA, 1032 bp, Muscodor strobelii
  misc_feature: SGI cDNA ID NO. 564324
  misc_feature: Encodes the peptide sequence at SEQ ID NO 13223
atggccatagaagacatcatgcctcttcccctaattgacttgagcaagtactttgtatccgacttcccggaggataaacaaagcgttattcgccgagtggctaacgcctgtcgagactacggcgcctttcaggtgaaaggacatggaatatcgcttgaaacacaaattggcttattcaaagccatgacgaacgtcttcaatttgcctcaagaagagaaactggagctttcgttcctcaaaaatgcctgtcgtcggggctacgaagcctctggcatgacgctacgcgacgaagacacaatggctgattcaaaagagtgctactatgtcgggccagaggatactactatagaactctccggcttctacgggcccaacgtttggcccgatttgccacatgatcagttccgaaagtccgtctgggagcactaccaagcaacccggactctcgggaaaatcatttgggagataatgctgcaaggtctcggcttttcacccagtctagtggagacattcgcacagagacctctcatccccatgaagatgatccgctatcctcccgtaagcggtacgctccagggccaatacggggcgggcgcacatacggattttgccggtcttacagtcttgctccaggagcctgggaaacaggggcttgagatatggcataacgaccaatggttgcctgtggcggctcaggaagacgtatacgtgatcaacgtaggggatatgacggaacgatggtctagcggtcagtacaagagtgctcgacatagagtcgtgaatcagactggtgaatcgtctagattagcttgtgctactttttggcagggtgacgtgttcgcgacgaacccaatggccactaatgatagtaatactgagactatcggtcaggggttggtgagaacatttcgtaagcagtatcatctcgatcgagatgtccaagaggccgtattcggttgtgcttctgcgttggatgcaatggatactagcaagaagggtcaactgctgacgggtggatgcacagtatcataa

SEQ ID NO: 13223 - protein, 343 aa, Muscodor strobelii
  misc_feature: SGI Peptide ID NO. 564324
  misc_feature (175)..(277): Pfam Id: PF03171 Pfam Desc: 2OG-Fe(II) oxygenase superfamily
  misc_feature (1)..(321): NCBI GI: 189196476 Blast Desc: 2OG-Fe(II) oxygenase [Pyrenophora tritici-repentis Pt-1C-BFP] gi|187980455|gb|EDU47081.1| 2OG-Fe(II) oxygenase [Pyrenophora tritici-repentis Pt-1C-BFP]
  misc_feature (9)..(319): NCBI GI: 171680484 Blast Desc: protein product [Podospora anserina] gi|170939869|emb|CAP65095.1| protein product [Podospora anserina]
  misc_feature (9)..(309): NCBI GI: 145239687 Blast Desc: An08g03730 [Aspergillus niger] gi|134077001|emb|CAK45410.1| protein product [Aspergillus niger]
  misc_feature (9)..(309): NCBI GI: 121704375 Blast Desc: 2OG-Fe(II) oxygenase family oxidoreductase, [Aspergillus clavatus NRRL 1] gi|119398596|gb|EAW09025.1| 2OG-Fe(II) oxygenase family oxidoreductase, [Aspergillus clavatus
  misc_feature (3)..(295): NCBI GI: 240109919 Blast Desc: isopenicillin N synthetase, [Coccidioides posadasii C735 delta SOWgp]
  misc_feature (3)..(295): NCBI GI: 119184616 Blast Desc: CIMG_07085 [Coccidioides immitis RS]
  misc_feature (9)..(295): NCBI GI: 259480641 Blast Desc: TPA: conserved [Aspergillus nidulans FGSC A4]
  misc_feature (9)..(295): NCBI GI: 67901812 Blast Desc: AN7893.2 [Aspergillus nidulans FGSC A4] gi|40740357|gb|EAA59547.1| AN7893.2 [Aspergillus nidulans FGSC A4]
  misc_feature (9)..(295): NCBI GI: 242821861 Blast Desc: leucoanthocyanidin dioxygenase, [Talaromyces stipitatus ATCC 10500] gi|218712688|gb|EED12113.1| leucoanthocyanidin dioxygenase, [Talaromyces stipitatus ATCC
  misc_feature (1)..(279): NCBI GI: 242792659 Blast Desc: 1-aminocyclopropane-1-carboxylate oxidase, [Talaromyces stipitatus ATCC 10500] gi|218718587|gb|EED18007.1| 1-aminocyclopropane-1-carboxylate oxidase, [Talaromyces ATCC
  misc_feature (7)..(275): SWISSPROT Homolog: EC 1.14.17.4 Aminocyclopropanecarboxylate oxidase
MAIEDIMPLPLIDLSKYFVSDFPEDKQSVIRRVANACRDYGAFQVKGHGISLETQIGLFKAMTNVFNLPQEEKLELSFLKNACRRGYEASGMTLRDEDTMADSKECYYVGPEDTTIELSGFYGPNVWPDLPHDQFRKSVWEHYQATRTLGKIIWEIMLQGLGFSPSLVETFAQRPLIPMKMIRYPPVSGTLQGQYGAGAHTDFAGLTVLLQEPGKQGLEIWHNDQWLPVAAQEDVYVINVGDMTERWSSGQYKSARHRVVNQTGESSRLACATFWQGDVFATNPMATNDSNTETIGQGLVRTFRKQYHLDRDVQEAVFGCASALDAMDTSKKGQLLTGGCTVS

SEQ ID NO: 13224 - DNA, 1029 bp, Muscodor strobelii
  misc_feature: SGI cDNA ID NO. 564325
  misc_feature: Encodes the peptide sequence at SEQ ID NO 13225
atgcgctgggcggcatttttaagcgcttcgctagcagtagcgaatactgctgcgctagtgatacgacgcacagatgagcctgcggacgggttgtatatcgtagagaactcgtttgctactaccgtcgacgcggatcgggaagttcgcgaatactggactacggacaggatagattcaatgagtcacgacccatacgaccagcctaacgagacagttccattagaagatcgacatcgaggcgaggaatatgatggccaaggggcagtacctcacactgtcgggcgtcttctctggactgatgttactgaagatgggaattcggatagcagctgcacggcgactctagtccagagctctaatggagcgaccatcgtcacagcagcgcactgcttcaaagacaatggcaacacccccgaaacgacgggtaacaatacgaaatggcacatcaatctgctcttcattcctggctttcgcgataatatgccacggcttaactttaccttaaatcgcggctggataccgagcacgttcgcttacgaaaatgacgttttcaaaaatgatcgagcatttgcagttctcaacacggatttggtatcaggagaatcggccgagacattactcggcgcaggtcaacaaattggattcggcgccgcggaagcatcctatgatcttgtctacaacttaggctatccgcggtatgttgttacacaaagcgcggatcgtagtggctctccagcattcacaggacgaagactagcggcctgttatggcaaggctacagactggtggcgtgaggaatcgaacatggctggatttgcctgtcaaatgagcggtggatcaagtggcggacctcattttgccaactttgacacaactcagggtaccggcatggtggtgtcggtgaatagtattctcgatattgcgaagccgaacgggacggaatcatacgagtacggcacgtcagtcacggacgatttttccaaactcatgttcgagactgctcaggccgtgcacccttctctcacctaa

SEQ ID NO: 13225 - protein, 342 aa, Muscodor strobelii
  misc_feature: SGI Peptide ID NO. 564325
  misc_feature (36)..(335): NCBI GI: 254387685 Blast Desc: conserved [Streptomyces clavuligerus ATCC 27064] gi|197701410|gb|EDY47222.1| conserved [Streptomyces clavuligerus ATCC 27064]
  misc_feature (34)..(335): NCBI GI: 256666735 Blast Desc: StAA4_06306 [Streptomyces sp. AA4]
  misc_feature (39)..(335): NCBI GI: 269127579 Blast Desc: Tcur_3373 [Thermomonospora curvata DSM 43183] gi|268312537|gb|ACY98911.1| Tcur_3373 [Thermomonospora curvata DSM 43183]
  misc_feature (33)..(337): NCBI GI: 72161149 Blast Desc: Tfu_0745 [Thermobifida fusca YX] gi|71914881|gb|AAZ54783.1| Tfu_0745 [Thermobifida fusca YX]
  misc_feature (33)..(291): NCBI GI: 282864886 Blast Desc: SACTEDRAFT_4485 [Streptomyces sp. ACTE] gi|282560311|gb|EFB65859.1| SACTEDRAFT_4485 [Streptomyces sp. ACTE]
  misc_feature (33)..(335): NCBI GI: 229208112 Blast Desc: NdasDRAFT_3664 [Nocardiopsis dassonvillei subsp. dassonvillei DSM 43111] gi|228569170|gb|EEK33694.1| NdasDRAFT_3664 [Nocardiopsis dassonvillei subsp. dassonvillei DSM
  misc_feature (41)..(306): NCBI GI: 254387687 Blast Desc: conserved [Streptomyces clavuligerus ATCC 27064] gi|197701412|gb|EDY47224.1| conserved [Streptomyces clavuligerus ATCC 27064]
  misc_feature (80)..(335): NCBI GI: 269124553 Blast Desc: Tcur_0281 [Thermomonospora curvata DSM 43183] gi|268309511|gb|ACY95885.1| Tcur_0281 [Thermomonospora curvata DSM 43183]
  misc_feature (33)..(304): NCBI GI: 271963497 Blast Desc: Sros_1962 [Streptosporangium roseum DSM 43021] gi|270506672|gb|ACZ84950.1| Sros_1962 [Streptosporangium roseum DSM 43021]
  misc_feature (24)..(337): NCBI GI: 256782492 Blast Desc: ShygA5_47525 [Streptomyces hygroscopicus ATCC 53653]
MRWAAFLSASLAVANTAALVIRRTDEPADGLYIVENSFATTVDADREVREYWTTDRIDSMSHDPYDQPNETVPLEDRHRGEEYDGQGAVPHTVGRLLWTDVTEDGNSDSSCTATLVQSSNGATIVTAAHCFKDNGNTPETTGNNTKWHINLLFIPGFRDNMPRLNFTLNRGWIPSTFAYENDVFKNDRAFAVLNTDLVSGESAETLLGAGQQIGFGAAEASYDLVYNLGYPRYVVTQSADRSGSPAFTGRRLAACYGKATDWWREESNMAGFACQMSGGSSGGPHFANFDTTQGTGMVVSVNSILDIAKPNGTESYEYGTSVTDDFSKLMFETAQAVHPSLT

SEQ ID NO: 13226 - DNA, 451 bp, Muscodor strobelii
  misc_feature: SGI EST ID NO. CUFF.31581.0
  misc_feature: Variant of the nucleotide sequence at SEQ ID NO 13224
ctcgtttgctactaccgtcgacgcggatcgggaagttcgcgaatactggactacggacaggatagattcaatgagtcacgacccatacgaccagcctaacgagacagttccattagaagatcgacatcgaggcgaggaatatgatggccaaggggcagtacctcacactgtcgggcgtcttctctggactgatgttactgaagatgggaattcggatagcagctgcacggcgactctagtccagagctctaatggagcgaccatcgtcacagcagcgcactgcttcaaagacaatggcaacacccccgaaacgacgggtaacaatacgaaatggcacatcaatctgctcttcattcctggctttcgcgataatatgccacggcttaactttaccttaaatcgcggctggataccgagcacgttcgcttacgaaaatgacgttttcaaaaat

SEQ ID NO: 13227 - DNA, 651 bp, Muscodor strobelii
  misc_feature: SGI cDNA ID NO. 564326
  misc_feature: Encodes the peptide sequence at SEQ ID NO 13228
atgctctacggtcgtctcgattatttgcacaattatcgaaatgacctggcagaagacaactcaaacttcgtcttattatctttacgccaagaacggatagaagcgcaaagatttggcgcgacagcgactggagaatacatgacacaatacaacgccgtagattggcgaaacagactggagttccttcttcgtggcgtcgtatggtatgtgcctgattgggaaactactttaggctgggacggccccgacttgggggaatgccaggcggaagtaatgtcagggaaccccaatataggaaacacgtatggtattgcgataggcgatcgaatcatccgtcctttcattgacgggcaacatctctcgttatctgagcagtgtcatatttactatgccctcgcccttgttatgattcacgaattgtcgcatgtcatcagagaggctcgcatgtttgatgatgatgaaactttcggcaattacctccgtccagaacatatacccggcgagcaggagccttgcgttgatttcggagaccagcgggaaatgggtttctggtgtgagaagcagttattcggaggtgcaacatcgttacaatgtaggtctcagagagccgatggcaaatttctaacgtcaggtcgtacctgggaagattga

SEQ ID NO: 13228 - protein, 216 aa, Muscodor strobelii
  misc_feature: SGI Peptide ID NO. 564326
MLYGRLDYLHNYRNDLAEDNSNFVLLSLRQERIEAQRFGATATGEYMTQYNAVDWRNRLEFLLRGVVWYVPDWETTLGWDGPDLGECQAEVMSGNPNIGNTYGIAIGDRIIRPFIDGQHLSLSEQCHIYYALALVMIHELSHVIREARMFDDDETFGNYLRPEHIPGEQEPCVDFGDQREMGFWCEKQLFGGATSLQCRSQRADGKFLTSGRTWED

SEQ ID NO: 13229 - DNA, 279 bp, Muscodor strobelii
  misc_feature: SGI EST ID NO. CUFF.31591.0
  misc_feature: Variant of the nucleotide sequence at SEQ ID NO 13227
cagggaaccccaatataggaaacacgtatggtattgcgataggcgatcgaatcatccgtcctttcattgacgggcaacatctctcgttatctgagcagtgtcatatttactatgccctcgcccttgttatgattcacgaattgtcgcatgtcatcagagaggctcgcatgtttgatgatgatgaaactttcggcaattacctccgtccagaacatatacccggcgagcaggagccttgcgttgatttcggagaccagcgggaaatgggtttctggtgtg

SEQ ID NO: 13230 - DNA, 1713 bp, Muscodor strobelii
  misc_feature: SGI cDNA ID NO. 564327
  misc_feature: Encodes the peptide sequence at SEQ ID NO 13231
atggcctcctctccaggcgccaaagcagcgccaacctcacaaactgagcaaacagccgcagtccgcggggcctcagtcctcatcctcctccagatcgcctcacgcgcaataacattcatagcaaaccaactcctactacgttttctcaccgcgcagcttctgggcgtctcagcgcaattagaagtctactacctctcagtcctattcttcgcccgcgagagtctgcgcgtagccgtgcagcgccaaagctctagtgatgacgcagacaagaaagaagggaatgcgacaggaagtcaatcagtcgtgaatatcgcctatctagccattgtattgggtctggcatcttcggggggcttgggctgggcgtatttacattatgtcgactcagcgactgccatgacgccgcatcttgataaagcactgtggatatatgccttagctgcaatcgttgagttgctctccgagccagcgttcgtcgtgttgcagcatcgactacgtttcggtcctcgagctgccgcagagtcgatcgcgacgtttttacgctgcatcgtgacattcactttcgtgaattgggcatggagaaaaggctcagatgtaggggcactaccctttgccttcggccaactcgcgtacggcgtgggattgcttgccgtatacacattctatggcttcaggttatcaagcacagagggattctcacttctacctactcaaatactaggccagaagaagtctctcaaaacatacttcctcggctacttctacacgcccacattacaactcgcatcaagtctcatcgcccaatcattcgtaaaacacctcctaacacaaggcgacacatttctcgtctcaatactctcagatacgaaatcacagggcatatatgccctagcgaataactacggcagtctactcgcccgtctcgtattccaacctatcgaggagagcagcaggaattacttcagcaaactcctttcctccacagacatccagacatcaacagaggacaaaaaccaggaaaaggagaaaccccaaacccccaagccccaaatccaaaaagcacacatcgacctacaatcccttctaaaattctacatcctcctctctatcctcgttctcgcaataggacccttcgccggccccctcctcgtgcaaatcatcgccggcacccgctgggcatcatccggagccggattcgtcctcgcgcggtactgcctatacatcccactcctcgccatcaacggcgtagccgaggctttcgtctcctcagtcgccactgagtcagaagtccaccggcagagtctctggatgggcggtttcagcattgcattcgcggttgctggattcgtaagcctcaaggttatggaactaggcgctgcaggactggtttatgctaatgcgattaatatgctgtgtcggattctgtggagtgggaactttatatcgagttacttccgccgcaatggagtgagtttcagatggagcaaattggtacctgacagcgtagcgttatatgtcctatctaccgctgcgctttggggcaccttgttgaaagctgggatttctgtcggtgatgtgtcgaagcatgttttcaaggacatcgtcacagttggagctgttgcggtgccattcgtcgcagtgattgcctacgccgaacgccattacctcatggactgctacagcgcgatcgttggccgccgtaaggcatcctga

SEQ ID NO: 13231 - protein, 570 aa, Muscodor strobelii
  misc_feature: SGI Peptide ID NO. 564327
  misc_feature (18)..(562): Pfam Id: PF04506 Pfam Desc: Rft protein
  misc_feature (18)..(486): Pfam Id: PF04506 Pfam Desc: Rft protein
  misc_feature (9)..(548): NCBI GI: 145613030 Blast Desc: MGG_08271 [Magnaporthe grisea 70-15] gi|145020090|gb|EDK04318.1| MGG_08271 [Magnaporthe grisea 70-15]
  misc_feature (4)..(555): NCBI GI: 256725849 Blast Desc: NECHADRAFT_43948 [Nectria haematococca mpVI 77-13-4]
  misc_feature (21)..(500): NCBI GI: 171677332 Blast Desc: protein product [Podospora anserina] gi|170936734|emb|CAP61392.1| protein product [Podospora anserina]
  misc_feature (21)..(570): NCBI GI: 116200967 Blast Desc: CHGG_08368 [Chaetomium globosum CBS 148.51] gi|88176886|gb|EAQ84354.1| CHGG_08368 [Chaetomium globosum CBS 148.51]
  misc_feature (1)..(499): NCBI GI: 156043045 Blast Desc: SS1G_10525 [Sclerotinia sclerotiorum 1980] gi|154694913|gb|EDN94651.1| SS1G_10525 [Sclerotinia sclerotiorum 1980]
  misc_feature (13)..(567): NCBI GI: 169613190 Blast Desc: SNOG_09726 [Phaeosphaeria nodorum SN15] gi|111061871|gb|EAT82991.1| SNOG_09726 [Phaeosphaeria nodorum SN15]
  misc_feature (21)..(463): NCBI GI: 46111509 Blast Desc: FG02636.1 [Gibberella zeae PH-1]
  misc_feature (18)..(567): NCBI GI: 189210952 Blast Desc: oligosaccharide translocation protein RFT1 [Pyrenophora tritici-repentis Pt-1C-BFP] gi|187977900|gb|EDU44526.1| oligosaccharide translocation protein
  misc_feature (20)..(489): NCBI GI: 164425464 Blast Desc: NCU05783 [Neurospora crassa OR74A] gi|157070935|gb|EAA30807.2| conserved [Neurospora crassa OR74A]
  misc_feature (18)..(561): NCBI GI: 225678020 Blast Desc: oligosaccharide translocation protein RFT1 [Paracoccidioides brasiliensis Pb03]
MASSPGAKAAPTSQTEQTAAVRGASVLILLQIASRAITFIANQLLLRFLTAQLLGVSAQLEVYYLSVLFFARESLRVAVQRQSSSDDADKKEGNATGSQSVVNIAYLAIVLGLASSGGLGWAYLHYVDSATAMTPHLDKALWIYALAAIVELLSEPAFVVLQHRLRFGPRAAAESIATFLRCIVTFTFVNWAWRKGSDVGALPFAFGQLAYGVGLLAVYTFYGFRLSSTEGFSLLPTQILGQKKSLKTYFLGYFYTPTLQLASSLIAQSFVKHLLTQGDTFLVSILSDTKSQGIYALANNYGSLLARLVFQPIEESSRNYFSKLLSSTDIQTSTEDKNQEKEKPQTPKPQIQKAHIDLQSLLKFYILLSILVLAIGPFAGPLLVQIIAGTRWASSGAGFVLARYCLYIPLLAINGVAEAFVSSVATESEVHRQSLWMGGFSIAFAVAGFVSLKVMELGAAGLVYANAINMLCRILWSGNFISSYFRRNGVSFRWSKLVPDSVALYVLSTAALWGTLLKAGISVGDVSKHVFKDIVTVGAVAVPFVAVIAYAERHYLMDCYSAIVGRRKAS

SEQ ID NO: 13232 - DNA, 2170 bp, Muscodor strobelii
  misc_feature: SGI EST ID NO. CUFF.31829.0
  misc_feature: Variant of the nucleotide sequence at SEQ ID NO 13230
cggacactaaactccagtaatgcctcagctcgcacaactaaggccccgttcgacactgggtcacaacaccacggactgcatgtctcaatttgaagccacaatatcacaacctcaatgcaaacttcgtggccttcatcaagagtcaaattcacgaatgtgcccgcgatgaccacatctcatcactaaacctcttacactcacccaacccttcatcactccaccatggcctcctctccaggcgccaaagcagcgccaacctcacaaactgagcaaacagccgcagtccgcggggcctcagtcctcatcctcctccagatcgcctcacgcgcaataacattcatagcaaaccaactcctactacgttttctcaccgcgcagcttctgggcgtctcagcgcaattagaagtctactacctctcagtcctattcttcgcccgcgagagtctgcgcgtagccgtgcagcgccaaagctctagtgatgacgcagacaagaaagaagggaatgcgacaggaagtcaatcagtcgtgaatatcgcctatctagccattgtattgggtctggcatcttcggggggcttgggctgggcgtatttacattatgtcgactcagcgactgccatgacgccgcatcttgataaagcactgtggatatatgccttagctgcaatcgttgagttgctctccgagccagcgttcgtcgtgttgcagcatcgactacgtttcggtcctcgagctgccgcagagtcgatcgcgacgtttttacgctgcatcgtgacattcactttcgtgaattgggcatggagaaaaggctcagatgtaggggcactaccctttgccttcggccaactcgcgtacggcgtgggattgcttgccgtatacacattctatggcttcaggttatcaagcacagagggattctcacttctacctactcaaatactaggccagaagaagtctctcaaaacatacttcctcggctacttctacacgcccacattacaactcgcatcaagtctcatcgcccaatcattcgtaaaacacctcctaacacaaggcgacacatttctcgtctcaatactctcagatacgaaatcacagggcatatatgccctagcgaataactacggcagtctactcgcccgtctcgtattccaacctatcgaggagagcagcaggaattacttcagcaaactcctttcctccacagacatccagacatcaacagaggacaaaaaccaggaaaaggagaaaccccaaacccccaagccccaaatccaaaaagcacacatcgacctacaatcccttctaaaattctacatcctcctctctatcctcgttctcgcaataggacccttcgccggccccctcctcgtgcaaatcatcgccggcacccgctgggcatcatccggagccggattcgtcctcgcgcggtactgcctatacatcccactcctcgccatcaacggcgtagccgaggctttcgtctcctcagtcgccactgagtcagaagtccaccggcagagtctctggatgggcggtttcagcattgcattcgcggttgctggattcgtaagcctcaaggttatggaactaggcgctgcaggactggtttatgctaatgcgattaatatgctgtgtcggattctgtggagtgggaactttatatcgagttacttccgccgcaatggagtgagtttcagatggagcaaattggtacctgacagcgtagcgttatatgtcctatctaccgctgcgctttggggcaccttgttgaaagctgggatttctgtcggtgatgtgtcgaagcatgttttcaaggacatcgtcacagttggagctgttgcggtgccattcgtcgcagtgattgcctacgccgaacgccattacctcatggactgctacagcgcgatcgttggccgccgtaaggcatcctgatccgacgataccgttgcctcagatgatttatatatcctgctctatgactgaatgaatgccagtctcatgcgttgcttcataaatctaatcatcaaacgtggtcttcgtgcccttctttgacatgtctacatctttgaaaaacgcgccgtaggtgctgtgagccttcttcttgaccgtagtaccgaacttcatgagctcttccgggacaggttggttggcggccttgaggatgttg

SEQ ID NO: 13233 - DNA, 1800 bp, Muscodor strobelii
  misc_feature: SGI cDNA ID NO. 564328
  misc_feature: Encodes the peptide sequence at SEQ ID NO 13234
atgtcgaaacactctcttgaagacgttgaagtagaagcggacctcccgcgcaagaagtccaagaaagataagaaggaaaagaaagatcgcaaagagaagttgcgccaagatgagtccggtgtctcgacgccgatcctgagcgaggatgcgactgcgacaccagaagagccagagaccaaggtaaagaagagcaagaaagataaaaaggacaagaaagaaaagaaggaaaagaagcgaagcagagaacaggacgacgagaccgtagaggaaactgaggaatcctctaagaaggagaaaaaggacaagaaagcgaagaaagagaagaagcgcgcaaagcaagacgacgatgtcaacaccccgatgactaatggaacatctaatggtgtcgcatctgatgctatgaatggcacgaatggaacgaacgacacgacgaccgaaggatatcatgagaccgcaagcctgactgctgtcccgcaatccgagatcacggctttcttgagcactcaccagatcaccattggcgacccgctctccgacaagcctcttcgtcccatcacacagttctcacatttgccttcgacacccttgacctcgaagaacccgttcgcggctttccaaacgccaacgcctatccaagcggcctcgtggccttttggtctatcaggccgcgatattgtcggtgtggccgagacgggatctggaaagacaattgctttcggtctgcccctcatacacgccgtactaggcatgcctaagacgaaaggtgatggcaggatacgtgctgtcgtagtctcgcctacccgcgagctggcgatgcaaaccaacgacgagctttccagacttgccgcactcgtaggcttgaagacggtctgcgtgtacggcggtgcatcgaaagacgaccaacgaaatcttctccggaaagcagacatcatcgtcgcgactcctggtagacttaaggatttcctcgaggagggcgccgtcaagctcgagaacgccaaatttgttgttctcgacgaggcagatcgtatgctggacaaaggtttcgaagacgatatcaagctcattatcggcaagacaggtaggaaggaggatcgccagactcttatgtttaccgctacttggccacagagcgtccaggctctggctttgagtttcatggttactcccgtgcacatccagatcggtggcaacgagagtggtgatttgcaagccaacaccagaatttcgcagactgttgaagtcacggatcaacgcgcaaaggaaggtagattgctacagattctcaaggggcggccaaagaatgagagaatcttggtgttctgcttgtacaagaaagaagctacgcgagtcgaacagttcctgcaacagcgtggtatcaaggttgttggtattcacggcgatttgaagcaagaacagcgcactcgcagtttagaagctttcaagacgggccagacacctgttttggtcgctactgatgtggccgcccgtggtttggatattcctgaggtcaaactggttgtcaatgtcacattccctctcactatcgaggactacgtccaccgtatcggtcgtaccggacgcgctggcaagactggcgaggccattactctgtttactgagcatgataaagctcactctggagaattaatcaacatcctcaaggccgccaaccaacctgtcccggaagagctcatgaagttcggtactacggtcaagaagaaggctcacagcacctacggcgcgtttttcaaagatgtagacatgtcaaagaagggcacgaagaccacgtttgatgattag

SEQ ID NO: 13234 - protein, 599 aa, Muscodor strobelii
  misc_feature: SGI Peptide ID NO. 564328
  misc_feature (209)..(381): Pfam Id: PF00270 Pfam Desc: DEAD/DEAH box helicase
  misc_feature (453)..(529): Pfam Id: PF00271 Pfam Desc: Helicase conserved C-terminal domain
  misc_feature (148)..(598): NCBI GI: 46111511 Blast Desc: FG02637.1 [Gibberella zeae PH-1] gi|91206544|sp|Q4IJH1.1|DBP3_GIBZE RecName: Full=ATP-dependent RNA helicase DBP3
  misc_feature (122)..(598): NCBI GI: 85095256 Blast Desc: NCU05782 [Neurospora crassa OR74A] gi|74615933|sp|Q7S5R1.1|DBP3_NEUCR RecName: Full=ATP-dependent RNA helicase dbp-3 gi|28921501|gb|EAA30806.1| NCU05782 crassa
  misc_feature (161)..(597): NCBI GI: 171677330 Blast Desc: protein product [Podospora anserina] gi|170936733|emb|CAP61391.1| protein product [Podospora anserina]
  misc_feature (63)..(598): NCBI GI: 160380699 Blast Desc: protein product [Podospora anserina] gi|170936733|emb|CAP61391.1| protein product [Podospora anserina]
  misc_feature (96)..(598): NCBI GI: 154300880 Blast Desc: BC1G_10578 [Botryotinia fuckeliana B05.10] gi|160380613|sp|A6SCT6.1|DBP3_BOTFB RecName: Full=ATP-dependent RNA helicase dbp3 gi|150856326|gb|EDN31518.1| BC1G_10578 B05.10]
  misc_feature (148)..(598): NCBI GI: 169600899 Blast Desc: SNOG_03302 [Phaeosphaeria nodorum SN15] gi|118575175|sp|Q0UY62.1|DBP3_PHANO RecName: Full=ATP-dependent RNA helicase DBP3 gi|111068913|gb|EAT90033.1| SNOG_03302 nodorum
  misc_feature (138)..(598): NCBI GI: 145613028 Blast Desc: MGG_08272 [Magnaporthe grisea 70-15] gi|145020089|gb|EDK04317.1| MGG_08272 [Magnaporthe grisea 70-15]
  misc_feature (115)..(598): NCBI GI: 189211147 Blast Desc: ATP-dependent RNA helicase DBP3 [Pyrenophora tritici-repentis Pt-1C-BFP] gi|187977997|gb|EDU44623.1| ATP-dependent RNA helicase DBP3 [Pyrenophora tritici-repentis
  misc_feature (120)..(547): NCBI GI: 116200971 Blast Desc: CHGG_08370 [Chaetomium globosum CBS 148.51] gi|118575173|sp|Q2GUI4.1|DBP3_CHAGB RecName: Full=ATP-dependent RNA helicase DBP3 gi|88176888|gb|EAQ84356.1| CHGG_08370 globosum
  misc_feature (138)..(545): NCBI GI: 261358537 Blast Desc: ATP-dependent RNA helicase DBP3 [Verticillium albo-atrum VaMs.102]
MSKHSLEDVEVEADLPRKKSKKDKKEKKDRKEKLRQDESGVSTPILSEDATATPEEPETKVKKSKKDKKDKKEKKEKKRSREQDDETVEETEESSKKEKKDKKAKKEKKRAKQDDDVNTPMTNGTSNGVASDAMNGTNGTNDTTTEGYHETASLTAVPQSEITAFLSTHQITIGDPLSDKPLRPITQFSHLPSTPLTSKNPFAAFQTPTPIQAASWPFGLSGRDIVGVAETGSGKTIAFGLPLIHAVLGMPKTKGDGRIRAVVVSPTRELAMQTNDELSRLAALVGLKTVCVYGGASKDDQRNLLRKADIIVATPGRLKDFLEEGAVKLENAKFVVLDEADRMLDKGFEDDIKLIIGKTGRKEDRQTLMFTATWPQSVQALALSFMVTPVHIQIGGNESGDLQANTRISQTVEVTDQRAKEGRLLQILKGRPKNERILVFCLYKKEATRVEQFLQQRGIKVVGIHGDLKQEQRTRSLEAFKTGQTPVLVATDVAARGLDIPEVKLVVNVTFPLTIEDYVHRIGRTGRAGKTGEAITLFTEHDKAHSGELINILKAANQPVPEELMKFGTTVKKKAHSTYGAFFKDVDMSKKGTKTTFDD

SEQ ID NO: 13235 - DNA, 3977 bp, Muscodor strobelii
  misc_feature: SGI EST ID NO. CUFF.31830.1
  misc_feature: Variant of the nucleotide sequence at SEQ ID NO 13233
gggttgaaacatctctttccagtacatttagtccagttcggaccaatcactcgttgcagatatgtcgaaacactctcttgaagacgttgaagtagaagcggacctcccgcgcaagaagtccaagaaagataagaaggaaaagaaagatcgcaaagagaagttgcgccaagatgagtccggtgtctcgacgccgatcctgagcgaggatgcgactgcgacaccagaagagccagagaccaaggtaaagaagagcaagaaagataaaaaggacaagaaagaaaagaaggaaaagaagcgaagcagagaacaggacgacgagaccgtagaggaaactgaggaatcctctaagaaggagaaaaaggacaagaaagcgaagaaagagaagaagcgcgcaaagcaagacgacgatgtcaacaccccgatgactaatggaacatctaatggtgtcgcatctgatgctatgaatggcacgaatggaacgaacgacacgacgaccgaaggatatcatgagaccgcaagcctgactgctgtcccgcaatccgagatcacggctttcttgagcactcaccagatcaccattggcgacccgctctccgacaagcctcttcgtcccatcacacagttctcacatttgccttcgacacccttgacctcgaagaacccgttcgcggctttccaaacgccaacgcctatccaagcggcctcgtggccttttggtctatcaggccgcgatattgtcggtgtggccgagacgggatctggaaagacaattgctttcggtctgcccctcatacacgccgtactaggcatgcctaagacgaaaggtgatggcaggatacgtgctgtcgtagtctcgcctacccgcgagctggcgatgcaaaccaacgacgagctttccagacttgccgcactcgtaggcttgaagacggtctgcgtgtacggcggtgcatcgaaagacgaccaacgaaatcttctccggaaagcagacatcatcgtcgcgactcctggtagacttaaggatttcctcgaggagggcgccgtcaagctcgagaacgccaaatttgttgttctcgacgaggcagatcgtatgctggacaaaggtttcgaagacgatatcaagctcattatcggcaagacaggtaggaaggaggatcgccagactcttatgtttaccgctacttggccacagagcgtccaggctctggctttgagtttcatggttactcccgtgcacatccagatcggtggcaacgagagtggtgatttgcaagccaacaccagaatttcgcagactgttgaagtcacggatcaacgcgcaaaggaaggtagattgctacagattctcaaggggcggccaaagaatgagagaatcttggtgttctgcttgtacaagaaagaagctacgcgagtcgaacagttcctgcaacagcgtggtatcaaggttgttggtattcacggcgatttgaagcaagaacagcgcactcgcagtttagaagctttcaagacgggccagacacctgttttggtcgctactgatgtggccgcccgtggtttggatattcctgaggtcaaactggttgtcaatgtcacattccctctcactatcgaggactacgtccaccgtatcggtcgtaccggacgcgctggcaagactggcgaggccattactctgtttactgagcatgataaagctcactctggagaattaatcaacatcctcaaggccgccaaccaacctgtcccggaagagctcatgaagttcggtactacggtcaagaagaaggctcacagcacctacggcgcgtttttcaaagatgtagacatgtcaaagaagggcacgaagaccacgtttgatgattagatttatgaagcaacgcatgagactggcattcattcagtcatagagcaggatatataaatcatctgaggcaacggtatcgtcggatcaggatgccttacggcggccaacgatcgcgctgtagcagtccatgaggtaatggcgttcggcgtaggcactactagcggtcagcttcgatgtctctagacaatagagcatgtagagattaaagactatagcatagaataaagggcaaaaattgaacaagcacttacatcactgcgacgaatggcaccgcaacagctccaactgtgacgatgtccttgaaaacatgcttcgacacatcaccgacagaaatcccagctttcaacaaggtgccccaaagcgcagcggtagataggacatataacgctacgctgtcaggtaccaatttgctccatctgaaactcactccattgcggcggaagtaactcgatataaagttcccactccacagaatccgacacagcatattaatcgcattagcataaaccagtcctgcagcgcctagttccataaccttgaggcttacgaatccagcaaccgcgaatgcaatgctgaaaccgcccatccagagactctgccggtggacttctgactcagtggcgactgaggagacgaaagcctcggctacgccgttgatggcgaggagtgggatgtataggcagtaccgcgcgaggacgaatccggctccggatgatgcccagcgggtgccggcgatgatttgcacgaggagggggccggcgaagggtcctattgcgagaacgaggatagagaggaggatgtagaattttagaagggattgtaggtcgatgtgtgctttttggatttggggcttgggggtttggggtttctccttttcctggtttttgtcctctgttgatgtctggatgtctgtggaggaaaggagtttgctgaagtaattcctgctgctctcctcgataggttggaatacgagacgggcgagtagactgccgtagttattcgctagggcatatatgccctgtgatttcgtatctgagagtattgagacgagaaatgtgtcgccttgtgttaggaggtgttttacgaatgattgggcgatgagacttgatgcgagttgtaatgtgggcgtgtagaagtagccgaggaagtatgttttgagagacttcttctggcctagtatttgagtaggtagaagtgagaatccctctgtgcttgataacctgaagccatagaatgtgtatacggcaagcaatcccacgccgtacgcgagttggccgaaggcaaagggtagtgcccctacatctgagccttttctccatgcccaattcacgaaagtgaatgtcacgatgcagcgtaaaaacgtcgcgatcgactctgcggcagctcgaggaccgaaacgtagtcgatgctgcaacacgacgaacgctggctcggagagcaactcaacgattgcagctaaggcatatatccacagtgctttatcaagatgcggcgtcatggcagtcgctgagtcgacataatgtaaatacgcccagcccaagccccccgaagatgccagacccaatacaatggctagataggcgatattcacgactgattgacttcctgtcgcattcccttctttcttgtctgcgtcatcactagagctttggcgctgcacggctacgcgcagactctcgcgggcgaagaataggactgagaggtagtagacttctaattgcgctgagacgcccagaagctgcgcggtgagaaaacgtagtaggagttggtttgctatgaatgttattgcgcgtgaggcgatctggaggaggatgaggactgaggccccgcggactgcggctgtttgctcagtttgtgaggttggcgctgctttggcgcctggagaggaggccatggtggagtgatgaagggttgggtgagtgtaagaggtttagtgatgagatgtggtcatcgcgggcacattcgtgaatttgactcttgatgaaggccacgaagtttgcattgaggttgtgatattgtggcttcaaattgagacatgcagtccgtggtgttgtgacccagtgtcgaacggggccttagttgtgcgagctgaggcattactggagtttagtgtccg

SEQ ID NO: 13236 - DNA, 561 bp, Muscodor strobelii
  misc_feature: SGI cDNA ID NO. 564329
  misc_feature: Reduced expression when VOC is produced
  misc_feature: Encodes the peptide sequence at SEQ ID NO 13237
atgctctccagaacacttgccaacgctgcgcgacgagcagtaacatcgtctgcgcctcgcgccgccttacgccaaaccctcagcccagtcaccagcgccaatgtcgcccgcagatcataccacgagaaagtattagatcattacaacaagcctcgcaacgttggatccatgctcaagaccgatgccgacgttggtaccggtttggtcggagccccggcctgtggcgatgtcatgaagcttcagatccgtgtcgaccccaacaacaacaccatctccgatgtcaaatttaagacctttgggtgtggcagcgctattgctagctctagctacctgaccgagttggtgcgcggcatgacgttggaagaggctggcaagataaagaacaccgagattgcacaggagctttgcttaccgcccgtcaaacttcactgctctatgctggctgaagatgccatcaagtccgccatctcaaattactacacaaagaatccgaatgcccgcccaacgaatctcgctggtaccgaggcttctctgcctaccggggaggcttctcttgcgtga

SEQ ID NO: 13237 - protein, 186 aa, Muscodor strobelii
  misc_feature: SGI Peptide ID NO. 564329
  misc_feature (39)..(166): Pfam Id: PF01592 Pfam Desc: NifU-like N terminal domain
  misc_feature (1)..(183): NCBI GI: 261197131 Blast Desc: iron sulfur cluster assembly protein [Ajellomyces dermatitidis SLH14081] gi|239595598|gb|EEQ78179.1| iron sulfur cluster assembly protein [Ajellomyces dermatitidis SLH14081] iron
  misc_feature (1)..(179): NCBI GI: 154300882 Blast Desc: BC1G_10579 [Botryotinia fuckeliana B05.10] gi|150856327|gb|EDN31519.1| BC1G_10579 [Botryotinia fuckeliana B05.10]
  misc_feature (1)..(183): NCBI GI: 156043049 Blast Desc: SS1G_10527 [Sclerotinia sclerotiorum 1980] gi|154694915|gb|EDN94653.1| SS1G_10527 [Sclerotinia sclerotiorum 1980]
  misc_feature (31)..(182): NCBI GI: 169600127 Blast Desc: SNOG_02892 [Phaeosphaeria nodorum SN15] gi|160705383|gb|EAT89623.2| SNOG_02892 [Phaeosphaeria nodorum SN15]
  misc_feature (27)..(183): NCBI GI: 154270030 Blast Desc: iron sulfur cluster assembly protein 1, mitochondrial precursor [Ajellomyces capsulatus NAm1] gi|150413783|gb|EDN09160.1| iron sulfur cluster assembly protein
  misc_feature (1)..(174): NCBI GI: 256725853 Blast Desc: NECHADRAFT_62259 [Nectria haematococca mpVI 77-13-4]
  misc_feature (25)..(183): NCBI GI: 240107849 Blast Desc: NifU-like protein, [Coccidioides posadasii C735 delta SOWgp]
  misc_feature (32)..(186): NCBI GI: 226293836 Blast Desc: iron sulfur cluster assembly protein [Paracoccidioides brasiliensis Pb18]
  misc_feature (4)..(184): NCBI GI: 85095240 Blast Desc: iron sulfur cluster assembly protein 1, mitochondrial precursor [Neurospora crassa OR74A] gi|28921497|gb|EAA30802.1| iron sulfur cluster assembly protein 1, mitochondrial precursor
  misc_feature (11)..(179): NCBI GI: 255949844 Blast Desc: Pc22g17800 [Penicillium chrysogenum Wisconsin 54-1255] gi|211592706|emb|CAP99068.1| Pc22g17800 [Penicillium chrysogenum Wisconsin 54-1255]
  misc_feature: Useful for introducing or modulating the production of volatile compounds
MLSRTLANAARRAVTSSAPRAALRQTLSPVTSANVARRSYHEKVLDHYNKPRNVGSMLKTDADVGTGLVGAPACGDVMKLQIRVDPNNNTISDVKFKTFGCGSAIASSSYLTELVRGMTLEEAGKIKNTEIAQELCLPPVKLHCSMLAEDAIKSAISNYYTKNPNARPTNLAGTEASLPTGEASLA

SEQ ID NO: 13238 - DNA, 1308 bp, Muscodor strobelii
  misc_feature: SGI EST ID NO. CUFF.32121.1
  misc_feature: Variant of the nucleotide sequence at SEQ ID NO 13236
ctttgaagcaactttcctaagtttctctgacttcatctccctttgcctacgactcattcattgacacatcaatcgtcacacgtcaaaacgtccccgagcccaacgatatttataggaatcgatatcgcgctttggtctcaacctcctatccaccaaaataaaacatcgacgacaccagacaatttgacatctgatcaattccagcaacatgctctccagaacacttgccaacgctgcgcgacgagcagtaacatcgtctgcgcctcgcgccgccttacgccaaaccctcagcccagtcaccagcgccaatgtcgcccgcagatcataccacgagaaagtattagatcattacaacaagcctcgcaacgttggatccatgctcaagaccgatgccgacgttggtaccggtttggtcggagccccggcctgtggcgatgtcatgaagcttcagatccgtgtcgaccccaacaacaacaccatctccgatgtcaaatttaagacctttgggtgtggcagcgctattgctagctctagctacctgaccgagttggtgcgcggcatgacgttggaagaggctggcaagataaagaacaccgagattgcacaggagctttgcttaccgcccgtcaaacttcactgctctatgctggctgaagatgccatcaagtccgccatctcaaattactacacaaagaatccgaatgcccgcccaacgaatctcgctggtaccgaggcttctctgcctaccggggaggcttctcttgcgtgaagctgagcacccagacattcgcttgatttgatttgtgctatgcaccttgcaccgttgcatttttcatgatcacaatacccgcaacgtcgaggttagaggagggttatggtttacgactcagaaggaagggagattcgagtcagcacattggattctctctctatggcatcggaaaaaactggccacgacggccacgctccaatgagcttgaaacaggatgtgcgggacaattcgccctcgggtacctgtagtatgatattcggtggaggagttggttgcattttcacggtcgaagccattcaacaaaggcaaaagcatcctcacgcaaattgtatcatagcctcatgaataaacctaaaaaatgacatcccccacaaacatcttgtactcaaatttttttggtcgtgtccattactgccacagatcacttcgttctcttcaaagcctatggatgactcttggaagcaatcagtctagtggggaatactggctgctaggagaggcgcgacattgaaaatcgagagaaaatcacccgtggc

SEQ ID NO: 13239 - DNA, 870 bp, Muscodor strobelii
  misc_feature: SGI cDNA ID NO. 564330
  misc_feature: Encodes the peptide sequence at SEQ ID NO 13240
atggcagcgaagaggacagtactgataacaggatgctcagatggtggtttaggagcttcgctcgcaaaggcatttcacgtggcaggatggcgtgtctttgcatttgctcgcagcacgtcaaaactacagcaagtggaagatttaggcattgagacgatccaactagacatcacctcgaaagaatctatcaacaacgccgtcgccgagatatcagaactcacaggtggctccctcgactgcctagtgaacaatgccggcggcgggtattctcttcccatgctcgatgtcgacgtggataaagttcgacaactcttcgagttgaacacattctccctgatcacaatgacacaagtcttcgctcctttattaatgaggtcgagtcatggcgccttattggtgaatcacacttcgatcacctcccagactgccggcgcattcccatttcaaggagcgtacaacgcatcaaagggtgcggcttcgcaatttactgagaccatgcggctcgagctcgcgcccttcaacatcaaggtcatcaatatcttgacgggggctgtcaattcgaaattcttcgagaacaaaagcgaccaattacctcctagttcactctacaacatagctaaggaaagcgtcgaacgagctatgaacggagaggctggtgcgaacgggactgatcctgatgaatgggcccgtgcagtcgtcagagacctcatgaaaccctcgccgcctcactggatctgggagggcttccttgctggccgtactcgcttcaattcattcttccctgttgggttctttgataataccgtcaagtccatgtttggggtagatgttgttgagcgtaagatcaaaggtttcgatgcacaaaaatga

SEQ ID NO: 13240 - protein, 289 aa, Muscodor strobelii
  misc_feature: SGI Peptide ID NO. 564330
  misc_feature (5)..(171): Pfam Id: PF00106 Pfam Desc: short chain dehydrogenase
  misc_feature (1)..(283): NCBI GI: 256723333 Blast Desc: NECHADRAFT_72692 [Nectria haematococca mpVI 77-13-4]
  misc_feature (1)..(283): NCBI GI: 46115124 Blast Desc: FG03404.1 [Gibberella zeae PH-1]
  misc_feature (6)..(225): NCBI GI: 242814001 Blast Desc: IBR finger domain protein [Talaromyces stipitatus ATCC 10500] gi|218714621|gb|EED14044.1| IBR finger domain protein [Talaromyces stipitatus ATCC 10500]
  misc_feature (5)..(284): NCBI GI: 242820004 Blast Desc: short-chain dehydrogenases/reductase, [Talaromyces stipitatus ATCC 10500] gi|218713894|gb|EED13318.1| short-chain dehydrogenases/reductase, [Talaromyces stipitatus ATCC 10500]
  misc_feature (3)..(283): NCBI GI: 212538923 Blast Desc: short-chain dehydrogenase, [Penicillium marneffei ATCC 18224] gi|210069359|gb|EEA23450.1| short-chain dehydrogenase, [Penicillium marneffei ATCC 18224]
  misc_feature (2)..(280): NCBI GI: 256723231 Blast Desc: NECHADRAFT_86494 [Nectria haematococca mpVI 77-13-4]
  misc_feature (3)..(248): NCBI GI: 119467458 Blast Desc: short-chain dehydrogenase/reductase, [Neosartorya fischeri NRRL 181] gi|119405687|gb|EAW15638.1| short-chain dehydrogenase/reductase, [Neosartorya fischeri NRRL 181]
  misc_feature (3)..(282): NCBI GI: 154317593 Blast Desc: BC1G_03148 [Botryotinia fuckeliana B05.10] gi|150844322|gb|EDN19515.1| BC1G_03148 [Botryotinia fuckeliana B05.10]
  misc_feature (3)..(260): NCBI GI: 146324313 Blast Desc: short-chain dehydrogenase/reductase [Aspergillus fumigatus Af293] gi|129556254|gb|EAL85701.2| short-chain dehydrogenase/reductase, [Aspergillus fumigatus Af293] fumigatus
  misc_feature (3)..(282): NCBI GI: 156049501 Blast Desc: SS1G_08457 [Sclerotinia sclerotiorum 1980] gi|154692856|gb|EDN92594.1| SS1G_08457 [Sclerotinia sclerotiorum 1980]
  misc_feature (4)..(283): SWISSPROT Homolog: EC 1.1.1.101 Acylglycerone-phosphate reductase
MAAKRTVLITGCSDGGLGASLAKAFHVAGWRVFAFARSTSKLQQVEDLGIETIQLDITSKESINNAVAEISELTGGSLDCLVNNAGGGYSLPMLDVDVDKVRQLFELNTFSLITMTQVFAPLLMRSSHGALLVNHTSITSQTAGAFPFQGAYNASKGAASQFTETMRLELAPFNIKVINILTGAVNSKFFENKSDQLPPSSLYNIAKESVERAMNGEAGANGTDPDEWARAVVRDLMKPSPPHWIWEGFLAGRTRFNSFFPVGFFDNTVKSMFGVDVVERKIKGFDAQK

SEQ ID NO: 13241 - DNA, 2634 bp, Muscodor strobelii
  misc_feature: SGI EST ID NO. CUFF.31612.0
  misc_feature: Variant of the nucleotide sequence at SEQ ID NO 13239
gaaagcttgaatcaccctatgaaatcactcacctcggagatatcagtccgcactgtatttcccgctttattactgtctatgacgacctttccaaggccaaacggggatctgtcagcactgtttcagggttccccagaatttcctttacagtgagggtgtagtaagttcatatatgaaaaaccctgtaatcagatcctgtcgcaccgtgcacgtatgcggcattctcgccttatcagatccgaaccaaacatcggagccgaggtcgcatatgccatatgccgtgccttcatcttcgtgtcgcaaaattaatgcaagcagcctagagaatccaaagtgtaactatggcccaggtagaaaagcccattttcgagtttgcctgtgactcagaccccaaagtgcgattcagaaggaattgtcgaactcgttatgaaaaatcattagatgccaacagcattgttcctgagagacaaacacgattttcggtaatcttctcttctagagttgtgatgcctgcaactgtctttaatcctatatattcaaaaccttcaatgttcggtctgaaatgacattgttagaagacatatctttggacagcatgcttttcgagtggtgcttaccgatactagagatcgatgattggtccatgaggtccacggcactccgtggatccgcgacctctctcacaacagcaattcccgatgtctactatttccattcggacggtcttccaatgttttgactaatcgcatagtacggttctgcagctaggggaaactagtcctcgctactttactatatcctgagtgcgtggcccatgatcaaacacctccgccggaacgcgaattataaatggacaagaccctcacgacgacttaccaattcgctaccaattcggaaaattagacggacacttgtcgatccgagatatgataagaccgtatctgaaaccaaactacgatcccctctgttgcttgacatatgacaatatcgaacttaaaaatggtgagcaagacgagcatggagcaggtcacgatatataagatgtagtctcgatgatattcttctaggcggttcggacccccaatgttctaggtctgccaccgatcgtcattcctcgcaataaagaccagaaaactcgtggcgattgtcaaaatggcagcgaagaggacagtactgataacaggatgctcagatggtggtttaggagcttcgctcgcaaaggcatttcacgtggcaggatggcgtgtctttgcatttgctcgcagcacgtcaaaactacagcaagtggaagatttaggcattgagacgatccaactagacatcacctcgaaagaatctatcaacaacgccgtcgccgagatatcagaactcacaggtggctccctcgactgcctagtgaacaatgccggcggcgggtattctcttcccatgctcgatgtcgacgtggataaagttcgacaactcttcgagttgaacacattctccctgatcacaatgacacaagtcttcgctcctttattaatgaggtcgagtcatggcgccttattggtgaatcacacttcgatcacctcccagactgccggcgcattcccatttcaaggagcgtacaacgcatcaaagggtgcggcttcgcaatttactgagaccatgcggctcgagctcgcgcccttcaacatcaaggtcatcaatatcttgacgggggctgtcaattcgaaattcttcgagaacaaaagcgaccaattacctcctagttcactctacaacatagctaaggaaagcgtcgaacgagctatgaacggagaggctggtgcgaacgggactgatcctgatgaatgggcccgtgcagtcgtcagagacctcatgaaaccctcgccgcctcactggatctgggagggcttccttgctggccgtactcgcttcaattcattcttccctgttgggttctttgataataccgtcaagtccatgtttggggtagatgttgttgagcgtaagatcaaaggtttcgatgcacaaaaatgatggagataagttaacaatcagggctcgaagagcgttttggagtcaaagaagcgcactcaatgttgaacagcaatggaattgacgtggaagtagatcatatacagataagtgcgccttattgctctcatttagttacaaattgggagctgtcttctctcggcccccttgaaagacaacatgcccatactccctataacccttattaccaaggttcaatataatgtacctatccctaaagtgctttgtatgatgataatcgtcgtgatgcttcacagtctcccaaccgacataaacaaggtaatttttcttgtgtcccgcaactggctcaaccatttgaccaccggatacgcccttacagccatcaacatatcgaaccacatgtgtccatagcggccatgcgccttcgtcccaagtctcatccgttcccagataaaccgcagttcctactggcatgcccggtgctttgccgagggcttggcagtcctcggtgaactctctcaagtacgcgtgacggatgaataatttcggtgtgttctctgctggtttcgaatcttgtgtgagttcattgaatatagggacaatctcgttccgatattttagcgagcgcagaaa

SEQ ID NO: 13242 - DNA, 375 bp, Muscodor strobelii
  misc_feature: SGI cDNA ID NO. 564331
  misc_feature: Elevated expression when VOC is produced
  misc_feature: Encodes the peptide sequence at SEQ ID NO 13243
atgcggctcgagctcgcgcccttcaacatcaaggtcatcaatatcttgacgggggctgtcaattcgaaattcttcgagaacaaaagcgaccaattacctcctagttcactctacaacatagctaaggaaagcgtcgaacgagctatgaacggagaggctggtgcgaacgggactgatcctgatgaatgggcccgtgcagtcgtcagagacctcatgaaaccctcgccgcctcactggatctgggagggcttccttgctggccgtactcgcttcaattcattcttccctgttgggttctttgataataccgtcaagtccatgtttggggtagatgttgttgagcgtaagatcaaaggtttcgatgcacaaaaatga

SEQ ID NO: 13243 - protein, 124 aa, Muscodor strobelii
  misc_feature: SGI Peptide ID NO. 564331
  misc_feature (1)..(119): NCBI GI: 242820004 Blast Desc: short-chain dehydrogenases/reductase, [Talaromyces stipitatus ATCC 10500] gi|218713894|gb|EED13318.1| short-chain dehydrogenases/reductase, [Talaromyces stipitatus ATCC 10500]
  misc_feature (1)..(118): NCBI GI: 46115124 Blast Desc: FG03404.1 [Gibberella zeae PH-1]
  misc_feature (1)..(118): NCBI GI: 212538923 Blast Desc: short-chain dehydrogenase, [Penicillium marneffei ATCC 18224] gi|210069359|gb|EEA23450.1| short-chain dehydrogenase, [Penicillium marneffei ATCC 18224]
  misc_feature (1)..(118): NCBI GI: 256723333 Blast Desc: NECHADRAFT_72692 [Nectria haematococca mpVI 77-13-4]
  misc_feature (1)..(114): NCBI GI: 256723231 Blast Desc: NECHADRAFT_86494 [Nectria haematococca mpVI 77-13-4]
  misc_feature (1)..(118): NCBI GI: 242769409 Blast Desc: estradiol 17 beta-dehydrogenase, [Talaromyces stipitatus ATCC 10500] gi|218724958|gb|EED24375.1| estradiol 17 beta-dehydrogenase, [Talaromyces stipitatus ATCC 10500]
  misc_feature (1)..(60): NCBI GI: 242814001 Blast Desc: IBR finger domain protein [Talaromyces stipitatus ATCC 10500] gi|218714621|gb|EED14044.1| IBR finger domain protein [Talaromyces stipitatus ATCC 10500]
  misc_feature (1)..(111): NCBI GI: 115389730 Blast Desc: conserved [Aspergillus terreus NIH2624] gi|114194766|gb|EAU36466.1| conserved [Aspergillus terreus NIH2624]
  misc_feature (1)..(119): NCBI GI: 116203869 Blast Desc: CHGG_09818 [Chaetomium globosum CBS 148.51] gi|88175946|gb|EAQ83414.1| CHGG_09818 [Chaetomium globosum CBS 148.51]
  misc_feature (1)..(124): NCBI GI: 256727397 Blast Desc: NECHADRAFT_90830 [Nectria haematococca mpVI 77-13-4]
  misc_feature (1)..(118): SWISSPROT Homolog: EC 1.1.1.101 Acylglycerone-phosphate reductase
  misc_feature: Useful for introducing or modulating the production of volatile compounds
MRLELAPFNIKVINILTGAVNSKFFENKSDQLPPSSLYNIAKESVERAMNGEAGANGTDPDEWARAVVRDLMKPSPPHWIWEGFLAGRTRFNSFFPVGFFDNTVKSMFGVDVVERKIKGFDAQK

SEQ ID NO: 13244 - DNA, 2634 bp, Muscodor strobelii; identical to SEQ ID NO: 13241
  misc_feature: SGI EST ID NO. CUFF.31612.0
  misc_feature: Variant of the nucleotide sequence at SEQ ID NO 13242

SEQ ID NO: 13245 - DNA, 714 bp, Muscodor strobelii
  misc_feature: SGI cDNA ID NO. 564332
  misc_feature: Encodes the peptide sequence at SEQ ID NO 13246
atgaacgatatggcacctcaacaagaattagcggcaacacagatcatctatctggtcgttccaccggagctggagctaggtggcaatggagaagctgggagcaaatggtcgactgtgcaagacattattgagaagtccacagggtttcagaggctatattgggggagacgattggaagaacccgaaaatgttcagcttcacatagtccgacgaactattcagcaacacgaagactttctgcgctcgctaaaatatcggaacgagattgtccctatattcaatgaactcacacaagattcgaaaccagcagagaacacaccgaaattattcatccgtcacgcgtacttgagagagttcaccgaggactgccaagccctcggcaaagcaccgggcatgccagtaggaactgcggtttatctgggaacggatgagacttgggacgaaggcgcatggccgctatggacacatgtggttcgatatgttgatggctgtaagggcgtatccggtggtcaaatggttgagccagttgcgggacacaagaaaaattaccttgtttatgtcggttgggagactgtgaagcatcacgacgattatcatcatacaaagcactttagggataggtacattatattgaaccttggtaataagggttatagggagtatgggcatgttgtctttcaagggggccgagagaagacagctcccaatttgtaa

SEQ ID NO: 13246 - protein, 237 aa, Muscodor strobelii
  misc_feature: SGI Peptide ID NO. 564332
  misc_feature (13)..(175): NCBI GI: 67516391 Blast Desc: AN0477.2 [Aspergillus nidulans FGSC A4] gi|40747420|gb|EAA66576.1| AN0477.2 [Aspergillus nidulans FGSC A4]
  misc_feature (13)..(227): NCBI GI: 189200889 Blast Desc: conserved [Pyrenophora tritici-repentis Pt-1C-BFP] gi|187983880|gb|EDU49368.1| conserved [Pyrenophora tritici-repentis Pt-1C-BFP]
MNDMAPQQELAATQIIYLVVPPELELGGNGEAGSKWSTVQDIIEKSTGFQRLYWGRRLEEPENVQLHIVRRTIQQHEDFLRSLKYRNEIVPIFNELTQDSKPAENTPKLFIRHAYLREFTEDCQALGKAPGMPVGTAVYLGTDETWDEGAWPLWTHVVRYVDGCKGVSGGQMVEPVAGHKKNYLVYVGWETVKHHDDYHHTKHFRDRYIILNLGNKGYREYGHVVFQGGREKTAPNL

SEQ ID NO: 13247 - DNA, 3106 bp, Muscodor strobelii
  misc_feature: SGI EST ID NO. CUFF.31613.1
  misc_feature: Variant of the nucleotide sequence at SEQ ID NO 13245
gtttgcgaacataaatgtgcaatacctaccttcggagcttgatactaagatgaccgaataaggcgactcgaaataaatagtgttgcggatgaacgatatggcacctcaacaagaattagcggcaacacagatcatctatctggtcgttccaccggagctggagctaggtggcaatggagaagctgggagcaaatggtcgactgtgcaagacattattgagaagtccacagggtttcagaggctatattgggggagacgattggaagaacccgaaaatgttcagcttcacatagtccgacgaactattcagcaacacgaagactttctgcgctcgctaaaatatcggaacgagattgtccctatattcaatgaactcacacaagattcgaaaccagcagagaacacaccgaaattattcatccgtcacgcgtacttgagagagttcaccgaggactgccaagccctcggcaaagcaccgggcatgccagtaggaactgcggtttatctgggaacggatgagacttgggacgaaggcgcatggccgctatggacacatgtggttcgatatgttgatggctgtaagggcgtatccggtggtcaaatggttgagccagttgcgggacacaagaaaaattaccttgtttatgtcggttgggagactgtgaagcatcacgacgattatcatcatacaaagcactttagggataggtacattatattgaaccttggtaataagggttatagggagtatgggcatgttgtctttcaagggggccgagagaagacagctcccaatttgtaactaaatgagagcaataaggcgcacttatctgtatatgatctacttccacgtcaattccattgctgttcaacattgagtgcgcttctttgactccaaaacgctcttcgagccctgattgttaacttatctccatcatttttgtgcatcgaaacctttgatcttacgctcaacaacatctaccccaaacatggacttgacggtattatcaaagaacccaacagggaagaatgaattgaagcgagtacggccagcaaggaagccctcccagatccagtgaggcggcgagggtttcatgaggtctctgacgactgcacgggcccattcatcaggatcagtcccgttcgcaccagcctctccgttcatagctcgttcgacgctttccttagctatgttgtagagtgaactaggaggtaattggtcgcttttgttctcgaagaatttcgaattgacagcccccgtcaagatattgatgaccttgatgttgaagggcgcgagctcgagccgcatggtctcagtaaattgcgaagccgcaccctttgatgcgttgtacgctccttgaaatgggaatgcgccggcagtctgggaggtgatcgaagtgtgattcaccaataaggcgccatgactcgacctcattaataaaggagcgaagacttgtgtcattgtgatcagggagaatgtgttcaactcgaagagttgtcgaactttatccacgtcgacatcgagcatgggaagagaatacccgccgccggcattgttcactaggcagtcgagggagccacctgtgagttctgatatctcggcgacggcgttgttgatagattctttcgaggtgatgtctagttggatcgtctcaatgcctaaatcttccacttgctgtagttttgacgtgctgcgagcaaatgcaaagacacgccactagagcattcgatgttagctgctgccattcctgtggtattgctagagatacttataaaatatggcatcaacactattgaccactcgctcacaaaacgagcatccgtagtgtgtgcgcggaagaggagatcggtcatgccattcacttactcctgccacgtgaaatgcctttgcgagcgaagctcctaaaccaccatctgagcatcctgttatcagtactgtcctcttcgctgccattttgacaatcgccacgagttttctggtctttattgcgaggaatgacgatcggtggcagacctagaacattgggggtccgaaccgcctagaagaatatcatcgagactacatcttatatatcgtgacctgctccatgctcgtcttgctcaccatttttaagttcgatattgtcatatgtcaagcaacagaggggatcgtagtttggtttcagatacggtcttatcatatctcggatcgacaagtgtccgtctaattttccgaattggtagcgaattggtaagtcgtcgtgagggtcttgtccatttataattcgcgttccggcggaggtgtttgatcatgggccacgcactcaggatatagtaaagtagcgaggactagtttcccctagctgcagaaccgtactatgcgattagtcaaaacattggaagaccgtccgaatggaaatagtagacatcgggaattgctgttgtgagagaggtcgcggatccacggagtgccgtggacctcatggaccaatcatcgatctctagtatcggtaagcaccactcgaaaagcatgctgtccaaagatatgtcttctaacaatgtcatttcagaccgaacattgaaggttttgaatatataggattaaagacagttgcaggcatcacaactctagaagagaagattaccgaaaatcgtgtttgtctctcaggaacaatgctgttggcatctaatgatttttcataacgagttcgacaattccttctgaatcgcactttggggtctgagtcacaggcaaactcgaaaatgggcttttctacctgggccatagttacactttggattctctaggctgcttgcattaattttgcgacacgaagatgaaggcacggcatatggcatatgcgacctcggctccgatgtttggttcggatctgataaggcgagaatgccgcatacgtgcacggtgcgacaggatctgattacagggtttttcatatatgaacttactacaccctcactgtaaaggaaattctggggaaccctgaaacagtgctgacagatccccgtttggccttggaaaggtcgtcatagacagtaataaagcgggaaatacagtgcggactgatatctccgaggtgagtgatttcatagggtgattcaagctttc

SEQ ID NO: 13248 - DNA, 705 bp, Muscodor strobelii
  misc_feature: SGI cDNA ID NO. 564333
  misc_feature: Encodes the peptide sequence at SEQ ID NO 13249
atggcacctcaacaagaattagcggcaacacagatcatctatctggtcgttccaccggagctggagctaggtggcaatggagaagctgggagcaaatggtcgactgtgcaagacattattgagaagtccacagggtttcagaggctatattgggggagacgattggaagaacccgaaaatgttcagcttcacatagtccgacgaactattcagcaacacgaagactttctgcgctcgctaaaatatcggaacgagattgtccctatattcaatgaactcacacaagattcgaaaccagcagagaacacaccgaaattattcatccgtcacgcgtacttgagagagttcaccgaggactgccaagccctcggcaaagcaccgggcatgccagtaggaactgcggtttatctgggaacggatgagacttgggacgaaggcgcatggccgctatggacacatgtggttcgatatgttgatggctgtaagggcgtatccggtggtcaaatggttgagccagttgcgggacacaagaaaaattaccttgtttatgtcggttgggagactgtgaagcatcacgacgattatcatcatacaaagcactttagggataggtacattatattgaaccttggtaataagggttatagggagtatgggcatgttgtctttcaagggggccgagagaagacagctcccaatttgtaa

SEQ ID NO: 13249 - protein, 234 aa, Muscodor strobelii
  misc_feature: SGI Peptide ID NO. 564333
  misc_feature (10)..(172): NCBI GI: 67516391 Blast Desc: AN0477.2 [Aspergillus nidulans FGSC A4] gi|40747420|gb|EAA66576.1| AN0477.2 [Aspergillus nidulans FGSC A4]
  misc_feature (10)..(224): NCBI GI: 189200889 Blast Desc: conserved [Pyrenophora tritici-repentis Pt-1C-BFP] gi|187983880|gb|EDU49368.1| conserved [Pyrenophora tritici-repentis Pt-1C-BFP]
MAPQQELAATQIIYLVVPPELELGGNGEAGSKWSTVQDIIEKSTGFQRLYWGRRLEEPENVQLHIVRRTIQQHEDFLRSLKYRNEIVPIFNELTQDSKPAENTPKLFIRHAYLREFTEDCQALGKAPGMPVGTAVYLGTDETWDEGAWPLWTHVVRYVDGCKGVSGGQMVEPVAGHKKNYLVYVGWETVKHHDDYHHTKHFRDRYIILNLGNKGYREYGHVVFQGGREKTAPNL

SEQ ID NO: 13250 - DNA, 3106 bp, Muscodor strobelii; identical to SEQ ID NO: 13247
  misc_feature: SGI EST ID NO. CUFF.31613.1
  misc_feature: Variant of the nucleotide sequence at SEQ ID NO 13248

SEQ ID NO: 13251 - DNA, 1386 bp, Muscodor strobelii
  misc_feature: SGI cDNA ID NO. 564334
  misc_feature: Elevated expression when VOC is produced
  misc_feature: Encodes the peptide sequence at SEQ ID NO 13252
atggctccggtcacaaatttcgccgttaaagagaaatacaagtacttatatggcttcaacggttatcactcatcggaagcaataccaggagcaaacccagaggtcatcaacacaccgcaaaagccaccgtttggcttgagaacagagagaatcacaaattcgtcattcacagcgcctcgcgagaagaacatacaaacatggctatatcgcgtgacatcttctctggcccatggcgaattcacacccctggacgaaaactccgagactgcaaatccgccagctccaactcagctcacgcctaattcatatctttggcctcagatcccagtcgatgatgatgcggattggacttcgcaaaaactcatgggttgtaatggcgaccctcagcagaaacgtggcttagcactgtggttgttcagcgttacgaaggatatgcccgtcaacacagcattttccactattgatggagaatcgttgattattccccaatccggagcgttagacatccaaactgagctgggaaaactacttgttcgacaaaacgaaatcgccgtcatcccccgaaacgttcggtaccgcgtcacgcttccgggcggtttgccagctcgaggctacattatagagctctttgaaggacattatgaactcccgaatttaggaattgtcggctcaaccggcctggccaatgtgcgcgacttccaggttcccgttgcgtattttgatggagacttggtaactgatgggaaggggggcaaaactgccaaatcctctacggcgaacggcaattggaagattatctcacgccttaatggtcagctttggatatctacgcaagctcagacaccctttgatgttgtagcatggcatggaacttgttacccttacaaatacgatcttgcacgcttctgcgtactcggaaatgttctttttgatgagcatgatccctgtctctacaccgtcctcacagcacccgcacacggcagcggacctggaacagcagtcttagacttcgccatcgtcccaccccgctggcaagcgaccgaagacacactctggctaccgtatttccaccgcaacgtgatgcaagaattcgccatgatgattgtaaacgagcaatctcccgagtttccattcaacaacagtcacaacttcgcgcctatcgctggattattgaacggttcaatggccgctcacggatctggcgaagaagaattccaagcagcgactaatgacattgatacgatgaaacccgctaagttgcagactggtggcctaacgattggcttacttgagacagagcgtccgttgtatttgagtaagtgggcgtatgagtgtgcgttcaagaatttcaacgggaaagctggaggagggatatcgaaattgtga

SEQ ID NO: 13252 - protein, 461 aa, Muscodor strobelii
  misc_feature: SGI Peptide ID NO. 564334
  misc_feature (12)..(450): Pfam Id: PF04209 Pfam Desc: homogentisate 1,2-dioxygenase
  misc_feature (12)..(365): Pfam Id: PF04209 Pfam Desc: homogentisate 1,2-dioxygenase
  misc_feature (3)..(446): NCBI GI: 115390583 Blast Desc: homogentisate 1,2-dioxygenase [Aspergillus terreus NIH2624] gi|114193720|gb|EAU35420.1| homogentisate 1,2-dioxygenase [Aspergillus terreus NIH2624]
  misc_feature (3)..(448): NCBI GI: 256724315 Blast Desc: [Nectria haematococca mpVI 77-13-4]
  misc_feature (3)..(448): NCBI GI: 46124145 Blast Desc: FG06450.1 [Gibberella zeae PH-1]
  misc_feature (3)..(448): NCBI GI: 226288133 Blast Desc: homogentisate 1,2-dioxygenase [Paracoccidioides brasiliensis Pb18]
  misc_feature (3)..(448): NCBI GI: 226282871 Blast Desc: homogentisate 1,2-dioxygenase [Paracoccidioides brasiliensis Pb01]
  misc_feature (3)..(448): NCBI GI: 225561207 Blast Desc: homogentisate 1,2-dioxygenase [Ajellomyces capsulatus G186AR]
  misc_feature (3)..(448): NCBI GI: 240277946 Blast Desc: homogentisate 1,2-dioxygenase [Ajellomyces capsulatus H143]
  misc_feature (3)..(448): NCBI GI: 154274530 Blast Desc: homogentisate 1,2-dioxygenase [Ajellomyces capsulatus NAm1] gi|150414556|gb|EDN09918.1| homogentisate 1,2-dioxygenase [Ajellomyces capsulatus NAm1]
  misc_feature (3)..(448): NCBI GI: 189189748 Blast Desc: homogentisate 1,2-dioxygenase [Pyrenophora tritici-repentis Pt-1C-BFP] gi|187972819|gb|EDU40318.1| homogentisate 1,2-dioxygenase [Pyrenophora tritici-repentis
  misc_feature (3)..(448): NCBI GI: 261199752 Blast Desc: homogentisate 1,2-dioxygenase [Ajellomyces dermatitidis SLH14081] gi|239594485|gb|EEQ77066.1| homogentisate 1,2-dioxygenase [Ajellomyces dermatitidis SLH14081] homogentisate
  misc_feature (3)..(448): SWISSPROT Homolog: EC 1.13.11.5 Homogentisate 1,2-dioxygenase
  misc_feature: Useful for introducing or modulating the production of volatile compounds
MAPVTNFAVKEKYKYLYGFNGYHSSEAIPGANPEVINTPQKPPFGLRTERITNSSFTAPREKNIQTWLYRVTSSLAHGEFTPLDENSETANPPAPTQLTPNSYLWPQIPVDDDADWTSQKLMGCNGDPQQKRGLALWLFSVTKDMPVNTAFSTIDGESLIIPQSGALDIQTELGKLLVRQNEIAVIPRNVRYRVTLPGGLPARGYIIELFEGHYELPNLGIVGSTGLANVRDFQVPVAYFDGDLVTDGKGGKTAKSSTANGNWKIISRLNGQLWISTQAQTPFDVVAWHGTCYPYKYDLARFCVLGNVLFDEHDPCLYTVLTAPAHGSGPGTAVLDFAIVPPRWQATEDTLWLPYFHRNVMQEFAMMIVNEQSPEFPFNNSHNFAPIAGLLNGSMAAHGSGEEEFQAATNDIDTMKPAKLQTGGLTIGLLETERPLYLSKWAYECAFKNFNGKAGGGISKL

SEQ ID NO: 13253 - DNA, 1788 bp, Muscodor strobelii
  misc_feature: SGI EST ID NO. CUFF.31612.3
  misc_feature: Variant of the nucleotide sequence at SEQ ID NO 13251
tagacccctgtctgtcacctacagttccctgctgaattgaggttgcagcctggtctggggtagatgaatgcggagatgtggaggtctctggaggaccaggtcgagaagcgtcaaccatgataggatctcatggcgccgacaatgcatgtgtgaacattggacttcagttatgtcttgacttaataacttgaatgaatctccccagctactccaactatcaaaattaaattgttgaattgtttaggacctttttgccaaattcgagaaacaagatggctccggtcacaaatttcgccgttaaagagaaatacaagtacttatatggcttcaacggttatcactcatcggaagcaataccaggagcaaacccagaggtcatcaacacaccgcaaaagccaccgtttggcttgagaacagagagaatcacaaattcgtcattcacagcgcctcgcgagaagaacatacaaacatggctatatcgcgtgacatcttctctggcccatggcgaattcacacccctggacgaaaactccgagactgcaaatccgccagctccaactcagctcacgcctaattcatatctttggcctcagatcccagtcgatgatgatgcggattggacttcgcaaaaactcatgggttgtaatggcgaccctcagcagaaacgtggcttagcactgtggttgttcagcgttacgaaggatatgcccgtcaacacagcattttccactattgatggagaatcgttgattattccccaatccggagcgttagacatccaaactgagctgggaaaactacttgttcgacaaaacgaaatcgccgtcatcccccgaaacgttcggtaccgcgtcacgcttccgggcggtttgccagctcgaggctacattatagagctctttgaaggacattatgaactcccgaatttaggaattgtcggctcaaccggcctggccaatgtgcgcgacttccaggttcccgttgcgtattttgatggagacttggtaactgatgggaaggggggcaaaactgccaaatcctctacggcgaacggcaattggaagattatctcacgccttaatggtcagctttggatatctacgcaagctcagacaccctttgatgttgtagcatggcatggaacttgttacccttacaaatacgatcttgcacgcttctgcgtactcggaaatgttctttttgatgagcatgatccctgtctctacaccgtcctcacagcacccgcacacggcagcggacctggaacagcagtcttagacttcgccatcgtcccaccccgctggcaagcgaccgaagacacactctggctaccgtatttccaccgcaacgtgatgcaagaattcgccatgatgattgtaaacgagcaatctcccgagtttccattcaacaacagtcacaacttcgcgcctatcgctggattattgaacggttcaatggccgctcacggatctggcgaagaagaattccaagcagcgactaatgacattgatacgatgaaacccgctaagttgcagactggtggcctaacgattggcttacttgagacagagcgtccgttgtatttgagtaagtgggcgtatgagtgtgcgttcaagaatttcaacgggaaagctggaggagggatatcgaaattgtgatatgtactttcaagtatttgtgagataagattgtccttcataggaaaaaagctcgtgatcctcaaagtcatgagatctagtatatctccgtgatctggatgataagatacctgagtatgcaagtcattcg

SEQ ID NO: 13254 - DNA, 1653 bp, Muscodor strobelii
  misc_feature: SGI cDNA ID NO. 564335
  misc_feature: Encodes the peptide sequence at SEQ ID NO 13255
atgggccttgtagacacagtcgttgaaaacgcagaggtcgctggccttgggctagttatcgttgtaagtcgaagtcttatatacaatccggagctctgggcaggaatactgatgaaagtacagggcttcggatatatgatatggacgatcatatataacctttacttccatcctcttgccaaataccctgggcctttccttgcgaagatctcgccactatatagtatttggggcttgtacagagggcgatggccattcgatgtgcaccagttacacttgaaatatggcccaatattacgcctgatgccgactgaactcgcctttaccgatccgcaagcatggaaagatatctatgggcatcgacagggccacccccagttccacaagagcccaattcacgtaggatcggtagaagacattcccggttcaacatcgctgacgatgtcagatgatgagacgcacagtcgacagcggagagtcttggcgcatgctttcagtcagaaggcactattagaacaggaagggatcattcgtggctacgttgacttactcattgcgaagctgacgccgatggctcagagtggtgagcccgtgaatatgtgtaattggtttaacttcacgacttttgacattatcggagatatgtcctttgggcagcctttcggctgtctgcgggatggtgtatggcacgattgggtttctctagtcacacagacgattaaggcaggagccttcgagcagatgacccgaagagtcttcgagactggctcctggccacagcgtcagcttgtcaaattaattcctaaggatctcagacgaaaacgagtacagcacttggaattaagccgagagaaggctcttcagtatgctactatctacaaaactcatctaacccgagctttgctaacaagccataggcgtattcaggagggtctcacacgtgagcataacgacttcctctattacattcttcgagcgaacgagaaaggcgccataaaacaagatgagattattctgaacagcgccttgttcatcgtagctggttccgaaaccacagcatctctcctctccggaatggcaatgtggcttatgcgaacaccacacgcatacaagcgcttgacagaagagattagaaataacttcaaagatcccaaggacatgaaattcagcgacttgcaggacatgacttatatgaatgcctgcattgacgaagctttgcgcattttcccgccgctccctaccggactgacccgtactgttcccgacggaggcgacacagttgcaggagaatggcttcccggtggcacaacagtcgcggtgtacgggtggtcggcgacacattctcccctgaatttcacacgaccggaagagttcctgcctgagcgctggatcgatgaagcgtttgcaggggataagaaagatgctagccagccattctcgcttgggcctagaggctgtatcggacgacacttgacatacttggagttgcgattaatcctggcgaatttgctgtggcatttcgatatcgtgcgagctgataatgatgcgcctgttgatgtatgggagccccagggtgatttgccacacatcatggctttcaacacgtggaacaagccacctttgatgaccagacttattcccgtcaggaggtag

SEQ ID NO: 13255 - protein, 550 aa, Muscodor strobelii
  misc_feature: SGI Peptide ID NO. 564335
  misc_feature (63)..(533): Pfam Id: PF00067 Pfam Desc: Cytochrome P450
  misc_feature (85)..(508): Pfam Id: PF00067 Pfam Desc: Cytochrome P450
  misc_feature (34)..(549): NCBI GI: 189199302 Blast Desc: pisatin demethylase [Pyrenophora tritici-repentis Pt-1C-BFP] gi|187983087|gb|EDU48575.1| pisatin demethylase [Pyrenophora tritici-repentis Pt-1C-BFP]
  misc_feature (46)..(550): NCBI GI: 57337317 Blast Desc: cytochrome P450 monoxygenase [Botryotinia fuckeliana]
  misc_feature (45)..(288): NCBI GI: 261358527 Blast Desc: averantin oxidoreductase [Verticillium albo-atrum VaMs.102]
  misc_feature (96)..(550): NCBI GI: 154309272 Blast Desc: BC1G_07530 [Botryotinia fuckeliana B05.10] gi|150852354|gb|EDN27546.1| BC1G_07530 [Botryotinia fuckeliana B05.10]
  misc_feature (45)..(547): NCBI GI: 255936151 Blast Desc: Pc13g06690 [Penicillium chrysogenum Wisconsin 54-1255] gi|211583722|emb|CAP91738.1| Pc13g06690 [Penicillium chrysogenum Wisconsin 54-1255]
  misc_feature (51)..(549): NCBI GI: 121716300 Blast Desc: benzoate 4-monooxygenase cytochrome P450 [Aspergillus clavatus NRRL 1] gi|119403916|gb|EAW14333.1| benzoate 4-monooxygenase cytochrome P450 [Aspergillus clavatus NRRL 1]
  misc_feature (41)..(547): NCBI GI: 169783630 Blast Desc: [Aspergillus oryzae RIB40] gi|83775021|dbj|BAE65144.1| protein product [Aspergillus oryzae]
  misc_feature (40)..(545): NCBI GI: 255945441 Blast Desc: Pc20g09940 [Penicillium chrysogenum Wisconsin 54-1255] gi|211588223|emb|CAP86323.1| Pc20g09940 [Penicillium chrysogenum Wisconsin 54-1255]
  misc_feature (45)..(549): NCBI GI: 156032451 Blast Desc: SS1G_13923 [Sclerotinia sclerotiorum 1980] gi|154699325|gb|EDN99063.1| SS1G_13923 [Sclerotinia sclerotiorum 1980]
  misc_feature (37)..(543): NCBI GI: 70993962 Blast Desc: cytochrome P450 monooxygenase [Aspergillus fumigatus Af293] gi|66849462|gb|EAL89790.1| cytochrome P450 monooxygenase, [Aspergillus fumigatus Af293] gi|159125254|gb|EDP50371.1| toxin
  misc_feature (59)..(522): SWISSPROT Homolog: EC 1.14.13.12 Benzoate 4-monooxygenase
MGLVDTVVENAEVAGLGLVIVVSRSLIYNPELWAGILMKVQGFGYMIWTIIYNLYFHPLAKYPGPFLAKISPLYSIWGLYRGRWPFDVHQLHLKYGPILRLMPTELAFTDPQAWKDIYGHRQGHPQFHKSPIHVGSVEDIPGSTSLTMSDDETHSRQRRVLAHAFSQKALLEQEGIIRGYVDLLIAKLTPMAQSGEPVNMCNWFNFTTFDIIGDMSFGQPFGCLRDGVWHDWVSLVTQTIKAGAFEQMTRRVFETGSWPQRQLVKLIPKDLRRKRVQHLELSREKALQYATIYKTHLTRALLTSHRRIQEGLTREHNDFLYYILRANEKGAIKQDEIILNSALFIVAGSETTASLLSGMAMWLMRTPHAYKRLTEEIRNNFKDPKDMKFSDLQDMTYMNACIDEALRIFPPLPTGLTRTVPDGGDTVAGEWLPGGTTVAVYGWSATHSPLNFTRPEEFLPERWIDEAFAGDKKDASQPFSLGPRGCIGRHLTYLELRLILANLLWHFDIVRADNDAPVDVWEPQGDLPHIMAFNTWNKPPLMTRLIPVRR

SEQ ID NO: 13256 - DNA, 1293 bp, Muscodor strobelii
  misc_feature: SGI cDNA ID NO. 564336
  misc_feature: Encodes the peptide sequence at SEQ ID NO 13257
atgtccaacggcactccgatttcagggacttttcggccaaacccggaaatgtaccgtgcggattctgacatttacatgttcttcctctctggaaacggggtcttagcatctcaagcaacaaaagacccgtggtatcgcgctgatagtcggtcaaactgcactgtctacatatctgacgggagatcagacgctggctctagtgaatactatacatcccgtgaagcagcgtcaccacttggctgtgcaatgcagtatcagttttgcaaaggtccagacgcaaaggaagcgtcctgtggccctcttggcagctatgtcgacgcagcgaggggcgcactgccgcaattcgacatagactttgacttcgcctacaacagcacagatcaactgatagacatctacgcttcgaataacgaggcaagccgctttttgtggttgttgtccatctttgaacactatgccccaggaatggctgcgcctgtcaatgcactcggatcccagtctctggcttctcaacgcacactacagagtggggttcaaggtcctatttccgacgaacagtggaaactcgacgtgagtaactggtggaacataagcttggcgatgttacaagcctcatttgtcgacacggcaaatggtccaactgatcctaatatcgcaagactttatctgaacgccaccaaccagggccaaaagagtctatgtcacaatcagaaagttcttagcggatcgtacgtttcgatcagcttttccggtttgctattcacctacatcataggatcgctcatcatcattctgcattatactctcgagccactactcgtccgtgctctccccgataccgagattaacaaggtcaaggccatgcaatggaaatatgatgagctactccagattcaacgcattgctttccaaacaagagataatgacaaatggactaaatgcgaagaatcggtccctgtctcagaaggtcaaagaagtcctcttgttgtactcgacgcgacagacaaacaatcgaccagcgaggctttgctgaataatactgagaatcagtccagaacgaacagtcgagagactggctccaatgaccagcatgataatgtagcaaggaataatagcccatcgcttagtcctcgcacgccaggagaggacgcccctctcatgaccgttcctattttcagaaattcaacatccagaattggcgagtatgaggtccagtcaaatcgcgatcgaaatgatggccgaagtcttatggccggtcatcgcgtccgatatgatccttctggcagttattaa

SEQ ID NO: 13257 - protein, 430 aa, Muscodor strobelii
  misc_feature: SGI Peptide ID NO. 564336
  misc_feature (10)..(337): NCBI GI: 189194015 Blast Desc: conserved [Pyrenophora tritici-repentis Pt-1C-BFP] gi|187978910|gb|EDU45536.1| conserved [Pyrenophora tritici-repentis Pt-1C-BFP]
  misc_feature (11)..(335): NCBI GI: 169615058 Blast Desc: SNOG_10683 [Phaeosphaeria nodorum SN15] gi|111060957|gb|EAT82077.1| SNOG_10683 [Phaeosphaeria nodorum SN15]
  misc_feature (8)..(341): NCBI GI: 115399382 Blast Desc: [Aspergillus terreus NIH2624] gi|114192163|gb|EAU33863.1| [Aspergillus terreus NIH2624]
  misc_feature (4)..(322): NCBI GI: 119474227 Blast Desc: NFIA_004500 [Neosartorya fischeri NRRL 181] gi|119407142|gb|EAW17092.1| conserved [Neosartorya fischeri NRRL 181]
  misc_feature (13)..(304): NCBI GI: 169772941 Blast Desc: [Aspergillus oryzae RIB40] gi|83768800|dbj|BAE58937.1| protein product [Aspergillus oryzae]
  misc_feature (11)..(352): NCBI GI: 159128250 Blast Desc: conserved [Aspergillus fumigatus A1163]
  misc_feature (11)..(352): NCBI GI: 70986226 Blast Desc: conserved [Aspergillus fumigatus Af293] gi|66846236|gb|EAL86569.1| conserved [Aspergillus fumigatus Af293]
  misc_feature (11)..(320): NCBI GI: 256723662 Blast Desc: NECHADRAFT_86728 [Nectria haematococca mpVI 77-13-4]
  misc_feature (13)..(305): NCBI GI: 121699395 Blast Desc: ACLA_082720 [Aspergillus clavatus NRRL 1] gi|119396149|gb|EAW06581.1| ACLA_082720 [Aspergillus clavatus NRRL 1]
  misc_feature (11)..(353): NCBI GI: 169601244 Blast Desc: SNOG_03481 [Phaeosphaeria nodorum SN15] gi|160705891|gb|EAT88686.2| SNOG_03481 [Phaeosphaeria nodorum SN15]
MSNGTPISGTFRPNPEMYRADSDIYMFFLSGNGVLASQATKDPWYRADSRSNCTVYISDGRSDAGSSEYYTSREAASPLGCAMQYQFCKGPDAKEASCGPLGSYVDAARGALPQFDIDFDFAYNSTDQLIDIYASNNEASRFLWLLSIFEHYAPGMAAPVNALGSQSLASQRTLQSGVQGPISDEQWKLDVSNWWNISLAMLQASFVDTANGPTDPNIARLYLNATNQGQKSLCHNQKVLSGSYVSISFSGLLFTYIIGSLIIILHYTLEPLLVRALPDTEINKVKAMQWKYDELLQIQRIAFQTRDNDKWTKCEESVPVSEGQRSPLVVLDATDKQSTSEALLNNTENQSRTNSRETGSNDQHDNVARNNSPSLSPRTPGEDAPLMTVPIFRNSTSRIGEYEVQSNRDRNDGRSLMAGHRVRYDPSGSY

SEQ ID NO: 13258 - DNA, 1357 bp, Muscodor strobelii
  misc_feature: SGI EST ID NO. CUFF.31635.0
  misc_feature: Variant of the nucleotide sequence at SEQ ID NO 13256
aacccggaaatgtaccgtgcggattctgacatttacatgttcttcctctctggaaacggggtcttagcatctcaagcaacaaaagacccgtggtatcgcgctgatagtcggtcaaactgcactgtctacatatctgacgggagatcagacgctggctctagtgaatactatacatcccgtgaagcagcgtcaccacttggctgtgcaatgcagtatcagttttgcaaaggtccagacgcaaaggaagcgtcctgtggccctcttggcagctatgtcgacgcagcgaggggcgcactgccgcaattcgacatagactttgacttcgcctacaacagcacagatcaactgatagacatctacgcttcgaataacgaggcaagccgctttttgtggttgttgtccatctttgaacactatgccccaggaatggctgcgcctgtcaatgcactcggatcccagtctctggcttctcaacgcacactacagagtggggttcaaggtcctatttccgacgaacagtggaaactcgacgtgagtaactggtggaacataagcttggcgatgttacaagcctcatttgtcgacacggcaaatggtccaactgatcctaatatcgcaagactttatctgaacgccaccaaccagggccaaaagagtctatgtcacaatcagaaagttcttagcggatcgtacgtttcgatcagcttttccggtttgctattcacctacatcataggatcgctcatcatcattctgcattatactctcgagccactactcgtccgtgctctccccgataccgagattaacaaggtcaaggccatgcaatggaaatatgatgagctactccagattcaacgcattgctttccaaacaagagataatgacaaatggactaaatgcgaagaatcggtccctgtctcagaaggtcaaagaagtcctcttgttgtactcgacgcgacagacaaacaatcgaccagcgaggctttgctgaataatactgagaatcagtccagaacgaacagtcgagagactggctccaatgaccagcatgataatgtagcaaggaataatagcccatcgcttagtcctcgcacgccaggagaggacgcccctctcatgaccgttcctattttcagaaattcaacatccagaattggcgagtatgaggtccagtcaaatcgcgatcgaaatgatggccgaagtcttatggccggtcatcgcgtccgatatgatccttctggcagttattaagaagtataagtgtcagaaacagaatcagctagttggtttgatacaatgtcatatagattctaagtccggcgttatgtaaatcgggattggggtttcttataga

SEQ ID NO: 13259 - DNA, 2412 bp, Muscodor strobelii
  misc_feature: SGI cDNA ID NO. 564337
  misc_feature: Encodes the peptide sequence at SEQ ID NO 13260
atggtcgtcgctcctgcctccactcttcacaattggcagcaagaacttcaaaagttcgttccggaattcaaagtactaccctattggggcaccgccgcggaccgaaaggttctccgaaagttttgggatcggaaacatgccacttaccgcaaagatgcgcctttccatgtacttgttacgtcctaccaacttgtggtttctgatgttgcctactttcagaagatgcgctggcagtacatgattctcgatgaagcccaagctatcaagagctctcaaagttcgcgttggaagtgcctgctcggcttccactgccgcaatcgtctcttgctcaccggtactcctatccaaaacaacatgcaggaactttgggctcttttgcatttcatcatgccttcactcttcgattctcacgatgagttcagcgagtggttttccaaggacatcgagtcgcacgcgcagagcaacacaacgctaaacgaggaccagcttagaaggctgcatatgatcctcaagccgttcatgttgcgtcgtgtgaagaagcatgtacagaaagagttgggcgacaagattgaacttgatgttttctgcgaactcacctaccgacagcgagcttattaccgcaacctgaggaaccagatcagtattatggatctgattgaaaaagcgactttgggcgacgaccaggactctggtactcttatgaatcttgtaatgcagttccgaaaagtctgtaatcatcccgacctgtttgagcgagcggacacgacgagcccttatttttccggttacttcgctgagacagcatcttttgttcgtgaaggaagcaatgttgctgttggctactcgacgcgaaacgtgatcgactaccagctgccacgtctcgtgtggaacgaggacggtagactgaagcgaacgagcaagagtaacgacaaagccggattccaaaacaaatatctcaatcacatgatgaacatctggtcaccggacaacatccaagctagcacgtcgggcaacgacgcattctcgttcttacgcttcgctgacacgagtgtacaagaagccagcaaggccagtcgccaggacgtctttgcgcgcgctactgatttggccaagaaaagtggtcggctcggacatctgggaatagtgtacgatgaagccgaagagaagaactacacgccagtccatgcgcttttccagattaaggagcggaacaatcgcaagcctcttgccgaggtcacttcggaaggtgcacttaaccgtcttatgaacgttgctaacactcgctggcgtgactcgggtctcagtcgactggagcaagccgcgctgcctggggctaccgcacctcctgtcgatgtctactgcgagggtactagagcaccagtcgccgagcgcgaagacactttgttcaataaatccatgcgcaaagcactgtatggacctaacgctgtcgaagagatgacactggtcgagaagaaggtacccttggagacataccctcagcgagctcttttgcctgcccctgataacgacaaacgccgcttcaccaacatcactgttcctagcatgcgtcgctttgttaccgacagtggcaagcttgccaagcttgaccagttactcttcaagctcaaggaagagggtcatcgtgtgctcctgtacttccagatgacgcgaatgattgatctgatggaagagtatctgacttatcgcaactacaagtactgtcgactcgatggttcgaccaagcttgaagatcgtcgagacaccgttaccgatttccagacccggcccgagatctttattttccttctttcaacccgtgctggtggtctgggcattaatctgacttctgccgacactgtcatcttctatgatagtgattggaacccaactatcgattcgcaggccatggatcgcgctcatcgtctcggacagaccaagcaagtcactgtataccgtctcattactcgaggtaccattgaagaacgcattcgcaagcgagctctgcagaaggaagaggtgcagcgtgtggtcatcactggtggcggcgctagaggtgtcgacttcagcggtcggcgaccacctgagaaccgcaaccgcgacatcgccatgtggcttgccgatgacgaacaagctgaactcatcgaacaacgcgagaaggaactcgctgagagcggagaacttgacaaggctacgaagaaacgtggtggcgccaagaggaaacgcgaggctgttagcctcgatgacatgtatcatgaaggcgagggtcatttcgctgatgagaacaaaccatcgggtaccgccactccggtcgaagccgaggccaaggccgtcaagaagaggaagtcaggtagtaagaaggccaagactacgaagcagcgccttgccatcgccgacggagagatggatatctaa

SEQ ID NO: 13260 - protein, 803 aa, Muscodor strobelii
  misc_feature: SGI Peptide ID NO. 564337
  misc_feature (565)..(643): Pfam Id: PF00271 Pfam Desc: Helicase conserved C-terminal domain
  misc_feature (1)..(250): Pfam Id: PF00176 Pfam Desc: SNF2 family N-terminal domain
  misc_feature (1)..(800): NCBI GI: 240274086 Blast Desc: DNA ATP-dependent helicase [Ajellomyces capsulatus H143]
  misc_feature (142)..(801): NCBI GI: 116198517 Blast Desc: CHGG_07414 [Chaetomium globosum CBS 148.51] gi|88178693|gb|EAQ86161.1| CHGG_07414 [Chaetomium globosum CBS 148.51]
  misc_feature (1)..(769): NCBI GI: 218512083 Blast Desc: INO80_DEBHA RecName: Full= DNA helicase INO80 gi|199434455|emb|CAR66027.1| DEHA2G22682p [Debaryomyces hansenii]
  misc_feature (1)..(769): NCBI GI: 50427841 Blast Desc: DEHA0G24101g [Debaryomyces hansenii CBS767]
  misc_feature (1)..(770): NCBI GI: 150864264 Blast Desc: DNA ATP-dependent helicase [Pichia stipitis CBS 6054] gi|149385520|gb|ABN64985.2| DNA ATP-dependent helicase [Pichia stipitis CBS 6054]
  misc_feature (1)..(770): NCBI GI: 260946861 Blast Desc: CLUG_03172 [Clavispora lusitaniae ATCC 42720] gi|238849582|gb|EEQ39046.1| CLUG_03172 [Clavispora lusitaniae ATCC 42720]
  misc_feature (1)..(770): NCBI GI: 190345830 Blast Desc: PGUG_01880 [Pichia guilliermondii ATCC 6260]
  misc_feature (1)..(770): NCBI GI: 146420507 Blast Desc: PGUG_01880 [Pichia guilliermondii ATCC 6260]
  misc_feature (1)..(770): NCBI GI: 149238896 Blast Desc: LELG_03252 [Lodderomyces elongisporus NRRL YB-4239] gi|206558165|sp|A5E0W5.1|INO80_LODEL RecName: Full= DNA helicase ino80 gi|146450817|gb|EDK45073.1| LELG_03252 [Lodderomyces NRRL
  misc_feature (1)..(709): NCBI GI: 254565235 Blast Desc: ATPase that forms a large complex, containing actin and several actin-related proteins [Pichia pastoris GS115] gi|238029524|emb|CAY67447.1| ATPase that forms a large complex,
MVVAPASTLHNWQQELQKFVPEFKVLPYWGTAADRKVLRKFWDRKHATYRKDAPFHVLVTSYQLVVSDVAYFQKMRWQYMILDEAQAIKSSQSSRWKCLLGFHCRNRLLLTGTPIQNNMQELWALLHFIMPSLFDSHDEFSEWFSKDIESHAQSNTTLNEDQLRRLHMILKPFMLRRVKKHVQKELGDKIELDVFCELTYRQRAYYRNLRNQISIMDLIEKATLGDDQDSGTLMNLVMQFRKVCNHPDLFERADTTSPYFSGYFAETASFVREGSNVAVGYSTRNVIDYQLPRLVWNEDGRLKRTSKSNDKAGFQNKYLNHMMNIWSPDNIQASTSGNDAFSFLRFADTSVQEASKASRQDVFARATDLAKKSGRLGHLGIVYDEAEEKNYTPVHALFQIKERNNRKPLAEVTSEGALNRLMNVANTRWRDSGLSRLEQAALPGATAPPVDVYCEGTRAPVAEREDTLFNKSMRKALYGPNAVEEMTLVEKKVPLETYPQRALLPAPDNDKRRFTNITVPSMRRFVTDSGKLAKLDQLLFKLKEEGHRVLLYFQMTRMIDLMEEYLTYRNYKYCRLDGSTKLEDRRDTVTDFQTRPEIFIFLLSTRAGGLGINLTSADTVIFYDSDWNPTIDSQAMDRAHRLGQTKQVTVYRLITRGTIEERIRKRALQKEEVQRVVITGGGARGVDFSGRRPPENRNRDIAMWLADDEQAELIEQREKELAESGELDKATKKRGGAKRKREAVSLDDMYHEGEGHFADENKPSGTATPVEAEAKAVKKRKSGSKKAKTTKQRLAIADGEMDI

SEQ ID NO: 13261 - DNA, 3114 bp, Muscodor strobelii
  misc_feature: SGI EST ID NO. CUFF.31662.0
  misc_feature: Variant of the nucleotide sequence at SEQ ID NO 13259
gggtcccttatatggtcgtcgctcctgcctccactcttcacaattggcagcaagaacttcaaaagttcgttccggaattcaaagtactaccctattggggcaccgccgcggaccgaaaggttctccgaaagttttgggatcggaaacatgccacttaccgcaaagatgcgcctttccatgtacttgttacgtcctaccaacttgtggtttctgatgttgcctactttcagaagatgcgctggcagtacatgattctcgatgaagcccaagctatcaagagctctcaaagttcgcgttggaagtgcctgctcggcttccactgccgcaatcgtctcttgctcaccggtactcctatccaaaacaacatgcaggaactttgggctcttttgcatttcatcatgccttcactcttcgattctcacgatgagttcagcgagtggttttccaaggacatcgagtcgcacgcgcagagcaacacaacgctaaacgaggaccagcttagaaggctgcatatgatcctcaagccgttcatgttgcgtcgtgtgaagaagcatgtacagaaagagttgggcgacaagattgaacttgatgttttctgcgaactcacctaccgacagcgagcttattaccgcaacctgaggaaccagatcagtattatggatctgattgaaaaagcgactttgggcgacgaccaggactctggtactcttatgaatcttgtaatgcagttccgaaaagtctgtaatcatcccgacctgtttgagcgagcggacacgacgagcccttatttttccggttacttcgctgagacagcatcttttgttcgtgaaggaagcaatgttgctgttggctactcgacgcgaaacgtgatcgactaccagctgccacgtctcgtgtggaacgaggacggtagactgaagcgaacgagcaagagtaacgacaaagccggattccaaaacaaatatctcaatcacatgatgaacatctggtcaccggacaacatccaagctagcacgtcgggcaacgacgcattctcgttcttacgcttcgctgacacgagtgtacaagaagccagcaaggccagtcgccaggacgtctttgcgcgcgctactgatttggccaagaaaagtggtcggctcggacatctgggaatagtgtacgatgaagccgaagagaagaactacacgccagtccatgcgcttttccagattaaggagcggaacaatcgcaagcctcttgccgaggtcacttcggaaggtgcacttaaccgtcttatgaacgttgctaacactcgctggcgtgactcgggtctcagtcgactggagcaagccgcgctgcctggggctaccgcacctcctgtcgatgtctactgcgagggtactagagcaccagtcgccgagcgcgaagacactttgttcaataaatccatgcgcaaagcactgtatggacctaacgctgtcgaagagatgacactggtcgagaagaaggtacccttggagacataccctcagcgagctcttttgcctgcccctgataacgacaaacgccgcttcaccaacatcactgttcctagcatgcgtcgctttgttaccgacagtggcaagcttgccaagcttgaccagttactcttcaagctcaaggaagagggtcatcgtgtgctcctgtacttccagatgacgcgaatgattgatctgatggaagagtatctgacttatcgcaactacaagtactgtcgactcgatggttcgaccaagcttgaagatcgtcgagacaccgttaccgatttccagacccggcccgagatctttattttccttctttcaacccgtgctggtggtctgggcattaatctgacttctgccgacactgtcatcttctatgatagtgattggaacccaactatcgattcgcaggccatggatcgcgctcatcgtctcggacagaccaagcaagtcactgtataccgtctcattactcgaggtaccattgaagaacgcattcgcaagcgagctctgcagaaggaagaggtgcagcgtgtggtcatcactggtggcggcgctagaggtgtcgacttcagcggtcggcgaccacctgagaaccgcaaccgcgacatcgccatgtggcttgccgatgacgaacaagctgaactcatcgaacaacgcgagaaggaactcgctgagagcggagaacttgacaaggctacgaagaaacgtggtggcgccaagaggaaacgcgaggctgttagcctcgatgacatgtatcatgaaggcgagggtcatttcgctgatgagaacaaaccatcgggtaccgccactccggtcgaagccgaggccaaggccgtcaagaagaggaagtcaggtagtaagaaggccaagactacgaagcagcgccttgccatcgccgacggagagatggatatctaattcgggagtgtatcttcggctttgcctcccatcaatgtcaagacttcataagtcgcatgtgtcggcgtcgtgattgggatttgctatgtactaaaagcaaaaagaggatggcgttccgagatttcatttggggtatcacttttcactactcgttattaccccagcttttctttctctgcacgtgatgcgggttccttaccaaacagacatggtagaatggaggctgaacatgaaaaaaacatggaggtgtgttctagagtgggcatcactgctgtggattcaggaatgagtcgagaagctgatcgcagccatgctcggccaacacctatcgctatggtccaatactgcgttacatgaatagtctcgccggtggttctgaggattactatgtgcggaaggggcaaggattgggtgggttgaagatgtatgataggacatggcggagcaaggtgaatgaaccgggtgaataaagtgactaaagtgaataaaatagatgctaggatgcggttttaatactatgctgtggcttgactacatttcttccttctacttgtgaaggattagactgtgcggtttaacagcagctcctgttgaagatgttatgagtgtgagatgagtgttagaggtgtgtttatggagagtgtacataaggatatatgaggatatctgatagtagtaagttggtggtgag

SEQ ID NO: 13262 - DNA, 3240 bp, Muscodor strobelii
  misc_feature: SGI cDNA ID NO. 564338
  misc_feature: Reduced expression when VOC is produced
  misc_feature: Encodes the peptide sequence at SEQ ID NO 13263
atgtcgcaacaacgccgatcatcggaagaaacgaccgaggagtcaataaaggagttgagcgaagaatcaagcgaggaatcgaacgaagttccgctggtacggaaattgatgaactttgctcgtgatggggatgaagaagggataagaagtattcccattgagactacaggtgcctataaccacactgcgctgcacctggctgcattagaagacgagtacaatgctattgatgcgctggtccgcaagggtggtgcagatatcaatgctttgacctgggctagtgagacgccattaatcctcgcggcgaaacgaggtcagattgcagccaccaaggcactccttcaatatcatccaaacttagacatgaaggataccttttggggacagtctgctgtatcatacgcagctgagaatggccacgcagaggttgttaagttattgatagaggggaagtgtgagatatattctgtgaccgcggagcaatttccgccacttgaaagagctgcctggcgtggcaatcccgatgtcctgaaatcatttttcgagtgccactccggcgactttgtcttgttccggacacgtgccatagcggaagcactatgtcatgcttacgaagacgactatatcgccacaaaagacttcattttagattcgagtgagccttatttgacatctcaagatgagactggcagaacggtgctttcttgggcagcggagagtgacagtaaagcgacagtcaatgctcttttagtgcggaccgcgaaaatcgattttggcgataaaaacacacgcacgccattatcttttgcttcgcaacacggaaatctagcagttgtccgacaatttctatcaagaagagaacaggatgcccaagttctttcagagaatccggcaaacaatctccatattgactcgacaagcgaggacaagggctggactcctctctggtacgccgtaaatggtggacatacaaaggttgccgaggcattgctcgataacggtgcaaagccgtcaatcaaggataaaggaaaccgtgatctgatgcagcttctagttgataaggagacacatccagtagcggatggagcaagcatcagttcaattgctatggaaggtgtacgaaagcttctggagccattcttttctttattgacagatgtgtttgacgaaagcaggaaactggatgaaactatcaatgcaatgagcttgacgtttcatagcgccggcatggacatgcatcccagcggaaaaagtgtcactaagcttctcacggctcggcgagaagattcccagtcgtcgagcatcaggacgcaatggcttcatcttcctgcaaataacattctgtttaaaaggcacattgaatcttgcggcgcttcttattctcaagactattaccagatacttaaacccgagttctgggcggacaatcagagtgtgcctcgggatgttacacgctggcacgaacgattcatgcgtgccggctgccatgttcttccactctcgaaatctccggcaatcccaagcttaccggacgacgccaaggacgacaagctgaaggacgtagatggtgggaagagtccgacagataatcaagacgacgaggaaaacgagactaccaccaacagaaaaatgaacaagaaacttggtcgacatggagccagaaaaagcgaggatcaagagatgccttacttgcactgggaacatcgggacgaggttaacaaactcaaagagatatggaagagcttcgaaccgaaatcaaaatcccaggctagccaccgggaattcggtgctgccaaagcatcggaaggaacggcgttgaacagctcggagaaactgctttggatgtatctcggcgaagaccatcctatacatattcgaagaacactggacgagtattattatccggactcctccaaattagaagaccgaggaaatgatcagaccactttgcgatggttccaggatcaagccacgtccgatgcttctggccctgtactaacaatggtggaccagctttggatgtgggttttgcccaaatgcggatcatcaccacccaccatcattaccgcattcccccaagaaagcaattactattgcggaaactcgaggccattcctattgaaaaacattatcgcaaagtgcggagattattcccgtcgatcactctacgatgtcgccgaggttattgtggctgaatgttcccggatttactttgattccacaagcaacaggcctcgcacaacccagtttcttgacgtgttcagaaactcaattggaatgatcgtcgagaatgacattgggcgatttcgcgagttccaagatactataggtcagctgacaagcttgcccgaaagaaataacccaaccgctcaagacgacctcaacaagacagataatactagcagcgaggaaaatcgagctgcaaccaaagaacccgactcactcaataagatttctgatcgctcaagcaagtccaagggcagcctggacaatgaccgggctctagaaagacttctcaacattgagaaggacatcgaggacctacgcaaagtcaaggacattcgagacgaattgaacatcatgagatctttatgccatcggcaaaatggggtcattgaagagatggggcatatcactcaaaggcagaatgggacgaacgattcgcctcgcgacatacccggtcttacagcaccttacttgccacaagctgtagtaaaacgaaatcttgaagaagtggaagcgctggatgactttgcaaaaagagctggagatgccattgagcaacttcttgaactgaagcagcagcaggctgatctgctgcttaccaaggccatctataaaatcaacgacgccacagacaaacaggggaaaacaataatggcatttacgctcgtaacgatattatttctgcctctctcgttcatggcgagcttcctagcccttgacgtgtcgcagtttccaagttacgggggtaaactatcgctaaattgggttgtcaagataatcttatctgtttcattgcctttgagtattgccttttttgtcctcgcattcaattcgactcactctcagcgaaagaacaccatgaacgctattaggaaatggaaatcgaaagcgggaaacgtactaccgcatgttcctagcgttcgcataaggtgccctcgtatatgggagcgaggacacaatgcgacgggcgacatcgaaaacggcggtgcggcttctcacggaaataagaagtag

SEQ ID NO: 13263 - protein, 1079 aa, Muscodor strobelii
  misc_feature: SGI Peptide ID NO. 564338
  misc_feature (310)..(342): Pfam Id: PF00023 Pfam Desc: Ankyrin repeat
  misc_feature (59)..(92): Pfam Id: PF00023 Pfam Desc: Ankyrin repeat
  misc_feature (127)..(159): Pfam Id: PF00023 Pfam Desc: Ankyrin repeat
  misc_feature (93)..(125): Pfam Id: PF00023 Pfam Desc: Ankyrin repeat
  misc_feature (225)..(762): NCBI GI: 171687042 Blast Desc: protein product [Podospora anserina] gi|170943482|emb|CAP69135.1| protein product [Podospora anserina]
  misc_feature (62)..(1002): NCBI GI: 67541593 Blast Desc: AN6960.2 [Aspergillus nidulans FGSC A4] gi|40738412|gb|EAA57602.1| AN6960.2 [Aspergillus nidulans FGSC A4] gi|259480577|tpe|CBF71837.1| TPA: conserved [Aspergillus FGSC
  misc_feature (98)..(1038): NCBI GI: 70996130 Blast Desc: ankyrin repeat protein [Aspergillus fumigatus Af293] gi|66850455|gb|EAL90782.1| ankyrin repeat protein [Aspergillus fumigatus Af293] gi|159131573|gb|EDP56686.1| ankyrin repeat
  misc_feature (98)..(1037): NCBI GI: 119495022 Blast Desc: ankyrin repeat protein [Neosartorya fischeri NRRL 181] gi|119412469|gb|EAW22410.1| ankyrin repeat protein [Neosartorya fischeri NRRL 181]
  misc_feature (98)..(1019): NCBI GI: 115492215 Blast Desc: conserved [Aspergillus terreus NIH2624] gi|114197595|gb|EAU39295.1| conserved [Aspergillus terreus NIH2624]
  misc_feature (98)..(1019): NCBI GI: 212531615 Blast Desc: ankyrin repeat protein [Penicillium marneffei ATCC 18224] gi|210071328|gb|EEA25417.1| ankyrin repeat protein [Penicillium marneffei ATCC 18224]
  misc_feature (98)..(1019): NCBI GI: 121701093 Blast Desc: ankyrin repeat protein [Aspergillus clavatus NRRL 1] gi|119396954|gb|EAW07385.1| ankyrin repeat protein [Aspergillus clavatus NRRL 1]
  misc_feature (98)..(1038): NCBI GI: 145230782 Blast Desc: An01g12480 [Aspergillus niger] gi|134055776|emb|CAK37300.1| protein product [Aspergillus niger]
  misc_feature (68)..(1018): NCBI GI: 255941688 Blast Desc: Pc16g13140 [Penicillium chrysogenum Wisconsin 54-1255] gi|211586236|emb|CAP93984.1| Pc16g13140 [Penicillium chrysogenum Wisconsin 54-1255]
  misc_feature (130)..(1011): NCBI GI: 67517003 Blast Desc: AN0782.2 [Aspergillus nidulans FGSC A4] gi|40746268|gb|EAA65424.1| AN0782.2 [Aspergillus nidulans FGSC A4] gi|259488938|tpe|CBF88794.1| TPA: ankyrin repeat protein FGSC
  misc_feature: Useful for introducing or modulating the production of volatile compounds
MSQQRRSSEETTEESIKELSEESSEESNEVPLVRKLMNFARDGDEEGIRSIPIETTGAYNHTALHLAALEDEYNAIDALVRKGGADINALTWASETPLILAAKRGQIAATKALLQYHPNLDMKDTFWGQSAVSYAAENGHAEVVKLLIEGKCEIYSVTAEQFPPLERAAWRGNPDVLKSFFECHSGDFVLFRTRAIAEALCHAYEDDYIATKDFILDSSEPYLTSQDETGRTVLSWAAESDSKATVNALLVRTAKIDFGDKNTRTPLSFASQHGNLAVVRQFLSRREQDAQVLSENPANNLHIDSTSEDKGWTPLWYAVNGGHTKVAEALLDNGAKPSIKDKGNRDLMQLLVDKETHPVADGASISSIAMEGVRKLLEPFFSLLTDVFDESRKLDETINAMSLTFHSAGMDMHPSGKSVTKLLTARREDSQSSSIRTQWLHLPANNILFKRHIESCGASYSQDYYQILKPEFWADNQSVPRDVTRWHERFMRAGCHVLPLSKSPAIPSLPDDAKDDKLKDVDGGKSPTDNQDDEENETTTNRKMNKKLGRHGARKSEDQEMPYLHWEHRDEVNKLKEIWKSFEPKSKSQASHREFGAAKASEGTALNSSEKLLWMYLGEDHPIHIRRTLDEYYYPDSSKLEDRGNDQTTLRWFQDQATSDASGPVLTMVDQLWMWVLPKCGSSPPTIITAFPQESNYYCGNSRPFLLKNIIAKCGDYSRRSLYDVAEVIVAECSRIYFDSTSNRPRTTQFLDVFRNSIGMIVENDIGRFREFQDTIGQLTSLPERNNPTAQDDLNKTDNTSSEENRAATKEPDSLNKISDRSSKSKGSLDNDRALERLLNIEKDIEDLRKVKDIRDELNIMRSLCHRQNGVIEEMGHITQRQNGTNDSPRDIPGLTAPYLPQAVVKRNLEEVEALDDFAKRAGDAIEQLLELKQQQADLLLTKAIYKINDATDKQGKTIMAFTLVTILFLPLSFMASFLALDVSQFPSYGGKLSLNWVVKIILSVSLPLSIAFFVLAFNSTHSQRKNTMNAIRKWKSKAGNVLPHVPSVRIRCPRIWERGHNATGDIENGGAASHGNKK

SEQ ID NO: 13264 - DNA, 2741 bp, Muscodor strobelii
  misc_feature: SGI EST ID NO. CUFF.31665.1
  misc_feature: Variant of the nucleotide sequence at SEQ ID NO 13262
ctcctctctggtacgccgtaaatggtggacatacaaaggttgccgaggcattgctcgataacggtgcaaagccgtcaatcaaggataaaggaaaccgtgatctgatgcagcttctagttgataaggagacacatccagtagcggatggagcaagcatcagttcaattgctatggaaggtgtacgaaagcttctggagccattcttttctttattgacagatgtgtttgacgaaagcaggaaactggatgaaactatcaatgcaatgagcttgacgtttcatagcgccggcatggacatgcatcccagcggaaaaagtgtcactaagcttctcacggctcggcgagaagattcccagtcgtcgagcatcaggacgcaatggcttcatcttcctgcaaataacattctgtttaaaaggcacattgaatcttgcggcgcttcttattctcaagactattaccagatacttaaacccgagttctgggcggacaatcagagtgtgcctcgggatgttacacgctggcacgaacgattcatgcgtgccggctgccatgttcttccactctcgaaatctccggcaatcccaagcttaccggacgacgccaaggacgacaagctgaaggacgtaggttcgtggaatacgcgaccatttgcaacagagatagaaacaaacaagccaagccgggcaagtaataaagacaatgcatcttcttcaaatagtcaacaaccgccgaaagaagcaacatatgggcatgatcaaagaggtgataaagacaatgtagggttattgaatgctcgatcttatacaatggaaacagatggtgggaagagtccgacagataatcaagacgacgaggaaaacgagactaccaccaacagaaaaatgaacaagaaacttggtcgacatggagccagaaaaagcgaggatcaagaggtgaaccaaaaaggcttcgctttatttgtgagggaacaagcgaccaaatctctagagctttgctaacaaattcagatgccttacttgcactgggaacatcgggacgaggttaacaaactcaaagagatatggaagagcttcgaaccgaaatcaaaatcccaggctagccaccgggaattcggtgctgccaaagcatcggaaggaacggcgttgaacagctcggagaaactgctttggatgtatctcggcgaagaccatcctatacatattcgaagaacactggacgagtattattatccggactcctccaaattagaagaccgaggaaatgatcagaccactttgcgatggttccaggatcaagccacgtccgatgcttctggccctgtactaacaatggtggaccagctttggatgtgggttttgcccaaatgcggatcatcaccacccaccatcattaccgcattcccccaagaaagcaattactattgcggaaactcgaggccattcctattgaaaaacattatcgcaaagtgcggagattattcccgtcgatcactctacgatgtcgccgaggttattgtggctgaatgttcccggatttactttgattccacaagcaacaggcctcgcacaacccagtttcttgacgtgttcagaaactcaattggaatgatcgtcgagaatgacattgggcgatttcgcgagttccaagatactataggtcagctgacaagcttgcccgaaagaaataacccaaccgctcaagacgacctcaacaagacagataatactagcagcgaggaaaatcgagctgcaaccaaagaacccgactcactcaataagatttctgatcgctcaagcaagtccaagggcagcctggacaatgaccgggctctagaaagacttctcaacattgagaaggacatcgaggacctacgcaaagtcaaggacattcgagacgaattgaacatcatgagatctttatgccatcggcaaaatggggtcattgaagagatggggcatatcactcaaaggcagaatgggacgaacgattcgcctcgcgacatacccggtcttacagcaccttacttgccacaagctgtagtaaaacgaaatcttgaagaagtggaagcgctggatgactttgcaaaaagagctggagatgccattgagcaacttcttgaactgaagcagcagcaggctgatctgctgcttaccaaggccatctataaaatcaacgacgccacagacaaacaggggaaaacaataatggcatttacgctcgtaacgatattatttctgcctctctcgttcatggcgagcttcctagcccttgacgtgtcgcagtttccaagttacgggggtaaactatcgctaaattgggttgtcaagataatcttatctgtttcattgcctttgagtattgccttttttgtcctcgcattcaattcgactcactctcagcgaaagaacaccatgaacgctattaggaaatggaaatcgaaagcgggaaacgtactaccgcatgttcctagcgttcgcataaggtgccctcgtatatgggagcgaggacacaatgcgacgggcgacatcgaaaacggcggtgcggcttctcacggaaataagaagtagtgaaatgtcgttttgcttcagcggagatagttatagataatgtgaaagctaccgcaaatagatatttgtttgctcgctgtttcttcacaggaagaagcgagctttaatgaggtgattgccctttagggttgattccataacaataaatgcgtaatagctcccagcaacgatgca

SEQ ID NO: 13265 - DNA, 3180 bp, Muscodor strobelii
  misc_feature: SGI cDNA ID NO. 564339
  misc_feature: Encodes the peptide sequence at SEQ ID NO 13266
atgtcgcaacaacgccgatcatcggaagaaacgaccgaggagtcaataaaggagttgagcgaagaatcaagcgaggaatcgaacgaagttccgctggtacggaaattgatgaactttgctcgtgatggggatgaagaagggataagaagtattcccattgagactacaggtgcctataaccacactgcgctgcacctggctgcattagaagacgagtacaatgctattgatgcgctggtccgcaagggtggtgcagatatcaatgctttgacctgggctagtgagacgccattaatcctcgcggcgaaacgaggtcagattgcagccaccaaggcactccttcaatatcatccaaacttagacatgaaggataccttttggggacagtctgctgtatcatacgcagctgagaatggccacgcagaggttgttaagttattgatagaggggaagtgtgagatatattctgtgaccgcggagcaatttccgccacttgaaagagctgcctggcgtggcaatcccgatgtcctgaaatcatttttcgagtgccactccggcgactttgtcttgttccggacacgtgccatagcggaagcactatgtcatgcttacgaagacgactatatcgccacaaaagacttcattttagattcgagtgagccttatttgacatctcaagatgagactggcagaacggtgctttcttgggcagcggagagtgacagtaaagcgacagtcaatgctcttttagtgcggaccgcgaaaatcgattttggcgataaaaacacacgcacgccattatcttttgcttcgcaacacggaaatctagcagttgtccgacaatttctatcaagaagagaacaggatgcccaagttctttcagagaatccggcaaacaatctccatattgactcgacaagcgaggacaagggctggactcctctctggtacgccgtaaatggtggacatacaaaggttgccgaggcattgctcgataacggtgcaaagccgtcaatcaaggataaaggaaaccgtgatctgatgcagcttctagttgataaggagacacatccagtagcggatggagcaagcatcagttcaattgctatggaaggtgtacgaaagcttctggagccattcttttctttattgacagatgtgtttgacgaaagcaggaaactggatgaaactatcaatgcaatgagcttgacgtttcatagcgccggcatggacatgcatcccagcggaaaaagtgtcactaagcttctcacggctcggcgagaagattcccagtcgtcgagcatcaggacgcaatggcttcatcttcctgcaaataacatacttaaacccgagttctgggcggacaatcagagtgtgcctcgggatgttacacgctggcacgaacgattcatgcgtgccggctgccatgttcttccactctcgaaatctccggcaatcccaagcttaccggacgacgccaaggacgacaagctgaaggacgtagatggtgggaagagtccgacagataatcaagacgacgaggaaaacgagactaccaccaacagaaaaatgaacaagaaacttggtcgacatggagccagaaaaagcgaggatcaagagatgccttacttgcactgggaacatcgggacgaggttaacaaactcaaagagatatggaagagcttcgaaccgaaatcaaaatcccaggctagccaccgggaattcggtgctgccaaagcatcggaaggaacggcgttgaacagctcggagaaactgctttggatgtatctcggcgaagaccatcctatacatattcgaagaacactggacgagtattattatccggactcctccaaattagaagaccgaggaaatgatcagaccactttgcgatggttccaggatcaagccacgtccgatgcttctggccctgtactaacaatggtggaccagctttggatgtgggttttgcccaaatgcggatcatcaccacccaccatcattaccgcattcccccaagaaagcaattactattgcggaaactcgaggccattcctattgaaaaacattatcgcaaagtgcggagattattcccgtcgatcactctacgatgtcgccgaggttattgtggctgaatgttcccggatttactttgattccacaagcaacaggcctcgcacaacccagtttcttgacgtgttcagaaactcaattggaatgatcgtcgagaatgacattgggcgatttcgcgagttccaagatactataggtcagctgacaagcttgcccgaaagaaataacccaaccgctcaagacgacctcaacaagacagataatactagcagcgaggaaaatcgagctgcaaccaaagaacccgactcactcaataagatttctgatcgctcaagcaagtccaagggcagcctggacaatgaccgggctctagaaagacttctcaacattgagaaggacatcgaggacctacgcaaagtcaaggacattcgagacgaattgaacatcatgagatctttatgccatcggcaaaatggggtcattgaagagatggggcatatcactcaaaggcagaatgggacgaacgattcgcctcgcgacatacccggtcttacagcaccttacttgccacaagctgtagtaaaacgaaatcttgaagaagtggaagcgctggatgactttgcaaaaagagctggagatgccattgagcaacttcttgaactgaagcagcagcaggctgatctgctgcttaccaaggccatctataaaatcaacgacgccacagacaaacaggggaaaacaataatggcatttacgctcgtaacgatattatttctgcctctctcgttcatggcgagcttcctagcccttgacgtgtcgcagtttccaagttacgggggtaaactatcgctaaattgggttgtcaagataatcttatctgtttcattgcctttgagtattgccttttttgtcctcgcattcaattcgactcactctcagcgaaagaacaccatgaacgctattaggaaatggaaatcgaaagcgggaaacgtactaccgcatgttcctagcgttcgcataaggtgccctcgtatatgggagcgaggacacaatgcgacgggcgacatcgaaaacggcggtgcggcttctcacggaaataagaagtag

SEQ ID NO: 13266 - protein, 1059 aa, Muscodor strobelii
  misc_feature: SGI Peptide ID NO. 564339
  misc_feature (310)..(342): Pfam Id: PF00023 Pfam Desc: Ankyrin repeat
  misc_feature (59)..(92): Pfam Id: PF00023 Pfam Desc: Ankyrin repeat
  misc_feature (127)..(159): Pfam Id: PF00023 Pfam Desc: Ankyrin repeat
  misc_feature (93)..(125): Pfam Id: PF00023 Pfam Desc: Ankyrin repeat
  misc_feature (225)..(742): NCBI GI: 171687042 Blast Desc: protein product [Podospora anserina] gi|170943482|emb|CAP69135.1| protein product [Podospora anserina]
  misc_feature (62)..(982): NCBI GI: 67541593 Blast Desc: AN6960.2 [Aspergillus nidulans FGSC A4] gi|40738412|gb|EAA57602.1| AN6960.2 [Aspergillus nidulans FGSC A4] gi|259480577|tpe|CBF71837.1| TPA: conserved [Aspergillus FGSC
  misc_feature (98)..(1018): NCBI GI: 70996130 Blast Desc: ankyrin repeat protein [Aspergillus fumigatus Af293] gi|66850455|gb|EAL90782.1| ankyrin repeat protein [Aspergillus fumigatus Af293] gi|159131573|gb|EDP56686.1| ankyrin repeat
  misc_feature (98)..(1017): NCBI GI: 119495022 Blast Desc: ankyrin repeat protein [Neosartorya fischeri NRRL 181] gi|119412469|gb|EAW22410.1| ankyrin repeat protein [Neosartorya fischeri NRRL 181]
  misc_feature (98)..(999): NCBI GI: 115492215 Blast Desc: conserved [Aspergillus terreus NIH2624] gi|114197595|gb|EAU39295.1| conserved [Aspergillus terreus NIH2624]
  misc_feature (98)..(999): NCBI GI: 121701093 Blast Desc: ankyrin repeat protein [Aspergillus clavatus NRRL 1] gi|119396954|gb|EAW07385.1| ankyrin repeat protein [Aspergillus clavatus NRRL 1]
  misc_feature (98)..(1018): NCBI GI: 145230782 Blast Desc: An01g12480 [Aspergillus niger] gi|134055776|emb|CAK37300.1| protein product [Aspergillus niger]
  misc_feature (541)..(999): NCBI GI: 242773540 Blast Desc: ankyrin repeat protein [Talaromyces stipitatus ATCC 10500] gi|218721880|gb|EED21298.1| ankyrin repeat protein [Talaromyces stipitatus ATCC 10500]
  misc_feature (62)..(1028): NCBI GI: 67525725 Blast Desc: AN3320.2 [Aspergillus nidulans FGSC A4] gi|40744108|gb|EAA63288.1| AN3320.2 [Aspergillus nidulans FGSC A4]
  misc_feature (98)..(998): NCBI GI: 169783090 Blast Desc: [Aspergillus oryzae RIB40] gi|83774751|dbj|BAE64874.1| protein product [Aspergillus oryzae]
MSQQRRSSEETTEESIKELSEESSEESNEVPLVRKLMNFARDGDEEGIRSIPIETTGAYNHTALHLAALEDEYNAIDALVRKGGADINALTWASETPLILAAKRGQIAATKALLQYHPNLDMKDTFWGQSAVSYAAENGHAEVVKLLIEGKCEIYSVTAEQFPPLERAAWRGNPDVLKSFFECHSGDFVLFRTRAIAEALCHAYEDDYIATKDFILDSSEPYLTSQDETGRTVLSWAAESDSKATVNALLVRTAKIDFGDKNTRTPLSFASQHGNLAVVRQFLSRREQDAQVLSENPANNLHIDSTSEDKGWTPLWYAVNGGHTKVAEALLDNGAKPSIKDKGNRDLMQLLVDKETHPVADGASISSIAMEGVRKLLEPFFSLLTDVFDESRKLDETINAMSLTFHSAGMDMHPSGKSVTKLLTARREDSQSSSIRTQWLHLPANNILKPEFWADNQSVPRDVTRWHERFMRAGCHVLPLSKSPAIPSLPDDAKDDKLKDVDGGKSPTDNQDDEENETTTNRKMNKKLGRHGARKSEDQEMPYLHWEHRDEVNKLKEIWKSFEPKSKSQASHREFGAAKASEGTALNSSEKLLWMYLGEDHPIHIRRTLDEYYYPDSSKLEDRGNDQTTLRWFQDQATSDASGPVLTMVDQLWMWVLPKCGSSPPTIITAFPQESNYYCGNSRPFLLKNIIAKCGDYSRRSLYDVAEVIVAECSRIYFDSTSNRPRTTQFLDVFRNSIGMIVENDIGRFREFQDTIGQLTSLPERNNPTAQDDLNKTDNTSSEENRAATKEPDSLNKISDRSSKSKGSLDNDRALERLLNIEKDIEDLRKVKDIRDELNIMRSLCHRQNGVIEEMGHITQRQNGTNDSPRDIPGLTAPYLPQAVVKRNLEEVEALDDFAKRAGDAIEQLLELKQQQADLLLTKAIYKINDATDKQGKTIMAFTLVTILFLPLSFMASFLALDVSQFPSYGGKLSLNWVVKIILSVSLPLSIAFFVLAFNSTHSQRKNTMNAIRKWKSKAGNVLPHVPSVRIRCPRIWERGHNATGDIENGGAASHGNKK

SEQ ID NO: 13267 - DNA, 2741 bp, Muscodor strobelii; identical to SEQ ID NO: 13264
  misc_feature: SGI EST ID NO. CUFF.31665.1
  misc_feature: Variant of the nucleotide sequence at SEQ ID NO 13265

SEQ ID NO: 13268 - DNA, 690 bp, Muscodor strobelii
  misc_feature: SGI cDNA ID NO. 564340
  misc_feature: Elevated expression when VOC is produced
  misc_feature: Encodes the peptide sequence at SEQ ID NO 13269
atggctcctccgccaaccctggtggcagcagtgttgaccctcgtcctagggtggctatcagtggcgttgcgattctacactcgagtatctgcacgccagggtcttcattgggatgactggttgctactgttagctgcgattactgggacatctgttcttgctctgacacttgctgcggctgtcgttgacccggctggtaacgacaatacgcaaatcttcgatgagagctatatcgaaacacctgaagacatattttatctcaaaataaatctcgcgacggcagtcatatattacacgatcaatgccgcagtcaagttgagcatcctgtacatgtactaccggatcttccgtgccaagccaagcctcagattccaattattcatcacagccggcctagtactggcatggtggattggaaccacggtggcgcagaccgtcaactgtattccgatatcaaagtattggactagcaatatccttgacccgaaatattgcttcaatctgaatacctttttcgttgtcgccggcagtcttgaggtatcactggacgtgattatcctgacgctccctattagggctgtgcttgctttgcatttgtcttggaaacggaaagctatcatctcgggcatcttcctgctcggaggctttgtgatagccacagggctttggttcactcaggggtcggagtaa

SEQ ID NO: 13269 - protein, 229 aa, Muscodor strobelii
  misc_feature: SGI Peptide ID NO. 564340
  misc_feature (6)..(214): NCBI GI: 156032776 Blast Desc: SS1G_13793 [Sclerotinia sclerotiorum 1980] gi|154699196|gb|EDN98934.1| SS1G_13793 [Sclerotinia sclerotiorum 1980]
  misc_feature (6)..(222): NCBI GI: 154301684 Blast Desc: BC1G_10169 [Botryotinia fuckeliana B05.10] gi|150855831|gb|EDN31023.1| BC1G_10169 [Botryotinia fuckeliana B05.10]
  misc_feature (16)..(217): NCBI GI: 238483045 Blast Desc: integral membrane protein [Aspergillus flavus NRRL3357] gi|220700811|gb|EED57149.1| integral membrane protein [Aspergillus flavus NRRL3357]
  misc_feature (6)..(220): NCBI GI: 156059168 Blast Desc: SS1G_03596 [Sclerotinia sclerotiorum 1980] gi|154701383|gb|EDO01122.1| SS1G_03596 [Sclerotinia sclerotiorum 1980]
  misc_feature (11)..(222): NCBI GI: 255940922 Blast Desc: Pc16g09120 [Penicillium chrysogenum Wisconsin 54-1255] gi|211585853|emb|CAP93582.1| Pc16g09120 [Penicillium chrysogenum Wisconsin 54-1255]
  misc_feature (16)..(217): NCBI GI: 169766336 Blast Desc: [Aspergillus oryzae RIB40] gi|83765494|dbj|BAE55637.1| protein product [Aspergillus oryzae]
  misc_feature (6)..(217): NCBI GI: 212533581 Blast Desc: integral membrane protein [Penicillium marneffei ATCC 18224] gi|210072311|gb|EEA26400.1| integral membrane protein [Penicillium marneffei ATCC 18224]
  misc_feature (6)..(217): NCBI GI: 70983652 Blast Desc: integral membrane protein [Aspergillus fumigatus Af293] gi|66844979|gb|EAL85315.1| integral membrane protein [Aspergillus fumigatus Af293] gi|159123642|gb|EDP48761.1| protein
  misc_feature (6)..(217): NCBI GI: 119484626 Blast Desc: integral membrane protein [Neosartorya fischeri NRRL 181] gi|119410248|gb|EAW20195.1| integral membrane protein [Neosartorya fischeri NRRL 181]
  misc_feature (8)..(217): NCBI GI: 115401548 Blast Desc: conserved [Aspergillus terreus NIH2624] gi|114190303|gb|EAU32003.1| conserved [Aspergillus terreus NIH2624]
  misc_feature: Useful for introducing or modulating the production of volatile compounds
MAPPPTLVAAVLTLVLGWLSVALRFYTRVSARQGLHWDDWLLLLAAITGTSVLALTLAAAVVDPAGNDNTQIFDESYIETPEDIFYLKINLATAVIYYTINAAVKLSILYMYYRIFRAKPSLRFQLFITAGLVLAWWIGTTVAQTVNCIPISKYWTSNILDPKYCFNLNTFFVVAGSLEVSLDVIILTLPIRAVLALHLSWKRKAIISGIFLLGGFVIATGLWFTQGSE

SEQ ID NO: 13270 - DNA, 1928 bp, Muscodor strobelii
  misc_feature: SGI EST ID NO. CUFF.31708.0
  misc_feature: Variant of the nucleotide sequence at SEQ ID NO 13268
atcaagagcagtccgcatatactgtcctcttctccattctgtaccgccaatgattgaggagtatgcatgctcgcttaaaaaatcatcaccccatttcactacccagtgttcagttgtggctcacttcagacccttgtccagctgtatttgatcacctcgtacgacacaaatctgcgcttccttttagacgggccagtagagataaggtaatgattaggaagctattggatatcatcgcaaccactgcgctctgcagtaagacacaaactccgcaccagtgtgcttacaataggcgataagtaatgccggaagctgctcactcgtcagtaatgtcggacgtttctgcctctaagctttgccatcaaagatggggtgttcttgacctttcacatctacgtttaatcatatccgtcggtatcaatcgacaaggcataattaaatccgatgtctctttatggctcctccgccaaccctggtggcagcagtgttgaccctcgtcctagggtggctatcagtggcgttgcgattctacactcgagtatctgcacgccagggtcttcattgggatgactggttgctactgttagctgcgattactgggacatctgttcttgctctgacacttgctgcggctgtcgttgacccggctggtaacgacaatacgcaaatcttcgatgagagctatatcgaaacacctgaagacatattttatctcaaaataaatctcgcgacggcagtcatatattacacgatcaatgccgcagtcaagttgagcatcctgtacatgtactaccggatcttccgtgccaagccaagcctcagattccaattattcatcacagccggcctagtactggcatggtggattggaaccacggtggcgcagaccgtcaactgtattccgatatcaaagtattggactagcaatatccttgacccgaaatattgcttcaatctgaatacctttttcgttgtcgccggcagtcttgaggtatcactggacgtgattatcctgacgctccctattagggctgtgcttgctttgcatttgtcttggaaacggaaagctatcatctcgggcatcttcctgctcggaggctttgtgatagccacagggcttgtgagagtcgtaactggatattcgccagggagtcaacgcccatcctcatcggctgagttgtggacagtggttcactcaggggtcggagtaatttgtgcaagcttgccgatattcaatccgttactgcagcgtatattgcaatcatccctcgttgcaaagacgctgagtttgttttcttcgaagtctggtcagtcaggagaagttataagaagagaggagagcagagaaacatcaattcctctgcatacaattgtcgacacgagaaattctagccgagtcgatgtagagcaaaatgcgctagcgccagagtctacgaataccactcaaagatacgacacggaattataagaagtatggataggggtcatctcttgttaaatgatgatgttttgatgctgccagttgacacaggcgcgatctccgcgattgaaactgatatggaagctgattgaggttactttcgagctcgaaatgtagcaaataagattcattaataagtcctgatatcaagttccatgagaagtcggctgaagcgcccacggttgtaacctaattataagcactgatgattgttcacgagaaggtatatcttagcgataggacctatgctcatttcacaaacacggctgcgtccgtcgtagcaacgcatgtctaagtgtgagagacacctatgtcgcaatcaaaaaagcagttgatgtcaatcaaggtagtagacagttttgtattccggagtgagtaaaacacttgtacctgtagtcccgtccttggtctattctgattatcgagctaccgcacatccgagtgtctt

SEQ ID NO: 13271 - DNA, 1512 bp, Muscodor strobelii
  misc_feature: SGI cDNA ID NO. 564341
  misc_feature: Encodes the peptide sequence at SEQ ID NO 13272
atgggtggaaataaaaacaacaaccaagtgcttctgcaccgcggcttccgtttcgagaagaggaacgtcgccttatcggccgatccagccgagaacacgatattgaagcaggcgctagttggtatcatacatgaaaacaaaaacccgcctaccatccagtccgagatcagaggtagattgctacatctattcgacacttgtctagattacgagacgcttggtcgcgcgttgcgtcttggtagcatcttttggagcacagtatcggagcgatggaaccccctcgcccctctgaacggccaacagacgaagacagttgctgatacttatgtgaaagcacgtcgggaggccattcgacgaggcttcgatgacatcaatgctcttactatagcagttgacaagttcatccggttgcaagaggaagttgacgcgctggccgcgatccaagggacaagtttagctattcgacctacagcggaagtccaagtatccgaggatcttggccaactctcgattcaacagtctgctgagaagcgccggatcaatgcttgggagctggctacgagcatatgggaactggaaaggaatttaccatctccgcccaactacattgcctggccgcccacatatctctttgaagaagcgtctgaacaagagctcgcatggatctcggacacccgaattcagagtcgcctgtccggaatttcgtacaagaagcgaccggaggatagcaaattcccgaatcatattccagacgatacgagcaccccactcgatgtcaaatggtttttgtgcgccacggcgctgtattacaaacgtcacgatctatgtgactgggggctgtacatgaaaccaatcgcgttcgcctgcgacgaggacgcacatggatggtggggaccgacaggaagactgtctcgtgaatatgatacgattcagcaatttgcaagctgggcaaaggaccgagtgaacaccggaccatggaggacggacgatatgattggggtcatctctggctggcccagtgagatcctcgaccaatggcaagcagaaaccaacgaccagtcacttgccgcgaagcagaccatgtggctcgaagagtcctgcaaagtgtctttcgttgtcgtcttgaataaactcagcgacggatatcgactgaccgtatacgatcccagccatcacctctacgccgatgacgagccccatgagggaatgggagaagcacctgaatggatattcaaacgtcgcatatgtaaagaaatcaacgaactgctgccgatcaaacaattctttcacggcggcgagttttgctacgtccaggatggtgacggcaagtatccggaggacctgctcggaaattcgctccgctatgtctgcgccatactccgaggcgatccgcgctaccgtcccggtccacgatcgagcagcatcatcggggtggaggagaatccattcgtctatatttcctcgccggaagactatttcaatggcggagaactattgtatccgatttcttag

SEQ ID NO: 13272 - protein, 503 aa, Muscodor strobelii
  misc_feature: SGI Peptide ID NO. 564341
MGGNKNNNQVLLHRGFRFEKRNVALSADPAENTILKQALVGIIHENKNPPTIQSEIRGRLLHLFDTCLDYETLGRALRLGSIFWSTVSERWNPLAPLNGQQTKTVADTYVKARREAIRRGFDDINALTIAVDKFIRLQEEVDALAAIQGTSLAIRPTAEVQVSEDLGQLSIQQSAEKRRINAWELATSIWELERNLPSPPNYIAWPPTYLFEEASEQELAWISDTRIQSRLSGISYKKRPEDSKFPNHIPDDTSTPLDVKWFLCATALYYKRHDLCDWGLYMKPIAFACDEDAHGWWGPTGRLSREYDTIQQFASWAKDRVNTGPWRTDDMIGVISGWPSEILDQWQAETNDQSLAAKQTMWLEESCKVSFVVVLNKLSDGYRLTVYDPSHHLYADDEPHEGMGEAPEWIFKRRICKEINELLPIKQFFHGGEFCYVQDGDGKYPEDLLGNSLRYVCAILRGDPRYRPGPRSSSIIGVEENPFVYISSPEDYFNGGELLYPIS

SEQ ID NO: 13273 - DNA, 1446 bp, Muscodor strobelii
  misc_feature: SGI cDNA ID NO. 564342
  misc_feature: Encodes the peptide sequence at SEQ ID NO 13274
atgcctcgagaccaccgggcgctgaagctacctggcttcaagtttccgcttggagaaccgatgttctccgacgaccgagctcgctaccgacgaatgcgagaggctcttctggggtccgacactagcgacatgactgtcgaacagcttcgtgccaagatggcacagtctctggaggagttacttggtgtctgcatgagcctagagacactcgctcgcgccgtgcgtctggagcagctatactggaagactgtcgctgaacagtgggagtcgcatggaccactcgaagaccgagagacagctctcttggtatatcgcttcgcaggggctcgacgaatcgctcgagaggagcatgataaccccaacaccaccttggccataaaggccaatagctttctaaccctatacacagagatccgggcgatgccggcaccccagtccatgaacctccccattcatctgaccgagtttggtaagatggcccagagtctcggacagctgggcatttcgaccggcgcgacctcgacaagcgcaggcgtcgcagtcgaagctctctctgccccgtcttggcccccaccccatctcagcgatgaagagcgccactgggtgaccgaccctcgcatagcgcagttcctaactggtataacgtatttgcatatacccccgaaaggacaaggaggattctttggcggctatcccgacgactacggcgagcctatggagatcaagcatttcctaggcgccatccttctatatcatcagaatccagcagcctgcaattggactcttcacatgaagcccgttgcattcatcgatcacaatgagcgtaatgcgtggcgtcgtgccatcggcaatctgtcactcatgtatagtacggcgggagaattcgcggtctatgctgccaaccaattgaagactcgtcgtcttgatgcagtcgtgggtctcatatcaggttggcctgcggaggatctgggggagtgggaatccaagtctcaggggcgcgtcatcagcggacagcaagaggactggctgaagagctgtcggaaatactcgtttctctgtatcctgaccattgtggccggtcccggagcaaacatgatcatatacgacccgttccaccaagccgcctctgatgttctacctcgtcgtgccggtagtactgagtgtccagcgcactcattcaagcgcgccatatgtcgtcagatcagccgcactatccagatcgtcgagctatggcatgggggtttgaggtgtcacgttgacgatacgcccccaaatcacgttgtcggtcccatgggaaatagtctccgatacttatacaagatggtggagggcgggttgagcaatcctctgtctgacttcatagagggagttgcagagccgcgcttcagtcgagtaccctcgcctgtcaattattttaacggtacaagcaacgaaggcgtcaattga

SEQ ID NO: 13274 - protein, 481 aa, Muscodor strobelii
  misc_feature: SGI Peptide ID NO. 564342
MPRDHRALKLPGFKFPLGEPMFSDDRARYRRMREALLGSDTSDMTVEQLRAKMAQSLEELLGVCMSLETLARAVRLEQLYWKTVAEQWESHGPLEDRETALLVYRFAGARRIAREEHDNPNTTLAIKANSFLTLYTEIRAMPAPQSMNLPIHLTEFGKMAQSLGQLGISTGATSTSAGVAVEALSAPSWPPPHLSDEERHWVTDPRIAQFLTGITYLHIPPKGQGGFFGGYPDDYGEPMEIKHFLGAILLYHQNPAACNWTLHMKPVAFIDHNERNAWRRAIGNLSLMYSTAGEFAVYAANQLKTRRLDAVVGLISGWPAEDLGEWESKSQGRVISGQQEDWLKSCRKYSFLCILTIVAGPGANMIIYDPFHQAASDVLPRRAGSTECPAHSFKRAICRQISRTIQIVELWHGGLRCHVDDTPPNHVVGPMGNSLRYLYKMVEGGLSNPLSDFIEGVAEPRFSRVPSPVNYFNGTSNEGVN

SEQ ID NO: 13275 - DNA, 1941 bp, Muscodor strobelii
  misc_feature: SGI cDNA ID NO. 564343
  misc_feature: Elevated expression when VOC is produced
  misc_feature: Encodes the peptide sequence at SEQ ID NO 13276
atggcggctcccttgcacagccgccacatacagaatgaaagcgaggcggaatatctagagcctcattggggttacgtccccagatctcggccgtgtacgaatgatgcaggatcatgcgcttacctcgatcaagtatatgacgctcacgatttatccatgctttactctggcatactatgggcaactattctcggcatagtgttcatatggacgatatcgaaacgagtatatgaatcacggagagcgggggggctcatatctggtggcaccagggcaaggaaatcagctaccacccgatcgatacatgcacttactgctcaaattcgaagtatattgcttccagatgcaatacggcctatattcggtagaacgacacgcctccaagttctgattttgagcgttttggctggctatttattaatctggagcttcgcgggtattacatatcaaacctggattactccagtgaagaactatccggacttacacaacacgagaacgagcctgggccccttttcggatcgcatcggtgtgatggcatacgcattgacacccctcgccattcttctatcaagtagagaatcgattccgtctctgctcactggtgtaccttatcaaagtttcaatttcctacaccgatggcttggctacatcattttggtccagggttcggttcacacgattggatggactattgttgagacccgcctataccaacctcagcctgcgaccgccattgcttggatcaagcaaacttatatgatctggggtgtcgttgccgaggttttgctcctcatgttgtttatactaagcacgccgtgggcaatacgtctgacaggatacgagttcttccgcaaaggccattatattcttgccatgttgtatataggtgcatgctggggtcattgggaacagctcaaatgcttccttctgccgtcacttctgatttggtttcttgatcgtggcatacgactcgcgaaaactgctttgattcattaccagtatttggaggatggctccatgggtttcagtgccgcctcggcatctcttacgcgctttatcgacggggagcatggggatattattcgcttggatttcgaacaaacgcatgatccatggagaatcggtcagcatttctatctctgcttcacagaaagcagtatctggcagtcgcatccgttcacgccgctcaacctaccgcaggtacggaatggcactgttgcacactcatacattttccgagccaaaaatggacagacgaaaaatatcgcggacattgctaatgtaaagctctctgaatcgtcaaaagctacgacatccgtgatactgacaggaccatatggggaacctataactgaagcactggtgcctgaagataatattctgtgtgttgcgggagggacggggatcacgtatgtactgcccgtcttactggagatcatccagaagcctgcgataaatgaccgcagaatccagctggtctgggcgattcgtcgaagagcggatctgccgtgggttgatgaggagcttcgcgccatacacagggctgctaaatctcatggaattacgatacatatttacgtgacaagagaaggaaagaacagcgcgcgttctatccttgaagagaaggttgtcaatgtaaacaatgaggcatgcggtttgccttcgggctcatcagcagtgggcggaagtattaagtcgctcgaaattgagattttgggggacaaagataacaatcaacatccagatgttatgaacatcgtcagcaatttcgtagatgaaaccatccgagggccgacaaaagtgttcggaagtggtccaggtgggatgatctcagacttgagaactgctgtagctgcgtgtagctcaggcaccaaggtttggaaaggaaatgagcgcttcgatgtcagcttgacttgcgatgacagactagagtggtaa

SEQ ID NO: 13276 - protein, 646 aa, Muscodor strobelii
  misc_feature: SGI Peptide ID NO. 564343
  misc_feature (176)..(299): Pfam Id: PF01794 Pfam Desc: Ferric reductase like transmembrane component
  misc_feature (340)..(451): Pfam Id: PF08022 Pfam Desc: FAD-binding domain
  misc_feature (458)..(619): Pfam Id: PF08030 Pfam Desc: Ferric reductase NAD binding domain
  misc_feature (462)..(508): Pfam Id: PF00175 Pfam Desc: Oxidoreductase NAD-binding domain
  misc_feature (459)..(539): Pfam Id: PF08030 Pfam Desc: Ferric reductase NAD binding domain
  misc_feature (5)..(646): NCBI GI: 256733016 Blast Desc: NECHADRAFT_68260 [Nectria haematococca mpVI 77-13-4]
  misc_feature (5)..(646): NCBI GI: 46123365 Blast Desc: FG06060.1 [Gibberella zeae PH-1]
  misc_feature (3)..(645): NCBI GI: 46138281 Blast Desc: FG10655.1 [Gibberella zeae PH-1]
  misc_feature (1)..(646): NCBI GI: 255940412 Blast Desc: Pc16g06390 [Penicillium chrysogenum Wisconsin 54-1255] gi|211585598|emb|CAP93309.1| Pc16g06390 [Penicillium chrysogenum Wisconsin 54-1255]
  misc_feature (9)..(646): NCBI GI: 189201559 Blast Desc: ferric reductase [Pyrenophora tritici-repentis Pt-1C-BFP] gi|187984215|gb|EDU49703.1| ferric reductase [Pyrenophora tritici-repentis Pt-1C-BFP]
  misc_feature (11)..(646): NCBI GI: 261354602 Blast Desc: ferric reductase transmembrane component 2 [Verticillium albo-atrum VaMs.102]
  misc_feature (5)..(646): NCBI GI: 169620032 Blast Desc: SNOG_13217 [Phaeosphaeria nodorum SN15] gi|111058424|gb|EAT79544.1| SNOG_13217 [Phaeosphaeria nodorum SN15]
  misc_feature (5)..(646): NCBI GI: 171684279 Blast Desc: protein product [Podospora anserina] gi|170942100|emb|CAP67752.1| protein product [Podospora anserina]
  misc_feature (2)..(646): NCBI GI: 145604663 Blast Desc: MGG_07833 [Magnaporthe grisea 70-15] gi|145012629|gb|EDJ97283.1| MGG_07833 [Magnaporthe grisea 70-15]
  misc_feature (9)..(646): NCBI GI: 121700338 Blast Desc: ferric-chelate reductase, [Aspergillus clavatus NRRL 1] gi|119396576|gb|EAW07008.1| ferric-chelate reductase, [Aspergillus clavatus NRRL 1]
  misc_feature (50)..(618): SWISSPROT Homolog: EC 1.16.1.7 Ferric-chelate reductase
  misc_feature: Useful for introducing or modulating the production of volatile compounds
MAAPLHSRHIQNESEAEYLEPHWGYVPRSRPCTNDAGSCAYLDQVYDAHDLSMLYSGILWATILGIVFIWTISKRVYESRRAGGLISGGTRARKSATTRSIHALTAQIRSILLPDAIRPIFGRTTRLQVLILSVLAGYLLIWSFAGITYQTWITPVKNYPDLHNTRTSLGPFSDRIGVMAYALTPLAILLSSRESIPSLLTGVPYQSFNFLHRWLGYIILVQGSVHTIGWTIVETRLYQPQPATAIAWIKQTYMIWGVVAEVLLLMLFILSTPWAIRLTGYEFFRKGHYILAMLYIGACWGHWEQLKCFLLPSLLIWFLDRGIRLAKTALIHYQYLEDGSMGFSAASASLTRFIDGEHGDIIRLDFEQTHDPWRIGQHFYLCFTESSIWQSHPFTPLNLPQVRNGTVAHSYIFRAKNGQTKNIADIANVKLSESSKATTSVILTGPYGEPITEALVPEDNILCVAGGTGITYVLPVLLEIIQKPAINDRRIQLVWAIRRRADLPWVDEELRAIHRAAKSHGITIHIYVTREGKNSARSILEEKVVNVNNEACGLPSGSSAVGGSIKSLEIEILGDKDNNQHPDVMNIVSNFVDETIRGPTKVFGSGPGGMISDLRTAVAACSSGTKVWKGNERFDVSLTCDDRLEW

SEQ ID NO: 13277 - DNA, 1488 bp, Muscodor strobelii
  misc_feature: SGI EST ID NO. CUFF.31750.0
  misc_feature: Variant of the nucleotide sequence at SEQ ID NO 13275
accttatcaaagtttcaatttcctacaccgatggcttggctacatcattttggtccagggttcggttcacacgattggatggactattgttgagacccgcctataccaacctcagcctgcgaccgccattgcttggatcaagcaaacttatatgatctggggtgtcgttgccgaggttttgctcctcatgttgtttatactaagcacgccgtgggcaatacgtctgacaggatacgagttcttccgcaaaggccattatattcttgccatgttgtatataggtgcatgctggggtcattgggaacagctcaaatgcttccttctgccgtcacttctgatttggtttcttgatcgtggcatacgactcgcgaaaactgctttgattcattaccagtatttggaggatggctccatgggtttcagtgccgcctcggcatctcttacgcgctttatcgacggggagcatggggatattattcgcttggatttcgaacaaacgcatgatccatggagaatcggtcagcatttctatctctgcttcacagaaagcagtatctggcagtcgcatccgttcacgccgctcaacctaccgcaggtacggaatggcactgttgcacactcatacattttccgagccaaaaatggacagacgaaaaatatcgcggacattgctaatgtaaagctctctgaatcgtcaaaagctacgacatccgtgatactgacaggaccatatggggaacctataactgaagcactggtgcctgaagataatattctgtgtgttgcgggagggacggggatcacgtatgtactgcccgtcttactggagatcatccagaagcctgcgataaatgaccgcagaatccagctggtctgggcgattcgtcgaagagcggatctgccgtgggttgatgaggagcttcgcgccatacacagggctgctaaatctcatggaattacgatacatatttacgtgacaagagaaggaaagaacagcgcgcgttctatccttgaagagaaggttgtcaatgtaaacaatgaggcatgcggtttgccttcgggctcatcagcagtgggcggaagtattaagtcgctcgaaattgagattttgggggacaaagataacaatcaacatccagatgttatgaacatcgtcagcaatttcgtagatgaaaccatccgagggccgacaaaagtgttcggaagtggtccaggtgggatgatctcagacttgagaactgctgtagctgcgtgtagctcaggcaccaaggtttggaaaggaaatgagcgcttcgatgtcagcttgacttgcgatgacagactagagtggtaagatggacattccgagaccccgacatagaaatcgaatactcggccaactccagatcgagaaagtgcatttggtcatgctcaataatagtgtgagcgatgctggattgtcccgcaatattctatcgtcttgaacttaatttctgacattgttgtctc

SEQ ID NO: 13278 - DNA, 549 bp, Muscodor strobelii
  misc_feature: SGI cDNA ID NO. 564344
  misc_feature: Elevated expression when VOC is produced
  misc_feature: Encodes the peptide sequence at SEQ ID NO 13279
atggatatggatatggggaattcagcatgctcaacccatatgctttggaactgggaagtgatcgatacatgttttctcgccgaatcatggcagatcaaaaacaacggaatgatggccgcaacttgcatcggcgtctttctcctggccatagtgctagagttcgtgcgtcgagtgggcaaggaatacgaccagttcattcttcgtcgatttcaacaatatgtcaattcgcaagctgctctatcaaaattgaatgatgacaaatatccatccgactccgctcctccgcagaaaactgtcatgttccgagcatcgttaccgcaacagttgattcggagttttattcacgcgattgctttcggcatcgcgtatattctcatgctgattgccatgggtttcaatggatacgtaatcatctctataatcataggtgctggaacaggcaattttgtatgcaactggacgacacaaaaaatcgccatcggttcgaactttgacccgatatccaggacctcgcagacaaatgacgagccgacggtttgttgcggatag

SEQ ID NO: 13279 - protein, 182 aa, Muscodor strobelii
  misc_feature: SGI Peptide ID NO. 564344
  misc_feature (12)..(158): Pfam Id: PF04145 Pfam Desc: Ctr copper transporter family
  misc_feature (13)..(158): Pfam Id: PF04145 Pfam Desc: Ctr copper transporter family
  misc_feature (3)..(182): NCBI GI: 46123367 Blast Desc: FG06061.1 [Gibberella zeae PH-1]
  misc_feature (2)..(182): NCBI GI: 256732573 Blast Desc: [Nectria haematococca mpVI 77-13-4]
  misc_feature (9)..(182): NCBI GI: 171684277 Blast Desc: protein product [Podospora anserina] gi|170942099|emb|CAP67751.1| protein product [Podospora anserina]
  misc_feature (1)..(182): NCBI GI: 261358524 Blast Desc: copper transport protein ctr4 [Verticillium albo-atrum VaMs.102]
  misc_feature (3)..(182): NCBI GI: 259485831 Blast Desc: TPA: conserved [Aspergillus nidulans FGSC A4]
  misc_feature (1)..(181): NCBI GI: 169620034 Blast Desc: SNOG_13218 [Phaeosphaeria nodorum SN15] gi|111058425|gb|EAT79545.1| SNOG_13218 [Phaeosphaeria nodorum SN15]
  misc_feature (7)..(181): NCBI GI: 261354601 Blast Desc: high affinity copper transporter [Verticillium albo-atrum VaMs.102]
  misc_feature (1)..(181): NCBI GI: 255940414 Blast Desc: Pc16g06400 [Penicillium chrysogenum Wisconsin 54-1255] gi|211585599|emb|CAP93310.1| Pc16g06400 [Penicillium chrysogenum Wisconsin 54-1255]
  misc_feature (8)..(182): NCBI GI: 39973075 Blast Desc: MGG_07832 [Magnaporthe grisea 70-15] gi|145012628|gb|EDJ97282.1| MGG_07832 [Magnaporthe grisea 70-15]
  misc_feature (2)..(182): NCBI GI: 242818288 Blast Desc: Ctr copper transporter family protein [Talaromyces stipitatus ATCC 10500] gi|218713552|gb|EED12976.1| Ctr copper transporter family protein [Talaromyces stipitatus ATCC 10500]
  misc_feature: Useful for introducing or modulating the production of volatile compounds
MDMDMGNSACSTHMLWNWEVIDTCFLAESWQIKNNGMMAATCIGVFLLAIVLEFVRRVGKEYDQFILRRFQQYVNSQAALSKLNDDKYPSDSAPPQKTVMFRASLPQQLIRSFIHAIAFGIAYILMLIAMGFNGYVIISIIIGAGTGNFVCNWTTQKIAIGSNFDPISRTSQTNDEPTVCCG

SEQ ID NO: 13280 - DNA, 1520 bp, Muscodor strobelii
  misc_feature: SGI EST ID NO. CUFF.31768.1
  misc_feature: Variant of the nucleotide sequence at SEQ ID NO 13278
caacaccccacatcagagtcgcgtatctcaagaacagagccgtggaccaaagaagaataaaaaggaagagaaactcatcgatcacgatcgagagattaggactgattggcactcatacgccacgcagagatcaatctactcacctaaacacgatgtcgcaaggtcacatcccttattaaagctttctagcacgccttagacctctattaaaacaaaccagttacggaaagcgacctccgtaaactcgtgaaatctacaaacaaaggtatataccaagttctaacgcaaggtcgcatggatatggatatggatatggggaattcagcatgctcaacccatatgctttggaactgggaagtgatcgatacatgttttctcgccgaatcatggcagatcaaaaacaacggaatgatggccgcaacttgcatcggcgtctttctcctggccatagtgctagagttcgtgcgtcgagtgggcaaggaatacgaccagttcattcttcgtcgatttcaacaatatgtcaattcgcaagctgctctatcaaaattgaatgatgacaaatatccatccgactccgctcctccgcagaaaactgtcatgttccgagcatcgttaccgcaacagttgattcggagttttattcacgcgattgctttcggcatcgcgtatattctcatgctgattgccatgggtttcaatggatacgtaatcatctctataatcataggtgctggaacaggcaattttgtatgcaactggacgacacaaaaaatcgccatcggttcgaactttgacccgatatccaggacctcgcagacaaatgacgagccgacggtttgttgcggatagatgcccatcatcactgtagtaattcatatcttgcaaagttactcagttttcccgaagttgggttcgaagtgtctgctcggaaccgttgccacttgtccttcggtgatctggttacggatcaacaagaccgccgccatattaatgcttggtaagattctcgaagaacgcccgtctgatttcttttgcgtacgcgtagcacgctggttgcaatgagcgcgatgtgataagtagagtggaccgagacactcttagtcgcatggaaccgacagtattgtctttaatagttgaacccgtagcctgaaagtgagcgaaacaggcgacgttcaattctaacgctcattgtgttcgagtaatacgccccacttatataactgcgctgaactcgcatttcggattgttcgctgatggtagatatcagaactgtgctggcggtgtttgtgtcaatagactgaacaagtgtttcagtgtttcgagtgtaggcggtggttcagtacagtaggtgcgaaatttacaggcaccttgatcgcctataaacccctctctgcattcgccgtggggcgtgtcgggaaacacggaaaacgggtctggctacattcggagagccggatatctgtcgattcggacggttgattgtcagtcaattcaacttgctgcactgacttcaaccaaaa

SEQ ID NO: 13281 - DNA, 1029 bp, Muscodor strobelii
  misc_feature: SGI cDNA ID NO. 564345
  misc_feature: Elevated expression when VOC is produced
  misc_feature: Encodes the peptide sequence at SEQ ID NO 13282
atgcagaacgacgatcatggtcgattcattgagaaccgccccaagctgggccgaattccacatctcacattcctaaatcaggcatcatatcatgcgccttactatagaaaccataatggacagcaattgcgtaaaatcaagcctcttccgactctcgaagatctacttcgtgatccccttagcccctttcgttttttcagcatagtcgtgtatctcttgcatattttcaagatgaagtctgttgtcgcagcaactttgctcgccggcgtggccttggcatctcctatgatggagaaggccaagcttgagcttcaggctaggaacgctgctcgcagaagtaacacattcaagtcttctgttgacggggctcttggggaccccactgcaactgatgccgagtctacgaactgggccggaatcgcaattgtcacatcaggtgtatccgaggtcgcaggcacattcactgttcctgagatctcaccaccaggtggcgcatctgctggtacctcatattgtggtgctgcttgggttggcgtagacggctactccaactctgctttgatccagaccggtgttctctggtgtgtcgatggtagcggaagtggtgctgagtatgaggcatggtatgagtacctaccggccgcattggtggactatggcaatatcgccgtcaacgctggcgatgttgtcacagtcactgccactatgacgggctcaaaccagggcacaaccacattgtccgccaatggccagactgtatcacacgatttcagcaacgagggcaccgctctacagggcgcttctgctgaatggattgttgaggacttcagctcaggcggcggccttgtacctttcgccaacttcggctccgttactttcacagacgctactgctatcatcaatggcgccacggtcaacgctgccgatgacaaccctgtgaacatcggactggagactagctctggcaccgtcatcactgacaccactgtctctggtagctctctcactgttacttacacgggaccttga

SEQ ID NO: 13282 - protein, 342 aa, Muscodor strobelii
  misc_feature: SGI Peptide ID NO. 564345
  misc_feature (134)..(340): Pfam Id: PF01828 Pfam Desc: Peptidase A4 family
  misc_feature (76)..(341): NCBI GI: 238499183 Blast Desc: aspergillopepsin, [Aspergillus flavus NRRL3357] gi|220692579|gb|EED48925.1| aspergillopepsin, [Aspergillus flavus NRRL3357]
  misc_feature (75)..(339): NCBI GI: 212527274 Blast Desc: aspergillopepsin-2 precursor, [Penicillium marneffei ATCC 18224] gi|210073192|gb|EEA27279.1| aspergillopepsin-2 precursor, [Penicillium marneffei ATCC 18224]
  misc_feature (78)..(337): NCBI GI: 242789335 Blast Desc: aspergillopepsin, [Talaromyces stipitatus ATCC 10500] gi|218717927|gb|EED17347.1| aspergillopepsin, [Talaromyces stipitatus ATCC 10500]
  misc_feature (106)..(339): NCBI GI: 212534108 Blast Desc: aspergillopepsin, [Penicillium marneffei ATCC 18224] gi|210069609|gb|EEA23699.1| aspergillopepsin, [Penicillium marneffei ATCC 18224]
  misc_feature (76)..(339): NCBI GI: 212541572 Blast Desc: aspergillopepsin-2 precursor, [Penicillium marneffei ATCC 18224] gi|210068240|gb|EEA22332.1| aspergillopepsin-2 precursor, [Penicillium marneffei ATCC 18224]
  misc_feature (76)..(305): NCBI GI: 119474281 Blast Desc: aspergillopepsin, [Neosartorya fischeri NRRL 181] gi|119407169|gb|EAW17119.1| aspergillopepsin, [Neosartorya fischeri NRRL 181]
  misc_feature (76)..(339): NCBI GI: 242798301 Blast Desc: aspergillopepsin-2 precursor, [Talaromyces stipitatus ATCC 10500] gi|218716486|gb|EED15907.1| aspergillopepsin-2 precursor, [Talaromyces stipitatus ATCC 10500]
  misc_feature (76)..(305): NCBI GI: 121711990 Blast Desc: aspergillopepsin, [Aspergillus clavatus NRRL 1] gi|119401762|gb|EAW12184.1| aspergillopepsin, [Aspergillus clavatus NRRL 1]
  misc_feature (76)..(339): NCBI GI: 212530110 Blast Desc: aspergillopepsin-2 precursor, [Penicillium marneffei ATCC 18224] gi|210074610|gb|EEA28697.1| aspergillopepsin-2 precursor, [Penicillium marneffei ATCC 18224]
  misc_feature (92)..(339): NCBI GI: 52547961 Blast Desc: AF439998_1 glutamic protease eqolisin [Talaromyces emersonii]
  misc_feature (128)..(339): SWISSPROT Homolog: EC 3.4.23.19 Aspergillopepsin II
  misc_feature: Useful for introducing or modulating the production of volatile compounds
MQNDDHGRFIENRPKLGRIPHLTFLNQASYHAPYYRNHNGQQLRKIKPLPTLEDLLRDPLSPFRFFSIVVYLLHIFKMKSVVAATLLAGVALASPMMEKAKLELQARNAARRSNTFKSSVDGALGDPTATDAESTNWAGIAIVTSGVSEVAGTFTVPEISPPGGASAGTSYCGAAWVGVDGYSNSALIQTGVLWCVDGSGSGAEYEAWYEYLPAALVDYGNIAVNAGDVVTVTATMTGSNQGTTTLSANGQTVSHDFSNEGTALQGASAEWIVEDFSSGGGLVPFANFGSVTFTDATAIINGATVNAADDNPVNIGLETSSGTVITDTTVSGSSLTVTYTGP

SEQ ID NO: 13283 - DNA, 2115 bp, Muscodor strobelii
  misc_feature: SGI EST ID NO. CUFF.31765.0
  misc_feature: Variant of the nucleotide sequence at SEQ ID NO 13281
gccgatcccatctctcagctctgcggaaagggccggatttacaaactcgacaatcgatattcgcaaaggctcagcaggcgggggcaatgacagacttgagcaaaacgcatttcatcctcacccccgtccatgtctttccctcccacatatttgtcgtgttttgagatctttgagaggagacaaacacgatctacacacacataccagaccctgatgatcatgcagggtgtagttcgaccccgtccaagttcatcgaacgcccaagatagtagggttcgtctacgacaccgaaactgtgccatggttgaaaagggcttctcattgcacccgcacactacgaacctgaggtcaacgctaagcccccactgcatatgccgtagacaccacgtttcatcacaacatggcttcctactcccatgtctagttcaacaatcacaaccgagccacttgcctatttggaaatggcttggcggtgctcagaggattgaggctaggccgccgttctcatatgtgaggcgggtttgcaaataggtgtcagataatagaggcgaggttctcggttaagtctgacatctatctatgagatgtcatcgaaagaagacgatcacatccaagagctagggctatgttcccagattgcgccatcgtttccggttccttagttgatatcaaatccgatactcaagatagaaagatggtgttcctccgagtcggccatgcagaacgacgatcatggtcgattcattgagaaccgccccaagctgggccgaattccacatctcacattcctaaatcaggcatcatatcatgcgccttactatagaaaccataatggacagcaattgcgtaaaagtataaagcttcattcaagtccccaagattgatcagattttcttagtactcctcagtcccaacagtcaagcctcttccgactctcgaagatctacttcgtgatccccttagcccctttcgttttttcagcatagtcgtgtatctcttgcatattttcaagatgaagtctgttgtcgcagcaactttgctcgccggcgtggccttggcatctcctatgatggagaaggccaagcttgagcttcaggctaggaacgctgctcgcagaagtaacacattcaagtcttctgttgacggggctcttggggaccccactgcaactgatgccgagtctacgaactgggccggaatcgcaattgtcacatcaggtgtatccgaggtcgcaggcacattcactgttcctgagatctcaccaccaggtggcgcatctgctggtacctcatattgtggtgctgcttgggttggcgtagacggctactccaactctgctttgatccagaccggtgttctctggtgtgtcgatggtagcggaagtggtgctgagtatgaggcatggtatgagtacctaccggccgcattggtggactatggcaatatcgccgtcaacgctggcgatgttgtcacagtcactgccactatgacgggctcaaaccagggcacaaccacattgtccgccaatggccagactgtatcacacgatttcagcaacgagggcaccgctctacagggcgcttctgctgaatggattgttgaggacttcagctcaggcggcggccttgtacctttcgccaacttcggctccgttactttcacagacgctactgctatcatcaatggcgccacggtcaacgctgccgatgacaaccctgtgaacatcggactggagactagctctggcaccgtcatcactgacaccactgtctctggtagctctctcactgttacttacacgggaccttgagcgggtgtgtttcagacttcgatctttctagattgcaagaggcttgaagctatctaggaagatctcagattgcgtcacgacacgggtacaactttttcgggatgccttgaagtgacgtccattgggcaatagttctttgtatatatagtcactacatactacatgcgccaacgttgttacatgttcatctactctagaaatgccacatgcattgctcccttgcgtctattggtggagtaattgcgatcgcgatatcgtttgttttcaacgagggatgaacataggccactgatactttgagacgc

SEQ ID NO: 13284 - DNA, 957 bp, Muscodor strobelii
  misc_feature: SGI cDNA ID NO. 564346
  misc_feature: Reduced expression when VOC is produced
  misc_feature: Encodes the peptide sequence at SEQ ID NO 13285
atgtctctgcggaaacttcttggatctggggcaaagacgatgaggtatattccatgtgatggtattgattcatcagtgctcataggtatgcaggttgggcgactcaatctgctcacccctgaactagtcaagaagaccaaagatgtcgagatacgagatggcgatgtaatttcacttaattggtcaatgaaactgccggaaaaaccagcctttgggcgacctccgtgtcagcacaaacttgaaccttttcctggtggcgctcctattttcgacgactttctcaatatgaatgtccagtctgggagccaatgggatggcttccggcatttcggacagctcaaacacggcagattttataacaatttgacgccagaagaagtaatgtcaagtacgcgatgtggcattcaagccatctcagaccatggtatcgttggtcgcggcgtactcctggattactatggctggaaagttgcaaagggagaatcgtacgatccgctcagttcacatccgatccacctcgaagaaattctagcagtcgcaaaagatcaagaaatagagttccaacggggagatatcttgcttgttcgtggtggctacacaagtgcttactatcaaaatgcgaaaaacaaccctaagaaactggttgaagctgcagtgcccaatccgactctcgccggcttagcacagacagaagaaatgaagacatggctccatgattcatacttctcagccgtcgctggagatgctcctgctttcgaatgctggcctgtaaaagactggtatctgcacgagtaccttctcggctgttggggcgttttgattggcgaaatgtttgatctagaggccctcgccagaatctgtcgcaagaagcaacgatggtcattcgtgtttgtcagtacgcctctgaatatgccaggcggtgttgcaagtcttgcgaacgccatggcaattcaatga

SEQ ID NO: 13285 - protein, 318 aa, Muscodor strobelii
  misc_feature: SGI Peptide ID NO. 564346
  misc_feature (32)..(317): NCBI GI: 240109780 Blast Desc: CPC735_032850 [Coccidioides posadasii C735 delta SOWgp]
  misc_feature (32)..(317): NCBI GI: 119184094 Blast Desc: CIMG_06890 [Coccidioides immitis RS]
  misc_feature (31)..(317): NCBI GI: 189195606 Blast Desc: conserved [Pyrenophora tritici-repentis Pt-1C-BFP] gi|187980020|gb|EDU46646.1| conserved [Pyrenophora tritici-repentis Pt-1C-BFP]
  misc_feature (32)..(317): NCBI GI: 169776361 Blast Desc: [Aspergillus oryzae RIB40] gi|83771382|dbj|BAE61514.1| protein product [Aspergillus oryzae]
  misc_feature (32)..(317): NCBI GI: 156055452 Blast Desc: SS1G_05078 [Sclerotinia sclerotiorum 1980] gi|154702862|gb|EDO02601.1| SS1G_05078 [Sclerotinia sclerotiorum 1980]
  misc_feature (32)..(317): NCBI GI: 226285937 Blast Desc: conserved [Paracoccidioides brasiliensis Pb01]
  misc_feature (31)..(317): NCBI GI: 255937421 Blast Desc: Pc13g13230 [Penicillium chrysogenum Wisconsin 54-1255] gi|211584357|emb|CAP92392.1| Pc13g13230 [Penicillium chrysogenum Wisconsin 54-1255]
  misc_feature (32)..(317): NCBI GI: 258570561 Blast Desc: conserved [Uncinocarpus reesii 1704] gi|237904354|gb|EEP78755.1| conserved [Uncinocarpus reesii 1704]
  misc_feature (32)..(317): NCBI GI: 119495476 Blast Desc: NFIA_013140 [Neosartorya fischeri NRRL 181] gi|119412684|gb|EAW22625.1| conserved [Neosartorya fischeri NRRL 181]
  misc_feature (32)..(317): NCBI GI: 255942185 Blast Desc: Pc18g00140 [Penicillium chrysogenum Wisconsin 54-1255] gi|211586594|emb|CAP94238.1| Pc18g00140 [Penicillium chrysogenum Wisconsin 54-1255]
  misc_feature: Useful for introducing or modulating the production of volatile compounds
MSLRKLLGSGAKTMRYIPCDGIDSSVLIGMQVGRLNLLTPELVKKTKDVEIRDGDVISLNWSMKLPEKPAFGRPPCQHKLEPFPGGAPIFDDFLNMNVQSGSQWDGFRHFGQLKHGRFYNNLTPEEVMSSTRCGIQAISDHGIVGRGVLLDYYGWKVAKGESYDPLSSHPIHLEEILAVAKDQEIEFQRGDILLVRGGYTSAYYQNAKNNPKKLVEAAVPNPTLAGLAQTEEMKTWLHDSYFSAVAGDAPAFECWPVKDWYLHEYLLGCWGVLIGEMFDLEALARICRKKQRWSFVFVSTPLNMPGGVASLANAMAIQ

SEQ ID NO: 13286 - DNA, 2085 bp, Muscodor strobelii
  misc_feature: SGI EST ID NO. CUFF.31812.1
  misc_feature: Variant of the nucleotide sequence at SEQ ID NO 13284
ctgtgactgactagctaatttcctcaggctattgcaactgactctgccacgtgggacaggatgtttttgcgcagtttgacgaaaacaacagcttggcgttgcgtcccactgccacccagcctagtcctcagaagggtgactcgaccggtgcttatttcacaataatttcgttgcctccgtcgcttcactgtccattggggcctcgacataataattacatactgaagtagttaattcatctctgtatgattggtagtactttagaacgctctagcgcgtactagggattgaaccatcaaatacgttttgactgcccatcttcttcaggtgcacatgccagcgctcccttcacagatcagcttcaaaccgtatctcagtgagttcctcactgtcacggaagccgatttccgttatgcagacaatgcgacgtgattaccaatctaggaactgtgtgtcgtatacaacggccatgccataaagttggatgacgcgggtatcaacgcactaccccgcaaacgactaaacccattcagcattataaagatgatccttttgaagggcatgcgcaaagtagcgcatatctaaatctatgattgattatacggagttctactacgcaccatcattgaatgatatctttatctttcgcatcatggatcatgctctgaagctattcccagacggactacctacactcgaacaactcagagaattcaacagaggcaaagatgtctctgcggaaacttcttggatctggggcaaagacgatgaggtatattccatgtgatggtattgattcatcagtgctcataggtatgcaggttgggcgactcaatctgctcacccctgaactagtcaagaagaccaaagatgtcgagatacgagatggcgatgtaatttcacttaattggtcaatgaaactgccggaaaaaccagcctttgggcgacctccgtgtcagcacaaacttgaaccttttcctggtggcgctcctattttcgacgactttctcaatatgaatgtccagtctggggtatgtatgcaaataagccgaggttctgtaaacgttccgttccttggagtcgtcgcattacatcgacgtaggggcggctccgattctcgtggattaatatttcaagcattggctgacaggtatcatgcgtgtagagccaatgggatggcttccggcatttcggacagctcaaacacggcagattttataacaatttgacgccagaagaagtaatgtcaagtacgcgatgtggcattcaagccatctcagaccatggtatcgttggtcgcggcgtactcctggattactatggctggaaagttgcaaagggagaatcgtacgatccgctcagttcacatccgatccacctcgaagaaattctagcagtcgcaaaagatcaagaaatagagttccaacggggagatatcttgcttgttcgtggtggctacacaagtgcttactatcaaaatgcgaaaaacaaccctaagaaactggttgaagctgcagtgcccaatccgactctcgccggcttagcacagacagaagaaatgaagacatggctccatgattcatacttctcagccgtcgctggagatgctcctgctttcgaatgctggcctgtaaaagactggtatctgcacgagtaccttctcggctgttggggcgttttgattggcgaaatgtttgatctagaggccctcgccagaatctgtcgcaagaagcaacgatggtcattcgtgtttgtcagtacgcctctgaatatgccaggcggtgttgcaagtcttgcgaacgccatggcaattcaatgatcgatcttgaatgtatagcttgcgagatacaaggcagtacacggcttgagatgctttttgtctcatggttcttcacgggcatattggaaatgtctcacggaggcaagagaggggtgattgtgaagttgttgaagatgctgtatacactcgtgtagaaagagtacgtatgggatggtccaaatgtcttgttttttattcgaaatgcgtgcgcatccgaccatccccccgcatacagtaggtgattatacagtaagtgtagtagcaag

SEQ ID NO: 13287 - DNA, 1047 bp, Muscodor strobelii
  misc_feature: SGI cDNA ID NO. 564347
  misc_feature: Encodes the peptide sequence at SEQ ID NO 13288
atgattgattatacggagttctactacgcaccatcattgaatgatatctttatctttcgcatcatggatcatgctctgaagctattcccagacggactacctacactcgaacaactcagagaattcaacagaggcaaagatgtctctgcggaaacttcttggatctggggcaaagacgatgaggttgggcgactcaatctgctcacccctgaactagtcaagaagaccaaagatgtcgagatacgagatggcgatgtaatttcacttaattggtcaatgaaactgccggaaaaaccagcctttgggcgacctccgtgtcagcacaaacttgaaccttttcctggtggcgctcctattttcgacgactttctcaatatgaatgtccagtctgggagccaatgggatggcttccggcatttcggacagctcaaacacggcagattttataacaatttgacgccagaagaagtaatgtcaagtacgcgatgtggcattcaagccatctcagaccatggtatcgttggtcgcggcgtactcctggattactatggctggaaagttgcaaagggagaatcgtacgatccgctcagttcacatccgatccacctcgaagaaattctagcagtcgcaaaagatcaagaaatagagttccaacggggagatatcttgcttgttcgtggtggctacacaagtgcttactatcaaaatgcgaaaaacaaccctaagaaactggttgaagctgcagtgcccaatccgactctcgccggcttagcacagacagaagaaatgaagacatggctccatgattcatacttctcagccgtcgctggagatgctcctgctttcgaatgctggcctgtaaaagactggtatctgcacgagtaccttctcggctgttggggcgttttgattggcgaaatgtttgatctagaggccctcgccagaatctgtcgcaagaagcaacgatggtcattcgtgtttgtcagtacgcctctgaatatgccaggcggtgttgcaagtcttgcgaacgccatggcaattcaatga

SEQ ID NO: 13288 - protein, 348 aa, Muscodor strobelii
  misc_feature: SGI Peptide ID NO. 564347
  misc_feature (33)..(347): NCBI GI: 119184094 Blast Desc: CIMG_06890 [Coccidioides immitis RS]
  misc_feature (33)..(347): NCBI GI: 240109780 Blast Desc: CPC735_032850 [Coccidioides posadasii C735 delta SOWgp]
  misc_feature (53)..(347): NCBI GI: 255937421 Blast Desc: Pc13g13230 [Penicillium chrysogenum Wisconsin 54-1255] gi|211584357|emb|CAP92392.1| Pc13g13230 [Penicillium chrysogenum Wisconsin 54-1255]
  misc_feature (23)..(347): NCBI GI: 189195606 Blast Desc: conserved [Pyrenophora tritici-repentis Pt-1C-BFP] gi|187980020|gb|EDU46646.1| conserved [Pyrenophora tritici-repentis Pt-1C-BFP]
  misc_feature (40)..(347): NCBI GI: 156055452 Blast Desc: SS1G_05078 [Sclerotinia sclerotiorum 1980] gi|154702862|gb|EDO02601.1| SS1G_05078 [Sclerotinia sclerotiorum 1980]
  misc_feature (52)..(347): NCBI GI: 226285937 Blast Desc: conserved [Paracoccidioides brasiliensis Pb01]
  misc_feature (30)..(347): NCBI GI: 119495476 Blast Desc: NFIA_013140 [Neosartorya fischeri NRRL 181] gi|119412684|gb|EAW22625.1| conserved [Neosartorya fischeri NRRL 181]
  misc_feature (33)..(347): NCBI GI: 258570561 Blast Desc: conserved [Uncinocarpus reesii 1704] gi|237904354|gb|EEP78755.1| conserved [Uncinocarpus reesii 1704]
  misc_feature (30)..(347): NCBI GI: 70995708 Blast Desc: conserved [Aspergillus fumigatus Af293] gi|66850244|gb|EAL90571.1| conserved [Aspergillus fumigatus Af293] gi|159131363|gb|EDP56476.1| conserved [Aspergillus A1163]
  misc_feature (40)..(347): NCBI GI: 121701511 Blast Desc: conserved [Aspergillus clavatus NRRL 1] gi|119397163|gb|EAW07594.1| conserved [Aspergillus clavatus NRRL 1]
MIDYTEFYYAPSLNDIFIFRIMDHALKLFPDGLPTLEQLREFNRGKDVSAETSWIWGKDDEVGRLNLLTPELVKKTKDVEIRDGDVISLNWSMKLPEKPAFGRPPCQHKLEPFPGGAPIFDDFLNMNVQSGSQWDGFRHFGQLKHGRFYNNLTPEEVMSSTRCGIQAISDHGIVGRGVLLDYYGWKVAKGESYDPLSSHPIHLEEILAVAKDQEIEFQRGDILLVRGGYTSAYYQNAKNNPKKLVEAAVPNPTLAGLAQTEEMKTWLHDSYFSAVAGDAPAFECWPVKDWYLHEYLLGCWGVLIGEMFDLEALARICRKKQRWSFVFVSTPLNMPGGVASLANAMAIQ

SEQ ID NO: 13289 - DNA, 2085 bp, Muscodor strobelii; identical to SEQ ID NO: 13286
  misc_feature: SGI EST ID NO. CUFF.31812.1
  misc_feature: Variant of the nucleotide sequence at SEQ ID NO 13287

SEQ ID NO: 13290 - DNA, 1773 bp, Muscodor strobelii
  misc_feature: SGI cDNA ID NO. 564348
  misc_feature: Reduced expression when VOC is produced
  misc_feature: Encodes the peptide sequence at SEQ ID NO 13291
atgggtctttcacgagaaccaagtcagagagcattgtttagatggaattcaactaagtcgaagacaagttcatcacgaagttcaaagcaggtcagcgaacctcagattgttcatctcggtggctctcgtgtaggaacagccttcgaagaattagatatcccagcaccagatcgatccattgctggccaacgaccgccaacacaatggacattccacccgcctgcaccgaacccgccaggtataggcattgccattgctagccctgacggcagccctgcgataacgcctggtgcggagaacgataatgaaagaccaataacgcagtggttttcaaccgattggaaaccgccggctgctcgtgagacagagaaaagccaaagtgagcgacaagccccggtgcagaccccagcgctgaggacggcctttccctatccaagctccaatacgagccacgaggaagatattgtattttccccgtcgacatcaactgcagacacactaagtgtgtcttccgctggcgagtcactacttgcaagcccgacatactatccttcttccctctcctcacccacacctaccgtcgagatggctctgcagtggccggtccagccaattcagtcgactgatgcacctgaagttgttgtgcaacccagtccgcaattcccgaagagatcaacttcgttgtcgaagcgtcatgcgccgccaaaagcgatgattaggggtgcagggactggctcccttttcgaacagaaggaagcccagttaaggcggacacaatcaaccgctcggcctgagctcaaagagacatcgttaagacgtacccaatccaatgctgatgcccataacgccccaaactcggcggagtggaggagtacatcgtcacgtccaccactcaacagcgagcgcccgagacagatatccaaccctttttctggaccgaagattgaagaggaagaggaagaggaggcacaggaagcagcagtggagaaggagactgaagtcaggcccaagaaacaattcgaacagggttcaacagctccggaagctcccattcaaccgcaacgtccaccactgtttcagtcgcagatcagccctccacctaatggaccactaccgcagcccccaccaaacgccaccataccccaaatatcgagcacgaaactagcaggccacggaaagatgcgcgattcggcacaccgaagagatcaatccagctccagcattagctctagtataaaagaccggctatcacctagatccccaagggagccaccagatcaacctgaactgtctccgactggagacaaacagagaatgacaccgaaagaaagattctggctacaccgacattacaaaggcgagaccaattttctcaaagcatggggactgcaaatcgaaaacgaagaggagcgtgaagaaggtctcaatatactgcgcgaactcatgcgaggcgaggaagaagaggaaagagagagccaagagaggcgggccgctcatcattctggaatatcgtcgcgagcgagtactgcgacatcttcatccggacgcgatggttacagtctcgacgtcatcgctgaggagtctcataaccgaaatagagagagtgccggctctgagaatgcagatatcgaattctggaaaacgaaccatgattcgcgtggtggtaaagcaccccataatcgaagacaccgaccagaaatgcatgcgcgaactgagagcgatagctctgtgttaggtgcatatctagatttgcgtcgactgagtcgagagtag

SEQ ID NO: 13291 - protein, 590 aa, Muscodor strobelii
  misc_feature: SGI Peptide ID NO. 564348
  misc_feature (442)..(487): NCBI GI: 171676416 Blast Desc: protein product [Podospora anserina] gi|170936274|emb|CAP60933.1| protein product [Podospora anserina]
  misc_feature (439)..(491): NCBI GI: 85090707 Blast Desc: NCU07753 [Neurospora crassa OR74A] gi|28919917|gb|EAA29310.1| [Neurospora crassa OR74A]
  misc_feature: Useful for introducing or modulating the production of volatile compounds
MGLSREPSQRALFRWNSTKSKTSSSRSSKQVSEPQIVHLGGSRVGTAFEELDIPAPDRSIAGQRPPTQWTFHPPAPNPPGIGIAIASPDGSPAITPGAENDNERPITQWFSTDWKPPAARETEKSQSERQAPVQTPALRTAFPYPSSNTSHEEDIVFSPSTSTADTLSVSSAGESLLASPTYYPSSLSSPTPTVEMALQWPVQPIQSTDAPEVVVQPSPQFPKRSTSLSKRHAPPKAMIRGAGTGSLFEQKEAQLRRTQSTARPELKETSLRRTQSNADAHNAPNSAEWRSTSSRPPLNSERPRQISNPFSGPKIEEEEEEEAQEAAVEKETEVRPKKQFEQGSTAPEAPIQPQRPPLFQSQISPPPNGPLPQPPPNATIPQISSTKLAGHGKMRDSAHRRDQSSSSISSSIKDRLSPRSPREPPDQPELSPTGDKQRMTPKERFWLHRHYKGETNFLKAWGLQIENEEEREEGLNILRELMRGEEEEERESQERRAAHHSGISSRASTATSSSGRDGYSLDVIAEESHNRNRESAGSENADIEFWKTNHDSRGGKAPHNRRHRPEMHARTESDSSVLGAYLDLRRLSRE

SEQ ID NO: 13292 - DNA, 2294 bp, Muscodor strobelii
  misc_feature: SGI EST ID NO. CUFF.31901.1
  misc_feature: Variant of the nucleotide sequence at SEQ ID NO 13290
caaaatgatcaggtctcctagtttttttgtcgcccgttgtctgacgcgctgatctcgacggagcaaaggtgtgtcgcgacggccatcgtaacttgaagtgaagcgtcgtctgaagcaacctgttcggcgtctcaaaaatgggtctttcacgagaaccaagtcagagagcattgtttagatggaattcaactaagtcgaagacaagttcatcacgaagttcaaagcaggtcagcgaacctcagattgttcatctcggtggctctcgtgtaggaacagccttcgaagaattagatatcccagcaccagatcgatccattgctggccaacgaccgccaacacaatggacattccacccgcctgcaccgaacccgccaggtataggcattgccattgctagccctgacggcagccctgcgataacgcctggtgcggagaacgataatgaaagaccaataacgcagtggttttcaaccgattggaaaccgccggctgctcgtgagacagagaaaagccaaagtgagcgacaagccccggtgcagaccccagcgctgaggacggcctttccctatccaagctccaatacgagccacgaggaagatattgtattttccccgtcgacatcaactgcagacacactaagtgtgtcttccgctggcgagtcactacttgcaagcccgacatactatccttcttccctctcctcacccacacctaccgtcgagatggctctgcagtggccggtccagccaattcagtcgactgatgcacctgaagttgttgtgcaacccagtccgcaattcccgaagagatcaacttcgttgtcgaagcgtcatgcgccgccaaaagcgatgattaggggtgcagggactggctcccttttcgaacagaaggaagcccagttaaggcggacacaatcaaccgctcggcctgagctcaaagagacatcgttaagacgtacccaatccaatgctgatgcccataacgccccaaactcggcggagtggaggagtacatcgtcacgtccaccactcaacagcgagcgcccgagacagatatccaaccctttttctggaccgaagattgaagaggaagaggaagaggaggcacaggaagcagcagtggagaaggagactgaagtcaggcccaagaaacaattcgaacagggttcaacagctccggaagctcccattcaaccgcaacgtccaccactgtttcagtcgcagatcagccctccacctaatggaccactaccgcagcccccaccaaacgccaccataccccaaatatcgagcacgaaactagcaggccacggaaagatgcgcgattcggcacaccgaagagatcaatccagctccagcattagctctagtataaaagaccggctatcacctagatccccaagggagccaccagatcaacctgaactgtctccgactggagacaaacagagaatgacaccgaaagaaagattctggctacaccgacattacaaaggcgagaccaattttctcaaagcatggggactgcaaatcgaaaacgaagaggagcgtgaagaaggtctcaatatactgcgcgaactcatgcgaggcgaggaagaagaggaaagagagagccaagagaggcgggccgctcatcattctggaatatcgtcgcgagcgagtactgcgacatcttcatccggacgcgatggttacagtctcgacgtcatcgctgaggagtctcataaccgaaatagagagagtgccggctctgagaatgcagatatcgaattctggaaaacgaaccatgattcgcgtggtggtaaagcaccccataatcgaagacaccgaccagaaatgcatgcgcgaactgagagcgatagctctgtgttaggtgcatatctagatttgcgtcgactgagtcgagagtagactgcgctagacccgggctagattgtgtgtacatagatattacaagatgtaaaaagactgaaacaaatattgtgctattattaacaaatattatcttcaatatgaccaactgtctaagtctttgaagtgataaagcattctacctgcgtgtttcctgaaggctgcgtgtgtcgagatgtgtataacaccatatccgtgtagtttgctgccctcctttcatgcagtaattgcgtgtctacgagcagccttgtggacggttcgataaacattgttccgtacaagtcttcccaatgagaacattctcacaaacacctgaaagacccgtatctccatcgcatcgttggaacaccttcttagccgctggataaagcattcttcgagtag

SEQ ID NO: 13293 - DNA, 1899 bp, Muscodor strobelii
  misc_feature: SGI cDNA ID NO. 564349
  misc_feature: Encodes the peptide sequence at SEQ ID NO 13294
atgaagcccgccagcgctgatgatgggttcttccaacgggtcccggtactgaagaaccaattcctccacgatccaagtattacgagagtcttcaaattatttgtgccccaaaatgttgctgaattcgtcgcgcgggagatcactcgacttggtgacgaagttctagcacctcaaatattcgactgggtaacggatgccgagaagaatcagccgtatgtagtaggtggcggcaaagatgcattcggtcaacctgtgagttcgaaacttgtcgttaccgaaggatggaaaaaattgcaagaattcaatatcgggaaaggtttcgcatcacaagggtatgaagatggactcgaacaatacactcgggtggttatgtatctgcgagtacttctattcgagtcctcgtcagcaaatgttggctgtccagccgcaatgacagatggtgcagcacgcgtcttgcaaacccaaatccgtagtaacaccctatcctcggaacaaaaagcggcgttccaaaatgcttacgatcacgttatctcgcgggacccaaaagatgcctggacaagtggacaatggatgacagagcgacctggagggagcgacgtatcgttatctgaaactgttgctacatattcaccattacccgcaaatgcaactgactgcgatcctagcgctggtattcctcttggcccttggagcgtcgatggattcaagtggttctcaagcgcaacagattgcaacatgacgatactactggcccaaacaccaaaaggtctctcatgtttctatgccccaatgcggcgctacaattccaaactcatcgtctccgccacaggggaaacaggcggcacagagctaaacggcgtctcgatatcaaggctaaagaacaaaatggggaccaaatcgttaccaaccgccgaactcgagcttcgcggcatgcgagcatggatgattggcaaagaaggcgagggaattaagcagatcgcgaccattctaacaattacccgaattcgttccgcaatcagtgcgctcggatacctgaaccgcggtctcgcaatcgcaagagcattcacagaggtacgagaagtcggtgcaggccgtgggaagcggatgaaactcacggatagcgagctacatatgcggactcttgctgatatgactgtggagtaccacgcgatgatgctgcttggcttctattgtagctacctccttggcattgaggagcatccgtcttcgacgtggaccccgctatcgtcaatcgcatcgatcactccgaggcctggtctcgtgacgccactgcttcgagtgttgaccccgttgttgaaagcgtacgttaccaaacaagtcgttccccttctatatgcatgcatggaatcactcggaggcgtcggatatctcgagaattccgagtcggaacatatgaatatcgcccgcttatttcgagacgcgtgtgtgctgaatatctgggagggtacgacagatgttctaggtaccgatttgatccgcgccttaaagcatcccaaagggggtgccgactccatccacgccttggatacggtgatcagtcaaggctgcaaagataccagcaatgaaacgatcgcgattcaatggttgagcttgaaagccaagttggaaaccaatacccagaaagatctgctgtattatgctcgggatgtaatgtggaagttggctgagatattgatggcaatgcttcttgcactcgatgccaaaagcgatgattgtgatgtcgcaaaggagatgcaaagacgttattacgaaaagaaaggcttccaagcagggcaaaacctggccggcagtctagaaacacatcgtaccagtttagagatgaaccaatcgatcgtcttcggctgtaaggaggcgagacttccgacatcgaaactttga

SEQ ID NO: 13294 - protein, 632 aa, Muscodor strobelii
  misc_feature: SGI Peptide ID NO. 564349
  misc_feature (320)..(503): Pfam Id: PF00441 Pfam Desc: Acyl-CoA dehydrogenase, C-terminal domain
  misc_feature (1)..(622): NCBI GI: 171694311 Blast Desc: protein product [Podospora anserina] gi|170947104|emb|CAP73909.1| protein product [Podospora anserina]
  misc_feature (1)..(593): NCBI GI: 46137383 Blast Desc: FG10207.1 [Gibberella zeae PH-1]
  misc_feature (1)..(593): NCBI GI: 256731744 Blast Desc: NECHADRAFT_61163 [Nectria haematococca mpVI 77-13-4]
  misc_feature (1)..(621): NCBI GI: 164426463 Blast Desc: NCU04231 [Neurospora crassa OR74A] gi|157071346|gb|EAA31986.2| [Neurospora crassa OR74A]
  misc_feature (1)..(621): NCBI GI: 16944400 Blast Desc: conserved [Neurospora crassa]
  misc_feature (1)..(589): NCBI GI: 226279170 Blast Desc: acyl-CoA dehydrogenase [Paracoccidioides brasiliensis Pb01]
  misc_feature (1)..(621): NCBI GI: 225677980 Blast Desc: PABG_06351 [Paracoccidioides brasiliensis Pb03]
  misc_feature (1)..(621): NCBI GI: 226287271 Blast Desc: acyl-CoA dehydrogenase [Paracoccidioides brasiliensis Pb18]
  misc_feature (1)..(593): NCBI GI: 225562669 Blast Desc: acyl-CoA dehydrogenase [Ajellomyces capsulatus G186AR]
  misc_feature (1)..(593): NCBI GI: 154279652 Blast Desc: [Ajellomyces capsulatus NAm1] gi|150412582|gb|EDN07969.1| [Ajellomyces capsulatus NAm1]
  misc_feature: Useful for introducing or modulating the production of volatile compounds
  misc_feature: Useful for fungicidal and/or biocontrol applications
MKPASADDGFFQRVPVLKNQFLHDPSITRVFKLFVPQNVAEFVAREITRLGDEVLAPQIFDWVTDAEKNQPYVVGGGKDAFGQPVSSKLVVTEGWKKLQEFNIGKGFASQGYEDGLEQYTRVVMYLRVLLFESSSANVGCPAAMTDGAARVLQTQIRSNTLSSEQKAAFQNAYDHVISRDPKDAWTSGQWMTERPGGSDVSLSETVATYSPLPANATDCDPSAGIPLGPWSVDGFKWFSSATDCNMTILLAQTPKGLSCFYAPMRRYNSKLIVSATGETGGTELNGVSISRLKNKMGTKSLPTAELELRGMRAWMIGKEGEGIKQIATILTITRIRSAISALGYLNRGLAIARAFTEVREVGAGRGKRMKLTDSELHMRTLADMTVEYHAMMLLGFYCSYLLGIEEHPSSTWTPLSSIASITPRPGLVTPLLRVLTPLLKAYVTKQVVPLLYACMESLGGVGYLENSESEHMNIARLFRDACVLNIWEGTTDVLGTDLIRALKHPKGGADSIHALDTVISQGCKDTSNETIAIQWLSLKAKLETNTQKDLLYYARDVMWKLAEILMAMLLALDAKSDDCDVAKEMQRRYYEKKGFQAGQNLAGSLETHRTSLEMNQSIVFGCKEARLPTSKL

SEQ ID NO: 13295 - DNA, 2781 bp, Muscodor strobelii
  misc_feature: SGI EST ID NO. CUFF.31985.0
  misc_feature: Variant of the nucleotide sequence at SEQ ID NO 13293
cgtgaagctgacatcttcacttaagcatggaaataatggagatgactgagaaatctttcattatctacgttgtagcgtacacagaaagttgcaattttatcgatcttcaaagcagttccttgcgggatccgatgcgacggtacaaatggaaatgaagcccgccagcgctgatgatgggttcttccaacgggtcccggtactgaagaaccaattcctccacgatccaagtattacgagagtcttcaaattatttgtgccccaaaatgttgctgaattcgtcgcgcgggagatcactcgacttggtgacgaagttctagcacctcaaatattcgactgggtaacggatgccgagaagaatcagccgtatgtagtaggtggcggcaaagatgcattcggtcaacctgtgagttcgaaacttgtcgttaccgaaggatggaaaaaattgcaagaattcaatatcgggaaaggtttcgcatcacaagggtatgaagatggactcgaacaatacactcgggtggttatgtatctgcgagtacttctattcgagtcctcgtcagcaaatgttggctgtccagccgcaatgacagatggtgcagcacgcgtcttgcaaacccaaatccgtagtaacaccctatcctcggaacaaaaagcggcgttccaaaatgcttacgatcacgttatctcgcgggacccaaaagatgcctggacaagtggacaatggatgacagagcgacctggagggagcgacgtatcgttatctgaaactgttgctacatattcaccattacccgcaaatgcaactgactgcgatcctagcgctggtattcctcttggcccttggagcgtcgatggattcaagtggttctcaagcgcaacagattgcaacatgacgatactactggcccaaacaccaaaaggtctctcatgtttctatgccccaatgcggcgctacaattccaaactcatcgtctccgccacaggggaaacaggcggcacagagctaaacggcgtctcgatatcaaggctaaagaacaaaatggggaccaaatcgttaccaaccgccgaactcgagcttcgcggcatgcgagcatggatgattggcaaagaaggcgagggaattaagcagatcgcgaccattctaacaattacccgaattcgttccgcaatcagtgcgctcggatacctgaaccgcggtctcgcaatcgcaagagcattcacagaggtacgagaagtcggtgcaggccgtgggaagcggatgaaactcacggatagcgagctacatatgcggactcttgctgatatgactgtggagtaccacgcgatgatgctgcttggcttctattgtagctacctccttggcattgaggagcatccgtcttcgacgtggaccccgctatcgtcaatcgcatcgatcactccgaggcctggtctcgtgacgccactgcttcgagtgttgaccccgttgttgaaagcgtacgttaccaaacaagtcgttccccttctatatgcatgcatggaatcactcggaggcgtcggatatctcgagaattccgagtcggaacatatgaatatcgcccgcttatttcgagacgcgtgtgtgctgaatatctgggagggtacgacagatgttctaggtaccgatttgatccgcgccttaaagcatcccaaagggggtgccgactccatccacgccttggatacggtgatcagtcaaggctgcaaagataccagcaatgaaacgatcgcgattcaatggttgagcttgaaagccaagttggaaaccaatacccagaaagatctgctgtattatgctcgggatgtaatgtggaagttggctgagatattgatggcaatgcttcttgcactcgatgccaaaagcgatgattgtgatgtcgcaaaggagatgcaaagacgttattacgaaaagaaaggcttccaagcagggcaaaacctggccggcagtctagaaacacatcgtaccagtttagagatgaaccaatcgatcgtcttcggctgtaaggaggcgagacttccgacatcgaaactttgaagagtaataaacggcatcgcaaggacactattgttgccgaaaagtgtacattcgcgagggggtctggtaaatagaaagtatcgtaacaattatacgtgtggagtgttgcctgtgaatacttgtggtcttagaaactgctgatagtatatatacttgtttagaattacgactactagtgatcatctatgataccctgctaagcaatctaccgtcactctagagctcattcggctcattcaggttatctacaagctgtcgttagtcattcatcacagattatactggcctttcctagttaatacccttgcttttcgcttgtttaaactcggcgagccattgcttgacaaaggcagcctcttggtcctgtgcatctgcaaccgcggcaggtggaagttccggtgtcgtctcattggggaaaaggccattttcatcccaatggtggacagctttgtcaatcaaaatgtacggttccgaggttgttgaatagcgttctggaatgccaatagcatgaacgcctgctgctctccaaggatcccattcaccatcgacccaggctaggcgggggtaactaagattgaaaccgccgtacttgttgatggcattgacatccgcttctttcgtaaggttgaacgcatcacggcatatgaccgttgaataatccaaatcaattgtacgtgaaatcagaggaagagcatcctcaggcactccactaccagtttgcaagaatcccc

SEQ ID NO: 13296 - DNA, 1653 bp, Muscodor strobelii
  misc_feature: SGI cDNA ID NO. 564350
  misc_feature: Encodes the peptide sequence at SEQ ID NO 13297
atggttggattcaatcggtttgcgaatgtattggctttcgcctccacagcccatgctctacagagatcatccctccccataagtgagcttaagaaacagattcgaggcagcgcggcgaaagtcaattctagagatgttcttgctgcgacgtatcccgaatacaacctcacaacgcccatagaccatttccacaacgattccctttacgagccacacagcgatggcactttcaacttgcgatactggttcgacgcgcaatactataaacctggcggtcctgtgatcgtgctatctggtggagagactgatggtgctgacaggttgccgttcttgcaaaagggtattgtatatcaacttgcaaaggcaacaaatggtgtgggcgtaatcttggaacaccgatattacggctcgagtatccctactgaagatctaagcacggaaagcctacggttcttgaccactgatcaagcactcgcggacactgcatactttgccaagaacgtgaagttcgcaggcttggaagatgtagacttcagccctgagacgacaccttggattgcctatggtggttcctacgccggctcgtttgttgctatccttcggaagctatacccagatgcttactggggcgctatatcatcttctggtgtacccgaggcgatctgggactactggaaatactttgaagctgccactgtctatggtcctcctgcctgtgtcgaggcgacccagaaaataaccgacatcattgacagcgtattgattcacaataaagctagcaagacggtactgaagacgatattcggtcttcctaatgttacacacgatgctgattttgcgagcgctatcaatgggggtatctacggactgcagagttacaactgggacccaagtcaaagttcggatcagttcttcgaatattgcgacattgtgtcctcgacgactctcaaatacaacacgaccgaaaagtacaggagttctgtcaatcaactcatcaaagctgctgggtacggggacgaaattcccgaactatccaaccagatgctcaactacattggcttttacgctcctgttgctaaaagctgtcgttccgcggatcaggatgaatgcttcagcacctacgacactgaattttatgcccaagacgatattgatcagtcatggcgcctctggccttaccaatattgcacacaatggggattcttgcaaactggtagtggagtgcctgaggatgctcttcctctgatttcacgtacaattgatttggattattcaacggtcatatgccgtgatgcgttcaaccttacgaaagaagcggatgtcaatgccatcaacaagtacggcggtttcaatcttagttacccccgcctagcctgggtcgatggtgaatgggatccttggagagcagcaggcgttcatgctattggcattccagaacgctattcaacaacctcggaaccgtacattttgattgacaaagctgtccaccattgggatgaaaatggccttttccccaatgagacgacaccggaacttccacctgccgcggttgcagatgcacaggaccaagaggctgcctttgtcaagcaatggctcgccgagtttaaacaagcgaaaagcaaggataacctgaatgagccgaatgagctctag

SEQ ID NO: 13297 - protein, 550 aa, Muscodor strobelii
  misc_feature: SGI Peptide ID NO. 564350
  misc_feature (58)..(518): Pfam Id: PF05577 Pfam Desc: Serine carboxypeptidase S28
  misc_feature (58)..(229): Pfam Id: PF05577 Pfam Desc: Serine carboxypeptidase S28
  misc_feature (1)..(537): NCBI GI: 145602874 Blast Desc: MGG_13765 [Magnaporthe grisea 70-15] gi|145011236|gb|EDJ95892.1| MGG_13765 [Magnaporthe grisea 70-15]
  misc_feature (51)..(538): NCBI GI: 85112594 Blast Desc: NCU00831 [Neurospora crassa OR74A] gi|28926153|gb|EAA35138.1| conserved [Neurospora crassa OR74A]
  misc_feature (31)..(540): NCBI GI: 171684281 Blast Desc: protein product [Podospora anserina] gi|170942101|emb|CAP67753.1| protein product [Podospora anserina]
  misc_feature (28)..(541): NCBI GI: 116192591 Blast Desc: CHGG_06013 [Chaetomium globosum CBS 148.51] gi|88181926|gb|EAQ89394.1| CHGG_06013 [Chaetomium globosum CBS 148.51]
  misc_feature (4)..(542): NCBI GI: 240111066 Blast Desc: Serine carboxypeptidase S28 family protein [Coccidioides posadasii C735 delta SOWgp]
  misc_feature (26)..(540): NCBI GI: 238839726 Blast Desc: conserved [Microsporum canis CBS 113480]
  misc_feature (48)..(536): NCBI GI: 261357867 Blast Desc: thymus-specific serine protease [Verticillium albo-atrum VaMs.102]
  misc_feature (45)..(537): NCBI GI: 119189871 Blast Desc: CIMG_04983 [Coccidioides immitis RS]
  misc_feature (51)..(537): NCBI GI: 154302877 Blast Desc: BC1G_09182 [Botryotinia fuckeliana B05.10] gi|150855106|gb|EDN30298.1| BC1G_09182 [Botryotinia fuckeliana B05.10]
  misc_feature (10)..(540): NCBI GI: 239615378 Blast Desc: extracelular serine carboxypeptidase [Ajellomyces dermatitidis ER-3]
  misc_feature (40)..(499): SWISSPROT Homolog: EC 3.4.14.2 Dipeptidyl-peptidase II
MVGFNRFANVLAFASTAHALQRSSLPISELKKQIRGSAAKVNSRDVLAATYPEYNLTTPIDHFHNDSLYEPHSDGTFNLRYWFDAQYYKPGGPVIVLSGGETDGADRLPFLQKGIVYQLAKATNGVGVILEHRYYGSSIPTEDLSTESLRFLTTDQALADTAYFAKNVKFAGLEDVDFSPETTPWIAYGGSYAGSFVAILRKLYPDAYWGAISSSGVPEAIWDYWKYFEAATVYGPPACVEATQKITDIIDSVLIHNKASKTVLKTIFGLPNVTHDADFASAINGGIYGLQSYNWDPSQSSDQFFEYCDIVSSTTLKYNTTEKYRSSVNQLIKAAGYGDEIPELSNQMLNYIGFYAPVAKSCRSADQDECFSTYDTEFYAQDDIDQSWRLWPYQYCTQWGFLQTGSGVPEDALPLISRTIDLDYSTVICRDAFNLTKEADVNAINKYGGFNLSYPRLAWVDGEWDPWRAAGVHAIGIPERYSTTSEPYILIDKAVHHWDENGLFPNETTPELPPAAVADAQDQEAAFVKQWLAEFKQAKSKDNLNEPNEL

SEQ ID NO: 13298 - DNA, 6657 bp, Muscodor strobelii
  misc_feature: SGI EST ID NO. CUFF.31986.2
  misc_feature: Variant of the nucleotide sequence at SEQ ID NO 13296
ctgctcttgacctcaaataacacgttttccgtgccaggctcttcagcgtaataggtggtatgaagtgcaatcaattttttccgaatagtgaacagttcgttcccttgcatgtcgcagaaacgctgccgattcgaaagagagaatgtctcgcctttgacctggaaaatgggctgaccagtggctgacttgatgtcaaaactgtccccagacaaggacatcactttctcttgcagtgccaaaacttcaggctgtcgcgcaaggtgaatgtcgaagaggccaagtggtgccgggtagggggctatttgcgacatcgtaattgatttgatatttgagtctaataagaatttgcgagaatgggggagttctgaacgacggtcgtgctgtaaatctcctcgataagaagcgtccttcgtaggctctatgatattgctcggaaggttgatgatgatgggttggtgaacagtcgcggtgcaagattagaggcaatgactgaggcgctgtctggcgcctttccttatataatctaaagctttttactagcaagtcctggctgaggccactttgataacctacccagagctgatctggaccttttctgtgcgacaggacgccgtgatggcactatgacatcaaagcatggcagtgctggggacttatgtgtttagcgttgcaattgctaaaaatactgccggttcgggttctgatccgaactgcacttagcccaatgaaatggttccccaaggccctgtcaacaacactatgggcgcttgccagagcaagtggttcattcggttgtgctggacaaaacctcaggctatcgtcttcatcctcaatactcgaagtaaaattggatgacaccagcaccgcggcagtcgcaatctcgtatattccttccaatgctaggcgccgcaaccgtgtcaccttggccctgtatgatttcattggcgacacatatacaggccctccgctgtcacctctaagcctggtggtagcgatgctgaaacaataaattcgagtgaccctcctgtcttatttggtaaatgcatctcgtcaggcttctcaccttggctgatgcgtgcaagcatgcaggcaggcggccgtgtttccgaccctcactgagttgcgctatgtcgctttaggaacatgagcaggagctcagatagccgctccggttggtccacaggcgagaagtgtccgcagtcctcgacaatgtccaattcagagcctgggatggcttcattcagacgatgagcccaatcaatgacttgccaggcgtcatcggcaccccatatgattttgaccggcaaattctcaagctcgtgcaatcgatctgctatttctagcgtatgtttggggtcgtagtgccgaacttgatgctcgaacagactcggttggccaatcgggcctgtgatatagtctagatattggtcaacagggagtctgtccttgttctgaacagtcgacagcaaccactctttgaaatgcgctcgatgttctgcgtcctttgtcttgatcatagactcgagcccgttttgcatctgctgcttggtgcgcttcgaaggatagctgtcaaagctcacgacatcgataagtgtgagtgaacgaaatcgctcgggagagaacacggcgaagcgctgcgcgatcccgcccccgatgtcatgggcgacgatatgtgctttttctaagccccaatgggccatgagcccttcaactacggatacctggcctgatatcgaagtatcgacggcggaagaccaaggcctctctgagagtccgtatccaaggaggtcgaaaacatgtgttttataacctgcattgaccagctgaggtacaatattacgccatatcagagatgaggacggcgttccgtggatcaaaactaccggctcatcgctgctttttccgaacacgccgtatgcaacccggctcccgttgacaagagtattctctgttgcgagtggctgcattgtagctgcagaggttactgacttgatctacggacctacattttttccacctcattcttgaagctgattcctacgatgcctttatatttgatgtgaacattttcgttcgcttttggctgttgagagaagggcgcgccttaaacccgtcaagtcgccactcaagctgcctaaatgactacacgaaatctctttcccgctgtgcaccttggaaatcggagtctgtctgagatgtgaaatcaatctcatcaattcatactagttccacgaatcatttcacccgtttatgtgaaagggcgatcgaatgcgccatgcggaattattgctgtgacgctttcgtccattgctacaacggcgaagtaggaattcaagggtccaattgatcaggatgcgccgggcgtttctagaccatcagcctagtaaactcaattaaacgctactctgatgacctcgccaagtagttgatctccgataacaagatctgtcagccacacacgcatcgagccaaacaatgcttcgtctgtccagctttcacacttattaagcacgcaagcgagaaagatatcgtgaaatcgatgccgtgataccattcgccacccgcggggatccctgttgccgagagataccgtacccggcaacctgccttgaatagctgaagcttcgagctccaaagggccggggcttttcagaccttccgtcttcaacctagctctccgagctcccaggaaggttgaagtcggagcaacaccatcatcagcttatttccactgtcgaaccgcatacaattcggagagtacatgcggtagcttgcacctgcttgtagacattcgccaagaagattgctcatcggatcgccactgctaggtttgttgctcccctcccccgtctccatttttggtataaggtactcatcgccaacccgctcgtgtggtgtggtctggaaatttttctttctatccttgctcgttgcgattgagcgacagatagctttgttactgatgtatagttaccttcgtccgaactcgatctcggtttcattcgattagaaaccggccgtagtattcacggcgttcgtccaacgtcaacctaggactggaaggtagacgacaatattagtcggggccattggatcacgcaaacgccgcagtaccgctttaccacatcctcatcctagcaaaatggttggattcaatcggtttgcgaatgtattggctttcgcctccacagcccatgctctacagagatcatccctccccataagtgagcttaagaaacagattcgaggcagcgcggcgaaagtcaattctagagatgttcttgctgcgacgtatcccgaatacaacctcacaacgcccatagaccatttccacaacgattccctttacgagccacacagcgatggcactttcaacttgcgatactggttcgacgcgcaatactataaacctggcggtcctgtgatcgtgctatctggtggagagactgatggtgctgacaggttgccgttcttgcaaaagggtattgtatatcaacttgcaaaggcaacaaatggtgtgggcgtaatcttggaacaccgatattacggctcgagtatccctactgaagatctaagcacggaaagcctacggttcttgaccactgatcaagcactcgcggacactgcatactttgccaagaacgtgaagttcgcaggcttggaagatgtagacttcagccctgagacgacaccttggattgcctatggtggttcctacgccggctcgtttgttgctatccttcggaagctatacccagatgcttactggggcgctatatcatcttctggtgtacccgaggcgatctgggactactggaaatactttgaagctgccactgtctatggtcctcctgcctgtgtcgaggcgacccagaaaataaccgacatcattgacagcgtattgattcacaataaagctagcaagacggtactgaagacgatattcggtcttcctaatgttacacacgatgctgattttgcgagcgctatcaatgggggtatctacggactgcagagttacaactgggacccaagtcaaagttcggatcagttcttcgaatattgcgacattgtgtcctcgacgactctcaaatacaacacgaccgaaaagtacaggagttctgtcaatcaactcatcaaagctgctgggtacggggacgaaattcccgaactatccaaccagatgctcaactacattggcttttacgctcctgttgctaaaagctgtcgttccgcggatcaggatgaatgcttcagcacctacgacactgaattttatgcccaagacgatattgatcagtcatggcgcctctggccttaccaatattgcacacaatggggattcttgcaaactggtagtggagtgcctgaggatgctcttcctctgatttcacgtacaattgatttggattattcaacggtcatatgccgtgatgcgttcaaccttacgaaagaagcggatgtcaatgccatcaacaagtacggcggtttcaatcttagttacccccgcctagcctgggtcgatggtgaatgggatccttggagagcagcaggcgttcatgctattggcattccagaacgctattcaacaacctcggaaccgtacattttgattgacaaagctgtccaccattgggatgaaaatggccttttccccaatgagacgacaccggaacttccacctgccgcggttgcagatgcacaggaccaagaggctgcctttgtcaagcaatggctcgccgagtttaaacaagcgaaaagcaagggtattaactaggaaaggccagtataatctgtgatgaatgactaacgacagcttgtagataacctgaatgagccgaatgagctctagagtgacggtagattgcttagcagggtatcatagatgatcactagtagtcgtaattctaaacaagtatatatactatcagcagtttctaagaccacaagtattcacaggcaacactccacacgtataattgttacgatactttctatttaccagaccccctcgcgaatgtacacttttcggcaacaatagtgtccttgcgatgccgtttattactcttcaaagtttcgatgtcggaagtctcgcctccttacagccgaagacgatcgattggttcatctctaaactggtacgatgtgtttctagactgccggccaggttttgccctgcttggaagcctttcttttcgtaataacgtctttgcatctcctttgcgacatcacaatcatcgcttttggcatcgagtgcaagaagcattgccatcaatatctcagccaacttccacattacatcccgagcataatacagcagatctttctgggtattggtttccaacttggctttcaagctcaaccattgaatcgcgatcgtttcattgctggtatctttgcagccttgactgatcaccgtatccaaggcgtggatggagtcggcaccccctttgggatgctttaaggcgcggatcaaatcggtacctagaacatctgtcgtaccctcccagatattcagcacacacgcgtctcgaaataagcgggcgatattcatatgttccgactcggaattctcgagatatccgacgcctccgagtgattccatgcatgcatatagaaggggaacgacttgtttggtaacgtacgctttcaacaacggggtcaacactcgaagcagtggcgtcacgagaccaggcctcggagtgatcgatgcgattgacgatagcggggtccacgtcgaagacggatgctcctcaatgccaaggaggtagctacaatagaagccaagcagcatcatcgcgtggtactccacagtcatatcagcaagagtccgcatatgtagctcgctatccgtgagtttcatccgcttcccacggcctgcaccgacttctcgtacctctgtgaatgctcttgcgattgcgagaccgcggttcaggtatccgagcgcactgattgcggaacgaattcgggtaattgttagaatggtcgcgatctgcttaattccctcgccttctttgccaatcatccatgctcgcatgccgcgaagctcgagttcggcggttggtaacgatttggtccccattttgttctttagccttgatatcgagacgccgtttagctctgtgccgcctgtttcccctgtggcggagacgatgagtttggaattgtagcgccgcattggggcatagaaacatgagagaccttttggtgtttgggccagtagtatcgtcatgttgcaatctgttgcgcttgagaaccacttgaatccatcgacgctccaagggccaagaggaataccagcgctaggatcgcagtcagttgcatttgcgggtaatggtgaatatgtagcaacagtttcagataacgatacgtcgctccctccaggtcgctctgtcatccattgtccacttgtccaggcatcttttgggtcccgcgagataacgtgatcgtaagcattttggaacgccgctttttgttccgaggatagggtgttactacggatttgggtttgcaagacgcgtgctgcaccatctgtcattgcggctggacagccaacatttgctgacgaggactcgaatagaagtactcgcagatacataaccacccgagtgtattgttcgagtccatcttcatacccttgtgatgcgaaactgcaag

SEQ ID NO: 13299 - DNA, 855 bp, Muscodor strobelii
  misc_feature: SGI cDNA ID NO. 564351
  misc_feature: Encodes the peptide sequence at SEQ ID NO 13300
atgcagccactcgcaacagagaatactcttgtcaacgggagccgggttgcatacggcgtgttcggaaaaagcagcgatgagccggtagttttgatccacggaacgccgtcctcatctctgatatggcgtaatattgtacctcagctggtcaatgcaggttataaaacacatgttttcgacctccttggatacggactctcagagaggccttggtcttccgccgtcgatacttcgatatcaggccaggtatccgtagttgaagggctcatggcccattggggcttagaaaaagcacatatcgtcgcccatgacatcgggggcgggatcgcgcagcgcttcgccgtgttctctcccgagcgatttcgttcactcacacttatcgatgtcgtgagctttgacagctatccttcgaagcgcaccaagcagcagatgcaaaacgggctcgagtctatgatcaagacaaaggacgcagaacatcgagcgcatttcaaagagtggttgctgtcgactgttcagaacaaggacagactccctgttgaccaatatctagactatatcacaggcccgattggccaaccgagtctgttcgagcatcaagttcggcactacgaccccaaacatacgctagaaatagcagatcgattgcacgagcttgagaatttgccggtcaaaatcatatggggtgccgatgacgcctggcaagtcattgattgggctcatcgtctgaatgaagccatcccaggctctgaattggacattgtcgaggactgcggacacttctcgcctgtggaccaaccggagcggctatctgagctcctgctcatgttcctaaagcgacatagcgcaactcagtga

SEQ ID NO: 13300 - protein, 284 aa, Muscodor strobelii
  misc_feature: SGI Peptide ID NO. 564351
  misc_feature (54)..(275): Pfam Id: PF00561 Pfam Desc: alpha/beta hydrolase fold
  misc_feature (1)..(280): NCBI GI: 256726047 Blast Desc: NECHADRAFT_43420 [Nectria haematococca mpVI 77-13-4]
  misc_feature (15)..(281): NCBI GI: 119474191 Blast Desc: alpha/beta hydrolase [Neosartorya fischeri NRRL 181] gi|119407124|gb|EAW17074.1| alpha/beta hydrolase [Neosartorya fischeri NRRL 181]
  misc_feature (1)..(165): NCBI GI: 46111153 Blast Desc: FG02458.1 [Gibberella zeae PH-1]
  misc_feature (6)..(277): NCBI GI: 157369233 Blast Desc: alpha/beta hydrolase fold [Serratia proteamaculans 568] gi|157320997|gb|ABV40094.1| alpha/beta hydrolase fold [Serratia proteamaculans 568]
  misc_feature (4)..(277): NCBI GI: 270263478 Blast Desc: SOD_e01020 [Serratia odorifera 4Rx13] gi|270042362|gb|EFA15457.1| SOD_e01020 [Serratia odorifera 4Rx13]
  misc_feature (8)..(277): NCBI GI: 256780892 Blast Desc: alpha/beta hydrolase [Streptomyces hygroscopicus ATCC 53653]
  misc_feature (7)..(281): NCBI GI: 134098479 Blast Desc: alpha/beta hydrolase [Saccharopolyspora erythraea NRRL 2338] gi|133911102|emb|CAM01215.1| alpha/beta hydrolase [Saccharopolyspora erythraea NRRL 2338]
  misc_feature (16)..(279): NCBI GI: 134101646 Blast Desc: oxidoreductase [Saccharopolyspora erythraea NRRL 2338] gi|133914269|emb|CAM04382.1| oxidoreductase [Saccharopolyspora erythraea NRRL 2338]
  misc_feature (12)..(278): NCBI GI: 282861244 Blast Desc: alpha/beta hydrolase fold protein [Streptomyces sp. ACTE] gi|282563902|gb|EFB69439.1| alpha/beta hydrolase fold protein [Streptomyces sp. ACTE]
  misc_feature (5)..(279): NCBI GI: 109896405 Blast Desc: alpha/beta hydrolase fold [Pseudoalteromonas atlantica T6c] gi|109698686|gb|ABG38606.1| alpha/beta hydrolase fold [Pseudoalteromonas atlantica T6c]
  misc_feature (11)..(280): SWISSPROT Homolog: EC 3.8.1.3 Haloacetate dehalogenase
MQPLATENTLVNGSRVAYGVFGKSSDEPVVLIHGTPSSSLIWRNIVPQLVNAGYKTHVFDLLGYGLSERPWSSAVDTSISGQVSVVEGLMAHWGLEKAHIVAHDIGGGIAQRFAVFSPERFRSLTLIDVVSFDSYPSKRTKQQMQNGLESMIKTKDAEHRAHFKEWLLSTVQNKDRLPVDQYLDYITGPIGQPSLFEHQVRHYDPKHTLEIADRLHELENLPVKIIWGADDAWQVIDWAHRLNEAIPGSELDIVEDCGHFSPVDQPERLSELLLMFLKRHSATQ

SEQ ID NO: 13301 - DNA, 3972 bp, Muscodor strobelii
  misc_feature: SGI EST ID NO. CUFF.31985.3
  misc_feature: Variant of the nucleotide sequence at SEQ ID NO 13299
tcttaagctcacttatggggagggatgatctctgtagagcatgggctgtggaggcgaaagccaatacattcgcaaaccgattgaatccaaccattttgctaggatgaggatgtggtaaagcggtactgcggcgtttgcgtgatccaatggccccgactaatattgtcgtctaccttccagtcctaggttgacgttggacgaacgccgtgaatactacggccggtttctaatcgaatgaaaccgagatcgagttcggacgaaggtaactatacatcagtaacaaagctatctgtcgctcaatcgcaacgagcaaggatagaaagaaaaatttccagaccacaccacacgagcgggttggcgatgagtaccttataccaaaaatggagacgggggaggggagcaacaaacctagcagtggcgatccgatgagcaatcttcttggcgaatgtctacaagcaggtgcaagctaccgcatgtactctccgaattgtatgcggttcgacagtggaaataagctgatgatggtgttgctccgacttcaaccttcctgggagctcggagagctaggttgaagacggaaggtctgaaaagccccggccctttggagctcgaagcttcagctattcaaggcaggttgccgggtacggtatctctcggcaacagggatccccgcgggtggcgaatggtatcacggcatcgatttcacgatatctttctcgcttgcgtgcttaataagtgtgaaagctggacagacgaagcattgtttggctcgatgcgtgtgtggctgacagatcttgttatcggagatcaactacttggcgaggtcatcagagtagcgtttaattgagtttactaggctgatggtctagaaacgcccggcgcatcctgatcaattggacccttgaattcctacttcgccgttgtagcaatggacgaaagcgtcacagcaataattccgcatggcgcattcgatcgccctttcacataaacgggtgaaatgattcgtggaactagtatgaattgatgagattgatttcacatctcagacagactccgatttccaaggtgcacagcgggaaagagatttcgtgtagtcatttaggcagcttgagtggcgacttgacgggtttaaggcgcgcccttctctcaacagccaaaagcgaacgaaaatgttcacatcaaatataaaggcatcgtaggaatcagcttcaagaatgaggtggaaaaaatgtaggtccgtagatcaagtcagtaacctctgcagctacaatgcagccactcgcaacagagaatactcttgtcaacgggagccgggttgcatacggcgtgttcggaaaaagcagcgatgagccggtagttttgatccacggaacgccgtcctcatctctgatatggcgtaatattgtacctcagctggtcaatgcaggttataaaacacatgttttcgacctccttggatacggactctcagagaggccttggtcttccgccgtcgatacttcgatatcaggccaggtatccgtagttgaagggctcatggcccattggggcttagaaaaagcacatatcgtcgcccatgacatcgggggcgggatcgcgcagcgcttcgccgtgttctctcccgagcgatttcgttcactcacacttatcgatgtcgtgagctttgacagctatccttcgaagcgcaccaagcagcagatgcaaaacgggctcgagtctatgatcaagacaaaggacgcagaacatcgagcgcatttcaaagagtggttgctgtcgactgttcagaacaaggacagactccctgttgaccaatatctagactatatcacaggcccgattggccaaccgagtctgttcgagcatcaagttcggcactacgaccccaaacatacgctagaaatagcagatcgattgcacgagcttgagaatttgccggtcaaaatcatatggggtgccgatgacgcctggcaagtcattgattgggctcatcgtctgaatgaagccatcccaggctctgaattggacattgtcgaggactgcggacacttctcgcctgtggaccaaccggagcggctatctgagctcctgctcatgttcctaaagcgacatagcgcaactcagtgagggtcggaaacacggccgcctgcctgcatgcttgcacgcatcagccaaggtgagaagcctgacgagatgcatttaccaaataagacaggagggtcactcgaatttattgtttcagcatcgctaccaccaggcttagaggtgacagcggagggcctgtatatgtgtcgccaatgaaatcatacagggccaaggtgacacggttgcggcgcctagcattggaaggaatatacgagattgcgactgccgcggtgctggtgtcatccaattttacttcgagtattgaggatgaagacgatagcctgaggttttgtccagcacaaccgaatgaaccacttgctctggcaagcgcccatagtgttgttgacagggccttggggaaccatttcattgggctaagtgcagttcggatcagaacccgaaccggcagtatttttagcaattgcaacgctaaacacataagtccccagcactgccatgctttgatgtcatagtgccatcacggcgtcctgtcgcacagaaaaggtccagatcagctctgggtaggttatcaaagtggcctcagccaggacttgctagtaaaaagctttagattatataaggaaaggcgccagacagcgcctcagtcattgcctctaatcttgcaccgcgactgttcaccaacccatcatcatcaaccttccgagcaatatcatagagcctacgaaggacgcttcttatcgaggagatttacagcacgaccgtcgttcagaactcccccattctcgcaaattcttattagactcaaatatcaaatcaattacgatgtcgcaaatagccccctacccggcaccacttggcctcttcgacattcaccttgcgcgacagcctgaagttttggcactgcaagagaaagtgatgtccttgtctggggacagttttgacatcaagtcagccactggtcagcccattttccaggtcaaaggcgagacattctctctttcgaatcggcagcgtttctgcgacatgcaagggaacgaactgttcactattcggaaaaaattgattgcacttcataccacctattacgctgaagagcctggcacggaaaacgtgttatttgaggtcaagagcagatttaacattggcggcaccaagatgatctgcacgttcaccaaccgcttctcgggcaaggaagagagtctattggtgaaaggaaacttcttcgacacaagggtcaatatcaccgacgaagcgacaggccagcctgttgcaattattgatcgagagttactcaatgcccgcgaaatattcactggccaggatacctacgccgtgactatcgcacccaacgttgacaaggcagtcatcgccgccatgtgtatctgcctagataacaagaaagagcaaggaaagtgataagagctctgacttgaggacatgactatattagctataaactagccagctctgttttgatgaattgtaatgataccctccgggctaggactactgtagcgagggtgcacaataaaagaacgtgtagaggagcaatggctggaagcatcaataccacactacttctatgtgacacgaggtctcgatatgctatcccgattatggtgccttacgcaaccccgccacttttacatgcacatcggtcacagttgagggctctaaaacctcgatcaaggccaaccactccgactaatgccttggtagctcttcaattccaatcgtgatactgtggcataaatagtataacttaagaaaaccgagcagctaccatcaatctacgggttttagcacccttcggcgtaatcatttaccttcggtggtcaccttggagagttggagttcgatagatgcaac

SEQ ID NO: 13302 - DNA, 594 bp, Muscodor strobelii
  misc_feature: SGI cDNA ID NO. 564352
  misc_feature: Encodes the peptide sequence at SEQ ID NO 13303
atgtcgcaaatagccccctacccggcaccacttggcctcttcgacattcaccttgcgcgacagcctgaagttttggcactgcaagagaaagtgatgtccttgtctggggacagttttgacatcaagtcagccactggtcagcccattttccaggtcaaaggcgagacattctctctttcgaatcggcagcgtttctgcgacatgcaagggaacgaactgttcactattcggaaaaaattgattgcacttcataccacctattacgctgaagagcctggcacggaaaacgtgttatttgaggtcaagagcagatttaacattggcggcaccaagatgatctgcacgttcaccaaccgcttctcgggcaaggaagagagtctattggtgaaaggaaacttcttcgacacaagggtcaatatcaccgacgaagcgacaggccagcctgttgcaattattgatcgagagttactcaatgcccgcgaaatattcactggccaggatacctacgccgtgactatcgcacccaacgttgacaaggcagtcatcgccgccatgtgtatctgcctagataacaagaaagagcaaggaaagtga

SEQ ID NO: 13303 - protein, 197 aa, Muscodor strobelii
  misc_feature: SGI Peptide ID NO. 564352
  misc_feature (13)..(188): Pfam Id: PF04525 Pfam Desc: Domain of function (DUF567)
  misc_feature (3)..(195): NCBI GI: 119484952 Blast Desc: NFIA_098510 [Neosartorya fischeri NRRL 181] gi|119410274|gb|EAW20221.1| conserved [Neosartorya fischeri NRRL 181]
  misc_feature (3)..(195): NCBI GI: 159123622 Blast Desc: DUF567 domain protein [Aspergillus fumigatus A1163]
  misc_feature (3)..(195): NCBI GI: 70983692 Blast Desc: DUF567 domain protein [Aspergillus fumigatus Af293] gi|66844999|gb|EAL85335.1| DUF567 domain protein [Aspergillus fumigatus Af293]
  misc_feature (3)..(195): NCBI GI: 256732292 Blast Desc: NECHADRAFT_93841 [Nectria haematococca mpVI 77-13-4]
  misc_feature (1)..(197): NCBI GI: 169617015 Blast Desc: SNOG_11683 [Phaeosphaeria nodorum SN15] gi|111059607|gb|EAT80727.1| SNOG_11683 [Phaeosphaeria nodorum SN15]
  misc_feature (1)..(195): NCBI GI: 189188292 Blast Desc: PTRG_00152 [Pyrenophora tritici-repentis Pt-1C-BFP] gi|187972091|gb|EDU39590.1| PTRG_00152 [Pyrenophora tritici-repentis Pt-1C-BFP]
  misc_feature (3)..(197): NCBI GI: 171676569 Blast Desc: protein product [Podospora anserina] gi|170936351|emb|CAP61009.1| protein product [Podospora anserina]
  misc_feature (3)..(195): NCBI GI: 46135699 Blast Desc: FG09365.1 [Gibberella zeae PH-1]
  misc_feature (6)..(195): NCBI GI: 255930443 Blast Desc: Pc06g01760 [Penicillium chrysogenum Wisconsin 54-1255] gi|211581394|emb|CAP79169.1| Pc06g01760 [Penicillium chrysogenum Wisconsin 54-1255]
  misc_feature (1)..(192): NCBI GI: 145256306 Blast Desc: An19g00030 [Aspergillus niger CBS 513.88] gi|134084738|emb|CAK47326.1| protein product [Aspergillus niger]
MSQIAPYPAPLGLFDIHLARQPEVLALQEKVMSLSGDSFDIKSATGQPIFQVKGETFSLSNRQRFCDMQGNELFTIRKKLIALHTTYYAEEPGTENVLFEVKSRFNIGGTKMICTFTNRFSGKEESLLVKGNFFDTRVNITDEATGQPVAIIDRELLNAREIFTGQDTYAVTIAPNVDKAVIAAMCICLDNKKEQGK

SEQ ID NO: 13304 - DNA, 3972 bp, Muscodor strobelii; identical to SEQ ID NO: 13301
  misc_feature: SGI EST ID NO. CUFF.31985.3
  misc_feature: Variant of the nucleotide sequence at SEQ ID NO 13302

SEQ ID NO: 13305 - DNA, 4590 bp, Muscodor strobelii
  misc_feature: SGI cDNA ID NO. 564353
  misc_feature: Elevated expression when VOC is produced
  misc_feature: Encodes the peptide sequence at SEQ ID NO 13306
atgagggtacctgtcagacctgcaatgcccgatccgaaagactacatggttggatggatatgttccgtacgttgtgaatatgttgccgccctggcatttctcgacgagcgacatgggaagcctgcagctgttgcccagcatgacgataatgtctacgtgctgggccggatcgatgagcacaatattgtgataaccctgcttcctcgtggtcagtatggactcaccagtgccgcaactgcagcaagaaatatggtccacagtttccctaacatcagattcgggctaatggtgggaatcggagggggggcgccaagcacggcacacgacattcgtttaggtgatgtggtcgtgagttcagctgggccgaacagcggcggcgtgttgcaatatgatttcgggaaaactatacaaaacaatgctttcgtcaccactggttatctaaatcagcccccgacccttctccttacggctacagcacagcttgaaggcgactacgaattcgacgggcccacgctcgatttgtctatcacacacgctatcaagaaaaatcccaggctgcagtcgacataccaacgtccagatgcttgcacggacagactttacgagtcaaattttttgcatggggatagcgagaaaacatgcgccgttgtatgcgctcatgggccgatggtcgaacggccgccccgcgctattgatgagtctattgtgcattatgggctcatcgcgtctgcaaatcaagtgatgaaggatgccttgaagcgcgatgaacttgttgcagaaagagatgtcttatgcttcgagatggaagctgctggtctaatgaaccatttcccttgcctcgtaattcgaggtataagtgactactcggattctcataagaacaaagaatggcagggatatgcagcgatggcggcggcagcatatgcaaaggacctcttgcacaccattccagcgaccaaggtccaggtagagaagaaattgggtgaaacgttcgaaatcatccattcagtacagcaagatcttgagcatgtgaagcttgatgtgagaaaaatgcggattgacaaagactccgaaaacataacgaaatggcttttgccagccgattcatcaatcaatctcaacgctgcgttgaaatatcggctgcctaaatctggccagtggcttcttcaacattcttcttatcaggcatggaagtctcaaagaaattcattcatctggctttccgggatcatcggctcggggaaaaccatacttgcctcgaccgtcattgaagacttgaggaagtctgatggcaaaagcctgctttacttttattttgattctaatgataaaggaaagacacatttcgagaacgcaataagatcccttatctaccaattatacaatcagagagaaaacacgcgaatgcccctgtgttctctatatacttcgaaggaaggtcaacaaccgactctgaaggagctttgcaatatcctcaatgacatgattaatgaagctggggaactctggatcgtacttgatgccctagacgaatgcacggtccgcgttgaacatatggctgaaagtctacttacatggattcgaggactgcctacgggacccgcgaacactcatcttcttgtcacgagtcgcccagaacatgacatcaattgcaatatcagggactgggcaccttgtcacagtatcattttaatcgaaagcacacttattgaagaagacatagctgcctacattcgatcaagagtaaaagatgatccagggctgaaaagatggaattcccatcccagcatccaatccgaaatagagattgcattaattgagaaggcggacggcatgtttcgttgggtagtctgtcagttagacgtactcggagaatgcctcgattatccagatgtcaagagagctctagcttttttaccagagacgctcgatgatacctatgcacgtattctgcgggccctgcctaaaggttttcggcccaagactatccggttactacagttcttactgtattctgaacggccgctgcgccttagagaagtgcttgatatgttgtcagtccatgtgcaagaaataccacgctttgatcctaaaaatcgcatgccagttcctgaggaggttgcaaggtattgttcgagcttaatttcaatcagcgtacgggacgtcaacgacagagaagaagatgactatggcgttgtatgttgcgatggaagaacgtcaagaacagtgacggaaattcagttggcccatctctcagtcagagaatacttgatgtccactcgacttgacgaagattataagggaagtctcagtgcaaatattgctagggcatctaatgcaagcatctgtcttgcatatttgatacagattgaccaggatctagctgagctagacatgtctgaaacacaagatggcttttgggttgtatatcaacggtcaaagaatgccatatcggatgccctacagttgcaccaggaaattcttaagtttaggaacaaccagcttcccagaggacagtttccagactctataagattagcctaccctatggcacaatatgttgtagactactggccaaatcatagcaacgcggtcgatagagaagtggcggaggtgacatgcttagcgttggaactactctcacacaatgacaatgtaggcccttggctagtactgaccaaaagcgaatcatatagggttcgttacggtccaataggtgcagtgaaagcatcggctctctactacgcggcctccgaaggtctttcgcatgtcgtcaaagcactgttggatcgtggccttgatgtcaatgccccaggaggagcgtacgggactgccctcgaaattgcagtcatgaaagggcacgaaaaggtcgtgcggctgcttttaccttgtaatatccgcgacgagccagaaggaatagtcaccgcaacgctctgtacggctgcctatgaaggacacggaagcattgttcagatgttgttgggcatgggcgctcaagtaaacactcgcaactctcaaggcgcaacggcgctattcctagcgacacagtgccagcatataggcattgttcaaacattgctcgacaagggtgctgatgcgaacttggaggtagaacattttggaactgcccttcgtaccatttgtgaggcacgcggagacaatgaaaacattacgatgatcgctcgagcccttctcgacggaggcgccgatgtgagtctcgccaaagatttcaatggcagtgctctccaagccgctgccgaaaatggccaccaagctatggttaagatgttgctggcaagaggtgcagatgtccatttccaaggcggacgatcaggcaatgcactcatagctgctgcaggacagagcaatcgagatattgtgcagatgctgcttgataaaggggccgacataaacttccggaccgacgatggcacttgtgcactttgcatcgctgcaggttgtggccaccaggcaattgtcgaaatgcttcttagcagagacgcggacgtgaatttacaaagcgaacaaaatggcagtgctctctcggctgccgccagtcagcataaccacagcattgttgaactcctcttggaaaaaggtgctaatgtaaattgtcaaacacagggtggctatagtcctctttgtattgctgctggaaccggacacctagtggttgtccaaatgcttcttgagaaaggcgcgactgttaaccaccagacggaggatggttacactgccctttgcattgctgcgagtgaaggttaccagtcagttgttcaattacttgtcgacaacggtgcagacataagtttgcagacacgggacggttacagcgctctttctctagccgcaggcgagggccatctatccgttgtccaaacacttctagactacggcgcagaattaaacgccgaagggggaaaatatggcagtgctctcaacgctgctttggatggtggacacgaagcagttgcacgcgtcctcctagagagcggtgccgacccgaatcttcaaaattggcacgaaggcaattcactatgctgttttatgagagctctacgccgtgaccctaaccaattgattcagctgttactcgacaagggtgcaaatccaaaccaagtttatatgcatggaactgcacttcattacgccacaacgaaacagagtccagtgaataccatcaatgtacttgtacactctggcgctaatgtgcttgcacaaacggaggatggccggactccccttcacgttgctgtagcgcagccgcactcactagcagctgtgaaggcgcttattgagctaggcgccgatgtttatgctaaggatcacaatggcatgactccttatcatcatgctgcagagcaccatcaggaagcagttctcgatatcctcattcggagcggatctgccttgaatatcagagatagacaggggcgtacaccgcttctttgcgccgttgaacctcgtaaaccctggtcagatgatgaagtccttgagataaaagggagaaaattcgagtccgaatcccttggaagaacggttgcatctatcgaactccaactctccaaggtgaccaccgaaggtaaatga

SEQ ID NO: 13306 - protein, 1529 aa, Muscodor strobelii
  misc_feature: SGI Peptide ID NO. 564353
  misc_feature (1242)..(1274): Pfam Id: PF00023 Pfam Desc: Ankyrin repeat
  misc_feature (1275)..(1307): Pfam Id: PF00023 Pfam Desc: Ankyrin repeat
  misc_feature (1209)..(1241): Pfam Id: PF00023 Pfam Desc: Ankyrin repeat
  misc_feature (1410)..(1443): Pfam Id: PF00023 Pfam Desc: Ankyrin repeat
  misc_feature (1143)..(1175): Pfam Id: PF00023 Pfam Desc: Ankyrin repeat
  misc_feature (1444)..(1476): Pfam Id: PF00023 Pfam Desc: Ankyrin repeat
  misc_feature (1006)..(1038): Pfam Id: PF00023 Pfam Desc: Ankyrin repeat
  misc_feature (1176)..(1208): Pfam Id: PF00023 Pfam Desc: Ankyrin repeat
  misc_feature (1114)..(1142): Pfam Id: PF00023 Pfam Desc: Ankyrin repeat
  misc_feature (1080)..(1109): Pfam Id: PF00023 Pfam Desc: Ankyrin repeat
  misc_feature (12)..(1371): NCBI GI: 119473749 Blast Desc: Ankyrin repeat protein [Neosartorya fischeri NRRL 181] gi|119406903|gb|EAW16853.1| Ankyrin repeat protein [Neosartorya fischeri NRRL 181]
  misc_feature (15)..(1472): NCBI GI: 212532817 Blast Desc: multiple ankyrin repeats single kh domain protein, [Penicillium marneffei ATCC 18224] gi|210071929|gb|EEA26018.1| multiple ankyrin repeats single kh domain protein, [Penicillium
  misc_feature (6)..(1174): NCBI GI: 119467286 Blast Desc: Ankyrin repeat protein [Neosartorya fischeri NRRL 181] gi|119405601|gb|EAW15552.1| Ankyrin repeat protein [Neosartorya fischeri NRRL 181]
  misc_feature (8)..(1333): NCBI GI: 116203745 Blast Desc: CHGG_09756 [Chaetomium globosum CBS 148.51] gi|88175884|gb|EAQ83352.1| CHGG_09756 [Chaetomium globosum CBS 148.51]
  misc_feature (3)..(1108): NCBI GI: 159122813 Blast Desc: Pfs, NACHT and Ankyrin domain protein [Aspergillus fumigatus A1163]
  misc_feature (10)..(1472): NCBI GI: 242760147 Blast Desc: Pfs, NACHT and Ankyrin domain protein [Talaromyces stipitatus ATCC 10500] gi|218723125|gb|EED22542.1| Pfs, NACHT and Ankyrin domain protein [Talaromyces stipitatus ATCC 10500]
  misc_feature (8)..(1237): NCBI GI: 116199953 Blast Desc: CHGG_08132 [Chaetomium globosum CBS 148.51] gi|88179411|gb|EAQ86879.1| CHGG_08132 [Chaetomium globosum CBS 148.51]
  misc_feature (9)..(1163): NCBI GI: 169784486 Blast Desc: [Aspergillus oryzae RIB40] gi|83775451|dbj|BAE65571.1| protein product [Aspergillus oryzae]
  misc_feature (12)..(1397): NCBI GI: 242760891 Blast Desc: ankyrin repeat-containing protein, [Talaromyces stipitatus ATCC 10500] gi|218723276|gb|EED22693.1| ankyrin repeat-containing protein, [Talaromyces stipitatus ATCC 10500]
  misc_feature (9)..(1320): NCBI GI: 145601767 Blast Desc: MGG_08651 [Magnaporthe grisea 70-15] gi|145010276|gb|EDJ94932.1| MGG_08651 [Magnaporthe grisea 70-15]
  misc_feature: Useful for introducing or modulating the production of volatile compounds
MRVPVRPAMPDPKDYMVGWICSVRCEYVAALAFLDERHGKPAAVAQHDDNVYVLGRIDEHNIVITLLPRGQYGLTSAATAARNMVHSFPNIRFGLMVGIGGGAPSTAHDIRLGDVVVSSAGPNSGGVLQYDFGKTIQNNAFVTTGYLNQPPTLLLTATAQLEGDYEFDGPTLDLSITHAIKKNPRLQSTYQRPDACTDRLYESNFLHGDSEKTCAVVCAHGPMVERPPRAIDESIVHYGLIASANQVMKDALKRDELVAERDVLCFEMEAAGLMNHFPCLVIRGISDYSDSHKNKEWQGYAAMAAAAYAKDLLHTIPATKVQVEKKLGETFEIIHSVQQDLEHVKLDVRKMRIDKDSENITKWLLPADSSINLNAALKYRLPKSGQWLLQHSSYQAWKSQRNSFIWLSGIIGSGKTILASTVIEDLRKSDGKSLLYFYFDSNDKGKTHFENAIRSLIYQLYNQRENTRMPLCSLYTSKEGQQPTLKELCNILNDMINEAGELWIVLDALDECTVRVEHMAESLLTWIRGLPTGPANTHLLVTSRPEHDINCNIRDWAPCHSIILIESTLIEEDIAAYIRSRVKDDPGLKRWNSHPSIQSEIEIALIEKADGMFRWVVCQLDVLGECLDYPDVKRALAFLPETLDDTYARILRALPKGFRPKTIRLLQFLLYSERPLRLREVLDMLSVHVQEIPRFDPKNRMPVPEEVARYCSSLISISVRDVNDREEDDYGVVCCDGRTSRTVTEIQLAHLSVREYLMSTRLDEDYKGSLSANIARASNASICLAYLIQIDQDLAELDMSETQDGFWVVYQRSKNAISDALQLHQEILKFRNNQLPRGQFPDSIRLAYPMAQYVVDYWPNHSNAVDREVAEVTCLALELLSHNDNVGPWLVLTKSESYRVRYGPIGAVKASALYYAASEGLSHVVKALLDRGLDVNAPGGAYGTALEIAVMKGHEKVVRLLLPCNIRDEPEGIVTATLCTAAYEGHGSIVQMLLGMGAQVNTRNSQGATALFLATQCQHIGIVQTLLDKGADANLEVEHFGTALRTICEARGDNENITMIARALLDGGADVSLAKDFNGSALQAAAENGHQAMVKMLLARGADVHFQGGRSGNALIAAAGQSNRDIVQMLLDKGADINFRTDDGTCALCIAAGCGHQAIVEMLLSRDADVNLQSEQNGSALSAAASQHNHSIVELLLEKGANVNCQTQGGYSPLCIAAGTGHLVVVQMLLEKGATVNHQTEDGYTALCIAASEGYQSVVQLLVDNGADISLQTRDGYSALSLAAGEGHLSVVQTLLDYGAELNAEGGKYGSALNAALDGGHEAVARVLLESGADPNLQNWHEGNSLCCFMRALRRDPNQLIQLLLDKGANPNQVYMHGTALHYATTKQSPVNTINVLVHSGANVLAQTEDGRTPLHVAVAQPHSLAAVKALIELGADVYAKDHNGMTPYHHAAEHHQEAVLDILIRSGSALNIRDRQGRTPLLCAVEPRKPWSDDEVLEIKGRKFESESLGRTVASIELQLSKVTTEGK

SEQ ID NO: 13307 - DNA, 3034 bp, Muscodor strobelii
  misc_feature: SGI EST ID NO. CUFF.31898.0
  misc_feature: Variant of the nucleotide sequence at SEQ ID NO 13305
gtctaagatgagacgtcacttgtttcagtacttattgatgtcaattttgcaatctcctcaggcatatgaatggacaaatgtggatgcaggcgaaagacaatattgtgtgatgcagcgtcgtaatgatcttcttgcacgaactgcatatcaaggcgcgggcatattatttgcgaaatcccctatgaccttttactcgctgttttcagagtctttcgtcgtttatcatgagggtacctgtcagacctgcaatgcccgatccgaaagactacatggttggatggatatgttccgtacgttgtgaatatgttgccgccctggcatttctcgacgagcgacatgggaagcctgcagctgttgcccagcatgacgataatgtctacgtgctgggccggatcgatgagcacaatattgtgataaccctgcttcctcgtggtcagtatggactcaccagtgccgcaactgcagcaagaaatatggtccacagtttccctaacatcagattcgggctaatggtgggaatcggagggggggcgccaagcacggcacacgacattcgtttaggtgatgtggtcgtgagttcagctgggccgaacagcggcggcgtgttgcaatatgatttcgggaaaactatacaaaacaatgctttcgtcaccactggttatctaaatcagcccccgacccttctccttacggctacagcacagcttgaaggcgactacgaattcgacgggcccacgctcgatttgtctatcacacacgctatcaagaaaaatcccaggctgcagtcgacataccaacgtccagatgcttgcacggacagactttacgagtcaaattttttgcatggggatagcgagaaaacatgcgccgttgtatgcgctcatgggccgatggtcgaacggccgccccgcgctattgatgagtctattgtgcattatgggctcatcgcgtctgcaaatcaagtgatgaaggatgccttgaagcgcgatgaacttgttgcagaaagagatgtcttatgcttcgagatggaagctgctggtctaatgaaccatttcccttgcctcgtaattcgaggtataagtgactactcggattctcataagaacaaagaatggcagggatatgcagcgatggcggcggcagcatatgcaaaggacctcttgcacaccattccagcgaccaaggtccaggtagagaagaaattgggtgaaacgttcgaaatcagttagttacttccagactagttggatctcagggcatcaaacactgatcataagtccattcagtacagcaagatcttgagcatgtgaagcttgatgtgagaaaaatgcggattgacaaagactccgaaaacataacgaaatggcttttgccagccgattcatcaatcaatctcaacgctgcgttgaaatatcggctgcctaaatctggccagtggcttcttcaacattcttcttatcaggcatggaagtctcaaagaaattcattcatctggctttccgggatcatcggctcggggaaaaccatacttgcctcgaccgtcattgaagacttgaggaagtctgatggcaaaagcctgctttacttttattttgattctaatgataaaggaaagacacatttcgagaacgcaataagatcccttatctaccaattatacaatcagagagaaaacacgcgaatgcccctgtgttctctatatacttcgaaggaaggtcaacaaccgactctgaaggagctttgcaatatcctcaatgacatgattaatgaagctggggaactctggatcgtacttgatgccctagacgaatgcacggtccgcgttgaacatatggctgaaagtctacttacatggattcgaggactgcctacgggacccgcgaacactcatcttcttgtcacgagtcgcccagaacatgacatcaattgcaatatcagggactgggcaccttgtcacagtatcattttaatcgaaagcacacttattgaagaagacatagctgcctacattcgatcaagagtaaaagatgatccagggctgaaaagatggaattcccatcccagcatccaatccgaaatagagattgcattaattgagaaggcggacggcatgtttcgttgggtagtctgtcagttagacgtactcggagaatgcctcgattatccagatgtcaagagagctctagcttttttaccagagacgctcgatgatacctatgcacgtattctgcgggccctgcctaaaggttttcggcccaagactatccggttactacagttcttactgtattctgaacggccgctgcgccttagagaagtgcttgatatgttgtcagtccatgtgcaagaaataccacgctttgatcctaaaaatcgcatgccagttcctgaggaggttgcaaggtattgttcgagcttaatttcaatcagcgtacgggacgtcaacgacagagaagaagatgactatggcgttgtatgttgcgatggaagaacgtcaagaacagtgacggaaattcagttggcccatctctcagtcagagaatacttgatgtccactcgacttgacgaagattataagggaagtctcagtgcaaatattgctagggcatctaatgcaagcatctgtcttgcatatttgatacagattgaccaggatctagctgagctagacatgtctgaaacacaagatggcttttgggttgtatatcaacggtcaaagaatgccatatcggatgccctacagttgcaccaggaaattcttaagtttaggaacaaccagcttcccagaggacagtttccagactctataagattagcctaccctatggcacaatatgttgtagactactggccaaatcatagcaacgcggtcgatagagaagtggcggaggtgacatgcttagcgttggaactactctcacacaatgacaatgtaggcccttggctagtactgaccaaaagcgaatcatatagggttcgttacggtccaataggtgcagtgaaagcatcggctctctactacgcggcctccgaa

SEQ ID NO: 13308 - DNA, 381 bp, Muscodor strobelii
  misc_feature: SGI cDNA ID NO. 564354
  misc_feature: Elevated expression when VOC is produced
  misc_feature: Encodes the peptide sequence at SEQ ID NO 13309
atgactgtcatccatattgtccttttcaagtttcgttcggacgtcacagacgaacacaaagcaaaattcgtcactgaacttaagacattaaaatccttatcctgtgtgcagaatggccatctgatagtcggcgggccatcgattaccgatccgatagagcgaagcaaagggtaccactatgcgcttgtgagccatcaccagaaccggcaggctttggctgaataccaagcaagcaaggagcacaatagagtaactagcgaatatgtctggccattcaaggaagatgtaatgcgcttcgatttcgaagttgcaccggaggatgaacatatgtgcgagatgttcgccaagacggtagtaaatggcgagagcacaagcatatga

SEQ ID NO: 13309 - protein, 126 aa, Muscodor strobelii
  misc_feature: SGI Peptide ID NO. 564354
  misc_feature (3)..(103): Pfam Id: PF07876 Pfam Desc: Stress responsive A/B Barrel Domain
  misc_feature (1)..(113): NCBI GI: 238482825 Blast Desc: conserved [Aspergillus flavus NRRL3357] gi|220700701|gb|EED57039.1| conserved [Aspergillus flavus NRRL3357]
  misc_feature (1)..(113): NCBI GI: 145236128 Blast Desc: [Aspergillus niger] gi|134075163|emb|CAK96476.1| [Aspergillus niger]
  misc_feature (1)..(115): NCBI GI: 70996853 Blast Desc: AFUA_5G14760 [Aspergillus fumigatus Af293] gi|66850817|gb|EAL91143.1| AFUA_5G14760 [Aspergillus fumigatus Af293] gi|159127088|gb|EDP52204.1| AFUB_062430 [Aspergillus
  misc_feature (1)..(110): NCBI GI: 119476584 Blast Desc: stress responsive A/B barrel domain protein [Neosartorya fischeri NRRL 181] gi|119407359|gb|EAW17308.1| stress responsive A/B barrel domain protein [Neosartorya fischeri
  misc_feature (1)..(111): NCBI GI: 67901280 Blast Desc: AN7627.2 [Aspergillus nidulans FGSC A4] gi|40742623|gb|EAA61813.1| AN7627.2 [Aspergillus nidulans FGSC A4]
  misc_feature (7)..(111): NCBI GI: 121700531 Blast Desc: stress responsive A/B barrel domain protein [Aspergillus clavatus NRRL 1] gi|119396673|gb|EAW07104.1| stress responsive A/B barrel domain protein [Aspergillus clavatus NRRL
  misc_feature (8)..(110): NCBI GI: 242787246 Blast Desc: TSTA_037520 [Talaromyces stipitatus ATCC 10500] gi|218721113|gb|EED20532.1| TSTA_037520 [Talaromyces stipitatus ATCC 10500]
  misc_feature (1)..(110): NCBI GI: 255941766 Blast Desc: Pc16g13530 [Penicillium chrysogenum Wisconsin 54-1255] gi|211586275|emb|CAP94023.1| Pc16g13530 [Penicillium chrysogenum Wisconsin 54-1255]
  misc_feature (7)..(112): NCBI GI: 256726555 Blast Desc: [Nectria haematococca mpVI 77-13-4]
  misc_feature (7)..(111): NCBI GI: 259483959 Blast Desc: TPA: conserved [Aspergillus nidulans FGSC A4]
  misc_feature: Useful for introducing or modulating the production of volatile compounds
MTVIHIVLFKFRSDVTDEHKAKFVTELKTLKSLSCVQNGHLIVGGPSITDPIERSKGYHYALVSHHQNRQALAEYQASKEHNRVTSEYVWPFKEDVMRFDFEVAPEDEHMCEMFAKTVVNGESTSI

SEQ ID NO: 13310 - DNA, 947 bp, Muscodor strobelii
  misc_feature: SGI EST ID NO. CUFF.31839.0
  misc_feature: Variant of the nucleotide sequence at SEQ ID NO 13308
gatatatcccttctcaaatatcataacagtttgagtgtgatccaactcatcaatcatcccctgtcaacaatttaatccttttcaagtttcgttcggacgtcacagacgaacacaaagcaaaattcgtcactgaacttaagacattaaaatccttatcctgtgtgcagaatggccatctgatagtcggcgggccatcgattaccgatccgatagagcgaagcaaagggtaccactatgcgcttgtgagccatcaccagaaccggcaggctttggctgaataccaagcaagcaaggagcacaatagagtaactagcgaatatgtctggccattcaaggaagatgtaatgcgcttcgatttcgaagttgcaccggaggatgaacatatgtgcgagatgttcgccaagacggtagtaaatggcgagagcacaagcatatgaggcatgcagcatcattcctagcaatgcggttcgtatatactgtaatattctgggctattaagaaaacgagacttccgtactccgtgctcattttggtgtgtagcctcaagggctgtttccatctcgacttgcacaatttgagagacttattgccaaccataaaataaaaaagtacatgtgagcttataacgtggcttgccatttcacgggatatttataatcaccgtaaaacagtgtattccatctgttcgtgggaatagtaatccattaaggcgcatggggctccggagatggacaccagggccaattgtgtagtactatactcgcccagtagacgaagtgatgcccccgtcaatgacaatcttctggcctgtgatgtatctagcctcatcagagaccaagaacagtgcagagttcgccacatcccatgcatttcccatcttacccatggggacctgactatctctcgtacgtctgaattcctcataaccaccgggtgtaggaaaccgg

SEQ ID NO: 13311 - DNA, 810 bp, Muscodor strobelii
  misc_feature: SGI cDNA ID NO. 564355
  misc_feature: Encodes the peptide sequence at SEQ ID NO 13312
atgctcgatctcaaagacaaggtcgcactcgtcattggacttggccagaccggtacagagggttgggggataggagcagcttgcgctgtgctcttcgcccgtcagggtgcaattgtgttcggcggtaataggacaattgcatcgaccaccaagacaaagcagacaattgaagatgaagggggccaatgcgatatcattgaaacggacgcgacgtcctccgaatccgtcaagaatctcgtagatgcttgtgtaacaaagcacggccgcatcgatatcttgcttacgaacgtcggccagtcgcagtctgggtgccctgcgactatatcagaatcaacgtgggatgctcagatagacatcaaccttaagagcgtctacttggcatgccatcacgtgcttccagtgatggagaaacaggtcacaggcggctcagtggtttgcgtctcgagtatcgctggaatgcgctacattggcaaacctcaggtcgcctacaatgctactaaagcggctattatgcagttcgtaaaggctacagctgtgatatatgccgaaaagggcgtgcgattgaatacggtggttccggggctcatggacacgccatacactaagcgcctgtccgaccggtttcctacacccggtggttatgaggaattcagacgtacgagagatagtcaggtccccatgggtaagatgggaaatgcatgggatgtggcgaactctgcactgttcttggtctctgatgaggctagatacatcacaggccagaagattgtcattgacgggggcatcacttcgtctactgggcgagtatag

SEQ ID NO: 13312 - protein, 269 aa, Muscodor strobelii
  misc_feature: SGI Peptide ID NO. 564355
  misc_feature (7)..(182): Pfam Id: PF00106 Pfam Desc: short chain dehydrogenase
  misc_feature (1)..(269): NCBI GI: 261361551 Blast Desc: oxidoreductase ucpA [Verticillium albo-atrum VaMs.102]
  misc_feature (1)..(268): NCBI GI: 46124281 Blast Desc: FG06518.1 [Gibberella zeae PH-1]
  misc_feature (1)..(269): NCBI GI: 256726423 Blast Desc: [Nectria haematococca mpVI 77-13-4]
  misc_feature (1)..(268): NCBI GI: 238506271 Blast Desc: short-chain dehydrogenase, [Aspergillus flavus NRRL3357] gi|220689050|gb|EED45401.1| short-chain dehydrogenase, [Aspergillus flavus NRRL3357]
  misc_feature (1)..(268): NCBI GI: 169785287 Blast Desc: [Aspergillus oryzae RIB40] gi|83775852|dbj|BAE65971.1| protein product [Aspergillus oryzae]
  misc_feature (1)..(269): NCBI GI: 242805891 Blast Desc: short-chain dehydrogenase, [Talaromyces stipitatus ATCC 10500] gi|218715252|gb|EED14674.1| short-chain dehydrogenase, [Talaromyces stipitatus ATCC 10500]
  misc_feature (1)..(269): NCBI GI: 145236130 Blast Desc: protein product [Aspergillus niger] gi|134075164|emb|CAK96477.1| protein product [Aspergillus niger]
  misc_feature (6)..(269): NCBI GI: 212531099 Blast Desc: 3-oxoacyl-[acyl-carrier-protein] reductase, [Penicillium marneffei ATCC 18224] gi|210071070|gb|EEA25159.1| 3-oxoacyl-[acyl-carrier-protein] reductase, [Penicillium ATCC
  misc_feature (3)..(267): NCBI GI: 169777681 Blast Desc: [Aspergillus oryzae RIB40] gi|238494870|ref|XP_002378671.1| short-chain dehydrogenases/reductase, [Aspergillus flavus NRRL3357] protein
  misc_feature (3)..(267): NCBI GI: 240109735 Blast Desc: oxidoreductase ucpA, [Coccidioides posadasii C735 delta SOWgp]
  misc_feature (2)..(262): SWISSPROT Homolog: EC 1.1.1.100 3-oxoacyl-[acyl-carrier-protein] reductase
MLDLKDKVALVIGLGQTGTEGWGIGAACAVLFARQGAIVFGGNRTIASTTKTKQTIEDEGGQCDIIETDATSSESVKNLVDACVTKHGRIDILLTNVGQSQSGCPATISESTWDAQIDINLKSVYLACHHVLPVMEKQVTGGSVVCVSSIAGMRYIGKPQVAYNATKAAIMQFVKATAVIYAEKGVRLNTVVPGLMDTPYTKRLSDRFPTPGGYEEFRRTRDSQVPMGKMGNAWDVANSALFLVSDEARYITGQKIVIDGGITSSTGRV

SEQ ID NO: 13313 - DNA, 1809 bp, Muscodor strobelii
  misc_feature: SGI cDNA ID NO. 564356
  misc_feature: Encodes the peptide sequence at SEQ ID NO 13314
atggaggggataacacaagcgccgacatcagattatgatttatctgcgccgattgaatccaaacaaggcttgagacagggtctcacatcctacggcgatgcacatttttcgctatttttgcgcaaagtgttcattaaggcactaggatacagcgaggatgcgctatcacggcctataatcggtatcgtgaacacgtattcgagcttcaatccgtgccatgccaatgttccccagctcatcgacgccgtgaagcgcggcgtccagctcagcggcgggctagcaattgatttccctacaatcagtattcatgagtctttctcgtcgccaactagcatgttcttgcgcaatctcatgagtatggacactgaagagatgattcgcgctcagccctgtgatgctgtcgttttgattggaggttgtgacaagaccacgcccgcgcaattaatgggaggtctttcggcaaataagcccatactccacctggtcactgggcccatgatgcccggtagtcatagaggggttagaataggggcctgtaccgactgtagaaataattgggcttccttccgggctggtactattgatatcgaggatatttcagctatcaacgatgagcttgcaccaacggccggtacttgcggggtcatgggtacggcaagcacaatggcatgcatactcgtcgctctcggtcttatgccattcgccggagcgtctgcacccgcggtatcgtcagcacggttacggatcgcagaggagaccggaaagaatgcagtcgcggccgttgcggccgatcgtcggccggtacctctactgacacgagagtcgttcctcaatgcgatcactgttctacaggcgatcggtggctctaccaacgctgtagtgcatctcatggccatcatcgggcgacatcctgatgttgcaggaactatctcacttgacacattcgatgagattggaaagaagacaccgcttctagtggacctgaagccaagcggcgagaattatatgacagattttcataattcaggtggcatgttggtccttctgcacgagctgaagccattgctgtaccttgacgccaagactgttactgggcaaacactaggtgaagcaattgcgagcgcagcatttctgaaggtaccacagcacctcagttgcattcagccctttgatgaccccttatattcccgttcgtctctcatcgtcgtccggggtaacattgcacccaaaggcgccgttatcaaggcaagcgcatccaaagaacgccacctattacggcattcaggcaaagcagtagtattcagcaattccgcggatctggcgcaaagaatcgacaacccagacctcgatgtgacagccgacagtgtgctagttctacaaaatattggccccatcggtaatccgggtatgcccgaagctggacttattccaatcccgagaaaactagcagcgaaaggcgtgaaagacatgctgagactctcagatggtagaatgagtggaactgcgggtggaacaatcgtcttacacatctcgcctgaatcggcagacccgaaatccgtactcggtatcataagaaacggggatatgatcaactttgatgctgacaagagaaagttaaatgtcgagctctcagaagaagagattacgatgagattgcgggacagacagtcccttgcggaatcagatcctgcagctgcgatgattctaccgaggagggtaagaggatatcgaggtctatacttgcgatctgttctacaggcagagcagggcgcagattttgactttcttacagcgcgtgggccagagtga

SEQ ID NO: 13314 - protein, 602 aa, Muscodor strobelii
  misc_feature: SGI Peptide ID NO. 564356
  misc_feature (57)..(594): Pfam Id: PF00920 Pfam Desc: Dehydratase family
  misc_feature (11)..(602): NCBI GI: 46124279 Blast Desc: FG06517.1 [Gibberella zeae PH-1]
  misc_feature (8)..(601): NCBI GI: 121702331 Blast Desc: dihydroxy-acid dehydratase, [Aspergillus clavatus NRRL 1] gi|119397573|gb|EAW08004.1| dihydroxy-acid dehydratase, [Aspergillus clavatus NRRL 1]
  misc_feature (6)..(601): NCBI GI: 70991262 Blast Desc: dihydroxy-acid dehydratase [Aspergillus fumigatus Af293] gi|66848112|gb|EAL88442.1| dihydroxy-acid dehydratase, [Aspergillus fumigatus Af293]
  misc_feature (7)..(601): NCBI GI: 119496325 Blast Desc: dihydroxy-acid dehydratase, [Neosartorya fischeri NRRL 181] gi|119413098|gb|EAW23039.1| dihydroxy-acid dehydratase, [Neosartorya fischeri NRRL 181]
  misc_feature (6)..(601): NCBI GI: 159130953 Blast Desc: dihydroxy-acid dehydratase, [Aspergillus fumigatus A1163]
  misc_feature (10)..(600): NCBI GI: 67537936 Blast Desc: AN5138.2 [Aspergillus nidulans FGSC A4] gi|40743129|gb|EAA62319.1| AN5138.2 [Aspergillus nidulans FGSC A4] gi|259484584|tpe|CBF80933.1| TPA: dihydroxyacid dehydratase
  misc_feature (11)..(600): NCBI GI: 212538303 Blast Desc: dihydroxy-acid dehydratase, [Penicillium marneffei ATCC 18224] gi|210069049|gb|EEA23140.1| dihydroxy-acid dehydratase, [Penicillium marneffei ATCC 18224]
  misc_feature (5)..(601): NCBI GI: 145238830 Blast Desc: An07g09870 [Aspergillus niger] gi|134076562|emb|CAK39753.1| protein product [Aspergillus niger]
  misc_feature (4)..(600): NCBI GI: 255948632 Blast Desc: Pc22g11360 [Penicillium chrysogenum Wisconsin 54-1255] gi|211592100|emb|CAP98424.1| Pc22g11360 [Penicillium chrysogenum Wisconsin 54-1255]
  misc_feature (11)..(598): NCBI GI: 115385851 Blast Desc: ATEG_10170 [Aspergillus terreus NIH2624] gi|114187919|gb|EAU29619.1| ATEG_10170 [Aspergillus terreus NIH2624]
  misc_feature (41)..(553): SWISSPROT Homolog: EC 4.2.1.9 Dihydroxy-acid dehydratase
MEGITQAPTSDYDLSAPIESKQGLRQGLTSYGDAHFSLFLRKVFIKALGYSEDALSRPIIGIVNTYSSFNPCHANVPQLIDAVKRGVQLSGGLAIDFPTISIHESFSSPTSMFLRNLMSMDTEEMIRAQPCDAVVLIGGCDKTTPAQLMGGLSANKPILHLVTGPMMPGSHRGVRIGACTDCRNNWASFRAGTIDIEDISAINDELAPTAGTCGVMGTASTMACILVALGLMPFAGASAPAVSSARLRIAEETGKNAVAAVAADRRPVPLLTRESFLNAITVLQAIGGSTNAVVHLMAIIGRHPDVAGTISLDTFDEIGKKTPLLVDLKPSGENYMTDFHNSGGMLVLLHELKPLLYLDAKTVTGQTLGEAIASAAFLKVPQHLSCIQPFDDPLYSRSSLIVVRGNIAPKGAVIKASASKERHLLRHSGKAVVFSNSADLAQRIDNPDLDVTADSVLVLQNIGPIGNPGMPEAGLIPIPRKLAAKGVKDMLRLSDGRMSGTAGGTIVLHISPESADPKSVLGIIRNGDMINFDADKRKLNVELSEEEITMRLRDRQSLAESDPAAAMILPRRVRGYRGLYLRSVLQAEQGADFDFLTARGPE

SEQ ID NO: 13315 - DNA, 2667 bp, Muscodor strobelii
  misc_feature: SGI EST ID NO. CUFF.31845.0
  misc_feature: Variant of the nucleotide sequence at SEQ ID NO 13313
aaataagcccatactccacctggtcactgggcccatgatgcccggtagtcatagaggggttagaataggggcctgtaccgactgtagaaataattgggcttccttccgggctggtactattgatatcgaggatatttcagctatcaacgatgagcttgcaccaacggccggtacttgcggggtcatgggtacggcaagcacaatggcatgcatactcgtcgctctcggtcttatgccattcgccggagcgtctgcacccgcggtatcgtcagcacggttacggatcgcagaggagaccggaaagaatgcagtcgcggccgttgcggccgatcgtcggccggtacctctactgacacgagagtcgttcctcaatgcgatcactgttctacaggcgatcggtggctctaccaacgctgtagtgcatctcatggccatcatcgggcgacatcctgatgttgcaggaactatctcacttgacacattcgatgagattggaaagaagacaccgcttctagtggacctgaagccaagcggcgagaattatatgacagattttcataattcaggtggcatgttggtccttctgcacgagctgaagccattgctgtaccttgacgccaagactgttactgggcaaacactaggtgaagcaattgcgagcgcagcatttctgaaggtaccacagcacctcagttgcattcagccctttgatgaccccttatattcccgttcgtctctcatcgtcgtccggggtaacattgcacccaaaggcgccgttatcaaggcaagcgcatccaaagaacgccacctattacggcattcaggcaaagcagtagtattcagcaattccgcggatctggcgcaaagaatcgacaacccagacctcgatgtgacagccgacagtgtgctagttctacaaaatattggccccatcggtaatccgggtatgcccgaagctggacttattccaatcccgagaaaactagcagcgaaaggcgtgaaagacatgctgagactctcagatggtagaatgagtggaactgcgggtggaacaatcgtcttacacatctcgcctgaatcggcagacccgaaatccgtactcggtatcataagaaacggggatatgatcaactttgatgctgacaagagaaagttaaatgtcgagctctcagaagaagagattacgatgagattgcgggacagacagtcccttgcggaatcagatcctgcagctgcgatgattctaccgaggagggtaagaggatatcgaggtctatacttgcgatctgttctacaggcagagcagggcgcagattttgactttcttacagcgcgtgggccagagtgaacagtcactatcggtgcagattagaagatataggtcttgtgagaggctcaccgctcaacgatttggtgaatcgcttacaatgtgatatgaaattgacctacgctagaatgtttcccagccggttgtgtttgatagcattatcgttagcatacatattattgggagcactgaagcgacttgttttagcgctcttgatgcggcgctattgtgaggatcggtattttcggcggtcagatcagttcacatgcgccattcgtactccttcattttctcataccattattcatacgcaaacccgaaattcaatgcagagttttcctagataaagcctgaagcgaccgatgtgaagtctccgaagaaattacccataacagcgtccatgtcgaaaggctccgcgaacagctcaggcgatggccaggcttcaagggcactcggttgcattatccacgagctatccgtgttcaactgactggtccaggcacttcctgccgagcctgttagactctctgctgtgaccatgtcggcaggagtctctgatgatggatctccattgcgatctcgagactgaatttgatttgcccctgcgttagacctgctgaacagaacattcttcccccagtcgaaaacagatgttgctaatttctccagaacgtccctacaacgttttgctccaggccaatgctcgccaagagcgctgagaatactaagggaagtcgtcatgtcgctccaaagcacatttagttctgtctgcaatgtcacgcccgaaaccgttctgacacaatagagtaatgtaactgtgctaagtaccagcgagtggaatgtgatccaggaatgaggtaacatgttctttttgtacaaatgactgtatagtctgatgctctgttgcgcactactatggcatttgttcagtgactcagttgaggggcgaggtatcgcggggctagggctaagcaaaagcatgcggatgctgtggtatcgtagctggcaaatcgtgtgaatatagaagtggtcttcactgaggacgaggctatcgagattgccggccaagatgtccaggcgactgaggacactcgcctgccagtcatgaatattgtctataggaggaaatgcgtatctcgggggatcgtggacgacgctattcgctacatatttgatttctgagttgatcttggccagttggaagaggtggattgagaaagacatatgtgttagcatcggcggattggatatcgatgcattgcccggcatcactagattggcatcatcgatgtcttcaggtaactggattgtctgcattagcgagctacagaacacgagca

SEQ ID NO: 13316 - DNA, 1008 bp, Muscodor strobelii
  misc_feature: SGI cDNA ID NO. 564357
  misc_feature: Encodes the peptide sequence at SEQ ID NO 13317
atgggtcggcccattggtctgcgagacgaagcttgcgagctccggttacctgaagacatcgatgatgccaatctagtgatgccgggcaatgcatcgatatccaatccgccgatgctaacacatatgtctttctcaatccacctcttccaactggccaagatcaactcagaaatcaaatatgtagcgaatagcgtcgtccacgatcccccgagatacgcatttcctcctatagacaatattcatgactggcaggcgagtgtcctcagtcgcctggacatcttggccggcaatctcgatagcctcgtcctcagtgaagaccacttctatattcacacgatttgccagctacgataccacagcatccgcatgcttttgcttagccctagccccgcgatacctcgcccctcaactgagtcactgaacaaatgccatagtagtgcgcaacagagcatcagactatacagtcatttgtacaaaaagaacatgttacctcattcctggatcacattccactcgctggtacttagcacagttacattactctattgtgtcagaacggtttcgggcgtgacattgcagacagaactaaatgtgctttggagcgacatgacgacttcccttagtattctcagcgctcttggcgagcattggcctggagcaaaacgttgtagggacgttctggagaaattagcaacatctgttttcgactgggggaagaatgttctgttcagcaggtctaacgcaggggcaaatcaaattcagtctcgagatcgcaatggagatccatcatcagagactcctgccgacatggtcacagcagagagtctaacaggctcggcaggaagtgcctggaccagtcagttgaacacggatagctcgtggataatgcaaccgagtgcccttgaagcctggccatcgcctgagctgttcgcggagcctttcgacatggacgctgttatgggtaatttcttcggagacttcacatcggtcgcttcaggctttatctag

SEQ ID NO: 13317 - protein, 335 aa, Muscodor strobelii
  misc_feature: SGI Peptide ID NO. 564357
  misc_feature (1)..(216): NCBI GI: 256726422 Blast Desc: NECHADRAFT_93076 [Nectria haematococca mpVI 77-13-4]
  misc_feature (1)..(222): NCBI GI: 46124277 Blast Desc: FG06516.1 [Gibberella zeae PH-1]
  misc_feature (19)..(327): NCBI GI: 261361553 Blast Desc: conserved [Verticillium albo-atrum VaMs.102]
  misc_feature (1)..(231): NCBI GI: 145236054 Blast Desc: protein product [Aspergillus niger] gi|134075125|emb|CAK39135.1| protein product [Aspergillus niger]
  misc_feature (1)..(232): NCBI GI: 115400427 Blast Desc: conserved [Aspergillus terreus NIH2624] gi|114191468|gb|EAU33168.1| conserved [Aspergillus terreus NIH2624]
  misc_feature (1)..(267): NCBI GI: 238484171 Blast Desc: C6 transcription factor, [Aspergillus flavus NRRL3357] gi|220701374|gb|EED57712.1| C6 transcription factor, [Aspergillus flavus NRRL3357]
  misc_feature (1)..(325): NCBI GI: 67901280 Blast Desc: AN7627.2 [Aspergillus nidulans FGSC A4] gi|40742623|gb|EAA61813.1| AN7627.2 [Aspergillus nidulans FGSC A4]
  misc_feature (1)..(325): NCBI GI: 259483958 Blast Desc: TPA: Zn(II)2Cys6 transcription factor (Eurofung) [Aspergillus nidulans FGSC A4]
  misc_feature (1)..(267): NCBI GI: 169767316 Blast Desc: [Aspergillus oryzae RIB40] gi|83765984|dbj|BAE56127.1| protein product [Aspergillus oryzae]
  misc_feature (1)..(247): NCBI GI: 256723469 Blast Desc: NECHADRAFT_12335 [Nectria haematococca mpVI 77-13-4]
MGRPIGLRDEACELRLPEDIDDANLVMPGNASISNPPMLTHMSFSIHLFQLAKINSEIKYVANSVVHDPPRYAFPPIDNIHDWQASVLSRLDILAGNLDSLVLSEDHFYIHTICQLRYHSIRMLLLSPSPAIPRPSTESLNKCHSSAQQSIRLYSHLYKKNMLPHSWITFHSLVLSTVTLLYCVRTVSGVTLQTELNVLWSDMTTSLSILSALGEHWPGAKRCRDVLEKLATSVFDWGKNVLFSRSNAGANQIQSRDRNGDPSSETPADMVTAESLTGSAGSAWTSQLNTDSSWIMQPSALEAWPSPELFAEPFDMDAVMGNFFGDFTSVASGFI

SEQ ID NO: 13318 - DNA, 798 bp, Muscodor strobelii
  misc_feature: SGI cDNA ID NO. 564358
  misc_feature: Encodes the peptide sequence at SEQ ID NO 13319
atggcttcggctttctcgcagcacatgccggcatggcggcagcgattgagtccgcccgcgttttcggcatcggcatggctagcattgcccattcaaaccacttttggcatgagcgcatgggttgtgcaggaggctctagatgccaacatgatgagtctagtatttacaaactcaagccctgcgctacccgtatggggcgggaagagcaagctcatgggtgtgtcccctatcgcctgtggcgctccaggcaaggacaaaccgttcattctcgatatggcgccttcagtcgcagctcggggcaagatctataaggcaaagcgacgcggggagaagataccgctagattgggctctcgatgccgatggtcaacctattgatgatcctgccgccgcattggagggagttatgcttcccatgggcgggccaaaaggctctgctttatctattatgatggatgtgttttcaggtgccctctccggctctgcgtttgcgggtcatgtaaccaacccatatgacccttctaagcccgccgacgtcggccattttctcattgccatcaagcctgatctcttcatgagcttagacgactttcgagaacgcatgcaatacctctacgagagagttgtgggctcggagaaggctgctggagtggaaaagatctacttccccggtgaacttgagcagctcgcagaagcagaaaggaagatatcaggtataccgctcgtgcaagcggaaatcgacgccttgaatgaggaggccagaagagtctcggcggaagctttaataactaagtcgtga

SEQ ID NO: 13319 - protein, 265 aa, Muscodor strobelii
  misc_feature: SGI Peptide ID NO. 564358
  misc_feature (1)..(252): Pfam Id: PF02615 Pfam Desc: Malate/L-lactate dehydrogenase
  misc_feature (42)..(252): Pfam Id: PF02615 Pfam Desc: Malate/L-lactate dehydrogenase
  misc_feature (35)..(261): NCBI GI: 46124275 Blast Desc: FG06515.1 [Gibberella zeae PH-1]
  misc_feature (25)..(262): NCBI GI: 119481623 Blast Desc: malate/L-lactate dehydrogenase, [Neosartorya fischeri NRRL 181] gi|119408994|gb|EAW18943.1| malate/L-lactate dehydrogenase, [Neosartorya fischeri NRRL 181]
  misc_feature (25)..(262): NCBI GI: 71002066 Blast Desc: malate/L-lactate dehydrogenase [Aspergillus fumigatus Af293] gi|66853352|gb|EAL93676.1| malate/L-lactate dehydrogenase, [Aspergillus fumigatus Af293] gi|159129771|gb|EDP54885.1| A1163]
  misc_feature (25)..(263): NCBI GI: 238497033 Blast Desc: malate/L-lactate dehydrogenase, [Aspergillus flavus NRRL3357] gi|220694632|gb|EED50976.1| malate/L-lactate dehydrogenase, [Aspergillus flavus NRRL3357]
  misc_feature (25)..(263): NCBI GI: 169774429 Blast Desc: [Aspergillus oryzae RIB40] gi|83769545|dbj|BAE59680.1| protein product [Aspergillus oryzae]
  misc_feature (25)..(264): NCBI GI: 121716328 Blast Desc: malate/L-lactate dehydrogenase, [Aspergillus clavatus NRRL 1] gi|119403930|gb|EAW14347.1| malate/L-lactate dehydrogenase, [Aspergillus clavatus NRRL 1]
  misc_feature (33)..(258): NCBI GI: 169598342 Blast Desc: SNOG_01972 [Phaeosphaeria nodorum SN15] gi|111069064|gb|EAT90184.1| SNOG_01972 [Phaeosphaeria nodorum SN15]
  misc_feature (35)..(265): NCBI GI: 189193153 Blast Desc: malate dehydrogenase [Pyrenophora tritici-repentis Pt-1C-BFP] gi|187978479|gb|EDU45105.1| malate dehydrogenase [Pyrenophora tritici-repentis Pt-1C-BFP]
  misc_feature (35)..(261): NCBI GI: 242823941 Blast Desc: malate/L-lactate dehydrogenase, [Talaromyces stipitatus ATCC 10500] gi|218713082|gb|EED12507.1| malate/L-lactate dehydrogenase, [Talaromyces stipitatus ATCC
  misc_feature (35)..(261): NCBI GI: 212531097 Blast Desc: malate/L-lactate dehydrogenase, [Penicillium marneffei ATCC 18224] gi|210071069|gb|EEA25158.1| malate/L-lactate dehydrogenase, [Penicillium marneffei ATCC 18224]
  misc_feature (35)..(235): SWISSPROT Homolog: EC 1.1.1.272 (R)-2-hydroxyacid dehydrogenase
MASAFSQHMPAWRQRLSPPAFSASAWLALPIQTTFGMSAWVVQEALDANMMSLVFTNSSPALPVWGGKSKLMGVSPIACGAPGKDKPFILDMAPSVAARGKIYKAKRRGEKIPLDWALDADGQPIDDPAAALEGVMLPMGGPKGSALSIMMDVFSGALSGSAFAGHVTNPYDPSKPADVGHFLIAIKPDLFMSLDDFRERMQYLYERVVGSEKAAGVEKIYFPGELEQLAEAERKISGIPLVQAEIDALNEEARRVSAEALITKS

SEQ ID NO: 13320 - DNA, 711 bp, Muscodor strobelii
  misc_feature: SGI EST ID NO. CUFF.31857.0
  misc_feature: Variant of the nucleotide sequence at SEQ ID NO 13318
tctagatgccaacatgatgagtctagtatttacaaactcaagccctgcgctacccgtatggggcgggaagagcaagctcatgggtgtgtcccctatcgcctgtggcgctccaggcaaggacaaaccgttcattctcgatatggcgccttcagtcgcagctcggggcaagatctataaggcaaagcgacgcggggagaagataccgctagattgggctctcgatgccgatggtcaacctattgatgatcctgccgccgcattggagggagttatgcttcccatgggcgggccaaaaggctctgctttatctattatgatggatgtgttttcaggtgccctctccggctctgcgtttgcgggtcatgtaaccaacccatatgacccttctaagcccgccgacgtcggccattttctcattgccatcaagcctgatctcttcatgagcttagacgactttcgagaacgcatgcaatacctctacgagagagttgtgggctcggagaaggctgctggagtggaaaagatctacttccccggtgaacttgagcagctcgcagaagcagaaaggaagatatcaggtataccgctcgtgcaagcggaaatcgacgccttgaatgaggaggccagaagagtctcggcggaagctttaataactaagtcgtgaatgtaacgtcaagcaagaaatgatgcttcttctgagatcgactatta

SEQ ID NO: 13321 - DNA, 1926 bp, Muscodor strobelii
  misc_feature: SGI cDNA ID NO. 564359
  misc_feature: Encodes the peptide sequence at SEQ ID NO 13322
atgggaaacctgttgaactatcagaggttgaagctccacgaacctctcggagaggctactcccaactcggcaaagcctttgccagtctccctacatgcaggaagaaagcagatgcttaatcccaatcgcatgagggaatatccattcatcgtcattgggagcggcatgggcggaggaatgctcgcaagaagtctcatgaatggatacaaccaggacgatcccagagtcctaatcctcgaaaaagggggactcgggtaccccactcattgtttgaacacgtctcgcacgcattttgatcatcagtctcaagacggctgcggccgcgacaatgagatcatgttcgacaactgtcttgccgctgaaggcacaaaatataaagtcaggagatctctggaggaattctgtggtggtggctctgtcttcgagctgggaggccgaagtcttttctggagtctggagacaccgcctatcagggccgacaaactcaagcaattcttccctctagaggtggtggcagatctattgaatgaagactcctcaactgcccaagacagctatggaaagaaggcacaacgaatcgtcgccaatagcccaccgagcgaaactcaagttttggaagcgaaggcaaaattgaccgaggctataatatctttcaggattttgagcaacgacttagtgtctacgcctaatggagcggaatttgccaactcagacaatctgtactacttcccccagggcgcgtacagcactacagactggatacaagataagcttctgaaccagcatcaccagagtttccccatcaacatcgacggtgtcgtcattgatcttgattggggccagactatcatcttatgcgcgggtacggtcaacaccgcagccatcgcgcttcgttcggatctaccgactgaggcgcgagaacaagttggcaagaatatgacagatcatgagacatggatgaacaggtactggaagcgcacgaaccttgaggagtataaaaggcagaaggccgtcgagctgtcctgctacgtgaccattcacggacaagaggcgctcctcaccgtctgtcttaatgctgaaaagctctacggacatggatttgcagacgggaagggtagcactaatgctccggagttcaaaaaggagctggagcaactatgtaaggcaatccgcgagcagttcggtttcgtgccgagcgctggtgagggcggatacgacgatgacaaggttcggctggcgccgtggggctctgttgctcatgaagttggcaccatgcgcatggatggccctggacacagtgatggtgttgtcgatgccaatctcaaggtgaagggtgttgacaatctgtatgtttgcgatttgtctgttttcccggtcagtccgatggagaacccttcgcttacaatgactgcattggctatgagactggttatcactgtcttcaccgttacggtatctgcagcgtcaaacttccaaggcagcccgctcacggcaggcactgtcgtaggggactggaaatacctaggatgcgccaacgagattgatggccgagctctcccaggagccagctactcggatgactcgatgacaatcgcaagttgtcaagcttactgcacaaagaacaatttccccctggccggtctcgagtacggacgagagtgctactgtggtaagatgatcatgactccttcgaaggtcggcccgaaaaacaactgcaacatgggctgcaagggcaacaataaagagatgtgcggtggtaactccctcgtctctatattcaacaacaccaagtttgtcgggcccggagctcccaagaccgtcggttcatggaactatcagagttgctacatggagccgcagtggggccgtgcgctcgacatcttgatcaaagctgatgataagatgacgatcgacatgtgcacctag

SEQ ID NO: 13322 - protein, 641 aa, Muscodor strobelii
  misc_feature: SGI Peptide ID NO. 564359
  misc_feature (507)..(586): Pfam Id: PF01822 Pfam Desc: WSC domain
  misc_feature (43)..(476): NCBI GI: 46127651 Blast Desc: FG08203.1 [Gibberella zeae PH-1]
  misc_feature (503)..(641): NCBI GI: 38567019 Blast Desc: related to glyoxal oxidase precursor [Neurospora crassa]
  misc_feature (495)..(640): NCBI GI: 256724920 Blast Desc: NECHADRAFT_34566 [Nectria haematococca mpVI 77-13-4]
  misc_feature (495)..(640): NCBI GI: 46122771 Blast Desc: FG05763.1 [Gibberella zeae PH-1]
  misc_feature (475)..(640): NCBI GI: 242773234 Blast Desc: conserved [Talaromyces stipitatus ATCC 10500] gi|218721818|gb|EED21236.1| conserved [Talaromyces stipitatus ATCC 10500]
  misc_feature (499)..(640): NCBI GI: 256724920 Blast Desc: NECHADRAFT_34566 [Nectria haematococca mpVI 77-13-4]
  misc_feature (502)..(640): NCBI GI: 85091187 Blast Desc: NCU05935 [Neurospora crassa OR74A] gi|28920164|gb|EAA29543.1| [Neurospora crassa OR74A]
  misc_feature (505)..(640): NCBI GI: 258576935 Blast Desc: [Uncinocarpus reesii 1704] gi|237902915|gb|EEP77316.1| [Uncinocarpus reesii 1704]
  misc_feature (499)..(640): NCBI GI: 238846204 Blast Desc: MCYG_08685 [Microsporum canis CBS 113480]
  misc_feature (500)..(641): NCBI GI: 170104262 Blast Desc: [Laccaria bicolor S238N-H82] gi|164641798|gb|EDR06057.1| [Laccaria bicolor S238N-H82]
MGNLLNYQRLKLHEPLGEATPNSAKPLPVSLHAGRKQMLNPNRMREYPFIVIGSGMGGGMLARSLMNGYNQDDPRVLILEKGGLGYPTHCLNTSRTHFDHQSQDGCGRDNEIMFDNCLAAEGTKYKVRRSLEEFCGGGSVFELGGRSLFWSLETPPIRADKLKQFFPLEVVADLLNEDSSTAQDSYGKKAQRIVANSPPSETQVLEAKAKLTEAIISFRILSNDLVSTPNGAEFANSDNLYYFPQGAYSTTDWIQDKLLNQHHQSFPINIDGVVIDLDWGQTIILCAGTVNTAAIALRSDLPTEAREQVGKNMTDHETWMNRYWKRTNLEEYKRQKAVELSCYVTIHGQEALLTVCLNAEKLYGHGFADGKGSTNAPEFKKELEQLCKAIREQFGFVPSAGEGGYDDDKVRLAPWGSVAHEVGTMRMDGPGHSDGVVDANLKVKGVDNLYVCDLSVFPVSPMENPSLTMTALAMRLVITVFTVTVSAASNFQGSPLTAGTVVGDWKYLGCANEIDGRALPGASYSDDSMTIASCQAYCTKNNFPLAGLEYGRECYCGKMIMTPSKVGPKNNCNMGCKGNNKEMCGGNSLVSIFNNTKFVGPGAPKTVGSWNYQSCYMEPQWGRALDILIKADDKMTIDMCT

SEQ ID NO: 13323 - DNA, 1740 bp, Muscodor strobelii
  misc_feature: SGI cDNA ID NO. 564360
  misc_feature: Encodes the peptide sequence at SEQ ID NO 13324
atggaggactgtcgcaatgtcacaatatcaagtcaatcagatatcgacagtggtcctctatcaaactgcaatggtggcaatccagaaatggaaatgcatattatcggaggagggaacctcagttttaccaatattactagtgttggtcctctctacatagccgataattcggacgtagaagacatcgactttccccagcttctaagtcttaacgcactcgcgatcaagaatgtgacatccctcacgagattctcggcgaggcatttaagtaacaatgagaccttcggcctttgggcactggacagcccatctcttcaatctctagagatcccgctgccgaaccacttaatacccctcgttctgtgggatctctccgatgcgctctccgataatatctcactcgacaatgtgcttgatatatacttcttcgaaacgaaccagtgttttcaactgccgaacctgagaacggttagcatcttcgacctgaagggcagcccgggatgcaactacgacttaggtgctgtcgaaactatcggccaactacgagttgagaatgccgtcaacatatccttctataagcatggattccccgttactagccctacctttcatgtgaacaactcgatgagcctcgcggaaacagaacctatacctgacgtcgcggatcctaacgtcgatttgagctctgtgggcgctattggagagcatctcaacgtttcgtccaactcaaacgttgctattagcttcaacggactaatgagcattggttcatctctcaaaatcacgaacaacgcaaactgtacgtttgctttcgatcagctcacacaagtggcgaatcttctgttcttagacaacactgattccgcatttcccgtgtttgtatctctagaaaacgtagaggctatccatattcggggctttatccaatcacccgatgctgtgaatgacaacatatttccagttctgaaccatgccagaaatgtgactatcgagtctttcaatcccgatttcgactgctcgtcactgatctcacaactcgagaatggaaaaattgcggaactcacctgtgatgtggtaaaaagtcaggcagttacaaacagctcgacgggcgcaaagaaccatgatgggggcttatctgctggtgtctatgccggcgtgggtatagaatcaggccttgttctcctgggcgttatctttacaatcgtatggctcgtccgtcgctacatacagcaatctcaagcacttaaagccagttctgacttccactataacgattctgttgaggaaacgattccatggccgcccatgattgatggggcacgcgaagtcgacggcgctgggatactaagagagatgccagacgacccattaacgggattagcaactggagatagagagctaccagataatcctctcgtagagctgccactgagcggtgttgaattacccgcacatccgtgggaacaggaattgactggacacggtgtcagacgtgtctctcaagggcaggccgaagacagatacgttgacaccatgcgcgaggaaggcattccgcgcagaagttccgacgaattttttggctggttcgacgcctgcgatgaccgaccaattagaccaccacacaatacggaaacaccaagcgccagggagaggactgtttccaacgtgccgcaaagtcgcccaggaccgagacttcagatgggggatgagtactctttgtgccggtcaaacttttcatag

SEQ ID NO: 13324 - protein, 579 aa, Muscodor strobelii
  misc_feature: SGI Peptide ID NO. 564360
MEDCRNVTISSQSDIDSGPLSNCNGGNPEMEMHIIGGGNLSFTNITSVGPLYIADNSDVEDIDFPQLLSLNALAIKNVTSLTRFSARHLSNNETFGLWALDSPSLQSLEIPLPNHLIPLVLWDLSDALSDNISLDNVLDIYFFETNQCFQLPNLRTVSIFDLKGSPGCNYDLGAVETIGQLRVENAVNISFYKHGFPVTSPTFHVNNSMSLAETEPIPDVADPNVDLSSVGAIGEHLNVSSNSNVAISFNGLMSIGSSLKITNNANCTFAFDQLTQVANLLFLDNTDSAFPVFVSLENVEAIHIRGFIQSPDAVNDNIFPVLNHARNVTIESFNPDFDCSSLISQLENGKIAELTCDVVKSQAVTNSSTGAKNHDGGLSAGVYAGVGIESGLVLLGVIFTIVWLVRRYIQQSQALKASSDFHYNDSVEETIPWPPMIDGAREVDGAGILREMPDDPLTGLATGDRELPDNPLVELPLSGVELPAHPWEQELTGHGVRRVSQGQAEDRYVDTMREEGIPRRSSDEFFGWFDACDDRPIRPPHNTETPSARERTVSNVPQSRPGPRLQMGDEYSLCRSNFS

SEQ ID NO: 13325 - DNA, 1389 bp, Muscodor strobelii
  misc_feature: SGI cDNA ID NO. 564361
  misc_feature: Encodes the peptide sequence at SEQ ID NO 13326
atggctcctagatcactgtttttgctggcgctggctgcgctgccaacggccctcgcccacgatcacgattctacgaacattgcggatggtgacgccatctctgccgacccgattgacacgatactatggatacacatctttctccagatgctagcatggggcatcatatttccattgggcatggtcctcggtatagttaagaatagatggcacgtccctctccaagtactcggcaccgtcattgcaattctcggctacttcctcggccacaggcacaaaggtcgagagtttcgccacgataacgttcactcgaagttcgcctcgccgatatccttcatgctcttcgtccagatcatattggggatctatctcaagctacatatcgaacggggaatattcggcaagatcaggaaggttatcaaggtcggccatggaattgtcggaaaggcattgcccatctttgcgtggactcagatggttttcggagggattactgctctgggattctgccaaggagaccacattggccaatgtcttgcgcacttcatcatgggaagtgcatttattgcctacggtatcctgttagctattctcctgctcataggtcaaatctggttgaggcgcactggccgctctcaggaattcttcgacagcgctgtcatcacagcctggggcgttgtcaacactttcaccgaacaccgatggggatccgcatgggtcaagaacgactggcaacacactaccatgggtattctatggtggtgcgctggtctagttggaatctggctcagcagggatcgtgacggtcgccctcagcgcaacttcatccccggtttcatcatcttcatcactggttgggcattcggcggccaccctcaagatctcatgattagcgccgaagtccacaagatgtacggctacacgctgatggctgttggtataacgcgtatcattgaagtcgctttcgtccttcgcgaccgacccagcatttcagctgatggcagggaaactcacagcttccaatacattcctatcttcctactcttcgcctccggcttcatgtttatgggcgcgaccgaggagcaaatggatctcatctccaactcaggaatcgaccacgtggcctatatccttattctctactcgttggccgctcttctgttcctcttcacacttatgctcatccacgtctacgactccaatgccactgctcctctcccgcacaagaatatggcatcctcaggccacgttccgttgcgcgacgcccaggaattcgagttggaagggttgatgagcgatgatgaggacgatggacctaggaaacatgctcaagatgatgacagcctgccgagtactgtaggaaggaataatgacggcatcgcacggtga

SEQ ID NO: 13326 - protein, 462 aa, Muscodor strobelii
  misc_feature: SGI Peptide ID NO. 564361
  misc_feature (39)..(461): NCBI GI: 116198481 Blast Desc: CHGG_07396 [Chaetomium globosum CBS 148.51] gi|88178675|gb|EAQ86143.1| CHGG_07396 [Chaetomium globosum CBS 148.51]
  misc_feature (19)..(458): NCBI GI: 256728718 Blast Desc: [Nectria haematococca mpVI 77-13-4]
  misc_feature (9)..(461): NCBI GI: 171692501 Blast Desc: protein product [Podospora anserina] gi|170946199|emb|CAP73000.1| protein product [Podospora anserina]
  misc_feature (14)..(437): NCBI GI: 85089959 Blast Desc: NCU07739 [Neurospora crassa OR74A] gi|28919525|gb|EAA28954.1| NCU07739 [Neurospora crassa OR74A]
  misc_feature (2)..(448): NCBI GI: 46110252 Blast Desc: FG02008.1 [Gibberella zeae PH-1]
  misc_feature (19)..(458): NCBI GI: 154316079 Blast Desc: BC1G_03624 [Botryotinia fuckeliana B05.10] gi|150846411|gb|EDN21604.1| BC1G_03624 [Botryotinia fuckeliana B05.10]
  misc_feature (17)..(462): NCBI GI: 261360489 Blast Desc: YTP1 [Verticillium albo-atrum VaMs.102]
  misc_feature (15)..(461): NCBI GI: 68164334 Blast Desc: YTP1 [Magnaporthe grisea]
  misc_feature (20)..(461): NCBI GI: 145615039 Blast Desc: MGG_05336 [Magnaporthe grisea 70-15] gi|145021963|gb|EDK05983.1| MGG_05336 [Magnaporthe grisea 70-15]
  misc_feature (19)..(458): NCBI GI: 156051274 Blast Desc: SS1G_07044 [Sclerotinia sclerotiorum 1980] gi|154704822|gb|EDO04561.1| SS1G_07044 [Sclerotinia sclerotiorum 1980]
MAPRSLFLLALAALPTALAHDHDSTNIADGDAISADPIDTILWIHIFLQMLAWGIIFPLGMVLGIVKNRWHVPLQVLGTVIAILGYFLGHRHKGREFRHDNVHSKFASPISFMLFVQIILGIYLKLHIERGIFGKIRKVIKVGHGIVGKALPIFAWTQMVFGGITALGFCQGDHIGQCLAHFIMGSAFIAYGILLAILLLIGQIWLRRTGRSQEFFDSAVITAWGVVNTFTEHRWGSAWVKNDWQHTTMGILWWCAGLVGIWLSRDRDGRPQRNFIPGFIIFITGWAFGGHPQDLMISAEVHKMYGYTLMAVGITRIIEVAFVLRDRPSISADGRETHSFQYIPIFLLFASGFMFMGATEEQMDLISNSGIDHVAYILILYSLAALLFLFTLMLIHVYDSNATAPLPHKNMASSGHVPLRDAQEFELEGLMSDDEDDGPRKHAQDDDSLPSTVGRNNDGIAR

SEQ ID NO: 13327 - DNA, 2086 bp, Muscodor strobelii
  misc_feature: SGI EST ID NO. CUFF.32058.0
  misc_feature: Variant of the nucleotide sequence at SEQ ID NO 13325
attcgacttgctgtaagattcggtctccgagagaattcggattctattatactttctcttctcttttcaattccgctgtgggatctgtagacgacctgcatgtattgattgcccaattgacaggcttatcgggctgtcagccaagcagtcaatacgtctgccgctggacccctcttctgtgcaactatccgattgccttagggattgcgacgctgttgccacaaggatcggcatttacttgtcgactccccgaccgtgttttcacattcgagactgccaaagcaaccatcgccaaccataccggctgtctatcacgggcagaacaacaactggaagacggtcgcaatggctcctagatcactgtttttgctggcgctggctgcgctgccaacggccctcgcccacgatcacgattctacgaacattgcggatggtgacgccatctctgccgacccgattgtacgtctatgcctcggctgcgaactgacgagtatatcgagacatttacaagcacagcaacagctaatgcattgccgcaggacacgatactatggatacacatctttctccagatgctagcatggggcatcatatttccattgggcatggtcctcggtatagttaagaatagatggcacgtccctctccaagtactcggcaccgtcattgcaattctcggctacttcctcggccacaggcacaaaggtcgagagtttcgccacgataacgttcactcgaagttcgcctcgccgatatccttcatgctcttcgtccagatcatattggggatctatctcaagctacatatcgaacggggaatattcggcaagatcaggaaggttatcaaggtcggccatggaattgtcggaaaggcattgcccatctttgcgtggactcagatggttttcggagggattactgctctgggattctgccaaggagaccacattggccaatgtcttgcgcacttcatcatgggaagtgcatttattgcctacggtatcctgttagctattctcctgctcataggtcaaatctggttgaggcgcactggccgctctcaggaattcttcgacagcgctgtcatcacagcctggggcgttgtcaacactttcaccgaacaccgatggggatccgcatgggtcaagaacgactggcaacacactaccatgggtattctatggtggtgcgctggtctagttggaatctggctcagcagggatcgtgacggtcgccctcagcgcaacttcatccccggtttcatcatcttcatcactggttgggcattcggcggccaccctcaagatctcatgattagcgccgaagtccacaagatgtacggctacacgctgatggctgttggtataacgcgtatcattgaagtcgctttcgtccttcgcgaccgacccagcatttcagctgatggcagggaaactcacagcttccaatacattcctatcttcctactcttcgcctccggcttcatgtttatgggcgcgaccgaggagcaaatggatctcatctccaactcaggaatcgaccacgtggcctatatccttattctctactcgttggccgctcttctgttcctcttcacacttatgctcatccacgtctacgactccaatgccactgctcctctcccgcacaagaatatggcatcctcaggccacgttccgttgcgcgacgcccaggaattcgagttggaagggttgatgagcgatgatgaggacgatggacctaggaaacatgctcaagatgatgacagcctgccgagtactgtaggaaggaataatgacggcatcgcacggtgagcaagtgagaggtagcagagaaagatcacgagaagcatgttggtcgaacactcaaaatagaaaacaatcaccaagatagaacttcaaccatggaaagttggaacttagcactgcatctaataagggcgttattcggggttggttatcaagtatgattacgtgttgatgttgtacgctgtcatggattcagagacttgggtaggaaacctacgaggatagctgagaagctcataattgaaacgaagttgaaactaagaacgttatacgccaag

SEQ ID NO: 13328 - DNA, 330 bp, Muscodor strobelii
  misc_feature: SGI cDNA ID NO. 564362
  misc_feature: Elevated expression when VOC is produced
  misc_feature: Encodes the peptide sequence at SEQ ID NO 13329
atgtttatgggcgcgaccgaggagcaaatggatctcatctccaactcaggaatcgaccacgtggcctatatccttattctctactcgttggccgctcttctgttcctcttcacacttatgctcatccacgtctacgactccaatgccactgctcctctcccgcacaagaatatggcatcctcaggccacgttccgttgcgcgacgcccaggaattcgagttggaagggttgatgagcgatgatgaggacgatggacctaggaaacatgctcaagatgatgacagcctgccgagtactgtaggaaggaataatgacggcatcgcacggtga

SEQ ID NO: 13329 - protein, 109 aa, Muscodor strobelii
  misc_feature: SGI Peptide ID NO. 564362
  misc_feature (1)..(108): NCBI GI: 116198481 Blast Desc: CHGG_07396 [Chaetomium globosum CBS 148.51] gi|88178675|gb|EAQ86143.1| CHGG_07396 [Chaetomium globosum CBS 148.51]
  misc_feature (1)..(104): NCBI GI: 256728718 Blast Desc: [Nectria haematococca mpVI 77-13-4]
  misc_feature (1)..(106): NCBI GI: 154316079 Blast Desc: BC1G_03624 [Botryotinia fuckeliana B05.10] gi|150846411|gb|EDN21604.1| BC1G_03624 [Botryotinia fuckeliana B05.10]
  misc_feature (1)..(106): NCBI GI: 156051274 Blast Desc: SS1G_07044 [Sclerotinia sclerotiorum 1980] gi|154704822|gb|EDO04561.1| SS1G_07044 [Sclerotinia sclerotiorum 1980]
  misc_feature (1)..(108): NCBI GI: 145615039 Blast Desc: MGG_05336 [Magnaporthe grisea 70-15] gi|145021963|gb|EDK05983.1| MGG_05336 [Magnaporthe grisea 70-15]
  misc_feature (1)..(108): NCBI GI: 145952252 Blast Desc: MTP1 [Magnaporthe grisea]
  misc_feature (1)..(108): NCBI GI: 68164334 Blast Desc: YTP1 [Magnaporthe grisea]
  misc_feature (1)..(108): NCBI GI: 171692501 Blast Desc: protein product [Podospora anserina] gi|170946199|emb|CAP73000.1| protein product [Podospora anserina]
  misc_feature (1)..(84): NCBI GI: 85089959 Blast Desc: NCU07739 [Neurospora crassa OR74A] gi|28919525|gb|EAA28954.1| NCU07739 [Neurospora crassa OR74A]
  misc_feature (1)..(99): NCBI GI: 261198543 Blast Desc: integral membrane protein [Ajellomyces dermatitidis SLH14081] gi|239594825|gb|EEQ77406.1| integral membrane protein [Ajellomyces dermatitidis SLH14081]
  misc_feature: Useful for introducing or modulating the production of volatile compounds
MFMGATEEQMDLISNSGIDHVAYILILYSLAALLFLFTLMLIHVYDSNATAPLPHKNMASSGHVPLRDAQEFELEGLMSDDEDDGPRKHAQDDDSLPSTVGRNNDGIAR

SEQ ID NO: 13330 - DNA, 2086 bp, Muscodor strobelii; identical to SEQ ID NO: 13327
  misc_feature: SGI EST ID NO. CUFF.32058.0
  misc_feature: Variant of the nucleotide sequence at SEQ ID NO 13328

SEQ ID NO: 13331 - DNA, 1692 bp, Muscodor strobelii
  misc_feature: SGI cDNA ID NO. 564363
  misc_feature: Reduced expression when VOC is produced
  misc_feature: Encodes the peptide sequence at SEQ ID NO 13332
atggccctgaagacaaatttctccctaccaatggagcccccatcaggccgatccagccgtcaaaaccaaagcgtacacttctcagactcgccatctctctcacccgcaacgacacttcacgatccggcggaagcctttcagaggttcgacataaatctccctatccgaactctctcagcaaatgccaacctcgctgaatacacaaccgaaacgaatgccggcgagatcccaggtcctatcgaaccagatggcgagaaacgctacagacttgtcacgttcacggtcgatgacccggagaacccgaagaattggagcaaggctttcaagtggtacatcacgatgattgtagcattgacttgtttcgtcgtcgccttcgcgagttcggttgtcacagcggatattaagggagttgtggaggagtttaatgtcagcgaagaggtggcgttgttgagtattacgctctttgttgttggctttggtattggaccgttggttttcgcgccgctttctgagatctacggaaggaaggttatttatgtttcgacgcttttcgttgccgtgatattcatcattcctggtgcggtcgcaaagaacattgcgacgcttctaggcatagctttttcagctccgatcacgattatcggcggaactttggcagattgctggaaggcggaggagcgcggtatccctatggctgcgttctcagctgcgccttttgtcggtcctgctatcggacccctagtcggcggttttctatcagacgctgctggatggcgctggctatactggatacaactgatactctcagtcatagtctgggttctgatcacttttactgtccctgagacgtatgctcctacaatcctagcgagacgagcaaagaagctgcgaaaagagacgggcgagagcgactgtgttacagaggaggacatcgataagagaccgattggggaacgcctgcgcatcttcctcatcatgccgctcaagctcttgttcggcgagcttattgtcctcctcatcgcactttatatgtctgtcttgtatgggctattgtatatgttcttcattgctttcccgattgtcttccaagaaggcaagggatggagtgctggactgactggattaacttttatccccctcgcgataggcgtcatctgctcagcaatctgctccccctggatcaacgaccactacaaaagaaagatcgctccatatgttgccgaagggcgtatgccgcccgctgagctccgcctaatccccatgatgggcgcttgctggtttatccccattggcatgatcatattcgcgtggacttcatatccacgcctgatttgggtcggcccggcacttgcaggctttcccgtcggattcggtttcatcttcatctacaacagcgcaaataactacctcgtcgacacttatcagcatcttgcagcgtctgcgttagcggcgaagacactcatcaggagtctatggggtgccgcagtggtgctattcacgacgcagatgtatcataggcttgggtatgagtgggctagtacgctgcttgcggggatcagtctgttatgctgtgcaatcccgttcttattttggcagtatggtgaaaggatccggaggaggagcaaatacgcatacgcgggcgatgatgagatcgtgaagaaaagtgtgccgaaggaggaagatcgggtttga

SEQ ID NO: 13332 - protein, 563 aa, Muscodor strobelii
  misc_feature: SGI Peptide ID NO. 564363
  misc_feature (116)..(497): Pfam Id: PF07690 Pfam Desc: Major Facilitator Superfamily
  misc_feature (30)..(547): NCBI GI: 39944294 Blast Desc: MGG_04158 [Magnaporthe grisea 70-15] gi|145014891|gb|EDJ99459.1| MGG_04158 [Magnaporthe grisea 70-15]
  misc_feature (48)..(550): NCBI GI: 256726793 Blast Desc: [Nectria haematococca mpVI 77-13-4]
  misc_feature (15)..(559): NCBI GI: 156039623 Blast Desc: SS1G_11948 [Sclerotinia sclerotiorum 1980] gi|154697685|gb|EDN97423.1| SS1G_11948 [Sclerotinia sclerotiorum 1980]
  misc_feature (12)..(554): NCBI GI: 46136363 Blast Desc: FG09697.1 [Gibberella zeae PH-1]
  misc_feature (16)..(550): NCBI GI: 154295116 Blast Desc: BC1G_13501 [Botryotinia fuckeliana B05.10] gi|150844184|gb|EDN19377.1| BC1G_13501 [Botryotinia fuckeliana B05.10]
  misc_feature (31)..(550): NCBI GI: 261353841 Blast Desc: polyamine transporter 2 [Verticillium albo-atrum VaMs.102]
  misc_feature (87)..(562): NCBI GI: 21214009 Blast Desc: multidrug resistant protein [Acremonium chrysogenum]
  misc_feature (65)..(562): NCBI GI: 171695798 Blast Desc: protein product [Podospora anserina] gi|170948141|emb|CAP60305.1| protein product [Podospora anserina]
  misc_feature (30)..(550): NCBI GI: 258571257 Blast Desc: UREG_03949 [Uncinocarpus reesii 1704] gi|237904702|gb|EEP79103.1| UREG_03949 [Uncinocarpus reesii 1704]
  misc_feature (52)..(562): NCBI GI: 240109455 Blast Desc: Major Facilitator Superfamily protein [Coccidioides posadasii C735 delta SOWgp]
  misc_feature: Useful for introducing or modulating the production of volatile compounds
MALKTNFSLPMEPPSGRSSRQNQSVHFSDSPSLSPATTLHDPAEAFQRFDINLPIRTLSANANLAEYTTETNAGEIPGPIEPDGEKRYRLVTFTVDDPENPKNWSKAFKWYITMIVALTCFVVAFASSVVTADIKGVVEEFNVSEEVALLSITLFVVGFGIGPLVFAPLSEIYGRKVIYVSTLFVAVIFIIPGAVAKNIATLLGIAFSAPITIIGGTLADCWKAEERGIPMAAFSAAPFVGPAIGPLVGGFLSDAAGWRWLYWIQLILSVIVWVLITFTVPETYAPTILARRAKKLRKETGESDCVTEEDIDKRPIGERLRIFLIMPLKLLFGELIVLLIALYMSVLYGLLYMFFIAFPIVFQEGKGWSAGLTGLTFIPLAIGVICSAICSPWINDHYKRKIAPYVAEGRMPPAELRLIPMMGACWFIPIGMIIFAWTSYPRLIWVGPALAGFPVGFGFIFIYNSANNYLVDTYQHLAASALAAKTLIRSLWGAAVVLFTTQMYHRLGYEWASTLLAGISLLCCAIPFLFWQYGERIRRRSKYAYAGDDEIVKKSVPKEEDRV

SEQ ID NO: 13333 - DNA, 2512 bp, Muscodor strobelii
  misc_feature: SGI EST ID NO. CUFF.32329.1
  misc_feature: Variant of the nucleotide sequence at SEQ ID NO 13331
gcacgtggcttggagactcttgcctgccgagtcatagccgagtacctgtcaatcactggacttaatactactatttctccctttgtccgaacaaacatggacattcccagccaagatcgaaacatgatctgcgagtcatactatcctggcttatagattttccacatggcctatttcttcagtctatccaagactcttaccggtttcagcatgaatctgcagattgtgacgatgaggctgcgaatcttcgtacctggaagtggggatgcaggaaggcgaacttgatacggccaataagagcgtatcttcgtgttctcatgataatcgtcgcgagaagggccttttctagtccccttaaatgaaaacatttcggcattatgtcgagatataaaagggggctgtctcctcttacgaggttagggccctccgatggtcgatgagttcacgatagacacatacgttcatcagtctcaactttatcatatcgacatggccctgaagacaaatttctccctaccaatggagcccccatcaggccgatccagccgtcaaaaccaaagcgtacacttctcagactcgccatctctctcacccgcaacgacacttcacgatccggcggaagcctttcagaggttcgacataaatctccctatccgaactctctcagcaaatgccaacctcgctgaatacacaaccgaaacgaatgccggcgagatcccaggtcctatcgaaccagatggcgagaaacgctacagacttgtcacgttcacggtcgatgacccggagaacccgaagaattggagcaaggctttcaagtggtacatcacgatgattgtagcattgacttgtttcgtcgtcgccttcgcgagttcggttgtcacagcggatattaagggagttgtggaggagtttaatgtcagcgaagaggtggcgttgttgagtattacgctctttgttgttggctttggtattggaccgttggttttcgcgccgctttctgagatctacggaaggaaggttatttatgtttcgacgcttttcgttgccgtgatattcatcattcctggtgcggtcgcaaagaacattgcgacgcttctagtggctcgagctatagatggcatgtataaacagatcccgcgagagttatttttttgacagtgcttctaagacatcgtgctaactttttgaagtgagtgatctgaactatcagatatcagaaaccagtcctttgtcttaaagccccaggccgtgccgcggaacttcgtgaaaaataactaacgcgacacctttctggctaccagggcatagctttttcagctccgatcacgattatcggcggaactttggcagattgctggaaggcggaggagcgcggtatccctatggctgcgttctcagctgcgccttttgtcggtcctgctatcggacccctagtcggcggttttctatcagacgctgctggatggcgctggctatactggatacaactgatactctcagtcatagtctgggttctgatcacttttactgtccctgagacgtatgctcctacaatcctagcgagacgagcaaagaagctgcgaaaagagacgggcgagagcgactgtgttacagaggaggacatcgataagagaccgattggggaacgcctgcgcatcttcctcatcatgccgctcaagctcttgttcggcgagcttattgtcctcctcatcgcactttatatgtctgtcttgtatgggctattgtatatgttcttcattgctttcccgattgtcttccaagaaggcaagggatggagtgctggactgactggattaacttttatccccctcgcgataggcgtcatctgctcagcaatctgctccccctggatcaacgaccactacaaaagaaagatcgctccatatgttgccgaagggcgtatgccgcccgctgagctccgcctaatccccatgatgggcgcttgctggtttatccccattggcatgatcatattcgcgtggacttcatatccacgcctgatttgggtcggcccggcacttgcaggctttcccgtcggattcggtttcatcttcatctacaacagcgcaaataactacctcgtcgacacttatcagcatcttgcagcgtctgcgttagcggcgaagacactcatcaggagtctatggggtgccgcagtggtgctattcacgacgcagatgtatcataggcttgggtatgagtgggctagtacgctgcttgcggggatcagtctgttatgctgtgcaatcccgttcttattttggcagtatggtgaaaggatccggaggaggagcaaatacgcatacgcgggcgatgatgagatcgtgaagaaaagtgtgccgaaggaggaagatcgggtttgagataagggatatgtgtgaaaatgacgatgaaatattgatgcccaatagacgatagatatagacgagctcctagtaaaggaatcattttaatattcaatacctcacaagcgattcaccttcagttcgca

SEQ ID NO: 13334 - DNA, 510 bp, Muscodor strobelii
  misc_feature: SGI cDNA ID NO. 564364
  misc_feature: Elevated expression when VOC is produced
  misc_feature: Encodes the peptide sequence at SEQ ID NO 13335
atggcttccgctaccactttctgggacttcacccccaaggacaagaagggcgccgacaagcctctgtccgagtacaagggcaaggtcgtcctcgttgtcaacactgcctccaagtgtggtttcactcctcagttcgctgatctcgagaagctgtacaaggacatcaccgcctctaaccctgaagatttcgtcatcctcggtttcccctgcaaccagttcgccagccaggaccctggcagcaacgacgagatccaggagttctgccaggtcaactacggtgtcaccttccccatcttcggcaaggtcgaggtcaacggcgacaagcctgagcctgtctacaactggcttaagaacgagcagcccggtctgctcggcatgaagcgtgtcaagtggaacttcgagaagttcttgattggccgtgacggcaaggtcaagggccgctgggcctctaccaccaagcctgccgctcttgagaagcccatcaaggagcagatcgccatcaaggcgtaa

SEQ ID NO: 13335 - protein, 169 aa, Muscodor strobelii
  misc_feature: SGI Peptide ID NO. 564364
  misc_feature (7)..(117): Pfam Id: PF00255 Pfam Desc: Glutathione peroxidase
  misc_feature (1)..(169): NCBI GI: 210063459 Blast Desc: glutathione peroxidase-like protein [Isaria tenuipes]
  misc_feature (1)..(165): NCBI GI: 259486219 Blast Desc: TPA: phospholipid hydroperoxide glutathione peroxidase (Eurofung) [Aspergillus nidulans FGSC A4]
  misc_feature (1)..(166): NCBI GI: 256731449 Blast Desc: [Nectria haematococca mpVI 77-13-4]
  misc_feature (1)..(165): NCBI GI: 145233143 Blast Desc: An02g08110 [Aspergillus niger] gi|134056870|emb|CAK37774.1| protein product [Aspergillus niger]
  misc_feature (1)..(165): NCBI GI: 145609259 Blast Desc: glutathione peroxidase family protein [Magnaporthe grisea 70-15] gi|145016647|gb|EDK01077.1| glutathione peroxidase family protein [Magnaporthe grisea 70-15]
  misc_feature (1)..(168): NCBI GI: 46123545 Blast Desc: FG06150.1 [Gibberella zeae PH-1]
  misc_feature (1)..(165): NCBI GI: 261351679 Blast Desc: peroxiredoxin HYR1 [Verticillium albo-atrum VaMs.102]
  misc_feature (1)..(165): NCBI GI: 67524777 Blast Desc: AN2846.2 [Aspergillus nidulans FGSC A4] gi|40744241|gb|EAA63417.1| AN2846.2 [Aspergillus nidulans FGSC A4]
  misc_feature (1)..(165): NCBI GI: 169614504 Blast Desc: SNOG_10397 [Phaeosphaeria nodorum SN15] gi|160702756|gb|EAT81791.2| SNOG_10397 [Phaeosphaeria nodorum SN15]
  misc_feature (1)..(165): NCBI GI: 189207683 Blast Desc: glutathione peroxidase 1 [Pyrenophora tritici-repentis Pt-1C-BFP] gi|187976268|gb|EDU42894.1| glutathione peroxidase 1 [Pyrenophora tritici-repentis Pt-1C-BFP]
  misc_feature (4)..(166): SWISSPROT Homolog: EC 1.11.1.9 Glutathione peroxidase
  misc_feature: Useful for introducing or modulating the production of volatile compounds
MASATTFWDFTPKDKKGADKPLSEYKGKVVLVVNTASKCGFTPQFADLEKLYKDITASNPEDFVILGFPCNQFASQDPGSNDEIQEFCQVNYGVTFPIFGKVEVNGDKPEPVYNWLKNEQPGLLGMKRVKWNFEKFLIGRDGKVKGRWASTTKPAALEKPIKEQIAIKA

SEQ ID NO: 13336 - DNA, 1229 bp, Muscodor strobelii
  misc_feature: SGI EST ID NO. CUFF.31905.0
  misc_feature: Variant of the nucleotide sequence at SEQ ID NO 13334
tgcgaactgtcccctgagaagcaaatggatagccgaataaggcgcccttcgcagcagagtccacttcgctcccgcttccgctcgatgctcctgcccctgtataagcattgatcgtgtcccatattccccatacgagtaatctacaccagctgtgcaggtgttacagacccctgctgacaggtattttttgtcatgagaaaaatattctgcgttgctaggagagctcctgtcctctgtcatcatcgtccaccgctcattataaaccccacctataagagactcattgcgactcagtcgtttagatctcaaacttcacctttcacaaccactccaaccgctgtcttcccaacttcttcttccatccgccaaactagatccaacgtcacaatggcttccgctaccactttctgggacttcacccccaaggacaagaagggcgccgacaagcctctgtccgagtacaagggcaaggtcgtcctcgttgtcaacactgcctccaagtgtggtttcactcctcagttcgctgatctcgagaagctgtacaaggacatcaccgcctctaaccctgaagatttcgtcatcctcggtttcccctgcaaccagttcgccagccaggaccctggcagcaacgacgagatccaggagttctgccaggtcaactacggtgtcaccttccccatcttcggcaaggtcgaggtcaacggcgacaagcctgagcctgtctacaactggcttaagaacgagcagcccggtctgctcggcatgaagcgtgtcaagtggaacttcgagaagttcttgattggccgtgacggcaaggtcaagggccgctgggcctctaccaccaagcctgccgctcttgagaagcccatcaaggagcagatcgccatcaaggcgtaagtcttcagcttgggttacgcttttctagatgatgcagggaacggagtttcaagagtttatgagcagagtctaatgactgcattgacgatacccctagggtggctaggatttaattgccgacgagaacgcaatcatgaccatgtcatgagaaccgtctaaaggctcataggatacctgtcacttgtttagatcaataccaatttgtttctcgtacaacattcattgctctcttgcaactcctgtgtgtgatttcgcatgtggttttgatcgagacgctcacggactcgaagtgacgggagttgccgctctaccagccctgcgctgaaggatca

SEQ ID NO: 13337 - DNA, 1452 bp, Muscodor strobelii
  misc_feature: SGI cDNA ID NO. 564365
  misc_feature: Elevated expression when VOC is produced
  misc_feature: Encodes the peptide sequence at SEQ ID NO 13338
atggactgccgccgcatgccccgtccgcgacatatcgtgatcgtaggaggaggtataatcggcacgaccacagcctactatctgacccgacatccgtccttcaatccgttgattcaccatatcaccattctcgaagccacttctatcgctgctgcagcttccggaaaagctggcggattgctggggctctgggcctaccccatgtgcattgttcccttgtcatatcgactacacgaagagctggcctccgagtatggcggcgccgagcgatggggataccggcgtgtggcatgcgggcagatcgctgccagagtgagaaacaaaggttcgaagcctagaacgaagacgaagtcggccaggtttaagtccagcaaggcaaagctagccaatcagcgaacgagctgcatgcccacgaccattaccacggtaccttcacaagaccaagcaaagaccgatgggacagaactgccaaactgtgttcccattttatcgccagatttacgagcacaggacgaagatggaaacctgcaacttcaacacgaagggaaagactggcacaagcttcctaaacaagatgaagcagcgacagcactgttgcaacaatcagttctgcccgtcgatctagattggttcgacagcgaattcatcgacaaatacgacgagatgggactaccgggctataccgagaccgcacaagtacatccgtatcagttcacaactgcaatggcagaactagcgcgattagctggcgtggaaattcgactcaatgcgaaggtgactaaaatcgaggtgagtcgcggcgctgtacgatctgtcgattactttgaccgaaatgcgggagacgcacgcacagttcttggcgttaccgacgtcgtggtcgcagccggaccgtggacaggacgaatactaccagagaccaaagtagaaggcttatgtgcgcatagtgtcgtcttcgaggccgacgtatcaccatatgcagtctttactaacatctctctacccgcgaactgggttccgccccatcgacaacgccgcgtacacaaaggcaatgtagaccctgaggtctatgcgcgacccgggggcgaggtttatgcgtgcggggaactgaaccacggcgttccgcttcccgacaccgcggatctggttatcgtagatgaggcggaatgcaatgatatggctgcgtacctcggtaccgtcagcaggatccttaaagctgcgcccatctctgctcgacaggcttgctatatgccacgtcatatgcggccgggccaggagagcacgcctctcgttgggggcacttccgtcgaaggcctttgggtcgcagcaggccacacgtgctggggcatccaaaatgggcctgctaccgggaagcttatgagcgagttcatcttcgatggcgtcgccacgagcgccaatgtggccgaattggatccgaaacagttcggaatctaa

SEQ ID NO: 13338 - protein, 483 aa, Muscodor strobelii
  misc_feature: SGI Peptide ID NO. 564365
  misc_feature (11)..(462): Pfam Id: PF01266 Pfam Desc: FAD dependent oxidoreductase
  misc_feature (227)..(462): Pfam Id: PF01266 Pfam Desc: FAD dependent oxidoreductase
  misc_feature (11)..(97): Pfam Id: PF01266 Pfam Desc: FAD dependent oxidoreductase
  misc_feature (237)..(296): Pfam Id: PF00070 Pfam Desc: Pyridine nucleotide-disulphide oxidoreductase
  misc_feature (23)..(483): NCBI GI: 116206272 Blast Desc: CHGG_02429 [Chaetomium globosum CBS 148.51] gi|88183026|gb|EAQ90494.1| CHGG_02429 [Chaetomium globosum CBS 148.51]
  misc_feature (23)..(483): NCBI GI: 85089366 Blast Desc: NCU09535 [Neurospora crassa OR74A] gi|28919199|gb|EAA28684.1| conserved [Neurospora crassa OR74A] gi|38566869|emb|CAE76175.1| conserved [Neurospora crassa]
  misc_feature (23)..(483): NCBI GI: 256731060 Blast Desc: [Nectria haematococca mpVI 77-13-4]
  misc_feature (8)..(481): NCBI GI: 171693451 Blast Desc: protein product [Podospora anserina] gi|170946674|emb|CAP73477.1| protein product [Podospora anserina]
  misc_feature (22)..(483): NCBI GI: 46123547 Blast Desc: FG06151.1 [Gibberella zeae PH-1]
  misc_feature (22)..(481): NCBI GI: 261351678 Blast Desc: oxidoreductase [Verticillium albo-atrum VaMs.102]
  misc_feature (17)..(481): NCBI GI: 226293263 Blast Desc: highly conserved oxidoreductase [Paracoccidioides brasiliensis Pb18]
  misc_feature (10)..(481): NCBI GI: 121703760 Blast Desc: FAD dependent oxidoreductase, [Aspergillus clavatus NRRL 1] gi|119398288|gb|EAW08718.1| FAD dependent oxidoreductase, [Aspergillus clavatus NRRL 1]
  misc_feature (8)..(480): NCBI GI: 154320103 Blast Desc: BC1G_02032 [Botryotinia fuckeliana B05.10] gi|150854771|gb|EDN29963.1| BC1G_02032 [Botryotinia fuckeliana B05.10]
  misc_feature (24)..(481): NCBI GI: 145250335 Blast Desc: An15g01410 [Aspergillus niger] gi|134082200|emb|CAL00955.1| protein product [Aspergillus niger]
  misc_feature: Useful for introducing or modulating the production of volatile compounds
MDCRRMPRPRHIVIVGGGIIGTTTAYYLTRHPSFNPLIHHITILEATSIAAAASGKAGGLLGLWAYPMCIVPLSYRLHEELASEYGGAERWGYRRVACGQIAARVRNKGSKPRTKTKSARFKSSKAKLANQRTSCMPTTITTVPSQDQAKTDGTELPNCVPILSPDLRAQDEDGNLQLQHEGKDWHKLPKQDEAATALLQQSVLPVDLDWFDSEFIDKYDEMGLPGYTETAQVHPYQFTTAMAELARLAGVEIRLNAKVTKIEVSRGAVRSVDYFDRNAGDARTVLGVTDVVVAAGPWTGRILPETKVEGLCAHSVVFEADVSPYAVFTNISLPANWVPPHRQRRVHKGNVDPEVYARPGGEVYACGELNHGVPLPDTADLVIVDEAECNDMAAYLGTVSRILKAAPISARQACYMPRHMRPGQESTPLVGGTSVEGLWVAAGHTCWGIQNGPATGKLMSEFIFDGVATSANVAELDPKQFGI

SEQ ID NO: 13339 - DNA, 3703 bp, Muscodor strobelii
  misc_feature: SGI EST ID NO. CUFF.32073.0
  misc_feature: Variant of the nucleotide sequence at SEQ ID NO 13337
cttggtgtgagtaagcagaagctgagctattgacgaagcctatcatatggaactcgcgcgccggcacgctaccgggctagcaattgacgccatcaaccatcctcgaatttcagagcgattgatatgaaatatgcagcacatccttgctttggctgttctcacggacattagcgcgggcatatcataggccactttgccctccagacctttgagacgcaatcatcatggggttcttttgttctttccctctgaaatccattgagctcatcagtggcacttatctgagagtctctcaatgacaatgtaaactggttgtcgattcgtgacgagttgactctcgttgtctctggttgctcaccttcattcttttcacctactgccatggtatcaaagccccctcaccccgcaacgcgtccacttgtatcacttgtgcaccggcatcttgcaaggatagaagtaccgacgactactgttacgtacgagtcgagtggccccttgttgccgctagaactgaacggccggtgttcctgcagcagtggccagtgctgcaaagccaaaagccgtccgattcgctctatctctcttatcgcctatactggtggggttgaatcctaagtgcaattcggccaaggagcttcgagaaactccagcgaattgttctgccggaatgtggcatgctgatgaatcgatggcgaattacggctgtacctggtcgcgaaacgcttcaacgcttcacacgacctgacaatggttcgatgctacgcatttgcagcttgatcacagcaattgcattgttcttctaaataatcagctaagcgcattgatttattgtagagctgatcggtttgctgcttgtccgccggggagcatgtgaagtaagcactcggatccgatagcgcgtcagttgttgagatacctttcgattcggccatgacgacgatgatgcgatggactgccgccgcatgccccgtccgcgacatatcgtgatcgtaggaggaggtataatcggcacgaccacagcctactatctgacccgacatccgtccttcaatccgttgattcaccatatcaccattctcgaagccacttctatcgctgctgcagcttccggaaaagctggcggattgctggggctctgggcctaccccatgtgcattgttcccttgtcatatcgactacacgaagagctggcctccgagtatggcggcgccgagcgatggggataccggcgtgtggcatgcgggcagatcgctgccagagtgagaaacaaaggttcgaagcctagaacgaagacgaagtcggccaggtttaagtccagcaaggcaaagctagccaatcagcgaacgagctgcatgcccacgaccattaccacggtaccttcacaagaccaagcaaagaccgatgggacagaactgccaaactgtgttcccattttatcgccagatttacgagcacaggacgaagatggaaacctgcaacttcaacacgaagggaaagactggcacaagcttcctaaacaagatgaagcagcgacagcactgttgcaacaatcagttctgcccgtcgatctagattggttcgacagcgaattcatcgacaaatacgacgagatgggactaccgggctataccgagaccgcacaagtacatccgtatcagttcacaactgcaatggcagaactagcgcgattagctggcgtggaaattcgactcaatgcgaaggtgactaaaatcgaggtgagtcgcggcgctgtacgatctgtcgattactttgaccgaaatgcgggagacgcacgcacagttcttggcgttaccgacgtcgtggtcgcagccggaccgtggacaggacgaatactaccagagaccaaagtagaaggcttatgtgcgcatagtgtcgtcttcgaggccgacgtatcaccatatgcagtctttactaacatctctctacccgcgaactgggttccgccccatcgacaacgccgcgtacacaaaggcaatgtagaccctgaggtctatgcgcgacccgggggcgaggtttatgcgtgcggggaactgaaccacggcgttccgcttcccgacaccgcggatctggttatcgtagatgaggcggaatgcaatgatatggctgcgtacctcggtaccgtcagcaggatccttaaagctgcgcccatctctgctcgacaggcttgctatatgccacgtcatatgcggccgggccaggagagcacgcctctcgttgggggcacttccgtcgaaggcctttgggtcgcagcaggccacacgtgctggggcatccaaaatgggcctgctaccgggaagcttatgagcgagttcatcttcgatggcgtcgccacgagcgccaatgtggccgaattggatccgaaacagttcggaatctaatttccttctgtacgtatatataatgaaagctcctcgtacacgcaagatatatatataattactacatgaattgaagacgcatgcgcgattgcggcaatgttttcacgatgaatatcgactggaccggctctgatagcaaatatagatccgaccatcacgatctgctcactctcataagaaatataatcgcgaagattgcagctacgataccaagctttgagttcgcgagacattttagtagtacatgcgcaacgctcaaactaacttccagacaccgtccttaatctcaatcttgatctccctatcctcatctatactcctccttccagcttcaagaattgcggtcgtggcaatcgtattattgatagttggcagacccctttcatccagcttatcaggcgtcaacgacccgctattgacacctctgcatccatcgacgaacttctcaaacgagatatatccatatccaagttgcccattgaagttaccctcctcatcaggcgcatacttcatgtagaagggattataccacatcaattgccctgccttgtcatctgcgacatcgtatccgcgctttgcctggttgatgcggacttcgccgccggacgccatatagtggaagtactggttagaatgaacaccagccttttgaggtgcagtccaagacgctgtgtagacacctgttgcaatcttgctcggatcatctttcttttgccatgtcaccatcacggtgattgtgtcttcagtggcatccacgcaccccagacccgttgcaataccctttgcagctgatgcagataccttcacaggcacgaatcccagctgcgtgaccatcgaatcgcaaatgtcgatgtggtggctattgaggtagtaggaaatatcagagtcgataccagcccaagctttgaacgtctcgagttgtgactttggctgggacatgtagctgtagaagtaattgaagtcaccgaggttcttggccttgtactttgcatcagcgtatgccgggtcatatcgcttgtggtgttcgatgtagacgtatacgccgctcttgcgagctgcttcaataagctgttggtggtgctccagcgtctttacggcgggcttggtgatcatgacgtggatctttcgctcgatagcgtagagagcaatggggaagtgtgtcgtgtctggtgtaaagattgtgatggcgtcgcctggcttcagggcatcgatggcggttttgtaggcatctgcatccttgacctcgttccctggaaaggagtcgaatgagcagtcaaggccgttgtagactttggagatgtttg

SEQ ID NO: 13340 - DNA, 1260 bp, Muscodor strobelii
  misc_feature: SGI cDNA ID NO. 564366
  misc_feature: Encodes the peptide sequence at SEQ ID NO 13341
atgccggaagctgaacctctcaacgtgttgatggtcggcacgggggagtataccacgggtttcgtgggcgggggagcttcaggatccgacaaaaaggtcggagtcgtagggttgacgctcttcgacctccggcggcgaggaaaggttggccgtttgagcatggctggcacgaatgggacgaaattccctgccatcagacagcatcttgacacaaacatctccaaagtctacaacggccttgactgctcattcgactcctttccagggaacgaggtcaaggatgcagatgcctacaaaaccgccatcgatgccctgaagccaggcgacgccatcacaatctttacaccagacacgacacacttccccattgctctctacgctatcgagcgaaagatccacgtcatgatcaccaagcccgccgtaaagacgctggagcaccaccaacagcttattgaagcagctcgcaagagcggcgtatacgtctacatcgaacaccacaagcgatatgacccggcatacgctgatgcaaagtacaaggccaagaacctcggtgacttcaattacttctacagctacatgtcccagccaaagtcacaactcgagacgttcaaagcttgggctggtatcgactctgatatttcctactacctcaatagccaccacatcgacatttgcgattcgatggtcacgcagctgggattcgtgcctgtgaaggtatctgcatcagctgcaaagggtattgcaacgggtctggggtgcgtggatgccactgaagacacaatcaccgtgatggtgacatggcaaaagaaagatgatccgagcaagattgcaacaggtgtctacacagcgtcttggactgcacctcaaaaggctggtgttcattctaaccagtacttccactatatggcgtccggcggcgaagtccgcatcaaccaggcaaagcgcggatacgatgtcgcagatgacaaggcagggcaattgatgtggtataatcccttctacatgaagtatgcgcctgatgaggagggtaacttcaatgggcaacttggatatggatatatctcgtttgagaagttcgtcgatggatgcagaggtgtcaatagcgggtcgttgacgcctgataagctggatgaaaggggtctgccaactatcaataatacgattgccacgaccgcaattcttgaagctggaaggaggagtatagatgaggatagggagatcaagattgagattaaggacggtgtctggaagttagtttga

SEQ ID NO: 13341 - protein, 419 aa, Muscodor strobelii
  misc_feature: SGI Peptide ID NO. 564366
  misc_feature (31)..(165): Pfam Id: PF01408 Pfam Desc: Oxidoreductase family, NAD-binding Rossmann fold
  misc_feature (109)..(165): Pfam Id: PF01408 Pfam Desc: Oxidoreductase family, NAD-binding Rossmann fold
  misc_feature (5)..(419): NCBI GI: 261351676 Blast Desc: D-galacturonic acid reductase [Verticillium albo-atrum VaMs.102]
  misc_feature (4)..(419): NCBI GI: 85089358 Blast Desc: NCU09533 [Neurospora crassa OR74A] gi|28919197|gb|EAA28682.1| NCU09533 [Neurospora crassa OR74A] gi|38566871|emb|CAE76177.1| conserved [Neurospora crassa]
  misc_feature (3)..(419): NCBI GI: 156065451 Blast Desc: SS1G_00736 [Sclerotinia sclerotiorum 1980] gi|154691595|gb|EDN91333.1| SS1G_00736 [Sclerotinia sclerotiorum 1980]
  misc_feature (7)..(419): NCBI GI: 116206268 Blast Desc: CHGG_02427 [Chaetomium globosum CBS 148.51] gi|88183024|gb|EAQ90492.1| CHGG_02427 [Chaetomium globosum CBS 148.51]
  misc_feature (12)..(419): NCBI GI: 171693457 Blast Desc: protein product [Podospora anserina] gi|170946677|emb|CAP73480.1| protein product [Podospora anserina]
  misc_feature (11)..(419): NCBI GI: 39972323 Blast Desc: conserved [Magnaporthe grisea 70-15] gi|145016650|gb|EDK01080.1| conserved [Magnaporthe grisea 70-15]
  misc_feature (4)..(419): NCBI GI: 148251214 Blast Desc: D-galacturonic acid reductase [Hypocrea jecorina]
  misc_feature (11)..(418): NCBI GI: 256731062 Blast Desc: [Nectria haematococca mpVI 77-13-4]
  misc_feature (11)..(418): NCBI GI: 46121503 Blast Desc: FG05130.1 [Gibberella zeae PH-1]
  misc_feature (6)..(418): NCBI GI: 189188024 Blast Desc: D-galacturonic acid reductase [Pyrenophora tritici-repentis Pt-1C-BFP] gi|187971957|gb|EDU39456.1| D-galacturonic acid reductase [Pyrenophora tritici-repentis
MPEAEPLNVLMVGTGEYTTGFVGGGASGSDKKVGVVGLTLFDLRRRGKVGRLSMAGTNGTKFPAIRQHLDTNISKVYNGLDCSFDSFPGNEVKDADAYKTAIDALKPGDAITIFTPDTTHFPIALYAIERKIHVMITKPAVKTLEHHQQLIEAARKSGVYVYIEHHKRYDPAYADAKYKAKNLGDFNYFYSYMSQPKSQLETFKAWAGIDSDISYYLNSHHIDICDSMVTQLGFVPVKVSASAAKGIATGLGCVDATEDTITVMVTWQKKDDPSKIATGVYTASWTAPQKAGVHSNQYFHYMASGGEVRINQAKRGYDVADDKAGQLMWYNPFYMKYAPDEEGNFNGQLGYGYISFEKFVDGCRGVNSGSLTPDKLDERGLPTINNTIATTAILEAGRRSIDEDREIKIEIKDGVWKLV

SEQ ID NO: 13342 - DNA, 4286 bp, Muscodor strobelii
  misc_feature: SGI EST ID NO. CUFF.32074.1
  misc_feature: Variant of the nucleotide sequence at SEQ ID NO 13340
tttcaccctggtagtagtaggcagtatacaagatgttagtgacatgacatgtgaagtgtgcgcgtgtcctgaatttctacttccttattttcatttcgtggaagaagcctttgtgtcgaaccggatcatcgtctacctaggcatcgcgtccgaggagttgcaacaaataagtcgcccaaaatgccggaagctgaacctctcaacgtgttgatggtaggcaatcccaattgcgccggtataaagctgcgaaaagtcggcacgggggagtataccacgggtttcgtgggcgggggagcttcaggatccgacaaaaaggtcggagtcgtagggttgacgctcttcgacctccggcggcgaggaaaggttggccgtttgagcatggctggcacgaatgggacgaaattccctgccatcagacagcatcttgacacaaacatctccaaagtctacaacggccttgactgctcattcgactcctttccagggaacgaggtcaaggatgcagatgcctacaaaaccgccatcgatgccctgaagccaggcgacgccatcacaatctttacaccagacacgacacacttccccattgctctctacgctatcgagcgaaagatccacgtcatgatcaccaagcccgccgtaaagacgctggagcaccaccaacagcttattgaagcagctcgcaagagcggcgtatacgtctacatcgaacaccacaagcgatatgacccggcatacgctgatgcaaagtacaaggccaagaacctcggtgacttcaattacttctacagctacatgtcccagccaaagtcacaactcgagacgttcaaagcttgggctggtatcgactctgatatttcctactacctcaatagccaccacatcgacatttgcgattcgatggtcacgcagctgggattcgtgcctgtgaaggtatctgcatcagctgcaaagggtattgcaacgggtctggggtgcgtggatgccactgaagacacaatcaccgtgatggtgacatggcaaaagaaagatgatccgagcaagattgcaacaggtgtctacacagcgtcttggactgcacctcaaaaggctggtgttcattctaaccagtacttccactatatggcgtccggcggcgaagtccgcatcaaccaggcaaagcgcggatacgatgtcgcagatgacaaggcagggcaattgatgtggtataatcccttctacatgaagtatgcgcctgatgaggagggtaacttcaatgggcaacttggatatggatatatctcgtttgagaagttcgtcgatggatgcagaggtgtcaatagcgggtcgttgacgcctgataagctggatgaaaggggtctgccaactatcaataatacgattgccacgaccgcaattcttgaagctggaaggaggagtatagatgaggatagggagatcaagattgagattaaggacggtgtctggaagttagtttgagcgttgcgcatgtactactaaaatgtctcgcgaactcaaagcttggtatcgtagctgcaatcttcgcgattatatttcttatgagagtgagcagatcgtgatggtcggatctatatttgctatcagagccggtccagtcgatattcatcgtgaaaacattgccgcaatcgcgcatgcgtcttcaattcatgtagtaattatatatatatcttgcgtgtacgaggagctttcattatatatacgtacagaaggaaattagattccgaactgtttcggatccaattcggccacattggcgctcgtggcgacgccatcgaagatgaactcgctcataagcttcccggtagcaggcccattttggatgccccagcacgtgtggcctgctgcgacccaaaggccttcgacggaagtgcccccaacgagaggcgtgctctcctggcccggccgcatatgacgtggcatatagcaagcctgtcgagcagagatgggcgcagctttaaggatcctgctgacggtaccgaggtacgcagccatatcattgcattccgcctcatctacgataaccagatccgcggtgtcgggaagcggaacgccgtggttcagttccccgcacgcataaacctcgcccccgggtcgcgcatagacctcagggtctacattgcctttgtgtacgcggcgttgtcgatggggcggaacccagttcgcgggtagagagatgttagtaaagactgcatatggtgatacgtcggcctcgaagacgacactatgcgcacataagccttctactttggtctctggtagtattcgtcctgtccacggtccggctgcgaccacgacgtcggtaacgccaagaactgtgcgtgcgtctcccgcatttcggtcaaagtaatcgacagatcgtacagcgccgcgactcacctcgattttagtcaccttcgcattgagtcgaatttccacgccagctaatcgcgctagttctgccattgcagttgtgaactgatacggatgtacttgtgcggtctcggtatagcccggtagtcccatctcgtcgtatttgtcgatgaattcgctgtcgaaccaatctagatcgacgggcagaactgattgttgcaacagtgctgtcgctgcttcatcttgtttaggaagcttgtgccagtctttcccttcgtgttgaagttgcaggtttccatcttcgtcctgtgctcgtaaatctggcgataaaatgggaacacagtttggcagttctgtcccatcggtctttgcttggtcttgtgaaggtaccgtggtaatggtcgtgggcatgcagctcgttcgctgattggctagctttgccttgctggacttaaacctggccgacttcgtcttcgttctaggcttcgaacctttgtttctcactctggcagcgatctgcccgcatgccacacgccggtatccccatcgctcggcgccgccatactcggaggccagctcttcgtgtagtcgatatgacaagggaacaatgcacatggggtaggcccagagccccagcaatccgccagcttttccggaagctgcagcagcgatagaagtggcttcgagaatggtgatatggtgaatcaacggattgaaggacggatgtcgggtcagatagtaggctgtggtcgtgccgattatacctcctcctgtgcgcaacaaagtccattgttagtggagatcgtaatatgcggttccattcgaacatgctaccctcggagcgaagaacacgcaaaagcacgaattggttccgatgacaccaagaagtctagatcatccaatggaattatgcagtgacatacctacgatcacgatatgtcgcggacggggcatgcggcggcagtccatcgcatcatcgtcgtcatggccgaatcgaaaggtatctcaacaactgacgcgctatcggatccgagtgcttacttcacatgctccccggcggacaagcagcaaaccgatcagctctacaataaatcaatgcgcttagctgattatttagaagaacaatgcaattgctgtgatcaagctgcaaatgcgtagcatcgaaccattgtcaggtcgtgtgaagcgttgaagcgtttcgcgaccaggtacagccgtaattcgccatcgattcatcagcatgccacattccggcagaacaattcgctggagtttctcgaagctccttggccgaattgcacttaggattcaaccccaccagtataggcgataagagagatagagcgaatcggacggcttttggctttgcagcactggccactgctgcaggaacaccggccgttcagttctagcggcaacaaggggccactcgactcgtacgtaacagtagtcgtcggtacttctatccttgcaagatgccggtgcacaagtgatacaagtggacgcgttgcggggtgagggggctttgataccatggcagtaggtgaaaagaatgaaggtgagcaaccagagacaacgagagtcaactcgtcacgaatcgacaaccagtttacattgtcattgagagactctcagataagtgccactgatgagctcaatggatttcagagggaaagaacaaaagaaccccatgatgattgcgtctcaaaggtctggagggcaaagtggcctatgatatgcccgcgctaatgtccgtgagaacagccaaagcaaggatgtgctgcatatttcatatcaatcgctctgaaattcgaggatggttgatggcgtcaattgctagcccggtagcgtgccggcgcgcgagttccatatgataggcttcgtcaatagctcagcttctgcttactcacaccaag

SEQ ID NO: 13343 - DNA, 957 bp, Muscodor strobelii
  misc_feature: SGI cDNA ID NO. 564367
  misc_feature: Encodes the peptide sequence at SEQ ID NO 13344
atggcgacgacaacgaaagggtctttgccatgcggcatctatgccccgactatgacatttttcgacccagaaactgaagaacttgacatccccacgataaagcaacatgccgagcgtcttgcccgagatggcctcgctggtctagtaactcttggctcaaatggagaagctgtacactgtacacgtgaggagaaaatggccatcacgcgcgcgacgcgcgaagcattagacgcagccggattcgcaagcacacctatcattgtgggtgcgacggagagcagcgtgaagggcaccgttgaactatgcaagatgtcggcagaggcaggtggtgatgcagtgctgctactccctcccgcatactataaagcccaggtggatgaggagatgattgaaggctacttcacagctgtcgcagatgagagcccgttgcctctagttctgtacaattatcctggtgctgttgcgggtgttgacatggactctgacctcctcatcaagctggcgcaacatccaaacattattggcaccaagtttacatgtggcaacacaggaaagcttacacgcgtagcatttgcagtggatgcaaagacgccgtcgcaagaaggcagtggatacatggcatttggcggtatttgcgactttacagtgcagacactcgcatcgggcggaagtggtattattgccggcggcgcgaatgtgttcccgaaagtctgcgtcaaggtctggaatctgtatgcggacggcaaaaaggaggaggctatcgcactgcagaagaagctctctcgcgcagattggtaccttacgaaacccgccatcgcaggcaccaagcaagccattcagagctatttcgggtatggaggataccctcgacggcctcttaaacggttagctgaggcaaaggtcgcggctgttgctgagggaattaaggaggttatggatattgagaagtctctataa

SEQ ID NO: 13344 - protein, 318 aa, Muscodor strobelii
  misc_feature: SGI Peptide ID NO. 564367
  misc_feature (9)..(312): Pfam Id: PF00701 Pfam Desc: Dihydrodipicolinate synthetase family
  misc_feature (99)..(189): Pfam Id: PF00701 Pfam Desc: Dihydrodipicolinate synthetase family
  misc_feature (9)..(318): NCBI GI: 85087566 Blast Desc: NCU09532 [Neurospora crassa OR74A] gi|28918976|gb|EAA28602.1| NCU09532 [Neurospora crassa OR74A] gi|38566872|emb|CAE76178.1| related to dihydrodipicolinate
  misc_feature (9)..(318): NCBI GI: 171693455 Blast Desc: protein product [Podospora anserina] gi|170946676|emb|CAP73479.1| protein product [Podospora anserina]
  misc_feature (8)..(318): NCBI GI: 144954318 Blast Desc: L-threo-3-deoxy-hexulosonate aldolase [Hypocrea jecorina] gi|148251213|gb|ABQ53584.1| 2-keto-3-deoxy-L-galactonate aldolase [Hypocrea jecorina]
  misc_feature (5)..(318): NCBI GI: 46121499 Blast Desc: FG05128.1 [Gibberella zeae PH-1]
  misc_feature (9)..(318): NCBI GI: 256731455 Blast Desc: [Nectria haematococca mpVI 77-13-4]
  misc_feature (9)..(318): NCBI GI: 156065455 Blast Desc: SS1G_00738 [Sclerotinia sclerotiorum 1980] gi|73665487|gb|AAZ79448.1| [Sclerotinia sclerotiorum] gi|154691597|gb|EDN91335.1| SS1G_00738 [Sclerotinia sclerotiorum
  misc_feature (9)..(318): NCBI GI: 169617117 Blast Desc: SNOG_11734 [Phaeosphaeria nodorum SN15] gi|111059658|gb|EAT80778.1| SNOG_11734 [Phaeosphaeria nodorum SN15]
  misc_feature (18)..(318): NCBI GI: 189188026 Blast Desc: dihydrodipicolinate synthase [Pyrenophora tritici-repentis Pt-1C-BFP] gi|187971958|gb|EDU39457.1| dihydrodipicolinate synthase [Pyrenophora tritici-repentis
  misc_feature (4)..(318): NCBI GI: 70999422 Blast Desc: dihydrodipicolinate synthetase family protein [Aspergillus fumigatus Af293] gi|66852067|gb|EAL92392.1| dihydrodipicolinate synthetase family protein [Aspergillus Af293]
  misc_feature (5)..(318): NCBI GI: 169770851 Blast Desc: [Aspergillus oryzae RIB40] gi|238486674|ref|XP_002374575.1| dihydrodipicolinate synthetase family protein [Aspergillus flavus NRRL3357] protein product
  misc_feature (28)..(301): SWISSPROT Homolog: EC 4.2.1.52 Dihydrodipicolinate synthase
MATTTKGSLPCGIYAPTMTFFDPETEELDIPTIKQHAERLARDGLAGLVTLGSNGEAVHCTREEKMAITRATREALDAAGFASTPIIVGATESSVKGTVELCKMSAEAGGDAVLLLPPAYYKAQVDEEMIEGYFTAVADESPLPLVLYNYPGAVAGVDMDSDLLIKLAQHPNIIGTKFTCGNTGKLTRVAFAVDAKTPSQEGSGYMAFGGICDFTVQTLASGGSGIIAGGANVFPKVCVKVWNLYADGKKEEAIALQKKLSRADWYLTKPAIAGTKQAIQSYFGYGGYPRRPLKRLAEAKVAAVAEGIKEVMDIEKSL

SEQ ID NO: 13345 - DNA, 417 bp, Muscodor strobelii
  misc_feature: SGI cDNA ID NO. 564368
  misc_feature: Elevated expression when VOC is produced
  misc_feature: Encodes the peptide sequence at SEQ ID NO 13346
atgaattggggtcaagctcatagccgagcgcatttcgcgatgcttacttgcctgctcaggaatagcaatggttgtgttcaggtccagcatgacgagccgagccgtaaacttaccgtactagttgatagatcaaagatcattagtgacggcaaaagagcactaggtgaaatgctgttaaggcttcacatgtatcggtgcacagcagatgtacaagcatgccgagaatactacgaggacctatctcacgtcgatgacgaaagacttcgatggagggagacggtcttggctaacaagcccccacctatgctcaatgtgcaagccaacacctttttgcgtagcgatggatctattgagttgaaagagtacgaaccgacttttgaaggcatcattgaaagctggtatgatcgcagagtttag

SEQ ID NO: 13346 - protein, 138 aa, Muscodor strobelii
  misc_feature: SGI Peptide ID NO. 564368
  misc_feature (2)..(138): Pfam Id: PF03571 Pfam Desc: Peptidase family M49
  misc_feature (3)..(138): NCBI GI: 145602280 Blast Desc: MGG_05041 [Magnaporthe grisea 70-15] gi|145010714|gb|EDJ95370.1| MGG_05041 [Magnaporthe grisea 70-15]
  misc_feature (7)..(138): NCBI GI: 171692745 Blast Desc: protein product [Podospora anserina] gi|170946321|emb|CAP73122.1| protein product [Podospora anserina]
  misc_feature (3)..(138): NCBI GI: 119479921 Blast Desc: dipeptidyl peptidase III [Neosartorya fischeri NRRL 181] gi|119408143|gb|EAW18092.1| dipeptidyl peptidase III [Neosartorya fischeri NRRL 181]
  misc_feature (2)..(138): NCBI GI: 115395826 Blast Desc: conserved [Aspergillus terreus NIH2624] gi|114193121|gb|EAU34821.1| conserved [Aspergillus terreus NIH2624]
  misc_feature (3)..(133): NCBI GI: 121709563 Blast Desc: ACLA_066650 [Aspergillus clavatus NRRL 1] gi|119400604|gb|EAW11029.1| ACLA_066650 [Aspergillus clavatus NRRL 1]
  misc_feature (2)..(136): NCBI GI: 159126327 Blast Desc: dipeptidyl peptidase III [Aspergillus fumigatus A1163]
  misc_feature (2)..(136): NCBI GI: 70998434 Blast Desc: dipeptidyl peptidase III [Aspergillus fumigatus Af293] gi|66851575|gb|EAL91901.1| dipeptidyl peptidase III [Aspergillus fumigatus Af293]
  misc_feature (3)..(136): NCBI GI: 195452502 Blast Desc: GK13184 [Drosophila willistoni] gi|194169466|gb|EDW84367.1| GK13184 [Drosophila willistoni]
  misc_feature (3)..(138): NCBI GI: 115385883 Blast Desc: [Aspergillus terreus NIH2624] gi|114187935|gb|EAU29635.1| [Aspergillus terreus NIH2624]
  misc_feature (31)..(138): NCBI GI: 145228847 Blast Desc: An01g02980 [Aspergillus niger] gi|134054824|emb|CAK43664.1| protein product [Aspergillus niger]
  misc_feature (3)..(136): SWISSPROT Homolog: EC 3.4.14.4 Dipeptidyl-peptidase III
  misc_feature: Useful for introducing or modulating the production of volatile compounds
MNWGQAHSRAHFAMLTCLLRNSNGCVQVQHDEPSRKLTVLVDRSKIISDGKRALGEMLLRLHMYRCTADVQACREYYEDLSHVDDERLRWRETVLANKPPPMLNVQANTFLRSDGSIELKEYEPTFEGIIESWYDRRV

SEQ ID NO: 13347 - DNA, 2998 bp, Muscodor strobelii
  misc_feature: SGI EST ID NO. CUFF.31908.0
  misc_feature: Variant of the nucleotide sequence at SEQ ID NO 13345
tcggaacgtgtgcaagaatttatcgcgagcagccgactatgctgctaacgagacgcagcaacgtttcctgcatgagtacatcgagagctttcaaactggtagtctcgaaagctatcgagattcgcaaagaacatggattagcgacaaggcacctaggattgaaaacatattcggattcgtcgagccctatagggatccaaacggtgtacgctcggagtttgaggcattggtagcgatcgccgatgcaaaagagacgagtctactaacaaagctggttgagaactcagacaagttcattcggaggctgccttggtcatcgactgagaacgatgggaaaggtccatttgagagttcgcgatttgacccgcctgatttttctagtatccatgctctcgcttattgttccagcatcatatttccggggatcaatctaccaaattacaacgatattcgccaagataccggcttcaaaagtgtgatcattgccaaccggatggcggtggaaagcataacgatgcaatggccctttattccaacagaagaaatggaaacttttcagaaacacaaacaccaggcatactattggtgggttgtatttcatgagctgctaggtcatggtacaggtaagatgatggtcgaacagtctgcggggaaattcaactttgatgttgccaaccctccgctcaatccacttgatgggaaaccgattcaatcttggtacaggctgggacaaacctggacaggccaatttgctgatctatctacgactgttgatgaatgccgttgcgagctcgttggggctttcttgatggacgatgtagagctccttgccttgtgcggtttcactgagcagacaggaattaaagcaagtgatctcacatataacctctatcagcaactcggcgttgatgggcttcgtggtttagccaatttcaatgttgaaaacatgaattggggtcaagctcatagccgagcgcatttcgcgatgcttacttgcctgctcaggaatagcaatggttgtgttcaggtccagcatgacgagccgagccgtaaacttaccgtactagttgatagatcaaagatcattagtgacggcaaaagagcactaggtgaaatgctgttaaggcttcacatgtatcggtgcacagcagatgtacaagcatgccgagaatactacgaggacctatctcacgtcgatgacgaaagacttcgatggagggagacggtcttggctaacaagcccccacctatgctcaatgtgcaagccaacacctttttgcgtagcgatggatctattgagttgaaagagtacgaaccgacttttgaaggcatcattgaaagctggtatgatcgcagagtttagctgatacgccgatatacgatagatgacagcccacgaggcagaggagagaagtgcgattggcgtcgcaatgcaataattatcttctaatcttcataccgatggaattcaaggactatttagattaatgcagagtcctattacgcacgtaaatatgtcttcgtgatctgaagcttggggtgcgataactatctggtgtgaatctcaagttacatcatatgttttgatcctcatttctggcatacaaaccatcactgcatcatagacacagtacaagatgaggccatatataataccagatttgtagatctatgtgttgctcatatgcaataaagtaatggctccatgcattctcagcccttcattaattttgcggcttctgaatattgaagaagatcgattccaattaaatgcaattatcatcatgtgtctctttccattatagagacttctcaatatccataacctccttaattccctcagcaacagccgcgacctttgcctcagctaaccgtttaagaggccgtcgagggtatcctccatacccgaaatagctctgaatggcttgcttggtgcctgcgatggcgggtttcgtaaggtaccaatctgcgcgagagagcttcttctgcagtgcgatagcctcctcctttttgccgtccgcatacagattccagaccttgacgcagactttcgggaacacattcgcgccgccggcaataataccacttccgcccgatgcgagtgtctgcactgtaaagtcgcaaataccgccaaatgccatgtatccactgccttcttgcgacggcgtctttgcatccactgcaaatgctacgcgtgtaagctttcctgtgttgccacatgtaaacttggtgccaataatgtttggatgttgcgccagcttgatgaggaggtcagagtccatgtcaacacccgcaacagcaccaggataattgtacagaactagaggcaacgggctctcatctgcgacagctgtgaagtagccttcaatcatctcctcatccacctgggctttatagtatgcgggagggagtagcagcactgcatcaccacctgcctctgccgacatcttgcatagttcaacggtgcccttcacgctgctctccgtcgcacccacaatgataggtgtgcttgcgaatccggctgcgtctaatgcttcgcgcgtcgcgcgcgtgatggccattttctcctcacgtgtacagtgtacagcttctccatttgagccaagagttactagaccagcgaggccatctcgggcaagacgctcggcatgttgctttatcgtggggatgtcaagttcttcagtttctgggtcgaaaaatgtcatagtcggggcatagatgccgcatggcaaagaccctttcgttgtcgtcgccatttttactttaagaggatcgaaatgtgtatgactatttttttcgtgagatgtagacaattaagaattaaggattacaacgcgcatgcacctatgaatgtagcagagttctagaaatttatcacactactacccccacggatatcgaaggtaaaatgctaggtgtccatttgcaatctacaacgcttctcatccccgatcatctcctcactccatgagccgttctgccatttagtgggccggca

SEQ ID NO: 13348 - DNA, 2040 bp, Muscodor strobelii
  misc_feature: SGI cDNA ID NO. 564369
  misc_feature: Elevated expression when VOC is produced
  misc_feature: Encodes the peptide sequence at SEQ ID NO 13349
atggccgaccaaattcagatttacaagttaggcgcagcctccctattcaatggcctatctaatcgagagaaatactatgcacaccacatggcaagggcagcgtggcatggtgcaaaaattatccttcaacaagtatcgcccgaatcgcctctaatcttcgatttcatcattggccttcatgaggtctgcaagggagactggcagcaattggctgttggtgatggggtgactcaggatgatattcgtgcatttcttaagtataccgctactttcctctcaaatgttgggaactattttggctctggagatcaaaagttcgtccctcaaatgagtcgagcggccctgaaggcgcttgcctcacgtactccacgtctcatgaagctttttgaacgtttcgaggatgacatcttctccatacctccacataatcttggatttccaagcgcttcatcgcaaagctcttattacatcggacatacgatatctcgagatgaaatcgtgcaggtcactaagattctagactcgcattccatcttccctgaaaacactaggatcgagaaaataggcactcgttcgtttagggttcttcaagcatctgcagacattgatgagcaagagaaactcatcagtgctcctgactcttcaattgaggtccgtctcgtgaaaggagatcatgccattagtcttcggaacgtgtgcaagaatttatcgcgagcagccgactatgctgctaacgagacgcagcaacgtttcctgcatgagtacatcgagagctttcaaactggtagtctcgaaagctatcgagattcgcaaagaacatggattagcgacaaggcacctaggattgaaaacatattcggattcgtcgagccctatagggatccaaacggtgtacgctcggagtttgaggcattggtagcgatcgccgatgcaaaagagacgagtctactaacaaagctggttgagaactcagacaagttcattcggaggctgccttggtcatcgactgagaacgatgggaaaggtccatttgagagttcgcgatttgacccgcctgatttttctagtatccatgattctttgtcaattgagtggcatgtaactaagcgatcgcagtacaacgatattcgccaagataccggcttcaaaagtgtgatcattgccaaccggatggcggtggaaagcataacgatgcaatggccctttattccaacagaagaaatggaaacttttcagaaacacaaacaccaggcatactattggtgggttgtatttcatgagctgctaggtcatggtacaggtaagatgatggtcgaacagtctgcggggaaattcaactttgatgttgccaaccctccgctcaatccacttgatgggaaaccgattcaatcttggtacaggctgggacaaacctggacaggccaatttgctgatctatctacgactgttgatgaatgccgttgcgagctcgttggggctttcttgatggacgatgtagagctccttgccttgtgcggtttcactgagcagacaggaattaaagcaagtgatctcacatataacctctatcagcaactcggcgttgatgggcttcgtggtttagccaatttcaatgttgaaaacatgaattggggtcaagctcatagccgagcgcatttcgcgatgcttacttgcctgctcaggaatagcaatggttgtgttcaggtccagcatgacgagccgagccgtaaacttaccgtactagttgatagatcaaagatcattagtgacggcaaaagagcactaggtgaaatgctgttaaggcttcacatgtatcggtgcacagcagatgtacaagcatgccgagaatactacgaggacctatctcacgtcgatgacgaaagacttcgatggagggagacggtcttggctaacaagcccccacctatgctcaatgtgcaagccaacacctttttgcgtagcgatggatctattgagttgaaagagtacgaaccgacttttgaaggcatcattgaaagctggtatgatcgcagagtttag

SEQ ID NO: 13349 - protein, 679 aa, Muscodor strobelii
  misc_feature: SGI Peptide ID NO. 564369
  misc_feature (126)..(679): Pfam Id: PF03571 Pfam Desc: Peptidase family M49
  misc_feature (373)..(679): Pfam Id: PF03571 Pfam Desc: Peptidase family M49
  misc_feature (126)..(356): Pfam Id: PF03571 Pfam Desc: Peptidase family M49
  misc_feature (6)..(679): NCBI GI: 119479921 Blast Desc: dipeptidyl peptidase III [Neosartorya fischeri NRRL 181] gi|119408143|gb|EAW18092.1| dipeptidyl peptidase III [Neosartorya fischeri NRRL 181]
  misc_feature (6)..(677): NCBI GI: 70998434 Blast Desc: dipeptidyl peptidase III [Aspergillus fumigatus Af293] gi|66851575|gb|EAL91901.1| dipeptidyl peptidase III [Aspergillus fumigatus Af293]
  misc_feature (6)..(677): NCBI GI: 159126327 Blast Desc: dipeptidyl peptidase III [Aspergillus fumigatus A1163]
  misc_feature (7)..(677): NCBI GI: 169607313 Blast Desc: SNOG_06713 [Phaeosphaeria nodorum SN15] gi|111064244|gb|EAT85364.1| SNOG_06713 [Phaeosphaeria nodorum SN15]
  misc_feature (1)..(677): NCBI GI: 256734453 Blast Desc: [Nectria haematococca mpVI 77-13-4]
  misc_feature (16)..(677): NCBI GI: 46108270 Blast Desc: FG01017.1 [Gibberella zeae PH-1]
  misc_feature (16)..(679): NCBI GI: 240279963 Blast Desc: dipeptidyl peptidase [Ajellomyces capsulatus H143]
  misc_feature (21)..(679): NCBI GI: 238838788 Blast Desc: dipeptidyl-peptidase 3 [Microsporum canis CBS 113480]
  misc_feature (16)..(679): NCBI GI: 225560409 Blast Desc: dipeptidyl peptidase III [Ajellomyces capsulatus G186AR]
  misc_feature (7)..(679): NCBI GI: 70994866 Blast Desc: dipeptidyl peptidase [Aspergillus fumigatus Af293] gi|66849844|gb|EAL90172.1| dipeptidyl peptidase, [Aspergillus fumigatus Af293] gi|159124877|gb|EDP49994.1| dipeptidyl fumigatus
  misc_feature (7)..(677): SWISSPROT Homolog: EC 3.4.14.4 Dipeptidyl-peptidase III
  misc_feature: Useful for introducing or modulating the production of volatile compounds
MADQIQIYKLGAASLFNGLSNREKYYAHHMARAAWHGAKIILQQVSPESPLIFDFIIGLHEVCKGDWQQLAVGDGVTQDDIRAFLKYTATFLSNVGNYFGSGDQKFVPQMSRAALKALASRTPRLMKLFERFEDDIFSIPPHNLGFPSASSQSSYYIGHTISRDEIVQVTKILDSHSIFPENTRIEKIGTRSFRVLQASADIDEQEKLISAPDSSIEVRLVKGDHAISLRNVCKNLSRAADYAANETQQRFLHEYIESFQTGSLESYRDSQRTWISDKAPRIENIFGFVEPYRDPNGVRSEFEALVAIADAKETSLLTKLVENSDKFIRRLPWSSTENDGKGPFESSRFDPPDFSSIHDSLSIEWHVTKRSQYNDIRQDTGFKSVIIANRMAVESITMQWPFIPTEEMETFQKHKHQAYYWWVVFHELLGHGTGKMMVEQSAGKFNFDVANPPLNPLDGKPIQSWYRLGQTWTGQFADLSTTVDECRCELVGAFLMDDVELLALCGFTEQTGIKASDLTYNLYQQLGVDGLRGLANFNVENMNWGQAHSRAHFAMLTCLLRNSNGCVQVQHDEPSRKLTVLVDRSKIISDGKRALGEMLLRLHMYRCTADVQACREYYEDLSHVDDERLRWRETVLANKPPPMLNVQANTFLRSDGSIELKEYEPTFEGIIESWYDRRV

SEQ ID NO: 13350 - DNA, 2998 bp, Muscodor strobelii; identical to SEQ ID NO: 13347
  misc_feature: SGI EST ID NO. CUFF.31908.0
  misc_feature: Variant of the nucleotide sequence at SEQ ID NO 13348

SEQ ID NO: 13351 - DNA, 1596 bp, Muscodor strobelii
  misc_feature: SGI cDNA ID NO. 564370
  misc_feature: Encodes the peptide sequence at SEQ ID NO 13352
atggccgaccaaattcagatttacaagttaggcgcagcctccctattcaatggcctatctaatcgagagaaatactatgcacaccacatggcaagggcagcgtggcatggtgcaaaaattatccttcaacaagtatcgcccgaatcgcctctaatcttcgatttcatcattggccttcatgaggtctgcaagggagactggcagcaattggctgttggtgatggggtgactcaggatgatattcgtgcatttcttaagtataccgctactttcctctcaaatgttgggaactattttggctctggagatcaaaagttcgtccctcaaatgagtcgagcggccctgaaggcgcttgcctcacgtactccacgtctcatgaagctttttgaacgtttcgaggatgacatcttctccatacctccacataatcttggatttccaagcgcttcatcgcaaagctcttattacatcggacatacgatatctcgagatgaaatcgtgcaggtcactaagattctagactcgcattccatcttccctgaaaacactaggatcgagaaaataggcactcgttcgtttagggttcttcaagcatctgcagacattgatgagcaagagaaactcatcagtgctcctgactcttcaattgaggtccgtctcgtgaaaggagatcatgccattagtcttcggaacgtgtgcaagaatttatcgcgagcagccgactatgctgctaacgagacgcagcaacgtttcctgcatgagtacatcgagagctttcaaactggtagtctcgaaagctatcgagattcgcaaagaacatggattagcgacaaggcacctaggattgaaaacatattcggattcgtcgagccctatagggatccaaacggtgtacgctcggagtttgaggcattggtagcgatcgccgatgcaaaagagacgagtctactaacaaagctggttgagaactcagacaagttcattcggaggctgccttggtcatcgactgagaacgatgggaaaggtccatttgagagttcgcgatttgacccgcctgatttttctagtatccatgattctttgtcaattgagtggcatgtaactaagcgatcgcagtacaacgatattcgccaagataccggcttcaaaagtgtgatcattgccaaccggatggcggtggaaagcataacgatgcaatggccctttattccaacagaagaaatggaaacttttcagaaacacaaacaccaggcatactattggtgggttgtatttcatgagctgctaggtcatggtacaggtaagatgatggtcgaacagtctgcggggaaattcaactttgatgttgccaaccctccgctcaatccacttgatgggaaaccgattcaatcttggtacaggctgggacaaacctggacaggccaatttgctgatctatctacgactgttgatgaatgccgttgcgagctcgttggggctttcttgatggacgatgtagagctccttgccttgtgcggtttcactgagcagacaggaattaaagcaagtgatcgtaagtggcgctattccatgctctggcacaatactgactcctaa

SEQ ID NO: 13352 - protein, 531 aa, Muscodor strobelii
  misc_feature: SGI Peptide ID NO. 564370
  misc_feature (126)..(531): Pfam Id: PF03571 Pfam Desc: Peptidase family M49
  misc_feature (126)..(356): Pfam Id: PF03571 Pfam Desc: Peptidase family M49
  misc_feature (373)..(495): Pfam Id: PF03571 Pfam Desc: Peptidase family M49
  misc_feature (6)..(517): NCBI GI: 119479921 Blast Desc: dipeptidyl peptidase III [Neosartorya fischeri NRRL 181] gi|119408143|gb|EAW18092.1| dipeptidyl peptidase III [Neosartorya fischeri NRRL 181]
  misc_feature (6)..(517): NCBI GI: 70998434 Blast Desc: dipeptidyl peptidase III [Aspergillus fumigatus Af293] gi|66851575|gb|EAL91901.1| dipeptidyl peptidase III [Aspergillus fumigatus Af293]
  misc_feature (6)..(517): NCBI GI: 159126327 Blast Desc: dipeptidyl peptidase III [Aspergillus fumigatus A1163]
  misc_feature (7)..(511): NCBI GI: 169607313 Blast Desc: SNOG_06713 [Phaeosphaeria nodorum SN15] gi|111064244|gb|EAT85364.1| SNOG_06713 [Phaeosphaeria nodorum SN15]
  misc_feature (3)..(520): NCBI GI: 115401222 Blast Desc: [Aspergillus terreus NIH2624] gi|114190140|gb|EAU31840.1| [Aspergillus terreus NIH2624]
  misc_feature (16)..(507): NCBI GI: 189189024 Blast Desc: dipeptidyl-peptidase 3 [Pyrenophora tritici-repentis Pt-1C-BFP] gi|187972457|gb|EDU39956.1| dipeptidyl-peptidase 3 [Pyrenophora tritici-repentis Pt-1C-BFP]
  misc_feature (16)..(507): NCBI GI: 154270505 Blast Desc: HCAG_08942 [Ajellomyces capsulatus NAm1] gi|150409911|gb|EDN05299.1| HCAG_08942 [Ajellomyces capsulatus NAm1]
  misc_feature (7)..(507): NCBI GI: 240279963 Blast Desc: dipeptidyl peptidase [Ajellomyces capsulatus H143]
  misc_feature (7)..(507): NCBI GI: 225560409 Blast Desc: dipeptidyl peptidase III [Ajellomyces capsulatus G186AR]
  misc_feature (21)..(507): NCBI GI: 238838788 Blast Desc: dipeptidyl-peptidase 3 [Microsporum canis CBS 113480]
  misc_feature (16)..(507): SWISSPROT Homolog: EC 3.4.14.4 Dipeptidyl-peptidase III
MADQIQIYKLGAASLFNGLSNREKYYAHHMARAAWHGAKIILQQVSPESPLIFDFIIGLHEVCKGDWQQLAVGDGVTQDDIRAFLKYTATFLSNVGNYFGSGDQKFVPQMSRAALKALASRTPRLMKLFERFEDDIFSIPPHNLGFPSASSQSSYYIGHTISRDEIVQVTKILDSHSIFPENTRIEKIGTRSFRVLQASADIDEQEKLISAPDSSIEVRLVKGDHAISLRNVCKNLSRAADYAANETQQRFLHEYIESFQTGSLESYRDSQRTWISDKAPRIENIFGFVEPYRDPNGVRSEFEALVAIADAKETSLLTKLVENSDKFIRRLPWSSTENDGKGPFESSRFDPPDFSSIHDSLSIEWHVTKRSQYNDIRQDTGFKSVIIANRMAVESITMQWPFIPTEEMETFQKHKHQAYYWWVVFHELLGHGTGKMMVEQSAGKFNFDVANPPLNPLDGKPIQSWYRLGQTWTGQFADLSTTVDECRCELVGAFLMDDVELLALCGFTEQTGIKASDRKWRYSMLWHNTDS

SEQ ID NO: 13353 - DNA, 2998 bp, Muscodor strobelii; identical to SEQ ID NO: 13347
  misc_feature: SGI EST ID NO. CUFF.31908.0
  misc_feature: Variant of the nucleotide sequence at SEQ ID NO 13351

SEQ ID NO: 13354 - DNA, 1374 bp, Muscodor strobelii
  misc_feature: SGI cDNA ID NO. 564371
  misc_feature: Encodes the peptide sequence at SEQ ID NO 13355
atgcatttgttacagatcgctacgagcttcgtggcccttctgggcgctggacctgtgggtgcggcaatcacccctttgcctctgcctgctagttgcactggggtatctgcaatccgatttccagggacactcgcgtcaggatggtctgttgtgaagattgttggagggttaaagcaagtccgaacggtgatctgggataccaatggcaatatgttggtctctgaagcaacgaagggcatctccgtgcatacctttgggacgaatggctgtgtcaacagctcaacgactctaattgccaatacacaactcaatcacggtcttgcccttaccccagatgggacaactctttacgcaagcggcgaacgaactgtttattcatggacttacaatcctgacacgagaaccgtgactaatcaaaagactgccatctccggaattgacagtggtatccactcgacgagaaatctgctggtcgttaaatcgcaacccaatatgttgcttgtgcaagttggttcgaatgccaacctggatacagcatctggacaaccagctactgggcgcgctatcatcaaaattttcgacatgagcaaagcgccaacaaccggatatgtattcaaaacttctggtgaagtcttcgcctacggcctgaggaacgaaatcggctttgttcaagatccaaatggtattgtctggggcgttgagaatagcggtgatgacttcactgtgagcggctcagacatccaccagaacaacccagcggagaaactcaataattgtgagtcaccacaatctctctctgctaatatgcatagttcgatgcgactaacacgagaaatagtgggagatccgctcaccgctcgcaacgtctggtatgggtatccaaactgcttcgctgtctgggaccccgcaccattcgccagcaaaggtcttaagactggtagtcaattcttgtatgcatccggaaatggagcgactagtgatgcagattgcgccagcaagaccactgctccacgcctgaccttcatggcccacagcgcaccaatctggaacactttcgacaccaatgcgacgaacatgtatgtgaccttccacggttcgtgggatcgccaacctcctacgggcttcaaagtcgttcaagttccatttacgaaacttgataccggtgcctatgatccagtagctccagcgacaagccaaaccggttacacggatatctactcggcaccaaaccctggcggttgcacagccaacggtctgacacagagtaactgtgttcgattcaccgctgctgcttgggatccggctggccgtggcttgttcattggcagcgacaacagcgccgagggtgaaatattcttgctgtcgaagaaatag

SEQ ID NO: 13355 - protein, 457 aa, Muscodor strobelii
  misc_feature: SGI Peptide ID NO. 564371
  misc_feature (21)..(455): NCBI GI: 116200510 Blast Desc: CHGG_10800 [Chaetomium globosum CBS 148.51] gi|88175514|gb|EAQ82982.1| CHGG_10800 [Chaetomium globosum CBS 148.51]
  misc_feature (21)..(455): NCBI GI: 171676354 Blast Desc: protein product [Podospora anserina] gi|170936243|emb|CAP60902.1| protein product [Podospora anserina]
  misc_feature (19)..(360): NCBI GI: 164423905 Blast Desc: NCU07811 [Neurospora crassa OR74A] gi|157070280|gb|EAA28613.2| [Neurospora crassa OR74A]
  misc_feature (25)..(456): NCBI GI: 189203559 Blast Desc: conserved [Pyrenophora tritici-repentis Pt-1C-BFP] gi|187985214|gb|EDU50702.1| conserved [Pyrenophora tritici-repentis Pt-1C-BFP]
  misc_feature (71)..(456): NCBI GI: 169602517 Blast Desc: SNOG_04262 [Phaeosphaeria nodorum SN15] gi|160706189|gb|EAT88022.2| SNOG_04262 [Phaeosphaeria nodorum SN15]
  misc_feature (28)..(426): NCBI GI: 169604130 Blast Desc: SNOG_05075 [Phaeosphaeria nodorum SN15] gi|111066346|gb|EAT87466.1| SNOG_05075 [Phaeosphaeria nodorum SN15]
  misc_feature (31)..(456): NCBI GI: 169862695 Blast Desc: CC1G_09524 [Coprinopsis cinerea okayama7#130] gi|116500960|gb|EAU83855.1| CC1G_09524 [Coprinopsis cinerea okayama7#130]
  misc_feature (31)..(456): NCBI GI: 169862697 Blast Desc: CC1G_09525 [Coprinopsis cinerea okayama7#130] gi|116500961|gb|EAU83856.1| CC1G_09525 [Coprinopsis cinerea okayama7#130]
  misc_feature (31)..(454): NCBI GI: 169862645 Blast Desc: CC1G_09499 [Coprinopsis cinerea okayama7#130] gi|116500935|gb|EAU83830.1| CC1G_09499 [Coprinopsis cinerea okayama7#130]
  misc_feature (21)..(454): NCBI GI: 171676585 Blast Desc: protein product [Podospora anserina] gi|170936359|emb|CAP61017.1| protein product [Podospora anserina]
MHLLQIATSFVALLGAGPVGAAITPLPLPASCTGVSAIRFPGTLASGWSVVKIVGGLKQVRTVIWDTNGNMLVSEATKGISVHTFGTNGCVNSSTTLIANTQLNHGLALTPDGTTLYASGERTVYSWTYNPDTRTVTNQKTAISGIDSGIHSTRNLLVVKSQPNMLLVQVGSNANLDTASGQPATGRAIIKIFDMSKAPTTGYVFKTSGEVFAYGLRNEIGFVQDPNGIVWGVENSGDDFTVSGSDIHQNNPAEKLNNCESPQSLSANMHSSMRLTREIVGDPLTARNVWYGYPNCFAVWDPAPFASKGLKTGSQFLYASGNGATSDADCASKTTAPRLTFMAHSAPIWNTFDTNATNMYVTFHGSWDRQPPTGFKVVQVPFTKLDTGAYDPVAPATSQTGYTDIYSAPNPGGCTANGLTQSNCVRFTAAAWDPAGRGLFIGSDNSAEGEIFLLSKK

SEQ ID NO: 13356 - DNA, 1008 bp, Muscodor strobelii
  misc_feature: SGI cDNA ID NO. 564373
  misc_feature: Encodes the peptide sequence at SEQ ID NO 13357
atgacttccagatatctctccatcggcctgttggtttcgttattgacaggcagggctctgactcagagctccgaacaacatccctcattaccaacatggaaatgtacgacgtccggaggatgcgtgcagcagaacaccagcgtcgtgctggacaaggactcgaaatacgctcaaggagctgcgggctctcgatctgcggctgactacgctgccatgggagtctctacgtcaggcgacgcggtgactctgttccactacgtccgaacaggtggcacgctgaatccggcatccccacggatctacctcctcgacgccgacggtaagtacgtcatgatgaacctcctgaaccaggagttgtctgtcgacgtcgactattcggcgactccttgtggcgagaacggggctttctacctctccgagatgaaggccgacggcggaggctcctcgggaggcgcggcggcgggacagggatattgtgatgcccagtgtcagggttactgctgcaacgagatggacatccttgaggccaatgcacgcgccacggccatgacaccgcatccgtgcgccggtgataattgcgataagagtggctgcgggtataacccctatgcgagcggccagcgcaacctctgggctacaagcggcaccgtcaataccaatcagcccttcaccgtcgtgacgcagtttgtgggcagcggttccttgacgcagatcaagcgtatttacatacagaatggaaagcagactgatggggggtcaatatcaagctgtaatgatgggcagggaggtcttgcgggtatgggtcaggctctgggccgagggatggtactggcaatgagcatctggaacgacgctgctcagcaaatgtcgtggcttgacgccggaaacaacggaccgtgcacgacgggagaaagcactcctgggtctattcagtctaatcatcctgacacgcacgtcatcttttcgaatatccgatggggcgatattgggtctactacgaagggataa

SEQ ID NO: 13357 - protein, 335 aa, Muscodor strobelii
  misc_feature: SGI Peptide ID NO. 564373
  misc_feature (18)..(335): Pfam Id: PF00840 Pfam Desc: Glycosyl hydrolase family 7
  misc_feature (262)..(335): Pfam Id: PF00840 Pfam Desc: Glycosyl hydrolase family 7
  misc_feature (66)..(163): Pfam Id: PF00840 Pfam Desc: Glycosyl hydrolase family 7
  misc_feature (165)..(247): Pfam Id: PF00840 Pfam Desc: Glycosyl hydrolase family 7
  misc_feature (18)..(51): Pfam Id: PF00840 Pfam Desc: Glycosyl hydrolase family 7
  misc_feature (25)..(334): NCBI GI: 116208318 Blast Desc: CHGG_03452 [Chaetomium globosum CBS 148.51] gi|88184049|gb|EAQ91517.1| CHGG_03452 [Chaetomium globosum CBS 148.51]
  misc_feature (27)..(332): NCBI GI: 121704228 Blast Desc: endoglucanase, [Aspergillus clavatus NRRL 1] gi|119398522|gb|EAW08952.1| endoglucanase, [Aspergillus clavatus NRRL 1]
  misc_feature (11)..(335): NCBI GI: 119467101 Blast Desc: endoglucanase, [Neosartorya fischeri NRRL 181] gi|119405509|gb|EAW15460.1| endoglucanase, [Neosartorya fischeri NRRL 181]
  misc_feature (27)..(332): NCBI GI: 239909307 Blast Desc: endoglucanase I [Penicillium oxalicum]
  misc_feature (27)..(332): NCBI GI: 211998851 Blast Desc: endoglucanase I [Penicillium decumbens]
  misc_feature (27)..(332): NCBI GI: 164451746 Blast Desc: endoglucanase I [Penicillium decumbens]
  misc_feature (11)..(335): NCBI GI: 70984781 Blast Desc: endoglucanase [Aspergillus fumigatus Af293] gi|66845524|gb|EAL85859.1| endoglucanase, [Aspergillus fumigatus Af293]
  misc_feature (1)..(332): NCBI GI: 115402429 Blast Desc: endoglucanase EG-1 precursor [Aspergillus terreus NIH2624] gi|114189137|gb|EAU30837.1| endoglucanase EG-1 precursor [Aspergillus terreus NIH2624]
  misc_feature (11)..(335): NCBI GI: 159122681 Blast Desc: endoglucanase, [Aspergillus fumigatus A1163]
  misc_feature (23)..(332): NCBI GI: 121709349 Blast Desc: endo-1,4-beta-glucanase [Aspergillus clavatus NRRL 1] gi|119400542|gb|EAW10967.1| endo-1,4-beta-glucanase [Aspergillus clavatus NRRL 1]
  misc_feature (1)..(331): SWISSPROT Homolog: EC 3.2.1.4 Cellulase
MTSRYLSIGLLVSLLTGRALTQSSEQHPSLPTWKCTTSGGCVQQNTSVVLDKDSKYAQGAAGSRSAADYAAMGVSTSGDAVTLFHYVRTGGTLNPASPRIYLLDADGKYVMMNLLNQELSVDVDYSATPCGENGAFYLSEMKADGGGSSGGAAAGQGYCDAQCQGYCCNEMDILEANARATAMTPHPCAGDNCDKSGCGYNPYASGQRNLWATSGTVNTNQPFTVVTQFVGSGSLTQIKRIYIQNGKQTDGGSISSCNDGQGGLAGMGQALGRGMVLAMSIWNDAAQQMSWLDAGNNGPCTTGESTPGSIQSNHPDTHVIFSNIRWGDIGSTTKG

SEQ ID NO: 13358 - DNA, 2461 bp, Muscodor strobelii
  misc_feature: SGI EST ID NO. CUFF.31923.1
  misc_feature: Variant of the nucleotide sequence at SEQ ID NO 13356
cgaatctgcagggtacgaagctgaaaatcatgccattctgctctgcgttggcgagcttgtcttgattatgcactcttgacatttgacggtcaaactacgtgatacaccatgacttccagatatctctccatcggcctgttggtttcgttattgacaggcagggctctgactcagagctccgaacaacatccctcattaccaacatggaaatgtacgacgtccggaggatgcgtgcagcagaacaccagcgtcgtgctggacaaggactcgaaatacgctcaaggagctgcgggctctcgatctgcggctgactacgctgccatgggagtctctacgtcaggcgacgcggtgactctgttccactacgtccgaacaggtggcacgctgaatccggcatccccacggatctacctcctcgacgccgacggtaagtacgtcatgatgaacctcctgaaccaggagttgtctgtcgacgtcgactattcggcgactccttgtggcgagaacggggctttctacctctccgagatgaaggccgacggcggaggctcctcgggaggcgcggcggcgggacagggatattgtgatgcccagtgtcagggttactgctgcaacgagatggacatccttgaggccaatgcacgcgccacggccatgacaccgcatccgtgcgccggtgataattgcgataagagtggctgcgggtataacccctatgcgagcggccagcgcaacctctgggctacaagcggcaccgtcaataccaatcagcccttcaccgtcgtgacgcagtttgtgggcagcggttccttgacgcagatcaagcgtatttacatacagaatggaaagcagactgatggggggtcaatatcaagctgtaatgatgggcagggaggtcttgcgggtatgggtcaggctctgggccgagggatggtactggcaatgagcatctggaacgacgctgctcagcaaatgtcgtggcttgacgccggaaacaacggaccgtgcacgacgggagaaagcactcctgggtctattcagtctaatcatcctgacacgcacgtcatcttttcgaatatccgatggggcgatattgggtctactacgaagggataagctgcgttcctattcattgtgggatggattgctctgctcgctcgtttcatatacttgtaggtagattcgcaaatacagtgctattcctgtctgttttgtaaattcgcacattatacagccctgcatatgaatttttcattcaaacaaacacaatcatgtaccgtttgtcgacctacctacatgttgcccatttcaacgatcacatggctacaatgcgcttttattcatctaatctgtagcatatcgatcaacttgcgactctcagcatgcgtcctggctcctctccgagaagggaatctgaggcaccatgcttggaagacgtgattcctggactgagagttaaatactatttcggatgggatgggattccgccgcaagctctccagactcaggagggcatatcagtttgtcaagatgacgatttaggtctgaccactcccaccgccagccaaaggaaagaagcgtcaacaacaccttcaaacaaacgacatgccgccagtcataattccattcccgatgcgaagaaacggagggttactagcggcagtactgcagtcattggagatataggtagaggtaccggacacgtatttcccaccgaattcgtcccgctgtctacaaaagtcaagccttctgatatctttacggcgcacggtagctccagatttgtgagtcgtcacgatgctggaaaggctctagtatatatcgacggttcctgtcagaataatggtctccccaatgctcaagccggctgggcttatgtattcggccgaggcgttgacggtcgcggggccataggatcaggtcgtctggaaactcagggcccttctggtggtccaagcatccaaagcagcaatcgtgcagaaatccgtgcagcaatcgcagcgctgcaatttcgaagttggtgcctcgaaggctttgatagtctgattatcgccacggactcagaatacgtggcaattggtgctacaaaatggattaagaaatggacaaccaatgactggcgaacttctaacaatgcaaatgttcagaatcgggacttatgggagatgttgctccgggaagtagagttttggcacgagcaaggactggcggttcaattttggcgaattcccagggaactgaacactggtgctgacgcagcagcgaaggatgcagcagcaaataaggcggcggaagaactcgtcgccccagtgcaacgaggggctatattcctgtagcatttgaagagtggtcacgttgttttagtatggacgagatacgtcttgtgatatggcagaggtgaatttgggtatagtcggattgacatttgacttctaacaaaattcacaagttttgatattcg

SEQ ID NO: 13359 - DNA, 1050 bp, Muscodor strobelii
  misc_feature: SGI cDNA ID NO. 564374
  misc_feature: Encodes the peptide sequence at SEQ ID NO 13360
atgactattcaaagaccccctcgcttttccaccctggaaatgatgttaattgaccagactgcatccaggaagaagaagaagaaaagagtctcattccccagtcccgtcgtcactggagccgctctccagcctgactaccccccatccagctctgttgtcaccggtccttacgtcgagtctgtttacccacagcgccgtcccagcgctaccagctctaccattgcttcggctggaacagatcaagagcttgacagactcacttccgctgctcccaagggcaagatgtctaccaccgaatctgaaggctctcccgagtggaccatccacgatgaccgcaccatctgcttgatgaaggctgttgacagcacctgggcggagatcggtgctaagctcaatcgcggcaagagtgaatgcaagcatcgatatcgcagcatcggcgtacacgcgaaggagctcggtcttactgttgaaaagctagctaagatgtaccttgacgacgccaatgagacgaaggcttccgagaagagcggcaagactaaggccaaaggcaagaataagaagaagcagaaggagcaggtcaccaccgacaccgaagacgaagagtctgatgaagaggacagcaagcggggcaagaagtccacgaagaagtctaaggataaagccaagcagaagggcaagtccgagcacaagggcaaaggcaagaagaaggtgaaggcactctctgaccctgccacttccgacgcctcctccagctccgaagaatccgagtcatcttcagaagaagaggaggagtacgatctagcagccgagattcaggcttcgcgtcgctatcagtacgacaatatgttcgcttggatgtatcccgaccagaagcgccttcgccccgatcggttctacagcgagagcgactgtcgcatactgggtggtctcgaggctcgctaccgcgccaacaagtggctgcatatccaggctgacttctacaacgccactggacgtatggtcgagggagagatcctgaaggccaagttctatgaggaggaggcagattag

SEQ ID NO: 13360 - protein, 349 aa, Muscodor strobelii
  misc_feature: SGI Peptide ID NO. 564374
MTIQRPPRFSTLEMMLIDQTASRKKKKKRVSFPSPVVTGAALQPDYPPSSSVVTGPYVESVYPQRRPSATSSTIASAGTDQELDRLTSAAPKGKMSTTESEGSPEWTIHDDRTICLMKAVDSTWAEIGAKLNRGKSECKHRYRSIGVHAKELGLTVEKLAKMYLDDANETKASEKSGKTKAKGKNKKKQKEQVTTDTEDEESDEEDSKRGKKSTKKSKDKAKQKGKSEHKGKGKKKVKALSDPATSDASSSSEESESSSEEEEEYDLAAEIQASRRYQYDNMFAWMYPDQKRLRPDRFYSESDCRILGGLEARYRANKWLHIQADFYNATGRMVEGEILKAKFYEEEAD

SEQ ID NO: 13361 - DNA, 1509 bp, Muscodor strobelii
  misc_feature: SGI cDNA ID NO. 564375
  misc_feature: Encodes the peptide sequence at SEQ ID NO 13362
atgagtgaacagacggtatctagcggcagactagtcagcgttgaggaagtatcagcacatcaaacgcttgacgatttatggctcgttgtcgatggaatggtctatgaccttactgagttcgcacctgatcaccctggtggtctcaccgtgttgctccaatacgctggccgtgatgcatcggaggcatacgccgaaatccattcgccatctttgattaaaaattcacttccagaatctcgcaaaattggaatattagatacggcaaccataacagaagagtggatgacgccagcagtagcggatgagaaggcattaacgagagataagggtgtcaaacctccactagagactattctcaatgcgcaagacttccggcaagtagcgcaggacacatttactccaaaagcttgggcatttgtatcctcggctgctaccgattgcctgacgaacgaatggaacaacaaagcatacaaccagatcatcctgcggccacgggtcctccgggatgttagcaaagttgatatcagtacaacgatgctgggaaatcctattactgcccctatcttcattgcccctacatcaatgggtaagatgttccaccccgaaggcgagagagagcttggaagaggagctcaagccctgggaatcccgcagtgtgtctcgacaagttgttcattcccgttacccgaagtgatggatgcagtggaagagcagaagagcgcagaaggaacaaatgtgcctgtcttctttcaactatacgttgacaaaaaccgaaagaattcagagaagttactacgaattgtgaaggaccgtggcgtcaaggcaatctttctcactattgatgcacctgtaattggcaagcgagaggcagacgaacggttaaaggctgatgagagcttaaagcttccgatgtctggcgtcagggccaagaacgatagcaaaggaggttcacttgggcgcattatgggcgcttttatcgatgcatcattaacatggaatgacgttgaatggttgaggaaaacggtccctggaatgcctatcgtactgaagggtattcagactgccatggacgccgtgaaggctatggaagtcggagtcgacgcgatctaccttacgaaccatggtggcaggagtcttgacactgcaccggccactattctggtgttattagagttgcagaaatgctgtccacagatcttcgataagatggaggtatacattgacggtggcataacacgaggtaccgatatattcaaggctctttgcctcggtgccaaagctgtcggtatcggtcgcggattcttgttctctttgaattatgggcaaaagggtatcgaacacttcgtcaatattttgacggacgagttggagacaacgatgcagcaatgcggcatcacttgcctggatcaagtccatcccggactgctacatactggagctgttgatcacttaattcctggattagaagagcacccttatgcgaaatggaggccgaagagtagactatag

SEQ ID NO: 13362 - protein, 502 aa, Muscodor strobelii
  misc_feature: SGI Peptide ID NO. 564375
  misc_feature (11)..(86): Pfam Id: PF00173 Pfam Desc: Cytochrome b5-like Heme/Steroid binding domain
  misc_feature (128)..(478): Pfam Id: PF01070 Pfam Desc: FMN-dependent dehydrogenase
  misc_feature (401)..(439): Pfam Id: PF01645 Pfam Desc: Conserved region in glutamate synthase
  misc_feature (10)..(502): NCBI GI: 154322399 Blast Desc: BC1G_00542 [Botryotinia fuckeliana B05.10] gi|150847876|gb|EDN23069.1| BC1G_00542 [Botryotinia fuckeliana B05.10]
  misc_feature (10)..(502): NCBI GI: 156065351 Blast Desc: SS1G_00686 [Sclerotinia sclerotiorum 1980] gi|154691545|gb|EDN91283.1| SS1G_00686 [Sclerotinia sclerotiorum 1980]
  misc_feature (10)..(501): NCBI GI: 70994694 Blast Desc: mitochondrial cytochrome b2-like [Aspergillus fumigatus Af293] gi|66849758|gb|EAL90086.1| mitochondrial cytochrome b2-like, [Aspergillus fumigatus Af293] mitochondrial
  misc_feature (10)..(501): NCBI GI: 119501134 Blast Desc: mitochondrial cytochrome b2, [Neosartorya fischeri NRRL 181] gi|119415489|gb|EAW25427.1| mitochondrial cytochrome b2, [Neosartorya fischeri NRRL 181]
  misc_feature (6)..(501): NCBI GI: 121706678 Blast Desc: mitochondrial cytochrome b2, [Aspergillus clavatus NRRL 1] gi|119399741|gb|EAW10167.1| mitochondrial cytochrome b2, [Aspergillus clavatus NRRL 1]
  misc_feature (6)..(502): NCBI GI: 256720300 Blast Desc: NECHADRAFT_56146 [Nectria haematococca mpVI 77-13-4]
  misc_feature (6)..(502): NCBI GI: 256720293 Blast Desc: NECHADRAFT_56158 [Nectria haematococca mpVI 77-13-4]
  misc_feature (6)..(501): NCBI GI: 67528452 Blast Desc: AN4424.2 [Aspergillus nidulans FGSC A4] gi|40740999|gb|EAA60189.1| AN4424.2 [Aspergillus nidulans FGSC A4] gi|259482762|tpe|CBF77551.1| TPA: mitochondrial cytochrome
  misc_feature (10)..(501): NCBI GI: 169773829 Blast Desc: [Aspergillus oryzae RIB40] gi|238491848|ref|XP_002377161.1| mitochondrial cytochrome b2-like, [Aspergillus flavus NRRL3357] protein product oryzae]
  misc_feature (10)..(492): NCBI GI: 115398229 Blast Desc: ATEG_05528 [Aspergillus terreus NIH2624] gi|114192897|gb|EAU34597.1| ATEG_05528 [Aspergillus terreus NIH2624]
  misc_feature (12)..(476): SWISSPROT Homolog: EC 1.1.2.3 L-lactate dehydrogenase (cytochrome)
MSEQTVSSGRLVSVEEVSAHQTLDDLWLVVDGMVYDLTEFAPDHPGGLTVLLQYAGRDASEAYAEIHSPSLIKNSLPESRKIGILDTATITEEWMTPAVADEKALTRDKGVKPPLETILNAQDFRQVAQDTFTPKAWAFVSSAATDCLTNEWNNKAYNQIILRPRVLRDVSKVDISTTMLGNPITAPIFIAPTSMGKMFHPEGERELGRGAQALGIPQCVSTSCSFPLPEVMDAVEEQKSAEGTNVPVFFQLYVDKNRKNSEKLLRIVKDRGVKAIFLTIDAPVIGKREADERLKADESLKLPMSGVRAKNDSKGGSLGRIMGAFIDASLTWNDVEWLRKTVPGMPIVLKGIQTAMDAVKAMEVGVDAIYLTNHGGRSLDTAPATILVLLELQKCCPQIFDKMEVYIDGGITRGTDIFKALCLGAKAVGIGRGFLFSLNYGQKGIEHFVNILTDELETTMQQCGITCLDQVHPGLLHTGAVDHLIPGLEEHPYAKWRPKSRL

SEQ ID NO: 13363 - DNA, 834 bp, Muscodor strobelii
  misc_feature: SGI EST ID NO. CUFF.31938.0
  misc_feature: Variant of the nucleotide sequence at SEQ ID NO 13361
cagaagagcgcagaaggaacaaatgtgcctgtcttctttcaactatacgttgacaaaaaccgaaagaattcagagaagttactacgaattgtgaaggaccgtggcgtcaaggcaatctttctcactattgatgcacctgtaattggcaagcgagaggcagacgaacggttaaaggctgatgagagcttaaagcttccgatgtctggcgtcagggccaagaacgatagcaaaggaggttcacttgggcgcattatgggcgcttttatcgatgcatcattaacatggaatgacgttgaatggttgaggaaaacggtccctggaatgcctatcgtactgaagggtattcagactgccatggacgccgtgaaggctatggaagtcggagtcgacgcgatctaccttacgaaccatggtggcaggagtcttgacactgcaccggccactattctggtgttattagagttgcagaaatgctgtccacagatcttcgataagatggaggtatacattgacggtggcataacacgaggtaccgatatattcaaggctctttgcctcggtgccaaagctgtcggtatcggtcgcggattcttgttctctttgaattatgggcaaaagggtatcgaacacttcgtcaatattttgacggacgagttggagacaacgatgcagcaatgcggcatcacttgcctggatcaagtccatcccggactgctacatactggagctgttgatcacttaattcctggattagaagagcacccttatgcgaaatggaggccgaagagtagactatagaccgagcgacgtgtttccgaggtgaacttgtatata

SEQ ID NO: 13364 - DNA, 630 bp, Muscodor strobelii
  misc_feature: SGI cDNA ID NO. 564376
  misc_feature: Encodes the peptide sequence at SEQ ID NO 13365
atgtcgggtttaccggatttgccagccagctttgcagcggcactgagatctatcgatggcgaacatgccgaagaccctcgaacagtcgctggcgaagatggtagcaatgggatggtaccgcaagaattggcgtatgctcaaaagatgacacaatggctcactaagcggtgtccggatgctgcgccaactttacagctcgcatgccgagcgcagcatttgagaagatgggaaatcccgcggaacagttttcccatgacgcgtgcaggctacttgacctggcgctctaaacaaaaggcgatagcagcagaaaaaattaaagcacttctatcttctccgtctctcccatcaccaattcctgcgagcgatatagagcgcgtcgctgccctggtgcgaaaggagaacctagcctcggatgcagaaacgcagatcttggaagatgtcgcctgccttgtgttcctcgatggccagcttgacgactttgaaaagcgggccaacatcgacgaggataaaatgttagggattctccgcaagacttggactaaaatgagtgagagaggacgcgaacttgcgctcgcgatagatctgagcgagagagcacaggtccttgtccaaaaggcattgacagggtaa

SEQ ID NO: 13365 - protein, 209 aa, Muscodor strobelii
  misc_feature: SGI Peptide ID NO. 564376
  misc_feature (4)..(209): NCBI GI: 46126139 Blast Desc: FG07447.1 [Gibberella zeae PH-1]
  misc_feature (4)..(207): NCBI GI: 171692323 Blast Desc: protein product [Podospora anserina] gi|170946110|emb|CAP72911.1| protein product [Podospora anserina]
  misc_feature (1)..(209): NCBI GI: 116206534 Blast Desc: CHGG_02560 [Chaetomium globosum CBS 148.51] gi|88183157|gb|EAQ90625.1| CHGG_02560 [Chaetomium globosum CBS 148.51]
  misc_feature (3)..(209): NCBI GI: 145612171 Blast Desc: MGG_08138 [Magnaporthe grisea 70-15] gi|145019389|gb|EDK03617.1| MGG_08138 [Magnaporthe grisea 70-15]
  misc_feature (14)..(209): NCBI GI: 119500056 Blast Desc: NFIA_103760 [Neosartorya fischeri NRRL 181] gi|119414950|gb|EAW24888.1| conserved [Neosartorya fischeri NRRL 181]
  misc_feature (49)..(209): NCBI GI: 261355667 Blast Desc: cytochrome b2 [Verticillium albo-atrum VaMs.102]
  misc_feature (7)..(209): NCBI GI: 121708365 Blast Desc: conserved [Aspergillus clavatus NRRL 1] gi|119400256|gb|EAW10682.1| conserved [Aspergillus clavatus NRRL 1]
  misc_feature (14)..(209): NCBI GI: 146323869 Blast Desc: conserved [Aspergillus fumigatus Af293] gi|129557495|gb|EAL89539.2| conserved [Aspergillus fumigatus Af293]
  misc_feature (14)..(209): NCBI GI: 159125494 Blast Desc: conserved [Aspergillus fumigatus A1163]
  misc_feature (11)..(209): NCBI GI: 169611554 Blast Desc: SNOG_08891 [Phaeosphaeria nodorum SN15] gi|111062939|gb|EAT84059.1| SNOG_08891 [Phaeosphaeria nodorum SN15]
MSGLPDLPASFAAALRSIDGEHAEDPRTVAGEDGSNGMVPQELAYAQKMTQWLTKRCPDAAPTLQLACRAQHLRRWEIPRNSFPMTRAGYLTWRSKQKAIAAEKIKALLSSPSLPSPIPASDIERVAALVRKENLASDAETQILEDVACLVFLDGQLDDFEKRANIDEDKMLGILRKTWTKMSERGRELALAIDLSERAQVLVQKALTG

SEQ ID NO: 13366 - DNA, 1002 bp, Muscodor strobelii
  misc_feature: SGI EST ID NO. CUFF.31947.0
  misc_feature: Variant of the nucleotide sequence at SEQ ID NO 13364
ctgcgcattaccatcctacgctgctttatgataggtatgcgtccaatttctatcattccattaacagcccaatatctgtcttccagaaccgggactattgattccgagcattgagattgagcgcaatgtcgggtttaccggatttgccagccagctttgcagcggcactgagatctatcgatggcgaacatgccgaagaccctcgaacagtcgctggcgaagatggtagcaatgggatggtaccgcaagaattggcgtatgctcaaaagatgacacaatggctcactaagcggtgtccggatgctgcgccaactttacagctcgcatgccgagcgcagcatttgagaagatgggaaatcccgcggaacagttttcccatgacgcgtgcaggctacttgacctggcgctctaaacaaaaggcgatagcagcagaaaaaattaaagcacttctatcttctccgtctctcccatcaccaattcctgcgagcgatatagagcgcgtcgctgccctggtgcgaaaggagaacctagcctcggatgcagaaacgcagatcttggaagatgtcgcctgccttgtgttcctcgatggccagcttgacgactttgaaaagcgggccaacatcgacgaggataaaatgttagggattctccgcaagacttggactaaaatgagtgagagaggacgcgaacttgcgctcgcgatagatctgagcgagagagcacaggtccttgtccaaaaggcattgacagggtaaacttaaccactaaaaactgacgttttctacatgtacgctatgagaaccctgaaacatgtccaactgattgtgttgctcccagtgcaagagctaaacgagcagactctacagacgtgtcacgaactctatcaagcttgttcgggtatcggcgttttgtccgtaatggcatttgtatagcagtacggggatctcccaagtagcgcacatcaactaaatgcgggcaataaacatcaaaaaatcactgaac

SEQ ID NO: 13367 - DNA, 498 bp, Muscodor strobelii
  misc_feature: SGI cDNA ID NO. 564377
  misc_feature: Reduced expression when VOC is produced
  misc_feature: Encodes the peptide sequence at SEQ ID NO 13368
atggcggccttcgtcaatattcaacttcctttccagaaatcacagcctccgcctctctcaccacggccctcggggtcgtcgtctgcgatctcgccttcttcttcgtcagcacccgggaagctccctatgccgacacaatcgtcgaccagtttaactccatacatccgacgattagttgcaaccggcttcgacttccctggtgtgttgcacggctttttcggggatgattggatggcggggataggacacctccacgagggcgagcggaggaactatcttttcgccgccaaagcaacgaactggctcgatatcaaatcacagtacgacatgccggacgggcagacaataccctttcttcggccccttcagaacgtgacggaagacgagatcgtcaacgccgagtcgggttggagtcagtggcttgcgatgcaagactggatgatcggacctcgaacaccggacgagatgccagcagtcatcaagaccgaggattcatga

SEQ ID NO: 13368 - protein, 165 aa, Muscodor strobelii
  misc_feature: SGI Peptide ID NO. 564377
  misc_feature (1)..(155): NCBI GI: 46126137 Blast Desc: FG07446.1 [Gibberella zeae PH-1]
  misc_feature (1)..(154): NCBI GI: 164426240 Blast Desc: NCU11276 [Neurospora crassa OR74A] gi|157071256|gb|EAA32375.2| conserved [Neurospora crassa OR74A]
  misc_feature (1)..(156): NCBI GI: 212528608 Blast Desc: conserved [Penicillium marneffei ATCC 18224] gi|210073859|gb|EEA27946.1| conserved [Penicillium marneffei ATCC 18224]
  misc_feature (1)..(154): NCBI GI: 261197181 Blast Desc: conserved [Ajellomyces dermatitidis SLH14081] gi|239595623|gb|EEQ78204.1| conserved [Ajellomyces dermatitidis SLH14081] gi|239606613|gb|EEQ83600.1| conserved [Ajellomyces
  misc_feature (1)..(154): NCBI GI: 225683662 Blast Desc: conserved [Paracoccidioides brasiliensis Pb03] gi|226293019|gb|EEH48439.1| conserved [Paracoccidioides brasiliensis Pb18]
  misc_feature (1)..(154): NCBI GI: 226281845 Blast Desc: conserved [Paracoccidioides brasiliensis Pb01]
  misc_feature (1)..(156): NCBI GI: 240280019 Blast Desc: conserved [Ajellomyces capsulatus H143]
  misc_feature (1)..(156): NCBI GI: 225560461 Blast Desc: conserved [Ajellomyces capsulatus G186AR]
  misc_feature (1)..(156): NCBI GI: 242765948 Blast Desc: conserved [Talaromyces stipitatus ATCC 10500] gi|218724273|gb|EED23690.1| conserved [Talaromyces stipitatus ATCC 10500]
  misc_feature (1)..(156): NCBI GI: 258566169 Blast Desc: conserved [Uncinocarpus reesii 1704] gi|237907530|gb|EEP81931.1| conserved [Uncinocarpus reesii 1704]
  misc_feature: Useful for introducing or modulating the production of volatile compounds
MAAFVNIQLPFQKSQPPPLSPRPSGSSSAISPSSSSAPGKLPMPTQSSTSLTPYIRRLVATGFDFPGVLHGFFGDDWMAGIGHLHEGERRNYLFAAKATNWLDIKSQYDMPDGQTIPFLRPLQNVTEDEIVNAESGWSQWLAMQDWMIGPRTPDEMPAVIKTEDS

SEQ ID NO: 13369 - DNA, 2309 bp, Muscodor strobelii
  misc_feature: SGI EST ID NO. CUFF.31982.0
  misc_feature: Variant of the nucleotide sequence at SEQ ID NO 13367
cggcagccctttcctcactactaccggtactcggaatctaagctagtagagcggcaggctacctcgcttaagtaaagtgatgcggccatccatctctacgagttaccaattgtaacggggtcacactggttggaccctgctcgttgtatcgtgacttttcctcgtctctacaacccttggcgaactctttccacttccgcttctttgcatttgcttccctgatgaggcacagaactcagggcaatcctcgcttggagtaactacaatctgaaacaatattgaaagtacctaagcagatatcaaaaaggatcctcttgtcaaccgccagggcgaggcatccgagtattaaaggcttggttgacccacagtgttcgttgaccaaaccctagtggcccatccattgactattccacacgtctgattcgacatcacttatatcgaaaccagggcagtattgcagattccttctccgactactgcacttcgttgccgtttggccccgaagcgccacgtcttgtctccaacgggcagtcatatagggctaccggaattcgggaattatcaacaaagcatttcagagacccctgagcaacattgcggtgtgaaagatatctcgcagagaaacacggcaggatcaccaccgaacaggtagtccacagtacctaagaaataatcctgggcctttgtccataccttagacccagggccggtggaagtcttttaataatgtctttccaacctggaatgagccgctcaggatctcaacagtcgggtcgaggatatccaccagacagaaacccaaacgccttcctcccaatgcaagagtctcagtttgatatcctcgaatggtacccgcactttcagtcgtgtgttaggtatttcctagaccacgcacaacatgacggaccaatccaggcgatggcggccttcgtcaatattcaacttcctttccagaaatcacagcctccgcctctctcaccacggccctcggggtcgtcgtctgcgatctcgccttcttcttcgtcagcacccgggaagctccctatgccgacacaatcgtcgaccagtttaactccatacatccgacgattagttgcaaccggcttcgacttccctggtgtgttgcacggctttttcggggatgattggatggcggggataggacacctccacgagggcgagcggaggaactatcttttcgccgccaaagcaacgaactggctcgatatcaaatcacagtacgacatgccggacgggcagacaataccctttcttcggccccttcagaacgtgacggaagacgagatcgtcaacgccgagtcgggttggagtcagtggcttgcgatgcaagactggatgatcggacctcgaacaccggacgagatgccagcagtcatcaagaccgaggattcatgacaatgggtccatcatgtacctatccttcgttccataacacgaaccgacaactgccaggcaacgtcctcatgtgttctctacgaggagaagcgaagaatcattgagccagacctggcaagcgtaacggtacacacacacactacactcgtagggcacacgtctcagaggaaacatcaccgtattctcgctccatcatttcgaagtaggcatcacgaaggatcgccgacgtgatgacgaataaagagtggatcccgctgtaaccattgtgcagcgggaagaatacccgttggtggccatgactggttacctattacggtatcttcgagctatgtatttgcgagtcatgccaactgtattctttagactgactcggatcgaaacgcgccctttgggttatagttagtcccagcccgcagtataagagcaaaaggcaggtgacggggctaggggtttcaattcgatactgtggcgtaaagtaacaagacattttctacgataccctccatatgtttttcgacaggttcaatgtatacagaatagaggaatcatgctatcttggctgctccaaatcaatcttgtctttttgctgcgcttcgcatgtctccagggccgaatgctctgtagaccggtagctggaaatccatcatagattacgactgagtgagaccgaaccagagttgtccagtatccgagaggttaccagctatgtcgaagttcaatgtattagtatcgaccactgtgtgcttcagcgtccagtactcgtcgatgcctatcgatagtttaatacaagacagtgatgtgacacatgacaacgggttgggaacaaaactgaatagaattgactgcacatctcgtggcagttaggaaaaacaaagactcatgacaaagccaac

SEQ ID NO: 13370 - DNA, 3180 bp, Muscodor strobelii
  misc_feature: SGI cDNA ID NO. 564378
  misc_feature: Reduced expression when VOC is produced
  misc_feature: Encodes the peptide sequence at SEQ ID NO 13371
atgatggaccatgacatggcgcccttgatggacgaggtcccccgaggcggtatggcacctgcttcgaaggcgtcgcggggtgcctggtgccagtacatgtcgcaatgcctggagaagcgcctcgacaccaacactttcgacgaaaccgtaccggccttcgtctccaagaaccccctctcacctacgcacatggccgatgtgtggctgcgaccggtgagctccaatcacgagaccatcgacccgcgcaccacccgctacctgcaggtcttgatccgccgcaagctcgtcgacgtcccgtccatcctctgggctctgtaccgctactcgacatcccacaactacatgcccccagccgacagtaacgataataaccacccaatacgatggacgaggtcctacacggccgaggagacgctcttctaccgcctgtccaagatggtccagctcgagaacggcatcaacaagacaggcgaggccctgcaggtctgtgccctcatggccaagtggatggtcctgtttacggctgcctccgctgccttcgcccacgaggtcatggaagagatgcaggacgcacagaacaatacgcaggactcacaggatccgcagaacccgcagaatgcgcaaaagagacagttcagggaagagatggaggctgcccgtgctgcctttgtcatgcttctgctcaacatcgtcgagcaccaggtcgtactgcgcggtctgagccagccctacgccaaagacgcccgacatgccctgtccgagagcctgggctcctttattccatccatcatgcagagctcatcggagatcgccaaccgcctcgaggtcttccgaacaaacacactggcctcattcgaacccgtagacaagaagagcaaagatgcgccagacagtactatcgataccatcgagtcgctgatggctctcgacagcatagtaatccccgagatccccatgatcaactctagggccggcctgtacatatacttgaatgcagcactcgtcggccggcccatcctctatgatgaatgtctatttcccttcctcggtagcaggtaccagggtgatatccaagctactaccatcgatctcatcctcgcctcctttgatgttctagccaatgcacattttcgtaacgagggtcaaaagaccggccacctgcttcgctcgtatctaatcaataagctgcctttgttgctggcaaccttggcgggctccatgttccctccactgacggctcaggcctgtattaccgaggccctgagacatgtcgacaagaacgcctttcctactctctcttccatgtttgacaacactactaataataataccttcaccgataccgttcgccaagatttctgttttgcttgctgtttgcatggtctgatacccgaggcgcatatagaggttctacttggcgagatcacttaccagagtctgccgcagggtggtcgatatgacaaggacagacttgtcgctgattgtagagcggattcggagaagatccaagagttgatccgtgaactagacaacatggatggcaacgtcggcgccgtctgtttggccctcatcgatgtcatccaatacctctgtgctaataccgagactatgaccctgaagcttctgtgtagtcaactggctcgaaagcccctcgctctcgatgtcatgcttctgttcggcaaacccacagcgatactgcagccgttatgcgaggtcttgaataattggcggatcgacgaggatcaaggcgaacaccagcctgtgtacgaggagtttggcgctatactactccttgtactcgcatttgttttccgctacgacctatctgctgccgacctcggcgttcagtcgcctgattctttcatagccaaattcctcaaccatggccatttgagtcgctctttggaagagctcaacgaaccagaaacgcggcatttggacggctggatcaatggccttttcgatacggaagctggcgggctaggcgatgacctgatgtcttcttgcgcgccgcatgatttttatctactagttcctactctgttccatcatattgcaatggcgtatgactcgggaaatctggatgacgaagacatgaagacaggacttgaatacctagttgatacgtttcttctcccctcgttggtcatggcaatcacgtatatgtcaaatcagatctggtcagaaggcaagacgtcgccagatggaaaatcagaacagaaggccgtcatcaggatcttgcagctcattttgcttaagaagcaaggttccgatgaggcccaaaacatgctctcggcagtgatcaacattgtggccaaaccgttggaacactctcttcgattataccaaagacaagaccccaaatgccaagaagtcgagccattgctcaatgccatcaaagagaacatacgtttctccaggcgtacggctggagcaggccataacgagctggaagcttggactagctctgcaaatggaggactagctgcctctgtccgccacacaatacaaggactagtgcaatggagtcttcatcccgctgttaacacgatgccgacgtcatacacacatcggcagatcctagcagcgcatagggtactgggcgcgaagcggttggtacaggtgattttggacgaactaagacagcagacggacgctacaaatggcagcatcgcatacgatgtagcgacaacaattatatgcgctcccgatccgaccaataccccgccgattataaccatagatcccaataatgcccacacagatccacagtaccggatcactctacacgaggcgctgaagtccgaggctcaggagttcaaatcaatatttaaacacgatcctgcattagcataccacgtcgttcgtctgtatcgacaagtcgaggcacgaatcgtacgtccacaacccgcggccgcagctattccacaagctgttttcgatctcgacgagaatgcgacggcagcattaatagctggacagggcgatgggctcataacaggggatggcggcttgaatcttagtctcaacaacgcagcagacgatatgggactcacgggcaacgttggcacatcgggtggtctggacttcggaacagatgacgatattttcggcgatctgggtgctccgggaggcgcgaatgatctgctcgatggctgggatagtatggatatgtcatag

SEQ ID NO: 13371 - protein, 1059 aa, Muscodor strobelii
  misc_feature: SGI Peptide ID NO. 564378
  misc_feature (128)..(908): Pfam Id: PF08689 Pfam Desc: Mediator complex subunit Med5
  misc_feature (23)..(1058): NCBI GI: 261351501 Blast Desc: mediator of RNA polymerase II transcription subunit 5 [Verticillium albo-atrum VaMs.102]
  misc_feature (15)..(1042): NCBI GI: 256730919 Blast Desc: NECHADRAFT_96107 [Nectria haematococca mpVI 77-13-4]
  misc_feature (19)..(1058): NCBI GI: 46126019 Blast Desc: FG07387.1 [Gibberella zeae PH-1]
  misc_feature (22)..(1017): NCBI GI: 154322385 Blast Desc: BC1G_00535 [Botryotinia fuckeliana B05.10] gi|150847869|gb|EDN23062.1| BC1G_00535 [Botryotinia fuckeliana B05.10]
  misc_feature (13)..(965): NCBI GI: 85103883 Blast Desc: NCU11277 [Neurospora crassa OR74A] gi|28923158|gb|EAA32374.1| [Neurospora crassa OR74A]
  misc_feature (24)..(1046): NCBI GI: 171692303 Blast Desc: protein product [Podospora anserina] gi|170946100|emb|CAP72901.1| protein product [Podospora anserina]
  misc_feature (12)..(965): NCBI GI: 145613798 Blast Desc: MGG_01354 [Magnaporthe grisea 70-15] gi|145020822|gb|EDK04951.1| MGG_01354 [Magnaporthe grisea 70-15]
  misc_feature (29)..(963): NCBI GI: 189196148 Blast Desc: conserved [Pyrenophora tritici-repentis Pt-1C-BFP] gi|187980291|gb|EDU46917.1| conserved [Pyrenophora tritici-repentis Pt-1C-BFP]
  misc_feature (55)..(965): NCBI GI: 182676439 Blast Desc: conserved [Pyrenophora tritici-repentis Pt-1C-BFP] gi|187980291|gb|EDU46917.1| conserved [Pyrenophora tritici-repentis Pt-1C-BFP]
  misc_feature (23)..(975): NCBI GI: 158564251 Blast Desc: conserved [Pyrenophora tritici-repentis Pt-1C-BFP] gi|187980291|gb|EDU46917.1| conserved [Pyrenophora tritici-repentis Pt-1C-BFP]
  misc_feature: Useful for introducing or modulating the production of volatile compounds
MMDHDMAPLMDEVPRGGMAPASKASRGAWCQYMSQCLEKRLDTNTFDETVPAFVSKNPLSPTHMADVWLRPVSSNHETIDPRTTRYLQVLIRRKLVDVPSILWALYRYSTSHNYMPPADSNDNNHPIRWTRSYTAEETLFYRLSKMVQLENGINKTGEALQVCALMAKWMVLFTAASAAFAHEVMEEMQDAQNNTQDSQDPQNPQNAQKRQFREEMEAARAAFVMLLLNIVEHQVVLRGLSQPYAKDARHALSESLGSFIPSIMQSSSEIANRLEVFRTNTLASFEPVDKKSKDAPDSTIDTIESLMALDSIVIPEIPMINSRAGLYIYLNAALVGRPILYDECLFPFLGSRYQGDIQATTIDLILASFDVLANAHFRNEGQKTGHLLRSYLINKLPLLLATLAGSMFPPLTAQACITEALRHVDKNAFPTLSSMFDNTTNNNTFTDTVRQDFCFACCLHGLIPEAHIEVLLGEITYQSLPQGGRYDKDRLVADCRADSEKIQELIRELDNMDGNVGAVCLALIDVIQYLCANTETMTLKLLCSQLARKPLALDVMLLFGKPTAILQPLCEVLNNWRIDEDQGEHQPVYEEFGAILLLVLAFVFRYDLSAADLGVQSPDSFIAKFLNHGHLSRSLEELNEPETRHLDGWINGLFDTEAGGLGDDLMSSCAPHDFYLLVPTLFHHIAMAYDSGNLDDEDMKTGLEYLVDTFLLPSLVMAITYMSNQIWSEGKTSPDGKSEQKAVIRILQLILLKKQGSDEAQNMLSAVINIVAKPLEHSLRLYQRQDPKCQEVEPLLNAIKENIRFSRRTAGAGHNELEAWTSSANGGLAASVRHTIQGLVQWSLHPAVNTMPTSYTHRQILAAHRVLGAKRLVQVILDELRQQTDATNGSIAYDVATTIICAPDPTNTPPIITIDPNNAHTDPQYRITLHEALKSEAQEFKSIFKHDPALAYHVVRLYRQVEARIVRPQPAAAAIPQAVFDLDENATAALIAGQGDGLITGDGGLNLSLNNAADDMGLTGNVGTSGGLDFGTDDDIFGDLGAPGGANDLLDGWDSMDMS

SEQ ID NO: 13372 - DNA, 4531 bp, Muscodor strobelii
  misc_feature: SGI EST ID NO. CUFF.32083.0
  misc_feature: Variant of the nucleotide sequence at SEQ ID NO 13370
ctcagctttcaggtaccctcaactctgtaacggttgtccggggtagtttccttagcttcatacagcacacatccgtggactcgtgtgaggattcgaagatgtgcgagtagccacagagctttgtcgcttcacagactccctcctcaactggaggcttctgcgatgcctgcgatgcctgccatgatggaccatgacatggcgcccttgatggacgaggtcccccgaggcggtatggcacctgcttcgaaggcgtcgcggggtgcctggtgccagtacatgtcgcaatgcctggagaagcgcctcgacaccaacactttcgacgaaaccgtaccggccttcgtctccaagaaccccctctcacctacgcacatggccgatgtgtggctgcgaccggtgagctccaatcacgagaccatcgacccgcgcaccacccgctacctgcaggtcttgatccgccgcaagctcgtcgacgtcccgtccatcctctgggctctgtaccgctactcgacatcccacaactacatgcccccagccgacagtaacgataataaccacccaatacgatggacgaggtcctacacggccgaggagacgctcttctaccgcctgtccaagatggtccagctcgagaacggcatcaacaagacaggcgaggccctgcaggtctgtgccctcatggccaagtggatggtcctgtttacggctgcctccgctgccttcgcccacgaggtcatggaagagatgcaggacgcacagaacaatacgcaggactcacaggatccgcagaacccgcagaatgcgcaaaagagacagttcagggaagagatggaggctgcccgtgctgcctttgtcatgcttctgctcaacatcgtcgagcaccaggtcgtactgcgcggtctgagccagccctacgccaaagacgcccgacatgccctgtccgagagcctgggctcctttattccatccatcatgcagagctcatcggagatcgccaaccgcctcgaggtcttccgaacaaacacactggcctcattcgaacccgtagacaagaagagcaaagatgcgccagacagtactatcgataccatcgagtcgctgatggctctcgacagcatagtaatccccgagatccccatgatcaactctagggccggcctgtacatatacttgaatgcagcactcgtcggccggcccatcctctatgatgaatgtctatttcccttcctcggtagcaggtaccagggtgatatccaagctactaccatcgatctcatcctcgcctcctttgatgttctagccaatgcacattttcgtaacgagggtcaaaagaccggccacctgcttcgctcgtatctaatcaataagctgcctttgttgctggcaaccttggcgggctccatgttccctccactgacggctcaggcctgtattaccgaggccctgagacatgtcgacaagaacgcctttcctactctctcttccatgtttgacaacactactaataataataccttcaccgataccgttcgccaagatttctgttttgcttgctgtttgcatggtctgatacccgaggcgcatatagaggttctacttggcgagatcacttaccagagtctgccgcagggtggtcgatatgacaaggacagacttgtcgctgattgtagagcggattcggagaagatccaagagttgatccgtgaactagacaacatggatggcaacgtcggcgccgtctgtttggccctcatcgatgtcatccaatacctctgtgctaataccgagactatgaccctgaagcttctgtgtagtcaactggctcgaaagcccctcgctctcgatgtcatgcttctgttcggcaaacccacagcgatactgcagccgttatgcgaggtcttgaataattggcggatcgacgaggatcaaggcgaacaccagcctgtgtacgaggagtttggcgctatactactccttgtactcgcatttgttttccgctacgacctatctgctgccgacctcggcgttcagtcgcctgattctttcatagccaaattcctcaaccatggccatttgagtcgctctttggaagagctcaacgaaccagaaacgcggcatttggacggctggatcaatggccttttcgatacggaagctggcgggctaggcgatgacctgatgtcttcttgcgcgccgcatgatttttatctactagttcctactctgttccatcatattgcaatggcgtatgactcgggaaatctggatgacgaagacatgaagacaggacttgaatacctagttgatacgtttcttctcccctcgttggtcatggcaatcacgtatatgtcaaatcagatctggtcagaaggcaagacgtcgccagatggaaaatcagaacagaaggccgtcatcaggatcttgcagctcattttgcttaagaagcaaggttccgatgaggcccaaaacatgctctcggcagtgatcaacattgtggccaaaccgttggaacactctcttcgattataccaaagacaagaccccaaatgccaagaagtcgagccattgctcaatgccatcaaagagaacatacgtttctccaggcgtacggctggagcaggccataacgagctggaagcttggactagctctgcaaatggaggactagctgcctctgtccgccacacaatacaaggactagtgcaatggagtcttcatcccgctgttaacacgatgccgacgtcatacacacatcggcagatcctagcagcgcatagggtactgggcgcgaagcggttggtacaggtgattttggacgaactaagacagcagacggacgctacaaatggcagcatcgcatacgatgtagcgacaacaattatatgcgctcccgatccgaccaataccccgccgattataaccatagatcccaataatgcccacacagatccacagtaccggatcactctacacgaggcgctgaagtccgaggctcaggagttcaaatcaatatttaaacacgatcctgcattagcataccacgtcgttcgtctgtatcgacaagtcgaggcacgaatcgtacgtccacaacccgcggccgcagctattccacaagctgttttcgatctcgacgagaatgcgacggcagcattaatagctggacagggcgatgggctcataacaggggatggcggcttgaatcttagtctcaacaacgcagcagacgatatgggactcacgggcaacgttggcacatcgggtggtctggacttcggaacagatgacgatattttcggcgatctgggtgctccgggaggcgcgaatgatctgctcgatggctgggatagtatggatatgtcataggtgactgccgcttctgccgagttgagagctaagggattggataggtggtttgagatgcatgacgaggactgggcgtttttgggtaagagcgagaaagtgagattgagaatccttagagatcaggcggttcatgagctgatcgcttctgcgccctagactgacggagaagacgattgagcgaatgatcgggtcctcagacgatcgttgggattgttgtgagttggatgtgagttggttgggaacttgagtgtttgatgcgtgttggagtatggacagtgatatggctcttggtataggatgcttccatgaggcttgaggaaaatatgagcatagctgttgagcatagccatctaaagatgtgcgcataggagtttaaggtgaactgcagcaatagtgttatggtagagtctgtagcacgaacaggattatcttcaataacggtgtgaatacaaggacttgtaatcattctgtacgccaacgtccgctagtctattctgtaaactcccgagttttagtaaagtagagcatcgccatagtagttcgtaatctataccgcacacataatgctaggtaacaccatataaatcaagcacctcgaacacaaagctgctgatataccgtctaaaactccaactcccttcacaaccccgtctaatcccgcctcccatctcatcttctacctctgtcacgctattctcgctttaaacccaaaaatcccaagcaacgccctctctcaaatacacacttcctccattctccctccctttctcatctttctcgaccccgttattatctcccccatcccaaacagggccctcagcctcggcaagcagtccatttgcgcagaaagtaaaataaaccctagccacctcttctttataaaactgatcaaacctagggtccaacgcatctactaatgaattcacgtctccttcagggtggagagataaccagggaaaacggcacgtggctccccggcaggattttaagatgaagagcagtgcatctagacgcgttgatattgtggatatcgggagggttaaaggcgggtttgttgagagggttataactgttgtgtttgaagatggaatgaatggggaagactggttgatcagggaggatgaggatgtgttaagttgggtgagtgcgtttgaaggggagaggagattat

SEQ ID NO: 13373 - DNA, 1908 bp, Muscodor strobelii
  misc_feature: SGI cDNA ID NO. 564379
  misc_feature: Encodes the peptide sequence at SEQ ID NO 13374
atgcgtttctccatcgcgcttctaagcgcgctcactctcggcgctggattagctactagccaggaagcacagacacccttaaccgggcaagatgacgatgaccgcaagccgaatatcgtattcattctgacagacgaccaagacgtgcatctaaactcactagattacatgccgtttgttagaaaacatatcattgagcagggcacaacgttcaaaaaacactattgtaccacgagtttgtgttgtccgtctagagtcacgctttggacgggcaagttggcgcataatacgaatatcactgatgttcagcctccttacggtggttatcccaaattcgtctcgagaggatataacgatgattggttccccgtctggttggaagaagcagggtataacagctattacacggggaaactgttcaacgcacatacagtctcgaactacaactccccattccctcgtggattcgccggcacggactttctcttagacccatacacatactcctacctaaacagcacattccagtcaaactccgacccgccgcagagctacccaggacagtacagcacagacgtactagccgacaaggctcacgcactattagacgaagcagttcacagcgcagagaagaagccttttttcttgactgtagcaccaatcgcgccacacgccaatgtggaaataaaagagactgaggagggccggagtgtgttcttcagtgaacctataccggctgatcgacataaggatttatttcccgatgagattgtcccacggactcctagttttaatcctgaattcccatcaggagcaaactggattcgcgccctacccttacaaaacgattccaacatagcatataacgaccacttccaccgtcaacgcctgcggtccctacaagcagtcgatgaactcgtcgattcgcttatctcccgcttagacacctatgggatattagataatacatatatcgtctactcctcagataacgggtaccacataggccagcatagattacagccagggaaaacatgtgggtatgaggaagatataaacgttcctctaatcatccgcggtccaggtgtcgccgctaacgaaactgtggaggatctcgtgagcacgcatactgatctcgctcccactttcctctctttacttgggataccgctgagggaggacttcgacgggagtcctattccccttactcagtctcagattgaagccgagaggaagcgggagggcagtagaagagagcatgctaatatcgagttttggggtgtttccctgacggagggtatacaccagccgaaaaatggggaatttaatacgtataagagtttacggttaagtggggaggagtacgatttttattactctgtttggtgtacgaatgagcatgagttttatgatatgaggaacgatccataccaactaaataatctcctctccccttcaaacgcactcacccaacttaacacatcctcatcctccctgatcaaccagtcttccccattcattccatcttcaaacacaacagttataaccctctcaacaaacccgcctttaaccctcccgatatccacaatatcaacgcgtctagatgcactgctcttcatcttaaaatcctgccggggagccacgtgccgttttccctggttatctctccaccctgaaggagacgtgaattcattagtagatgcgttggaccctaggtttgatcagttttataaagaagaggtggctagggtttattttactttctgcgcaaatggactgcttgccgaggctgagggccctgtttgggatgggggagataataacggggtcgagaaagatgagaaagggagggagaatggaggaagtgtgtatttgagagagggcgttgcttgggatttttgggtttaa

SEQ ID NO: 13374 - protein, 635 aa, Muscodor strobelii
  misc_feature: SGI Peptide ID NO. 564379
  misc_feature (35)..(481): Pfam Id: PF00884 Pfam Desc: Sulfatase
  misc_feature (1)..(635): NCBI GI: 145251061 Blast Desc: An15g05130 [Aspergillus niger] gi|134082572|emb|CAK42487.1| protein product [Aspergillus niger]
  misc_feature (1)..(635): NCBI GI: 2873363 Blast Desc: arylsulfatase [Neurospora crassa]
  misc_feature (1)..(634): NCBI GI: 171680767 Blast Desc: protein product [Podospora anserina] gi|27764278|emb|CAD60558.1| protein product [Podospora anserina] gi|170940011|emb|CAP65237.1| protein product [Podospora anserina]
  misc_feature (30)..(600): NCBI GI: 238500393 Blast Desc: arylsulfatase, [Aspergillus flavus NRRL3357] gi|220693184|gb|EED49530.1| arylsulfatase, [Aspergillus flavus NRRL3357]
  misc_feature (31)..(600): NCBI GI: 169779723 Blast Desc: [Aspergillus oryzae RIB40] gi|83773065|dbj|BAE63193.1| protein product [Aspergillus oryzae]
  misc_feature (1)..(634): NCBI GI: 171693357 Blast Desc: protein product [Podospora anserina] gi|170946627|emb|CAP73430.1| protein product [Podospora anserina]
  misc_feature (11)..(635): NCBI GI: 119483994 Blast Desc: arylsulfatase, [Neosartorya fischeri NRRL 181] gi|119410056|gb|EAW20003.1| arylsulfatase, [Neosartorya fischeri NRRL 181]
  misc_feature (5)..(635): NCBI GI: 70982853 Blast Desc: arylsulfatase [Aspergillus fumigatus Af293] gi|66844579|gb|EAL84916.1| arylsulfatase, [Aspergillus fumigatus Af293] gi|159123838|gb|EDP48957.1| arylsulfatase, [Aspergillus
  misc_feature (36)..(634): NCBI GI: 67902708 Blast Desc: AN8341.2 [Aspergillus nidulans FGSC A4] gi|40747747|gb|EAA66903.1| AN8341.2 [Aspergillus nidulans FGSC A4] gi|259484268|tpe|CBF80344.1| TPA: arylsulfatase, [Aspergillus
  misc_feature (16)..(600): NCBI GI: 154293528 Blast Desc: BC1G_13903 [Botryotinia fuckeliana B05.10] gi|150845284|gb|EDN20477.1| BC1G_13903 [Botryotinia fuckeliana B05.10]
  misc_feature (35)..(589): SWISSPROT Homolog: EC 3.1.6.1 Arylsulfatase
MRFSIALLSALTLGAGLATSQEAQTPLTGQDDDDRKPNIVFILTDDQDVHLNSLDYMPFVRKHIIEQGTTFKKHYCTTSLCCPSRVTLWTGKLAHNTNITDVQPPYGGYPKFVSRGYNDDWFPVWLEEAGYNSYYTGKLFNAHTVSNYNSPFPRGFAGTDFLLDPYTYSYLNSTFQSNSDPPQSYPGQYSTDVLADKAHALLDEAVHSAEKKPFFLTVAPIAPHANVEIKETEEGRSVFFSEPIPADRHKDLFPDEIVPRTPSFNPEFPSGANWIRALPLQNDSNIAYNDHFHRQRLRSLQAVDELVDSLISRLDTYGILDNTYIVYSSDNGYHIGQHRLQPGKTCGYEEDINVPLIIRGPGVAANETVEDLVSTHTDLAPTFLSLLGIPLREDFDGSPIPLTQSQIEAERKREGSRREHANIEFWGVSLTEGIHQPKNGEFNTYKSLRLSGEEYDFYYSVWCTNEHEFYDMRNDPYQLNNLLSPSNALTQLNTSSSSLINQSSPFIPSSNTTVITLSTNPPLTLPISTISTRLDALLFILKSCRGATCRFPWLSLHPEGDVNSLVDALDPRFDQFYKEEVARVYFTFCANGLLAEAEGPVWDGGDNNGVEKDEKGRENGGSVYLREGVAWDFWV

SEQ ID NO: 13375 - DNA, 767 bp, Muscodor strobelii
  misc_feature: SGI EST ID NO. CUFF.31990.0
  misc_feature: Variant of the nucleotide sequence at SEQ ID NO 13373
aaattcgtctcgagaggatataacgatgattggttccccgtctggttggaagaagcagggtataacagctattacacggggaaactgttcaacgcacatacagtctcgaactacaactccccattccctcgtggattcgccggcacggactttctcttagacccatacacatactcctacctaaacagcacattccagtcaaactccgacccgccgcagagctacccaggacagtacagcacagacgtactagccgacaaggctcacgcactattagacgaagcagttcacagcgcagagaagaagccttttttcttgactgtagcaccaatcgcgccacacgccaatgtggaaataaaagagactgaggagggccggagtgtgttcttcagtgaacctataccggctgatcgacataaggatttatttcccgatgagattgtcccacggactcctagttttaatcctgaattcccatcaggagcaaactggattcgcgccctacccttacaaaacgattccaacatagcatataacgaccacttccaccgtcaacgcctgcggtccctacaagcagtcgatgaactcgtcgattcgcttatctcccgcttagacacctatgggatattagataatacatatatcgtctactcctcagataacgggtaccacataggccagcatagattacagccagggaaaacatgtgggtatgaggaagatataaacgttcctctaatcatccgcggtccaggtgtcgccgctaa

SEQ ID NO: 13376 - DNA, 1911 bp, Muscodor strobelii
  misc_feature: SGI cDNA ID NO. 564380
  misc_feature: Encodes the peptide sequence at SEQ ID NO 13377
atgcgtttctccatcgcgcttctaagcgcgctcactctcggcgctggattagctactagccaggaagcacagacacccttaaccgggcaagatgacgatgaccgcaagccgaatatcgtattcattctgacagacgaccaagacgtgcatctaaactcactagattacatgccgtttgttagaaaacatatcattgagcagggcacaacgttcaaaaaacactattgtaccacgagtttgtgttgtccgtctagagtcacgctttggacgggcaagttggcgcataatacgaatatcactgatgttcagcctccttacggtggttatcccaaattcgtctcgagaggatataacgatgattggttccccgtctggttggaagaagcagggtataacagctattacacggggaaactgttcaacgcacatacagtctcgaactacaactccccattccctcgtggattcgccggcacgcaggactttctcttagacccatacacatactcctacctaaacagcacattccagtcaaactccgacccgccgcagagctacccaggacagtacagcacagacgtactagccgacaaggctcacgcactattagacgaagcagttcacagcgcagagaagaagccttttttcttgactgtagcaccaatcgcgccacacgccaatgtggaaataaaagagactgaggagggccggagtgtgttcttcagtgaacctataccggctgatcgacataaggatttatttcccgatgagattgtcccacggactcctagttttaatcctgaattcccatcaggagcaaactggattcgcgccctacccttacaaaacgattccaacatagcatataacgaccacttccaccgtcaacgcctgcggtccctacaagcagtcgatgaactcgtcgattcgcttatctcccgcttagacacctatgggatattagataatacatatatcgtctactcctcagataacgggtaccacataggccagcatagattacagccagggaaaacatgtgggtatgaggaagatataaacgttcctctaatcatccgcggtccaggtgtcgccgctaacgaaactgtggaggatctcgtgagcacgcatactgatctcgctcccactttcctctctttacttgggataccgctgagggaggacttcgacgggagtcctattccccttactcagtctcagattgaagccgagaggaagcgggagggcagtagaagagagcatgctaatatcgagttttggggtgtttccctgacggagggtatacaccagccgaaaaatggggaatttaatacgtataagagtttacggttaagtggggaggagtacgatttttattactctgtttggtgtacgaatgagcatgagttttatgatatgaggaacgatccataccaactaaataatctcctctccccttcaaacgcactcacccaacttaacacatcctcatcctccctgatcaaccagtcttccccattcattccatcttcaaacacaacagttataaccctctcaacaaacccgcctttaaccctcccgatatccacaatatcaacgcgtctagatgcactgctcttcatcttaaaatcctgccggggagccacgtgccgttttccctggttatctctccaccctgaaggagacgtgaattcattagtagatgcgttggaccctaggtttgatcagttttataaagaagaggtggctagggtttattttactttctgcgcaaatggactgcttgccgaggctgagggccctgtttgggatgggggagataataacggggtcgagaaagatgagaaagggagggagaatggaggaagtgtgtatttgagagagggcgttgcttgggatttttgggtttaa

SEQ ID NO: 13377 - protein, 636 aa, Muscodor strobelii
  misc_feature: SGI Peptide ID NO. 564380
  misc_feature (35)..(482): Pfam Id: PF00884 Pfam Desc: Sulfatase
  misc_feature (1)..(636): NCBI GI: 145251061 Blast Desc: An15g05130 [Aspergillus niger] gi|134082572|emb|CAK42487.1| protein product [Aspergillus niger]
  misc_feature (1)..(635): NCBI GI: 171680767 Blast Desc: protein product [Podospora anserina] gi|27764278|emb|CAD60558.1| protein product [Podospora anserina] gi|170940011|emb|CAP65237.1| protein product [Podospora anserina]
  misc_feature (1)..(636): NCBI GI: 2873363 Blast Desc: arylsulfatase [Neurospora crassa]
  misc_feature (30)..(601): NCBI GI: 238500393 Blast Desc: arylsulfatase, [Aspergillus flavus NRRL3357] gi|220693184|gb|EED49530.1| arylsulfatase, [Aspergillus flavus NRRL3357]
  misc_feature (31)..(601): NCBI GI: 169779723 Blast Desc: [Aspergillus oryzae RIB40] gi|83773065|dbj|BAE63193.1| protein product [Aspergillus oryzae]
  misc_feature (1)..(635): NCBI GI: 171693357 Blast Desc: protein product [Podospora anserina] gi|170946627|emb|CAP73430.1| protein product [Podospora anserina]
  misc_feature (35)..(636): NCBI GI: 119483994 Blast Desc: arylsulfatase, [Neosartorya fischeri NRRL 181] gi|119410056|gb|EAW20003.1| arylsulfatase, [Neosartorya fischeri NRRL 181]
  misc_feature (5)..(636): NCBI GI: 70982853 Blast Desc: arylsulfatase [Aspergillus fumigatus Af293] gi|66844579|gb|EAL84916.1| arylsulfatase, [Aspergillus fumigatus Af293] gi|159123838|gb|EDP48957.1| arylsulfatase, [Aspergillus
  misc_feature (36)..(635): NCBI GI: 67902708 Blast Desc: AN8341.2 [Aspergillus nidulans FGSC A4] gi|40747747|gb|EAA66903.1| AN8341.2 [Aspergillus nidulans FGSC A4] gi|259484268|tpe|CBF80344.1| TPA: arylsulfatase, [Aspergillus
  misc_feature (16)..(601): NCBI GI: 154293528 Blast Desc: BC1G_13903 [Botryotinia fuckeliana B05.10] gi|150845284|gb|EDN20477.1| BC1G_13903 [Botryotinia fuckeliana B05.10]
  misc_feature (35)..(590): SWISSPROT Homolog: EC 3.1.6.1 Arylsulfatase
MRFSIALLSALTLGAGLATSQEAQTPLTGQDDDDRKPNIVFILTDDQDVHLNSLDYMPFVRKHIIEQGTTFKKHYCTTSLCCPSRVTLWTGKLAHNTNITDVQPPYGGYPKFVSRGYNDDWFPVWLEEAGYNSYYTGKLFNAHTVSNYNSPFPRGFAGTQDFLLDPYTYSYLNSTFQSNSDPPQSYPGQYSTDVLADKAHALLDEAVHSAEKKPFFLTVAPIAPHANVEIKETEEGRSVFFSEPIPADRHKDLFPDEIVPRTPSFNPEFPSGANWIRALPLQNDSNIAYNDHFHRQRLRSLQAVDELVDSLISRLDTYGILDNTYIVYSSDNGYHIGQHRLQPGKTCGYEEDINVPLIIRGPGVAANETVEDLVSTHTDLAPTFLSLLGIPLREDFDGSPIPLTQSQIEAERKREGSRREHANIEFWGVSLTEGIHQPKNGEFNTYKSLRLSGEEYDFYYSVWCTNEHEFYDMRNDPYQLNNLLSPSNALTQLNTSSSSLINQSSPFIPSSNTTVITLSTNPPLTLPISTISTRLDALLFILKSCRGATCRFPWLSLHPEGDVNSLVDALDPRFDQFYKEEVARVYFTFCANGLLAEAEGPVWDGGDNNGVEKDEKGRENGGSVYLREGVAWDFWV

SEQ ID NO: 13378 - DNA, 767 bp, Muscodor strobelii; identical to SEQ ID NO: 13375
  misc_feature: SGI EST ID NO. CUFF.31990.0
  misc_feature: Variant of the nucleotide sequence at SEQ ID NO 13376

SEQ ID NO: 13379 - DNA, 825 bp, Muscodor strobelii
  misc_feature: SGI cDNA ID NO. 564381
  misc_feature: Encodes the peptide sequence at SEQ ID NO 13380
atggttgccttccgctactcggtcctggccgcgcttgcgctcagcgtcacgtcagtcttcgctgaaactgctgaagctattccagttgtggacgaagccgcgaacgacgcggctgccgatgctgctgccaaggtcgacgtcgtcacaagcttccccgatgccgacatcttcggtgtcaagctaatcaacggcaagcccaccaaggctgtcatcgatgtcaccaacaatgatgacaagcctatgcaggttgccttcgtcggcggccagcttgtcactactcagcagctccctgccgaaaccccagaatacatgggcatcctccgcaacttgtcctcggtccagtaccaggccaccattcctgccggagagaagcagtctctgccctacacctttgtgcttgacatgcagcctcaggatgtccgactcaacctcatggctgttgtcatgactggcgacaactccatcttgtccctgggtgtctacaacgacgttgtcagcattgttgaggctcccatcagcatcttcgaccctcagatcatcttcttgtacctcttcctctccggtgcctttgctggtacctgctacttcgtctacaagacctacatcgaggccttcttccccggtgccaagaagaccgcccgaccttccaagaaggccaaggctatctccgagaaagagcctctctccggtggcgagggtactgccagcggtaccgacaaggcctacgatgagagctggatcccctccgaccacattaaccgccccaccgctcgccgcatcaagagcagcgccagcagcaagtccaagaacaagaacaccgagtag

SEQ ID NO: 13380 - protein, 274 aa, Muscodor strobelii
  misc_feature: SGI Peptide ID NO. 564381
  misc_feature (4)..(269): NCBI GI: 256731285 Blast Desc: NECHADRAFT_71675 [Nectria haematococca mpVI 77-13-4]
  misc_feature (1)..(269): NCBI GI: 85100895 Blast Desc: NCU01146 [Neurospora crassa OR74A] gi|18376269|emb|CAD21383.1| related to signal sequence receptor alpha chain [Neurospora crassa] gi|28922590|gb|EAA31817.1| crassa
  misc_feature (12)..(270): NCBI GI: 46126069 Blast Desc: FG07412.1 [Gibberella zeae PH-1]
  misc_feature (1)..(269): NCBI GI: 116206542 Blast Desc: CHGG_02564 [Chaetomium globosum CBS 148.51] gi|88183161|gb|EAQ90629.1| CHGG_02564 [Chaetomium globosum CBS 148.51]
  misc_feature (1)..(269): NCBI GI: 261351511 Blast Desc: signal sequence receptor alpha chain [Verticillium albo-atrum VaMs.102]
  misc_feature (1)..(260): NCBI GI: 39971787 Blast Desc: MGG_07209 [Magnaporthe grisea 70-15] gi|145019701|gb|EDK03929.1| MGG_07209 [Magnaporthe grisea 70-15]
  misc_feature (1)..(269): NCBI GI: 171692315 Blast Desc: protein product [Podospora anserina] gi|170946106|emb|CAP72907.1| protein product [Podospora anserina]
  misc_feature (1)..(265): NCBI GI: 154297431 Blast Desc: signal sequence receptor alpha chain [Botryotinia fuckeliana B05.10] gi|150858508|gb|EDN33700.1| signal sequence receptor alpha chain [Botryotinia fuckeliana B05.10]
  misc_feature (1)..(265): NCBI GI: 156048602 Blast Desc: SS1G_09033 [Sclerotinia sclerotiorum 1980] gi|154693429|gb|EDN93167.1| SS1G_09033 [Sclerotinia sclerotiorum 1980]
  misc_feature (45)..(262): NCBI GI: 189199112 Blast Desc: conserved [Pyrenophora tritici-repentis Pt-1C-BFP] gi|187982992|gb|EDU48480.1| conserved [Pyrenophora tritici-repentis Pt-1C-BFP]
MVAFRYSVLAALALSVTSVFAETAEAIPVVDEAANDAAADAAAKVDVVTSFPDADIFGVKLINGKPTKAVIDVTNNDDKPMQVAFVGGQLVTTQQLPAETPEYMGILRNLSSVQYQATIPAGEKQSLPYTFVLDMQPQDVRLNLMAVVMTGDNSILSLGVYNDVVSIVEAPISIFDPQIIFLYLFLSGAFAGTCYFVYKTYIEAFFPGAKKTARPSKKAKAISEKEPLSGGEGTASGTDKAYDESWIPSDHINRPTARRIKSSASSKSKNKNTE

SEQ ID NO: 13381 - DNA, 1520 bp, Muscodor strobelii
  misc_feature: SGI EST ID NO. CUFF.31995.0
  misc_feature: Variant of the nucleotide sequence at SEQ ID NO 13379
gtgaccgttggcgtatcttattggtcgctaagctccccatcggctccatcgacctgaatctccattcgaattgaccagatttcactcccactgccttgactgctgctgcaccggcaacagcactgcacatcgcaaagagagacggctttgatcatcaattggtctctctccacacacctttctcctcttccttcttcgtcatcctcttttcacccatcctccttgttctgccctcttttgtttcggttcatcggtccatcgggtcactggacactgtcaaaatggttgccttccgctactcggtcctggccgcgcttgcgctcagcgtcacgtcagtcttcgctgaaactgctgaagctattccagttgtggacgaagccgcgaacgacgcggctgccgatgctgctgccaaggtcgacgtcgtcacaagcttccccgatgccgacatcttcggtgtcaagctaatcaacggcaagcccaccaaggctgtcatcgatgtcaccaacaatgatgacaagcctatgcaggttgccttcgtcggcggccagcttgtcactactcagcagctccctgccgaaaccccagaatacatgggcatcctccgcaacttgtcctcggtccagtaccaggccaccattcctgccggagagaagcagtctctgccctacacctttgtgcttgacatgcagcctcaggatgtccgactcaacctcatggctgttgtcatgactggcgacaactccatcttgtccctgggtgtctacaacgacgttgtcagcattgttgaggctcccatcagcatcttcgaccctcagatcatcttcttgtacctcttcctctccggtgcctttgctggtacctgctacttcgtctacaagacctacatcgaggccttcttccccggtgccaagaagaccgcccgaccttccaagaaggccaaggctatctccgagaaagagcctctctccggtggcgagggtactgccagcggtaccgacaaggcctacgatgagagctggatcccctccgaccacattaaccgccccaccgctcgccgcatcaagagcagcgccagcagcaagtccaagaacaagaacaccgagtagaatcgacgttctgggaaaggaaaggcttcgcaataatcacgcccctcatcgttcgccgtgaaggctactactatctcggggtgaaaagggataattagggggcttggaaaaataggggcatggattggtgtataaaagtgcgaacctcacatgacgaggtctttatgatacctgtacatcaacccaaaacaggagaggacggtcttcccataaaaaggctatcctacgtaccaaaatgaaggaagtctcgagtatcatgttatgtgaagacaagagtcaggtgataattgattgccaaaccggctcaacagcaaaaatctcaattggcaagtgctgagaaatcattccgtgactcgcaatcaagaacaggctaccggaccactttcagccttttgctcatgcgcctttctcgcc

SEQ ID NO: 13382 - DNA, 1026 bp, Muscodor strobelii
  misc_feature: SGI cDNA ID NO. 564382
  misc_feature: Encodes the peptide sequence at SEQ ID NO 13383
atgaaacaaccacaccaagcaatcccaagaatatccctccactccttccaaacccgcctccccgaattaacaacccaaattctctccgcctcgcgcaaccccggattcttcatcctaacctcacactccatccccccttccctaataacgcaacaattcaccctctccacctcattcttcaacctgccccttcccacaaaatccctataccccttcgacaaaacaaacacaggctacgaatgcacctcccagatccgtcccagcaccggcgtaccagatcagaaagaatcctaccaaatccagtacagcccatctatgaacagcaaatggcctgctgaagatgtcctcccgggttttagggaagggtgtagggagtttatgaatgctgtgcagggggttagtgagcagttgatgatactttttgcgagggcgctgggatttgatgaggagtattttgttagggcgcatgatacgagtgatgaggagtgtcagacgacgttgaggctgttgcattattttccggtggataaggggaaagcgagagagatacagggggattatgttagggcgggtgctcatacggattggtgttgttttacgctgctttttcagaggcctggggagaatgggctggagatttgtccaagggggatggcaggcggaaaggaagggaaaggggatgatgtggcggatgaggagtggattggtgttgatgtgcaggagggggagattgtttgtaatattggcgatatgcttacgagctggagtgacgacctctttaagtcgacgcttcaccgtgtcaggactccgagagatcctgaaagggatcactttgggagtagatacagcatggcttatttcaatcaacctattaaaagctgtcgggtacaggggccgctcaagaagtaccccgaagtctcggcgggcgagttcattcaagctgcgatcaagcgtaattatgctgctctagaggcgagaaaggcgcatgagcaaaaggctgaaagtggtccggtagcctgttcttga

SEQ ID NO: 13383 - protein, 341 aa, Muscodor strobelii
  misc_feature: SGI Peptide ID NO. 564382
  misc_feature (163)..(290): Pfam Id: PF03171 Pfam Desc: 2OG-Fe(II) oxygenase superfamily
  misc_feature (191)..(290): Pfam Id: PF03171 Pfam Desc: 2OG-Fe(II) oxygenase superfamily
  misc_feature (5)..(338): NCBI GI: 169603548 Blast Desc: SNOG_04783 [Phaeosphaeria nodorum SN15] gi|160706419|gb|EAT87174.2| SNOG_04783 [Phaeosphaeria nodorum SN15]
  misc_feature (8)..(326): NCBI GI: 238490242 Blast Desc: leucoanthocyanidin dioxygenase, [Aspergillus flavus NRRL3357] gi|220696771|gb|EED53112.1| leucoanthocyanidin dioxygenase, [Aspergillus flavus NRRL3357]
  misc_feature (8)..(326): NCBI GI: 169772341 Blast Desc: [Aspergillus oryzae RIB40] gi|83768500|dbj|BAE58637.1| protein product [Aspergillus oryzae]
  misc_feature (8)..(326): NCBI GI: 212544214 Blast Desc: gibberellin 20 oxidase, [Penicillium marneffei ATCC 18224] gi|210065230|gb|EEA19324.1| gibberellin 20 oxidase, [Penicillium marneffei ATCC 18224]
  misc_feature (8)..(333): NCBI GI: 145231424 Blast Desc: An02g00550 [Aspergillus niger] gi|134056095|emb|CAK96270.1| protein product [Aspergillus niger]
  misc_feature (8)..(326): NCBI GI: 115383686 Blast Desc: ATEG_01025 [Aspergillus terreus NIH2624] gi|114196082|gb|EAU37782.1| ATEG_01025 [Aspergillus terreus NIH2624]
  misc_feature (8)..(326): NCBI GI: 189204071 Blast Desc: oxidoreductase domain containing protein [Pyrenophora tritici-repentis Pt-1C-BFP] gi|187985470|gb|EDU50958.1| oxidoreductase domain containing protein [Pyrenophora Pt-1C-BFP]
  misc_feature (8)..(321): NCBI GI: 169781152 Blast Desc: [Aspergillus oryzae RIB40] gi|83773781|dbj|BAE63906.1| protein product [Aspergillus oryzae]
  misc_feature (7)..(334): NCBI GI: 54112172 Blast Desc: FAO1p [Cryptococcus bacillisporus]
  misc_feature (7)..(334): NCBI GI: 54112138 Blast Desc: FAO1p [Cryptococcus bacillisporus]
  misc_feature (6)..(335): SWISSPROT Homolog: EC 1.14.11.15 Gibberellin 3-beta-dioxygenase
MKQPHQAIPRISLHSFQTRLPELTTQILSASRNPGFFILTSHSIPPSLITQQFTLSTSFFNLPLPTKSLYPFDKTNTGYECTSQIRPSTGVPDQKESYQIQYSPSMNSKWPAEDVLPGFREGCREFMNAVQGVSEQLMILFARALGFDEEYFVRAHDTSDEECQTTLRLLHYFPVDKGKAREIQGDYVRAGAHTDWCCFTLLFQRPGENGLEICPRGMAGGKEGKGDDVADEEWIGVDVQEGEIVCNIGDMLTSWSDDLFKSTLHRVRTPRDPERDHFGSRYSMAYFNQPIKSCRVQGPLKKYPEVSAGEFIQAAIKRNYAALEARKAHEQKAESGPVACS

SEQ ID NO: 13384 - DNA, 1339 bp, Muscodor strobelii
  misc_feature: SGI EST ID NO. CUFF.31999.0
  misc_feature: Variant of the nucleotide sequence at SEQ ID NO 13382
cttgctcaaaagatgtctgccgaaacgataagcaaagtaacataagcactctattccccgcatcatttaacgataccacctcatcttcaacctcctctgctcacagacgacaacatccttcgtgaaagcagcatctgacgagagtggacaagagataatcatgtatggtcgccatctccaactacaaaattaaagaaagctgcgttgatgttgaagaaacacgatatcggagcaagagatatcccattttcaaaagcgttgttgatattgccgtttctccatcaagtgccaaacgatagaaaataaaacaaacaagctcaagataccaacaatcatgaaacaaccacaccaagcaatcccaagaatatccctccactccttccaaacccgcctccccgaattaacaacccaaattctctccgcctcgcgcaaccccggattcttcatcctaacctcacactccatccccccttccctaataacgcaacaattcaccctctccacctcattcttcaacctgccccttcccacaaaatccctataccccttcgacaaaacaaacacaggctacgaatgcacctcccagatccgtcccagcaccggcgtaccagatcagaaagaatcctaccaaatccagtacagcccatctatgaacagcaaatggcctgctgaagatgtcctcccgggttttagggaagggtgtagggagtttatgaatgctgtgcagggggttagtgagcagttgatgatactttttgcgagggcgctgggatttgatgaggagtattttgttagggcgcatgatacgagtgatgaggagtgtcagacgacgttgaggctgttgcattattttccggtggataaggggaaagcgagagagatacagggggattatgttagggcgggtgctcatacggattggtgttgttttacgctgctttttcagaggcctggggagaatgggctggagatttgtccaagggggatggcaggcggaaaggaagggaaaggggatgatgtggcggatgaggagtggattggtgttgatgtgcaggagggggagattgtttgtaatattggcgatatgcttacgagctggagtgacgacctctttaagtcgacgcttcaccgtgtcaggactccgagagatcctgaaagggatcactttgggagtagatacagcatggcttatttcaatcaacctattaaaagctgtcgggtacaggtgagtactcggtatttcgtcattttgttgcaagagcgtgctcttgttgaaggggctggctgggttttgttgtctacatgcatcgtatgtgcatgtcctgacttacagttcaat

SEQ ID NO: 13385 - DNA, 486 bp, Muscodor strobelii
  misc_feature: SGI cDNA ID NO. 564383
  misc_feature: Encodes the peptide sequence at SEQ ID NO 13386
atggctcccaccaagccgcgcaccagcttaggcaaggaggccagcaaggacggcgaggctcccgtcaagcgtggccgcggcagacctcccaagaacggcgtctctgcccagccgaagaaggaacccactggtcgcccgcgcggtcgtcccccaggaaccggtggtggtgtcaagaaggccaccaagaaggccgcccccaaggtcaccactaccggcacccgctcgggtcgtggtcgtcccgccaaagctgatgtagccgcctctgctactcccaagaaagctgcaacacctaaggcatcgtccgccaaaagctcggccaagtctcgcaagggacgcaagagcgctaccgctgacgaggaggaggagaaggacgaggatgccgaggaagagaacccctctgtccatgccgatgccgatgatgccgaagacgatgacgttctggacgaggatgtgaacctgggcctcaatgtagtactccctccctag

SEQ ID NO: 13386 - protein, 161 aa, Muscodor strobelii
  misc_feature: SGI Peptide ID NO. 564383
  misc_feature (1)..(160): NCBI GI: 85100891 Blast Desc: NCU01145 [Neurospora crassa OR74A] gi|18376270|emb|CAD21384.1| related to high mobility group protein i/y (hmga) [Neurospora crassa] gi|28922589|gb|EAA31816.1|
  misc_feature (4)..(146): NCBI GI: 256731321 Blast Desc: NECHADRAFT_123405 [Nectria haematococca mpVI 77-13-4]
  misc_feature (17)..(75): NCBI GI: 171692317 Blast Desc: protein product [Podospora anserina] gi|170946107|emb|CAP72908.1| protein product [Podospora anserina]
MAPTKPRTSLGKEASKDGEAPVKRGRGRPPKNGVSAQPKKEPTGRPRGRPPGTGGGVKKATKKAAPKVTTTGTRSGRGRPAKADVAASATPKKAATPKASSAKSSAKSRKGRKSATADEEEEKDEDAEEENPSVHADADDAEDDDVLDEDVNLGLNVVLPP

SEQ ID NO: 13387 - DNA, 2266 bp, Muscodor strobelii
  misc_feature: SGI EST ID NO. CUFF.32007.0
  misc_feature: Variant of the nucleotide sequence at SEQ ID NO 13385
gcacgtccctaatcacccaaatcaaccgtttctcttcccttttctcttctttctttccacatccaccccaaacacctcccgtcgcgtctcatccccattctccccgttctcccgattttttccattttccatttgcgccaattcgtcttgacgaaggccgtgtcaattttttctctattttctcgcgtcctaatccccgtgtccacttacacgtctctttacacccaacacccacacatacaaacacaatggctcccaccaagccgcgcaccagcttaggcaaggaggccagcaaggacggcgaggctcccgtcaagcgtggccgcggcagacctcccaagaacggcgtctctgcccagccgaagaaggaacccactggtcgcccgcgcggtcgtcccccaggaaccggtggtggtgtcaagaaggccaccaagaaggccgcccccaaggtcaccactaccggcacccgctcgggtcgtggtcgtcccgccaaagctgatgtagccgcctctgctactcccaagaaagctgcaacacctaaggcatcgtccgccaaaagctcggccaagtctcgcaagggacgcaagagcgctaccgctgacgaggaggaggagaaggacgaggatgccgaggaagagaacccctctgtccatgccgatgccgatgatgccgaagacgatgacgttctggacgaggatgtgaacctgggcctcaatgacgattagaacacaccaaggacaacaaatgtttcgggtctatcagtcttcaccaacgccttccggaggtttagcggcatgacacccagccacagctaaggtcccaacaagttctgattgtttccaaaatatttatgactgttttcctctcttcggcgatcgatcaacgtttctgcacacaacaacgcgtgcttttgtattacacgaatgcttttctaccaaccctgggtaatccaatcgtccaatctacattggctggctatgatgaattgcgtatcgaggaaaagaaaggcaaaggaatgggataggaacatgtggagttgtggtgcgcgtttcccaatcaatggcaattgtacatttactgctctgggcatcatggtggctgttgctctaatcatgctttgtattaagggaaaagaaacggaaggaaggctattagtagcctgcctgtctaggtaattcgtgaatcgtacaagccgacgcgaaactgcgtctgagaatcatcttttgtcttgtgcttcaagtttgaatgtcgagtgtcttctgtccgaccctgtagcttgatgccccacagttgcttacagcgcgtcttgacgcgtctctctccccacttggacccttagatcctcagtattccagtctctaacaaagacttcccataccctcgtcactggcatgtctcattctcattccctcttccaagcctcaaactcctcctcgagatgctccttgaacttcttgaaccccctcccccaactctccccacacctccaacacacgaggtccccatcgagataacccgctttccccgggtgtaacctcggatcatcgtccctgagcgggaaatccttgacgtctattaaaaacggtgtattgaacgacaggtaatgtttcttgtgctttagacactctgagtgcatgtccgggctcaggacgtggatatgtagatcgttcatggaggggtgggcatggacgcctactaggatgtctttttcccagtttcgtcctggcgggaggggtttgtcttctggccatgatgtctcctcgtttaggacggattcaaggagtttggaggaggtggagaaggagccgtagcgtcgctggagttctttggcgacgagggatttgagaacgagggcttcggcttggatggtagagaggaaggacgggtcagaggcgaaggcgtcgaatggatggtaccgtgataagggggagatgggcaggaggagcgtgtgaacggctgatttggggtagaggtcatttattgctacgaaatgctcgttgtggtatattacgcggccttttgggtgagagagggggtttgtagtataggcgcttaggccgtctcgacgggtcagtgagccggtgtagtctgatcgcgttgaggctagggttttcggttgtgggactttcttgggcttgggagacatgagttcggtgactgcccaggttgtgttagtgagtgagactgggactgagggtggggatgaggtgagtggtaagaggttgacttacaagcattgcgctttgtgccgtgggttacggctacg

SEQ ID NO: 13388 - DNA, 885 bp, Muscodor strobelii
  misc_feature: SGI cDNA ID NO. 564384
  misc_feature: Elevated expression when VOC is produced
  misc_feature: Encodes the peptide sequence at SEQ ID NO 13389
atgtcgaccacagaccccgattccgatccggaagatgcaatcacgcaagacgaaatcaatggaacagcacccgcgccttcagcaagtacaagtggcgtagccgtaacccacggcacaaagcgcaatgctttcaccgaactcatgtctcccaagcccaagaaagtcccacaaccgaaaaccctagcctcaacgcgatcagactacaccggctcactgacccgtcgagacggcctaagcgcctatactacaaaccccctctctcacccaaaaggccgcgtaatataccacaacgagcatttcgtagcaataaatgacctctaccccaaatcagccgttcacacgctcctcctgcccatctcccccttatcacggtaccatccattcgacgccttcgcctctgacccgtccttcctctctaccatccaagccgaagccctcgttctcaaatccctcgtcgccaaagaactccagcgacgctacggctccttctccacctcctccaaactccttgaatccgtcctaaacgaggagacatcatggccagaagacaaacccctcccgccaggacgaaactgggaaaaagacatcctagtaggcgtccatgcccacccctccatgaacgatctacatatccacgtcctgagcccggacatgcactcagagtgtctaaagcacaagaaacattacctgtcgttcaatacaccgtttttaatagacgtcaaggatttcccgctcagggacgatgatccgaggttacacccggggaaagcgggttatctcgatggggacctcgtgtgttggaggtgtggggagagttgggggagggggttcaagaagttcaaggagcatctcgaggaggagtttgaggcttggaagagggaatga

SEQ ID NO: 13389 - protein, 294 aa, Muscodor strobelii
  misc_feature: SGI Peptide ID NO. 564384
  misc_feature (90)..(219): Pfam Id: PF01230 Pfam Desc: HIT domain
  misc_feature (12)..(294): NCBI GI: 261351513 Blast Desc: conserved [Verticillium albo-atrum VaMs.102]
  misc_feature (7)..(293): NCBI GI: 46125535 Blast Desc: FG07145.1 [Gibberella zeae PH-1]
  misc_feature (7)..(293): NCBI GI: 256730945 Blast Desc: NECHADRAFT_49288 [Nectria haematococca mpVI 77-13-4]
  misc_feature (41)..(292): NCBI GI: 225682125 Blast Desc: conserved [Paracoccidioides brasiliensis Pb03]
  misc_feature (41)..(292): NCBI GI: 226289308 Blast Desc: conserved [Paracoccidioides brasiliensis Pb18]
  misc_feature (41)..(292): NCBI GI: 226280040 Blast Desc: conserved [Paracoccidioides brasiliensis Pb01]
  misc_feature (18)..(293): NCBI GI: 242817657 Blast Desc: conserved [Talaromyces stipitatus ATCC 10500] gi|218713466|gb|EED12890.1| conserved [Talaromyces stipitatus ATCC 10500]
  misc_feature (23)..(293): NCBI GI: 71002534 Blast Desc: conserved [Aspergillus fumigatus Af293] gi|66853586|gb|EAL93910.1| conserved [Aspergillus fumigatus Af293] gi|159130005|gb|EDP55119.1| conserved [Aspergillus A1163]
  misc_feature (22)..(292): NCBI GI: 212530750 Blast Desc: conserved [Penicillium marneffei ATCC 18224] gi|210074930|gb|EEA29017.1| conserved [Penicillium marneffei ATCC 18224]
  misc_feature (23)..(293): NCBI GI: 119482097 Blast Desc: NFIA_091390 [Neosartorya fischeri NRRL 181] gi|119409231|gb|EAW19180.1| conserved [Neosartorya fischeri NRRL 181]
  misc_feature: Useful for introducing or modulating the production of volatile compounds
MSTTDPDSDPEDAITQDEINGTAPAPSASTSGVAVTHGTKRNAFTELMSPKPKKVPQPKTLASTRSDYTGSLTRRDGLSAYTTNPLSHPKGRVIYHNEHFVAINDLYPKSAVHTLLLPISPLSRYHPFDAFASDPSFLSTIQAEALVLKSLVAKELQRRYGSFSTSSKLLESVLNEETSWPEDKPLPPGRNWEKDILVGVHAHPSMNDLHIHVLSPDMHSECLKHKKHYLSFNTPFLIDVKDFPLRDDDPRLHPGKAGYLDGDLVCWRCGESWGRGFKKFKEHLEEEFEAWKRE

SEQ ID NO: 13390 - DNA, 4176 bp, Muscodor strobelii
  misc_feature: SGI cDNA ID NO. 564385
  misc_feature: Encodes the peptide sequence at SEQ ID NO 13391
atggtgaagaaggggaaggaaaaggctaaggctccgccggccggggcttctgccgcaggttctgcgtcgcaagcctcgaccagttcatccaagaaacccgctgcgaagttaagtaacaagaagcccgcccaggaggacgacttcatcgtcttcaccaactccaccaaagatgtgaagccaaagaaaagcggaggaaaagctgcaaatgacgaggagataccaacgggtccgccaaagcctaccgtgaaacagatcatcggaggttccagctggacgggtaaactaccggtcaatctgctctcagaacactgccaacgacagaaatgggataggcctgactaccagagaataagaggttccgaaggcttctcatacttcgttcaactaagcgccaagaaccccaagacgggggaagtgaccaaggttcctgccttcaagatccatccggatcacaaacatctcgtgcacagagagaccgatctggaagccaagcatgccgcggccacatatgcgttatttcgcgtgtgtagtatgaagaacatccacatgacgttgcctccagattacaagtcgctgtggaagcagttcgaggccatcaagaaggaggatgtcaagaacaagaatgagtggatgtatgatgcggatcctttcttagcgcaaaaacagcgagacgatgccaaaatcgctgctgagaagaagagaaaggaagcggaggccattaaggagaaggcgaagaacatgcctggtgctgccggtttggtgctgagaagcaatgccgcttcaggctctggatcttcaggccccagaggcggcggcgatccgatgcggggatggacaaccgtgccaaagatcgaaatgggccgaaagactcgatcccaacttgaagatctgttaaggcgagaggtcatatggaatcctcatggagtcaaaatgtcatcctcactgaaggagtcgataaccaaggagctgactagctctggcttccgtcacagtcatgtatcggaagctgtggatgaatgcaaagatcgagaggagactcttgagtggcttctcatacacgtccctgaggacgacttgccaagatgggcgctgcccgagagctacagtgcaggtgttacggtcgcggctatttcagacctgaaaagagaagctgcaatcaagcggctatcacaatctggatactcagttgagctttgcaagaagctatacgacgagcacgattcaaacgaaggacggacagcggaggcactacaacactttcttgtgtcaagtggtagtggagacagccaagatactaccactgaggcaccgttcatatccggcacccctgaagaggcctggtctgaagagatggaaagtctaggctcagtcttcggagagcatttcaagcgtgtctcagatgacgtctgtcaaattcgtgtggagaatgttaggaacggccccaagaaagacattgagacgtatgctcagatacgaagatccccccggtacccagcagaaatcatcttctcgttagagtctgatcttccctcctatatcaaactcagcgcggtcaagaagactctgaactatctcgctacggatctcagcgaggagccgatgaagatctactttgccattgactggatacaacagaacatcaatgagatcatcgagcgacctgggaagcttcgagacatctctggtgttgcttctgtagcagcagaagtacgaaacgtttatgcggtgaaacagcgacaatctcggcatccgaaagccttgcctcgaactgtcgatggacgaagcaaagaagaatggcagaaacgacaagaaaatccagccctgaaggagatgattgcgcaacgacaaaagctacctgcttggggagtcagagaccaggtcgttgacacagtactggaaaatcaagttacgattattgccggagagacagggtcgggcaagtcgacacagtctgtccagttcatccttgatgatttgtacagcaaaggccttggcaatgctacaagcatcatatgcacgcagcctcgccgtatttctgcactaggccttgcggatcgcgtcagtgaagaacggtgttcgcaagtcggtagagaggtcggttacacaattcgaggagagaacaagactggtccacaaacgaagatcactttcgttactactggtgtcttgttacgacgccttcaaacatcaggcggacgaacggaagatgttatcgcgtctctagcagatgtcagtcacgttgtgattgacgaagtccacgaacgcagtctagacacagacttccttttgagcatcattcgagatgtactgaagaagagaaaagacctcaagctcgtgctgatgagcgctactctcgatgccgcagcattcaaaggttattttacgtcagagggtttggatgttggcttagtcgagatcgcaggaaggacatatcctgtggaagactactacctagaagatatcatacacatgaccaacttcacagtcgaagataaataccgaaatgacagattcgacgactctgagaacattggcgacaaagctgggcaacaagatcctgttaataaggtcattcagaaactagggttccgcatcaactacaatctattagtcgagacaacgaaagagatcgatgcagatcttgcgtatcatggcaagaaaggcggtattctgatcttcttgcccggaactgcagagatcaccaagactgtcaatctactgaaatctatctcttccctacatgtcctgcctttacacgcatctcttgagacgagagagcaacgtagagtcttcgcaggccctccagccgggaaacgcaaagtcgttgtggctacgaacgtagcagagacgtcaatcacaattgatgatatcgtcgctgtcattgacaccggtaaagtgaaagagaccagcttcgatcctcagaataacatgcgcaagttggaagaaacatgggcctcgagggccgcatgcaagcaaagacgaggtcgtgccggccgtgtacaagcaggtaaatgctacaaactatacaccaagagccgcgaggagcagatggcagagcgtccagaacctgaaatccgccgcgtaccacttgagcaactgtgcttatctgttcgagccatgggtactaaagatattggtggtttcctaggtcgaacaccaacaccgccaactatcaaggcgattgaaaacgctatcaaaatgctgcagcgcatgggtgcccttgatggcgatgagctgactgctctaggacagcagctagctatgattcccgccgatcttcgatgtggcaaactcatggtgtacggtgcgatatttggctgtctagaagatagcattactattgctgcaattcttagtaccaggagtccgtttgtctcgccacccgaaaagcgagatttagccaaaaaggcacgtatgcgcttcgctagaggcgatggcgacttactcacagatcttcgagcctttcagcaatggagcgacatgtcagatgagggaatgggccagcgacagctgcgaaattactgcgatgagaacttcctttcgtaccagacattatcggacattgcatcgacacggacacagtactattcggcgctgacggaaatcggcctcgtcggcacctcggtacaatctatccatgctacagtatccatgcccctactccgcgccctcacagcctcagcctttgcaccccaaatcgcacgcattcaattcccggacaagaagttcgcagcgtcaatgactggtgctgtggagcttgaccccgaagcccggacaatcaagtactacacgcaggagaatggccgcgtattcatacaccccagtagcgtgcttttcgatagtccggggttttctggaaatgcggcgttcgtgtcttatttcactatgatggagacttctaagacatttattcgggacttgacgccattcaacgcattcacactgctcctattctccggaacgattgatctcgacacgctcggtcggggtctagtcgttgatgggtggcttcgattacgaggatgggcaagaatcggtgtacttgtctcgaggttaaggggtatgctagataacatcatagcgatgaaggtcaataatccacagttggatgtcaaagagaacgaggtcattaagatggttgctagacttatagagttagatggtttagatgcttga

SEQ ID NO: 13391 - protein, 1391 aa, Muscodor strobelii
  misc_feature: SGI Peptide ID NO. 564385
  misc_feature (442)..(547): Pfam Id: PF05773 Pfam Desc: RWD domain
  misc_feature (621)..(790): Pfam Id: PF00270 Pfam Desc: DEAD/DEAH box helicase
  misc_feature (1169)..(1322): Pfam Id: PF07717 Pfam Desc: Domain of function (DUF1605)
  misc_feature (1063)..(1152): Pfam Id: PF04408 Pfam Desc: Helicase associated domain (HA2)
  misc_feature (907)..(1001): Pfam Id: PF00271 Pfam Desc: Helicase conserved C-terminal domain
  misc_feature (1)..(1391): NCBI GI: 39971487 Blast Desc: MGG_07059 [Magnaporthe grisea 70-15] gi|145019520|gb|EDK03748.1| MGG_07059 [Magnaporthe grisea 70-15]
  misc_feature (45)..(1391): NCBI GI: 164426163 Blast Desc: NCU01143 [Neurospora crassa OR74A] gi|18376272|emb|CAD21386.1| conserved [Neurospora crassa] gi|157071222|gb|EAA31814.2| NCU01143 [Neurospora crassa OR74A]
  misc_feature (1)..(1391): NCBI GI: 116206782 Blast Desc: CHGG_02684 [Chaetomium globosum CBS 148.51] gi|88183281|gb|EAQ90749.1| CHGG_02684 [Chaetomium globosum CBS 148.51]
  misc_feature (75)..(1391): NCBI GI: 256730944 Blast Desc: [Nectria haematococca mpVI 77-13-4]
  misc_feature (52)..(1391): NCBI GI: 46125529 Blast Desc: FG07142.1 [Gibberella zeae PH-1]
  misc_feature (1)..(1390): NCBI GI: 156042251 Blast Desc: SS1G_11676 [Sclerotinia sclerotiorum 1980] gi|154696059|gb|EDN95797.1| SS1G_11676 [Sclerotinia sclerotiorum 1980]
  misc_feature (1)..(1390): NCBI GI: 154298471 Blast Desc: BC1G_11420 [Botryotinia fuckeliana B05.10] gi|150858016|gb|EDN33208.1| BC1G_11420 [Botryotinia fuckeliana B05.10]
  misc_feature (210)..(1391): NCBI GI: 171692321 Blast Desc: protein product [Podospora anserina] gi|170946109|emb|CAP72910.1| protein product [Podospora anserina]
  misc_feature (79)..(1390): NCBI GI: 169762684 Blast Desc: [Aspergillus oryzae RIB40] gi|83770270|dbj|BAE60403.1| protein product [Aspergillus oryzae]
  misc_feature (62)..(1390): NCBI GI: 121716744 Blast Desc: DEAD/DEAH box helicase, [Aspergillus clavatus NRRL 1] gi|119404055|gb|EAW14472.1| DEAD/DEAH box helicase, [Aspergillus clavatus NRRL 1]
MVKKGKEKAKAPPAGASAAGSASQASTSSSKKPAAKLSNKKPAQEDDFIVFTNSTKDVKPKKSGGKAANDEEIPTGPPKPTVKQIIGGSSWTGKLPVNLLSEHCQRQKWDRPDYQRIRGSEGFSYFVQLSAKNPKTGEVTKVPAFKIHPDHKHLVHRETDLEAKHAAATYALFRVCSMKNIHMTLPPDYKSLWKQFEAIKKEDVKNKNEWMYDADPFLAQKQRDDAKIAAEKKRKEAEAIKEKAKNMPGAAGLVLRSNAASGSGSSGPRGGGDPMRGWTTVPKIEMGRKTRSQLEDLLRREVIWNPHGVKMSSSLKESITKELTSSGFRHSHVSEAVDECKDREETLEWLLIHVPEDDLPRWALPESYSAGVTVAAISDLKREAAIKRLSQSGYSVELCKKLYDEHDSNEGRTAEALQHFLVSSGSGDSQDTTTEAPFISGTPEEAWSEEMESLGSVFGEHFKRVSDDVCQIRVENVRNGPKKDIETYAQIRRSPRYPAEIIFSLESDLPSYIKLSAVKKTLNYLATDLSEEPMKIYFAIDWIQQNINEIIERPGKLRDISGVASVAAEVRNVYAVKQRQSRHPKALPRTVDGRSKEEWQKRQENPALKEMIAQRQKLPAWGVRDQVVDTVLENQVTIIAGETGSGKSTQSVQFILDDLYSKGLGNATSIICTQPRRISALGLADRVSEERCSQVGREVGYTIRGENKTGPQTKITFVTTGVLLRRLQTSGGRTEDVIASLADVSHVVIDEVHERSLDTDFLLSIIRDVLKKRKDLKLVLMSATLDAAAFKGYFTSEGLDVGLVEIAGRTYPVEDYYLEDIIHMTNFTVEDKYRNDRFDDSENIGDKAGQQDPVNKVIQKLGFRINYNLLVETTKEIDADLAYHGKKGGILIFLPGTAEITKTVNLLKSISSLHVLPLHASLETREQRRVFAGPPAGKRKVVVATNVAETSITIDDIVAVIDTGKVKETSFDPQNNMRKLEETWASRAACKQRRGRAGRVQAGKCYKLYTKSREEQMAERPEPEIRRVPLEQLCLSVRAMGTKDIGGFLGRTPTPPTIKAIENAIKMLQRMGALDGDELTALGQQLAMIPADLRCGKLMVYGAIFGCLEDSITIAAILSTRSPFVSPPEKRDLAKKARMRFARGDGDLLTDLRAFQQWSDMSDEGMGQRQLRNYCDENFLSYQTLSDIASTRTQYYSALTEIGLVGTSVQSIHATVSMPLLRALTASAFAPQIARIQFPDKKFAASMTGAVELDPEARTIKYYTQENGRVFIHPSSVLFDSPGFSGNAAFVSYFTMMETSKTFIRDLTPFNAFTLLLFSGTIDLDTLGRGLVVDGWLRLRGWARIGVLVSRLRGMLDNIIAMKVNNPQLDVKENEVIKMVARLIELDGLDA

SEQ ID NO: 13392 - DNA, 4580 bp, Muscodor strobelii
  misc_feature: SGI EST ID NO. CUFF.32013.0
  misc_feature: Variant of the nucleotide sequence at SEQ ID NO 13390
ccgcggtggggtgcacagctccaagctttatctaagggaaggtgcacggctttgcactgtccaacatccctaataactcttggaagcgtagtactgtgtccgggttccagattactgtggacgttgttgctgtggttaatcatttttctacctaccgccaccatcacccgtcatcttcgagttctctttgttaatccgacagagacactacatcaaatcgcgagcccacccatggctcatcatggtgaagaaggggaaggaaaaggctaaggctccgccggccggggcttctgccgcaggttctgcgtcgcaagcctcgaccagttcatccaagaaacccgctgcgaagttaagtaacaagaagcccgcccaggaggacgacttcatcgtcttcaccaactccaccaaagatgtgaagccaaagaaaagcggaggaaaagctgcaaatgacgaggagataccaacgggtccgccaaagcctaccgtgaaacagatcatcggaggttccagctggacgggtaaactaccggtcaatctgctctcagaacactgccaacgacagaaatgggataggcctgactaccagagaataagaggttccgaaggcttctcatacttcgttcaactaagcgccaagaaccccaagacgggggaagtgaccaaggttcctgccttcaagatccatccggatcacaaacatctcgtgcacagagagaccgatctggaagccaagcatgccgcggccacatatgcgttatttcgcgtgtgtagtatgaagaacatccacatgacgttgcctccagattacaagtcgctgtggaagcagttcgaggccatcaagaaggaggatgtcaagaacaagaatgagtggatgtatgatgcggatcctttcttagcgcaaaaacagcgagacgatgccaaaatcgctgctgagaagaagagaaaggaagcggaggccattaaggagaaggcgaagaacatgcctggtgctgccggtttggtgctgagaagcaatgccgcttcaggctctggatcttcaggccccagaggcggcggcgatccgatgcggggatggacaaccgtgccaaagatcgaaatgggccgaaagactcgatcccaacttgaagatctgttaaggcgagaggtcatatggaatcctcatggagtcaaaatgtcatcctcactgaaggagtcgataaccaaggagctgactagctctggcttccgtcacagtcatgtatcggaagctgtggatgaatgcaaagatcgagaggagactcttgagtggcttctcatacacgtccctgaggacgacttgccaagatgggcgctgcccgagagctacagtgcaggtgttacggtcgcggctatttcagacctgaaaagagaagctgcaatcaagcggctatcacaatctggatactcagttgagctttgcaagaagctatacgacgagcacgattcaaacgaaggacggacagcggaggcactacaacactttcttgtgtcaagtggtagtggagacagccaagatactaccactgaggcaccgttcatatccggcacccctgaagaggcctggtctgaagagatggaaagtctaggctcagtcttcggagagcatttcaagcgtgtctcagatgacgtctgtcaaattcgtgtggagaatgttaggaacggccccaagaaagacattgagacgtatgctcagatacgaagatccccccggtacccagcagaaatcatcttctcgttagagtctgatcttccctcctatatcaaactcagcgcggtcaagaagactctgaactatctcgctacggatctcagcgaggagccgatgaagatctactttgccattgactggatacaacagaacatcaatgagatcatcgagcgacctgggaagcttcgagacatctctggtgttgcttctgtagcagcagaagtacgaaacgtttatgcggtgaaacagcgacaatctcggcatccgaaagccttgcctcgaactgtcgatggacgaagcaaagaagaatggcagaaacgacaagaaaatccagccctgaaggagatgattgcgcaacgacaaaagctacctgcttggggagtcagagaccaggtcgttgacacagtactggaaaatcaagttacgattattgccggagagacagggtcgggcaagtcgacacagtctgtccagttcatccttgatgatttgtacagcaaaggccttggcaatgctacaagcatcatatgcacgcagcctcgccgtatttctgcactaggccttgcggatcgcgtcagtgaagaacggtgttcgcaagtcggtagagaggtcggttacacaattcgaggagagaacaagactggtccacaaacgaagatcactttcgttactactggtgtcttgttacgacgccttcaaacatcaggcggacgaacggaagatgttatcgcgtctctagcagatgtcagtcacgttgtgattgacgaagtccacgaacgcagtctagacacagacttccttttgagcatcattcgagatgtactgaagaagagaaaagacctcaagctcgtgctgatgagcgctactctcgatgccgcagcattcaaaggttattttacgtcagagggtttggatgttggcttagtcgagatcgcaggaaggacatatcctgtggaagactactacctagaagatatcatacacatgaccaacttcacagtcgaagataaataccgaaatgacagattcgacgactctgagaacattggcgacaaagctgggcaacaagatcctgttaataaggtcattcagaaactagggttccgcatcaactacaatctattagtcgagacaacgaaagagatcgatgcagatcttgcgtatcatggcaagaaaggcggtattctgatcttcttgcccggaactgcagagatcaccaagactgtcaatctactgaaatctatctcttccctacatgtcctgcctttacacgcatctcttgagacgagagagcaacgtagagtcttcgcaggccctccagccgggaaacgcaaagtcgttgtggctacgaacgtagcagagacgtcaatcacaattgatgatatcgtcgctgtcattgacaccggtaaagtgaaagagaccagcttcgatcctcagaataacatgcgcaagttggaagaaacatgggcctcgagggccgcatgcaagcaaagacgaggtcgtgccggccgtgtacaagcaggtaaatgctacaaactatacaccaagagccgcgaggagcagatggcagagcgtccagaacctgaaatccgccgcgtaccacttgagcaactgtgcttatctgttcgagccatgggtactaaagatattggtggtttcctaggtcgaacaccaacaccgccaactatcaaggcgattgaaaacgctatcaaaatgctgcagcgcatgggtgcccttgatggcgatgagctgactgctctaggacagcagctagctatgattcccgccgatcttcgatgtggcaaactcatggtgtacggtgcgatatttggctgtctagaagatagcattactattgctgcaattcttagtaccaggagtccgtttgtctcgccacccgaaaagcgagatttagccaaaaaggcacgtatgcgcttcgctagaggcgatggcgacttactcacagatcttcgagcctttcagcaatggagcgacatgtcagatgagggaatgggccagcgacagctgcgaaattactgcgatgagaacttcctttcgtaccagacattatcggacattgcatcgacacggacacagtactattcggcgctgacggaaatcggcctcgtcggcacctcggtacaatctatccatgctacagtatccatgcccctactccgcgccctcacagcctcagcctttgcaccccaaatcgcacgcattcaattcccggacaagaagttcgcagcgtcaatgactggtgctgtggagcttgaccccgaagcccggacaatcaagtactacacgcaggagaatggccgcgtattcatacaccccagtagcgtgcttttcgatagtccggggttttctggaaatgcggcgttcgtgtcttatttcactatgatggagacttctaagacatttattcgggacttgacgccattcaacgcattcacactgctcctattctccggaacgattgatctcgacacgctcggtcggggtctagtcgttgatgggtggcttcgattacgaggatgggcaagaatcggtgtacttgtctcgaggttaaggggtatgctagataacatcatagcgatgaaggtcaataatccacagttggatgtcaaagagaacgaggtcattaagatggttgctagacttatagagttagatggtttagatgcttgaataatgactccgaattagtgaaggaaacttggatttgctgtgataatgaagctttatgtgagtgctgtgatgatttctaatgagcatgcgaagtgatgcttggtgatgacatatgcagaataatgtatacttgaccgaatagtccaaattgcacgggcagttg

SEQ ID NO: 13393 - DNA, 426 bp, Muscodor strobelii
  misc_feature: SGI cDNA ID NO. 564386
  misc_feature: Encodes the peptide sequence at SEQ ID NO 13394
atgactactccaatggctagctgctctcccctaggaggttcctcacggggctctgccctgttggagcctcctagggggagtagttatgtcagtgatgtcgttggcttcaagcaccctcgtctcggagatctcgttgatgtgttctatcctggtatgccggcacctgggtcacccaccttgaacgaagagttcttacagcaaacaagctttaagcataagttctccaatcataacttatccgacaatgagaagttgttagactgcaatgtaattttgacgttcgatattgaagggtccttcaaggatagcattatgagcattccccgcagagacaaactaggatataacctgatggaactctcccccgatcccgagaaagccgcgaaaggtatccaagttcctgaactggataaagtcaaaggatga

SEQ ID NO: 13394 - protein, 141 aa, Muscodor strobelii
  misc_feature: SGI Peptide ID NO. 564386
MTTPMASCSPLGGSSRGSALLEPPRGSSYVSDVVGFKHPRLGDLVDVFYPGMPAPGSPTLNEEFLQQTSFKHKFSNHNLSDNEKLLDCNVILTFDIEGSFKDSIMSIPRRDKLGYNLMELSPDPEKAAKGIQVPELDKVKG

SEQ ID NO: 13395 - DNA, 416 bp, Muscodor strobelii
  misc_feature: SGI EST ID NO. CUFF.32019.0
  misc_feature: Variant of the nucleotide sequence at SEQ ID NO 13393
gcaacatcacgctctcatcccacacatctccgccagcacttgcgttaccatgactactccaatggctagctgctctcccctaggaggttcctcacggggctctgccctgttggagcctcctagggggagtagttatgtcagtgatgtcgttggcttcaagcaccctcgtctcggagatctcgttgatgtgttctatcctggtatgccggcacctgggtcacccaccttgaacgaagagttcttacagcaaacaagctttaagcataagttctccaatcataacttatccgacaatgagaagttgttagactgcaatgtaattttgacgttcgatattgaagggtccttcaaggatagcattatgagcattccccgcagagacaaactaggatataacctgatggaactctcccccg

SEQ ID NO: 13396 - DNA, 1554 bp, Muscodor strobelii
  misc_feature: SGI cDNA ID NO. 564387
  misc_feature: Elevated expression when VOC is produced
  misc_feature: Encodes the peptide sequence at SEQ ID NO 13397
atggaagctttccatggcctaacattcacaggctatattgttaccctagccgccacttattatatagctttgtttggctatagacttctccttcaccccctttctaaatatccaggtccattcttcgcaagaattacagacggctatggcggactgtacgcactaaaacgtgagcttcatttaaaaacatggaaagaccatcaacaatttggtcctatcattcgacacggcccaaacaagctggtcttcagctctgtgcaagctgtccgtgacatatatctgaacgagggggtctcaaagtcgctatgctatgaagctggcaatgtcaacccaaccacaacgaatgtctttaatacaattgacaagcgtacgcatcgcgtcaaacgcaaacttgtcggccgaattgttaccgatcgttcgatcaggacttttgagtcaaagctatctgatcatgtcgatgtgtttcttgcccagatccagcgagactttgaaatgccgatcaatgtgtcagggcgatgcaaatatctagggctagatatagcagcgtaccttgggttcggatatgaattaaacctccagtcagacccgacataccgctatcttcttcgtgctatgatgattggcagttggaggctgaacatgtatatgcaattgccgtttttgcgcaagcttcgccttgaaattgttttctatctcctagctgtcgtacaaggcaagagtttcttgaaaactctctcgatgatgattcaatcccgactggcaaaagacaagaaagaagagcacgatttgtacgcttttatggccgaggccctcgacgcaccacaagaagacaggatcacagctagtgagatctggactgaaggcacttttttccttcctgcagcaggggacacaacttctacaactctgagtgcccttttttattacctcgcgcgaaatccacaatatcgcgagaagttagctgctgagattcgatcatcatttaccagcgctgcggaaatccgtgggtctcgcctgacgggatgtcgcttcctaagggcatgcatcaacgagagtctacgaatgtcgccgccagtaccaggcacaatgtggcgtcagaaaatagcatccgatgatgaccaggtcctaattattgatggccatgttatcccaccgggcacaagcgttggtgtagatatctatgcgctgcaccataacccacaatactttcctgaccctttcaattacaaccctgagcgatggttgtcaccaacgacgggcgattcagaggcaaagcttgctccacacggagaggaagacgtggaggcctcggcttccgaacccgatggcctggtaattaatccggctttcattccgttctctctcggtgcccgcggttgtgcaggcaaggcactagcgtatgctgaagtaagcatggcaatggcccgtacgctgtggtgcttcgacttcgaattcgcggacttacaagctgaacaggggcctgaatttaggctctgggatgttttcacatctagccatgatgggccttacctaaaattcacgcctcgaccttga

SEQ ID NO: 13397 - protein, 517 aa, Muscodor strobelii
  misc_feature: SGI Peptide ID NO. 564387
  misc_feature (33)..(513): Pfam Id: PF00067 Pfam Desc: Cytochrome P450
  misc_feature (297)..(513): Pfam Id: PF00067 Pfam Desc: Cytochrome P450
  misc_feature (3)..(516): NCBI GI: 85092131 Blast Desc: NCU06895 [Neurospora crassa OR74A] gi|28920645|gb|EAA30006.1| conserved [Neurospora crassa OR74A]
  misc_feature (22)..(516): NCBI GI: 255954725 Blast Desc: Pc21g10830 [Penicillium chrysogenum Wisconsin 54-1255] gi|211589826|emb|CAP95980.1| Pc21g10830 [Penicillium chrysogenum Wisconsin 54-1255]
  misc_feature (20)..(513): NCBI GI: 46123381 Blast Desc: FG06068.1 [Gibberella zeae PH-1]
  misc_feature (19)..(516): NCBI GI: 169782556 Blast Desc: [Aspergillus oryzae RIB40] gi|83774484|dbj|BAE64607.1| protein product [Aspergillus oryzae]
  misc_feature (8)..(516): NCBI GI: 145608110 Blast Desc: MGG_03375 [Magnaporthe grisea 70-15] gi|145015610|gb|EDK00100.1| MGG_03375 [Magnaporthe grisea 70-15]
  misc_feature (28)..(516): NCBI GI: 189206195 Blast Desc: cytochrome P450 3A31 [Pyrenophora tritici-repentis Pt-1C-BFP] gi|187975525|gb|EDU42151.1| cytochrome P450 3A31 [Pyrenophora tritici-repentis Pt-1C-BFP]
  misc_feature (26)..(516): NCBI GI: 242771379 Blast Desc: cytochrome P450, [Talaromyces stipitatus ATCC 10500] gi|218721449|gb|EED20867.1| cytochrome P450, [Talaromyces stipitatus ATCC 10500]
  misc_feature (20)..(513): NCBI GI: 256733020 Blast Desc: [Nectria haematococca mpVI 77-13-4]
  misc_feature (27)..(516): NCBI GI: 121710976 Blast Desc: benzoate 4-monooxygenase cytochrome P450 [Aspergillus clavatus NRRL 1] gi|119401254|gb|EAW11678.1| benzoate 4-monooxygenase cytochrome P450 [Aspergillus clavatus NRRL 1]
  misc_feature (28)..(516): NCBI GI: 169596678 Blast Desc: SNOG_01106 [Phaeosphaeria nodorum SN15] gi|111071481|gb|EAT92601.1| SNOG_01106 [Phaeosphaeria nodorum SN15]
  misc_feature (141)..(483): SWISSPROT Homolog: EC 1.14.15.3 Alkane 1-monooxygenase
  misc_feature: Useful for introducing or modulating the production of volatile compounds
MEAFHGLTFTGYIVTLAATYYIALFGYRLLLHPLSKYPGPFFARITDGYGGLYALKRELHLKTWKDHQQFGPIIRHGPNKLVFSSVQAVRDIYLNEGVSKSLCYEAGNVNPTTTNVFNTIDKRTHRVKRKLVGRIVTDRSIRTFESKLSDHVDVFLAQIQRDFEMPINVSGRCKYLGLDIAAYLGFGYELNLQSDPTYRYLLRAMMIGSWRLNMYMQLPFLRKLRLEIVFYLLAVVQGKSFLKTLSMMIQSRLAKDKKEEHDLYAFMAEALDAPQEDRITASEIWTEGTFFLPAAGDTTSTTLSALFYYLARNPQYREKLAAEIRSSFTSAAEIRGSRLTGCRFLRACINESLRMSPPVPGTMWRQKIASDDDQVLIIDGHVIPPGTSVGVDIYALHHNPQYFPDPFNYNPERWLSPTTGDSEAKLAPHGEEDVEASASEPDGLVINPAFIPFSLGARGCAGKALAYAEVSMAMARTLWCFDFEFADLQAEQGPEFRLWDVFTSSHDGPYLKFTPRP

SEQ ID NO: 13398 - DNA, 2492 bp, Muscodor strobelii
  misc_feature: SGI EST ID NO. CUFF.32046.0
  misc_feature: Variant of the nucleotide sequence at SEQ ID NO 13396
ctcacggttcattattgtcgaatccgctgccccgcaacgttgtgcaaacgaatttcgccctcccttgttacgatttgactagcgtcgaaaacgactaccatggaagctttccatggcctaacattcacaggctatattgttaccctagccgccacttattatatagctttgtttggctatagacttctccttcaccccctttctaaatatccaggtccattcttcgcaagaattacagacggctatggcggactgtacgcactaaaacgtgagcttcatttaaaaacatggaaagaccatcaacaatttggtcctatcattcgacacggcccaaacaagctggtcttcagctctgtgcaagctgtccgtgacatatatctgaacgagggggtctcaaagtcgctatgctatgaagctggcaatgtcaacccaaccacaacgaatgtctttaatacaattgacaagcgtacgcatcgcgtcaaacgcaaacttgtcggccgaattgttaccgatcgttcgatcaggacttttgagtcaaagctatctgatcatgtcgatgtgtttcttgcccagatccagcgagactttgaaatgccgatcaatgtgtcagggcgatgcaaatatctagggctagatatagcagcgtaccttgggttcggatatgaattaaacctccagtcagacccgacataccgctatcttcttcgtgctatgatgattggcagttggaggctgaacatgtatatgcaattgccgtttttgcgcaagcttcgccttgaaattgttttctatctcctagctgtcgtacaaggcaagagtttcttgaaaactctctcgatgatgattcaatcccgactggcaaaagacaagaaagaagagcacgatttgtacgcttttatggccgaggccctcgacgcaccacaagaagacaggatcacagctagtgagatctggactgaaggcacttttttccttcctgcagcaggggacacaacttctacaactctgagtgcccttttttattacctcgcgcgaaatccacaatatcgcgagaagttagctgctgagattcgatcatcatttaccagcgctgcggaaatccgtgggtctcgcctgacgggatgtcgcttcctaagggcatgcatcaacgagagtctacgaatgtcgccgccagtaccaggcacaatgtggcgtcagaaaatagcatccgatgatgaccaggtcctaattattgatggccatgttatcccaccgggcacaagcgttggtgtagatatctatgcgctgcaccataacccacaatactttcctgaccctttcaattacaaccctgagcgatggttgtcaccaacgacgggcgattcagaggcaaagcttgctccacacggagaggaagacgtggaggcctcggcttccgaacccgatggcctggtaattaatccggctttcattccgttctctctcggtgcccgcggttgtgcaggcaaggcactagcgtatgctgaagtaagcatggcaatggcccgtacgctgtggtgcttcgacttcgaattcgcggacttacaagctgaacaggggcctgaatttaggctctgggatgttttcacatctagccatgatgggccttacctaaaattcacgcctcgaccttgaagaaatcatgaggaacttgaatttcttatgcgagggacggagagttcacaagtatatagagacgtattaaaatacaaagaaggacaagggacagctcttaaattgactaccgagatagcatgctgactgcgcagtcaagagcctgaatgaaactttacaaggtgtttgagaagtgagatttctatagtgacgatacaacacatacgcaatctactgtttagctacgaactctccaatcttcgcagcaacctccccggccgtcttctcgaagccgatcaactcagcaatgagcaacgtgtcatgaacagcggcctcctcgtagtataactcaagcttgtttccatccactgccttcatctcctttgcccactctaagatatgtggcgaaatcaactctgctgtgccaacattcacaaacattggcaaaggtgaccggtacggatttcccacgtgcgtgatgtacggatctgagcgagcgtttggccagttgccggcatacgagttagcgccccaaataggataactcgacggaacgaaatcagtggcccgatgcggactattgctcaactcgtagagaaaaggggcaacccagggcgagagaagtacggcacatttcggattcgggatgccaatctcagcgccaaagtcatggatatatcgcaataaagcgagtgtcaagttaccgcctgcactgtctccgattaccacaatctggctagctggaatcttgaggtcgttcaggaggtagaggtagctagacacagcgtcctggagcgcagcgggaaacggattcagaccagcgtgtcctgatagtctgtctgatagccagaaaggtatca

SEQ ID NO: 13399 - DNA, 945 bp, Muscodor strobelii
  misc_feature: SGI cDNA ID NO. 564388
  misc_feature: Encodes the peptide sequence at SEQ ID NO 13400
atgccgacgactcaatttccactggtggcgtaccagccatttcgacttatcttccagatcacatacatcggcataatcatcttgcggttaccatactacgcacttctctcactaattccgtccttgagaccgaacgcatcatggaccttcaagcaaactttcatgacccgtcttctttatccaatcttggatataaaatctcgcgcggcggtgacagagacgctatctctagagccagggaaagaaggcgatcgatggcgaatcgtgaagccctccacgttggacgtttataaaggccctctggcatcttcaacgacaaagcccgccagaattggagacagactatcaggacacgctggtctgaatccgtttcccgctgcgctccaggacgctgtgtctagctacctctacctcctgaacgacctcaagattccagctagccagattgtggtaatcggagacagtgcaggcggtaacttgacactcgctttattgcgatatatccatgactttggcgctgagattggcatcccgaatccgaaatgtgccgtacttctctcgccctgggttgccccttttctctacgagttgagcaatagtccgcatcgggccactgatttcgttccgtcgagttatcctatttggggcgctaactcgtatgccggcaactggccaaacgctcgctcagatccgtacatcacgcacgtgggaaatccgtaccggtcacctttgccaatgtttgtgaatgttggcacagcagagttgatttcgccacatatcttagagtgggcaaaggagatgaaggcagtggatggaaacaagcttgagttatactacgaggaggccgctgttcatgacacgttgctcattgctgagttgatcggcttcgagaagacggccggggaggttgctgcgaagattggagagttcgtagctaaacagtag

SEQ ID NO: 13400 - protein, 314 aa, Muscodor strobelii
  misc_feature: SGI Peptide ID NO. 564388
  misc_feature (122)..(233): Pfam Id: PF07859 Pfam Desc: alpha/beta hydrolase fold
  misc_feature (8)..(311): NCBI GI: 169619948 Blast Desc: SNOG_13174 [Phaeosphaeria nodorum SN15] gi|111058381|gb|EAT79501.1| SNOG_13174 [Phaeosphaeria nodorum SN15]
  misc_feature (23)..(314): NCBI GI: 154299472 Blast Desc: BC1G_10998 [Botryotinia fuckeliana B05.10] gi|150857340|gb|EDN32532.1| BC1G_10998 [Botryotinia fuckeliana B05.10]
  misc_feature (9)..(314): NCBI GI: 189201383 Blast Desc: alpha/beta hydrolase fold-3 domain containing protein [Pyrenophora tritici-repentis Pt-1C-BFP] gi|187984127|gb|EDU49615.1| alpha/beta hydrolase fold-3 domain
  misc_feature (27)..(313): NCBI GI: 255953197 Blast Desc: Pc21g02870 [Penicillium chrysogenum Wisconsin 54-1255] gi|211589062|emb|CAP95184.1| Pc21g02870 [Penicillium chrysogenum Wisconsin 54-1255]
  misc_feature (14)..(312): NCBI GI: 116200945 Blast Desc: CHGG_08357 [Chaetomium globosum CBS 148.51] gi|88176875|gb|EAQ84343.1| CHGG_08357 [Chaetomium globosum CBS 148.51]
  misc_feature (13)..(310): NCBI GI: 156042101 Blast Desc: SS1G_11601 [Sclerotinia sclerotiorum 1980] gi|154695984|gb|EDN95722.1| SS1G_11601 [Sclerotinia sclerotiorum 1980]
  misc_feature (8)..(300): NCBI GI: 154299871 Blast Desc: BC1G_10826 [Botryotinia fuckeliana B05.10] gi|150857106|gb|EDN32298.1| BC1G_10826 [Botryotinia fuckeliana B05.10]
  misc_feature (36)..(296): NCBI GI: 46139569 Blast Desc: FG11299.1 [Gibberella zeae PH-1]
  misc_feature (40)..(313): NCBI GI: 145231321 Blast Desc: An02g00070 [Aspergillus niger] gi|134056047|emb|CAK96222.1| protein product [Aspergillus niger]
  misc_feature (7)..(313): NCBI GI: 242789662 Blast Desc: acetyl-hydrolase, [Talaromyces stipitatus ATCC 10500] gi|218717997|gb|EED17417.1| acetyl-hydrolase, [Talaromyces stipitatus ATCC 10500]
MPTTQFPLVAYQPFRLIFQITYIGIIILRLPYYALLSLIPSLRPNASWTFKQTFMTRLLYPILDIKSRAAVTETLSLEPGKEGDRWRIVKPSTLDVYKGPLASSTTKPARIGDRLSGHAGLNPFPAALQDAVSSYLYLLNDLKIPASQIVVIGDSAGGNLTLALLRYIHDFGAEIGIPNPKCAVLLSPWVAPFLYELSNSPHRATDFVPSSYPIWGANSYAGNWPNARSDPYITHVGNPYRSPLPMFVNVGTAELISPHILEWAKEMKAVDGNKLELYYEEAAVHDTLLIAELIGFEKTAGEVAAKIGEFVAKQ

SEQ ID NO: 13401 - DNA, 843 bp, Muscodor strobelii
  misc_feature: SGI cDNA ID NO. 564389
  misc_feature: Encodes the peptide sequence at SEQ ID NO 13402
atgtcgcagacaaaaagtcttgacatcgccatcatagtcatatacgtcctgttttctatcccaggtatcttcgtgcttttcaagcacggtcttcgacatggcgctgtattggggtggttctacctactgggcttcttcctccttcgcatcatctctagtggaatccaactcaacgacccaacgtcaacgactgctgcgcttctcgcaaatatcggattatctcccctgatactgtctagtgttagcatcattcatgaagcacgtgcctatctcttcgcagacagaaatcgaaagatcgaacttatcggagttgtcttcgcccaccaattagtagcagttgctatcgccctggttgctgttggcgcttcgagtctcaccaatcccgataaagcctccgagatggcaaagaacgaaaccctcgtcaaagtcggcgaggttttactcctgcttgcctggctcgcgatcacgattctcagcgggttcactgccgcgattgcgttccgcggtggtttcacctcaatagatatctctggtggcaagatcctaatctacgctgtggcaattgccatgccattcttgggtattcgactcttggctagtcttatttatttcttcaccaacacacagtcactgaacccagtcactggtagtcttggcttgaaggtcggactcgaagtctttgaggagctagcgatctctatcttgtaccttgccgcgggtctggtcactaggaacgttggcaagaatgggtcggacaacgctcaacagaggactaagattcgaagtctcgggtccaatgcacgatacgaaagtgcgcccagacgcgactctgcttatgtctaa

SEQ ID NO: 13402 - protein, 280 aa, Muscodor strobelii
  misc_feature: SGI Peptide ID NO. 564389
  misc_feature (4)..(249): NCBI GI: 46137699 Blast Desc: FG10365.1 [Gibberella zeae PH-1]
  misc_feature (4)..(245): NCBI GI: 115401966 Blast Desc: conserved [Aspergillus terreus NIH2624] gi|114190512|gb|EAU32212.1| conserved [Aspergillus terreus NIH2624]
  misc_feature (1)..(259): NCBI GI: 145251876 Blast Desc: An16g01380 [Aspergillus niger] gi|134082992|emb|CAK42755.1| protein product [Aspergillus niger]
  misc_feature (4)..(244): NCBI GI: 119501463 Blast Desc: integral membrane protein [Neosartorya fischeri NRRL 181] gi|119415654|gb|EAW25591.1| integral membrane protein [Neosartorya fischeri NRRL 181]
  misc_feature (6)..(247): NCBI GI: 119483152 Blast Desc: NFIA_027810 [Neosartorya fischeri NRRL 181] gi|119409759|gb|EAW19707.1| conserved [Neosartorya fischeri NRRL 181]
  misc_feature (4)..(248): NCBI GI: 255948354 Blast Desc: Pc22g09320 [Penicillium chrysogenum Wisconsin 54-1255] gi|211591961|emb|CAP98220.1| Pc22g09320 [Penicillium chrysogenum Wisconsin 54-1255]
  misc_feature (4)..(246): NCBI GI: 256725644 Blast Desc: NECHADRAFT_43698 [Nectria haematococca mpVI 77-13-4]
  misc_feature (4)..(245): NCBI GI: 67904436 Blast Desc: AN9205.2 [Aspergillus nidulans FGSC A4] gi|40742306|gb|EAA61496.1| AN9205.2 [Aspergillus nidulans FGSC A4] gi|259485365|tpe|CBF82328.1| TPA: integral membrane protein
  misc_feature (3)..(246): NCBI GI: 121701747 Blast Desc: integral membrane protein [Aspergillus clavatus NRRL 1] gi|119397281|gb|EAW07712.1| integral membrane protein [Aspergillus clavatus NRRL 1]
  misc_feature (4)..(277): NCBI GI: 146323946 Blast Desc: integral membrane protein [Aspergillus fumigatus Af293] gi|129556400|gb|EAL86292.2| integral membrane protein [Aspergillus fumigatus Af293]
MSQTKSLDIAIIVIYVLFSIPGIFVLFKHGLRHGAVLGWFYLLGFFLLRIISSGIQLNDPTSTTAALLANIGLSPLILSSVSIIHEARAYLFADRNRKIELIGVVFAHQLVAVAIALVAVGASSLTNPDKASEMAKNETLVKVGEVLLLLAWLAITILSGFTAAIAFRGGFTSIDISGGKILIYAVAIAMPFLGIRLLASLIYFFTNTQSLNPVTGSLGLKVGLEVFEELAISILYLAAGLVTRNVGKNGSDNAQQRTKIRSLGSNARYESAPRRDSAYV

SEQ ID NO: 13403 - DNA, 1441 bp, Muscodor strobelii
  misc_feature: SGI EST ID NO. CUFF.32043.0
  misc_feature: Variant of the nucleotide sequence at SEQ ID NO 13401
aaaattgatgccttatgcgcgctgattgcgcatcttgttacgttgtcaaccatgattctcagccaggatagcgagccagctcgcaatgaagtgaaattgcgactgacttattgtcttttcaaacccacacggagaattttatagcgcttcgaagaaggcagtgctcctcgttaccgacggttgttgcatcattgttgttatcaaggcgaaggtgatcaggttggcatggaggaggcctgcatttgtataagagcgcagctcttggctcctttctaagaagttcgaccaggctgtaaataacacaaacggtttctcccgcattgtacgagattcagttacatctagatttgtttgtaccatttcgaattcttgtcgctcccttggtcgtgtcgttgcctttcactattcggcacaagtcgccctatacttatcttcagcactatgtcgcagacaaaaagtcttgacatcgccatcatagtcatatacgtcctgttttctatcccaggtatcttcgtgcttttcaagcacggtcttcgacatggcgctgtattggggtggttctacctactgggcttcttcctccttcgcatcatctctagtggaatccaactcaacgacccaacgtcaacgactgctgcgcttctcgcaaatatcggattatctcccctgatactgtctagtgttagcatcattcatgaagcacgtgcctatctcttcgcagacagaaatcgaaagatcgaacttatcggagttgtcttcgcccaccaattagtagcagttgctatcgccctggttgctgttggcgcttcgagtctcaccaatcccgataaagcctccgagatggcaaagaacgaaaccctcgtcaaagtcggcgaggttttactcctgcttgcctggctcgcgatcacgattctcagcgggttcactgccgcgattgcgttccgcggtggtttcacctcaatagatatctctggtggcaagatcctaatctacgctgtggcaattgccatgccattcttgggtattcgactcttggctagtcttatttatttcttcaccaacacacagtcactgaacccagtcactggtagtcttggcttgaaggtcggactcgaagtctttgaggagctagcgatctctatcttgtaccttgccgcgggtctggtcactaggaacgttggcaagaatgggtcggacaacgctcaacagaggactaagattcgaagtctcgggtccaatgcacgatacgaaagtgcgcccagacgcgactctgcttatgtctaaagaccatcattaaaatcagccggcgtcgtatgcattgtattttggattgaagtagaagggttttgatttaccggtccatgtttgaattgatagagtgtagcatttggccaatgcttcaatgacagcatcaaatatcggggtttaggattaatacaga

SEQ ID NO: 13404 - DNA, 1098 bp, Muscodor strobelii
  misc_feature: SGI cDNA ID NO. 564390
  misc_feature: Encodes the peptide sequence at SEQ ID NO 13405
atggtcaaagttctacttgtcctgtacgatggcgggcagcacgccaatgatgtcccagagctcctaggaacaacagagaacgagcttggcatccgcaaatggctcgaggaccagggacacactcttgtcaccacttctgacaaggagggagaggactctactttcgataaagagctggtggatgccgagattatcatcacaacgccgttccatcccggctaccttacagcagagcgcctggccaaggccaagaaccttaagctcgctatcacagctggtattggttccgatcatgtcgacctgaacgccgcaaacacaacgaacggtgggatcacagtcgctgaggttactggctcaaatgtcgtttctgtcgccgagcatgtcgttatgactattctcgtccttgtccgtaactttgttcccgcacacgagcagattcaggccggtgaatgggacgttgctgccgccgccaagaacgagtacgatcttgagggtaaggttgtcggcactgtcgccgtcggccgcattggtgagcgtgtcctccgccgcctcaagcccttcgactgcaaggagttgctatacttcgactaccagcccttgaagcctgagattgaagccgagattggctgccgtcgtgtcgacaccctcgaggagatgttggctcaatgtgatgttgttaccatcaactgccctctacacgagaagactcgcggcatgttcaacaaggacctaatcgccaagatgaagcctgggtcatggctcgtcaacactgctcgtggcgccatcgttgtcaaggaggatgttgctgacgctctgaagagcggtcacctccgtggttacggtggtgatgtctggttcccccagcccgctcccaaggagcaccctctgcgctacgccaagaaccccttcggtggtggcaacgccatggttcctcacatgtccggcacctctctcgacgcccagaagcgctatgccgatggcaccaaggccattctcactagctaccttactggcaagcatgactacaggccagaagatctcatcgtcaaggatggtgactatgtcaccaaggcctacggacagaggaataaggcttaa

SEQ ID NO: 13405 - protein, 365 aa, Muscodor strobelii
  misc_feature: SGI Peptide ID NO. 564390
  misc_feature (22)..(349): Pfam Id: PF00389 Pfam Desc: D-isomer specific 2-hydroxyacid dehydrogenase, catalytic domain
  misc_feature (129)..(314): Pfam Id: PF02826 Pfam Desc: D-isomer specific 2-hydroxyacid dehydrogenase, NAD binding domain
  misc_feature (32)..(349): Pfam Id: PF00389 Pfam Desc: D-isomer specific 2-hydroxyacid dehydrogenase, catalytic domain
  misc_feature (2)..(365): NCBI GI: 156048612 Blast Desc: formate dehydrogenase [Sclerotinia sclerotiorum 1980] gi|154693434|gb|EDN93172.1| formate dehydrogenase [Sclerotinia sclerotiorum 1980]
  misc_feature (6)..(364): NCBI GI: 58257473 Blast Desc: formate dehydrogenase-like protein [Magnaporthe grisea]
  misc_feature (3)..(365): NCBI GI: 115398548 Blast Desc: formate dehydrogenase [Aspergillus terreus NIH2624] gi|114191746|gb|EAU33446.1| formate dehydrogenase [Aspergillus terreus NIH2624]
  misc_feature (3)..(364): NCBI GI: 121703582 Blast Desc: NAD-dependent formate dehydrogenase AciA/Fdh [Aspergillus clavatus NRRL 1] gi|119398199|gb|EAW08629.1| NAD-dependent formate dehydrogenase AciA/Fdh [Aspergillus NRRL 1]
  misc_feature (3)..(365): NCBI GI: 238010472 Blast Desc: [Zea mays]
  misc_feature (1)..(365): NCBI GI: 238494028 Blast Desc: NAD-dependent formate dehydrogenase AciA/Fdh [Aspergillus flavus NRRL3357] gi|220694900|gb|EED51243.1| NAD-dependent formate dehydrogenase AciA/Fdh [Aspergillus flavus
  misc_feature (3)..(364): NCBI GI: 119467786 Blast Desc: NAD-dependent formate dehydrogenase AciA/Fdh [Neosartorya fischeri NRRL 181] gi|119405851|gb|EAW15802.1| NAD-dependent formate dehydrogenase AciA/Fdh [Neosartorya NRRL
  misc_feature (6)..(365): NCBI GI: 169776949 Blast Desc: [Aspergillus oryzae RIB40] gi|83771677|dbj|BAE61807.1| protein product [Aspergillus oryzae]
  misc_feature (3)..(362): NCBI GI: 239613197 Blast Desc: formate dehydrogenase-III [Ajellomyces dermatitidis ER-3]
  misc_feature (6)..(365): NCBI GI: 145250133 Blast Desc: An15g00410 [Aspergillus niger] gi|134082093|emb|CAK42210.1| protein product [Aspergillus niger]
  misc_feature (1)..(364): SWISSPROT Homolog: EC 1.2.1.2 Formate dehydrogenase
MVKVLLVLYDGGQHANDVPELLGTTENELGIRKWLEDQGHTLVTTSDKEGEDSTFDKELVDAEIIITTPFHPGYLTAERLAKAKNLKLAITAGIGSDHVDLNAANTTNGGITVAEVTGSNVVSVAEHVVMTILVLVRNFVPAHEQIQAGEWDVAAAAKNEYDLEGKVVGTVAVGRIGERVLRRLKPFDCKELLYFDYQPLKPEIEAEIGCRRVDTLEEMLAQCDVVTINCPLHEKTRGMFNKDLIAKMKPGSWLVNTARGAIVVKEDVADALKSGHLRGYGGDVWFPQPAPKEHPLRYAKNPFGGGNAMVPHMSGTSLDAQKRYADGTKAILTSYLTGKHDYRPEDLIVKDGDYVTKAYGQRNKA

SEQ ID NO: 13406 - DNA, 2967 bp, Muscodor strobelii
  misc_feature: SGI EST ID NO. CUFF.32617.1
  misc_feature: Variant of the nucleotide sequence at SEQ ID NO 13404
tctgttgctatgagacaagcgcagagtcgcggctagcctttgtacgagtctgaggcacgtttctgtagagggatctgcgagagcggagaaagttaccgcgtttgtattacgcgaatcatttcaagatgcacaatgggctggactgggaatcttgcaccgttcacccgagtcgacgacaggcgagtaacatgagaatgtatcagctactggcaccgtcagcctatcctgccgtcgtgattaaccgctattaccgtgcctagctacccctcaacttctggatctgcttgtgatcccgaagtgtcgtgtacaacgtgtgagtgaggcggattgagtattcgttcgtttcgatcgtggccaggtcaaaccataaaacgatagagctcccctcagaacaaatgcaacctccccctcgtgttcttccatcatcatttactcatacttctgtagcttgcatacaccaacatctttaaaaagatctttcgtttcattgatcttgcctcatctattcccttgacccttacccgagcaaactattaggtcgaattaaatcttcaaaatggtcaaagttctacttgtcctgtacgatggcgggcagcacgccaatgatgtcccagagctcctaggaacaacagagaacgagcttggcatccgcaaatggctcgaggaccagggacacactcttgtcaccacttctgacaaggagggagaggactctactttcgataaagagctggtggatgccgagattatcatcacaacgccgttccatcccggctaccttacagcagagcgcctggccaaggccaagaaccttaagctcgctatcacagctggtattggttccgatcatgtcgacctgaacgccgcaaacacaacgaacggtgggatcacagtcgctgaggttactggctcaaatgtcgtttctgtcgccgagcatgtcgttatgactattctcgtccttgtccgtaactttgttcccgcacacgagcagattcaggccggtgaatgggacgttgctgccgccgccaagaacgagtacgatcttgagggtaaggttgtcggcactgtcgccgtcggccgcattggtgagcgtgtcctccgccgcctcaagcccttcgactgcaaggagttgctatacttcgactaccagcccttgaagcctgagattgaagccgagattggctgccgtcgtgtcgacaccctcgaggagatgttggctcaatgtgatgttgttaccatcaactgccctctacacgagaagactcgcggcatgttcaacaaggacctaatcgccaagatgaagcctgggtcatggctcgtcaacactgctcgtggcgccatcgttgtcaaggaggatgttgctgacgctctgaagagcggtcacctccgtggttacggtggtgatgtctggttcccccagcccgctcccaaggagcaccctctgcgctacgccaagaaccccttcggtggtggcaacgccatggttcctcacatgtccggcacctctctcgacgcccagaagcgctatgccgatggcaccaaggccattctcactagctaccttactggcaagcatgactacaggccagaagatctcatcgtcaaggatggtgactatgtcaccaaggcctacggacagaggaataaggcttaaacaacggaatttggttcatagcgaagggtgaatggacgcattagggaactatcatggtcatgatgtatattttttaaggatgattcccatttgatgataggctctatgcgttttccatatgtcataatgaaaaaatttatttgagacaatcacgtactcctatcacatcttgatcactcataaagtgcttccgatgtttcatgaagctattgtcttcactacaactttcatcttcgggaatatccgttggtgccggattgccccaaccagtcagtgcgtcattgccttgcttcccggctgcaagacctgatgcatacaacgacaatttcaccagattttctaacgaatcgcaatcaccagacattcaccaccagcctgggtgagaaaagccaacgattaccgcatgttgccgttgctgcaatccgactggcggttagtgaggggctccttgctcggcgtgtctctggcgggcgcgctctgacgtcgtgggtcaccggtctgtgtgacacaactatgacctaaggcttcactagagcggcaaactagacatctagatcctcgtgagctgcagtctctctccttacgaagaagcggattggctcgtacgcctcaaggactagggtcgagattggggcgatctaggtttcttcgcagtcatctatgccagcttggcctgtaaggttcgctggacttgaaacgttaggcaggctgtcgccggtgagagatcgggcgcggcgcccgtgcaggtgcaaagcttgtctaatgggggtatccgatgagaaagggagggatgatggaccgatcggaaatgtagacgacgagggcgggtgttgtctataaatactaatcattcgcgaggaccttgctggccatcttttctaccctatttcctctttcgatcataatcagccaattacatatcgagaattctatcacatcatatcactacctgacaaccctagtaaatatggcctgcaactgcaacagcgctggctcctgcgcctgccaatcttctggcacttgcaagtgtgagtcgaactgcggatgctcgaactgccctaagaagtaaagaatcaattgaactttgcgatatcgtatcactgggatttacggggtttcctacatggcgcacactctttgacatttgatgggggcacgagttcaatgttacgcaaattgtacgccagcttatagtctcacacaattgtagaatcgctcttttaatgcattattcatatgcgattattgtcttcgcttgactaccttcatgaatactgctatcttgcgaagaattgtggcattggacatagatg

SEQ ID NO: 13407 - DNA, 963 bp, Muscodor strobelii
  misc_feature: SGI cDNA ID NO. 564391
  misc_feature: Encodes the peptide sequence at SEQ ID NO 13408
atgctgtcgaaatctgtggtagcgctggtggcaacggtcactggcgcattggcagcgacaccgtcaggcttcgagccagctagcgaaaacagtctgatcgtcacatttggtaatgtggcggctcttgatggagttgaagtcgaaaaagcggcaacggcatcggcgccatcgattgggacccaaagcaagctcgatgggacttcatttgcggttattatggtcgatctggacatccccaccaacaatcctcctgctacgagcaccctgcttcattggatgcaaacgggattggcacaaagctcgtcagcgaccgctttgaacaccacaactggcacattgagtgcatatctgctatcggtagcagatgggcagactgcgtttgctagctacatttcgccaaacccgcccgctagaatccctctgtcgcatcgatacacggagattttgattgatacatctgatgcgactgatgatggtttggcgacgcttcaaacggcggctacgaatcgctcggctttcaatgctgaagatgtcttgacgagagctggattggtggataaagtcgtcgcaggcaattttttcaatgttacaaatcccggaccagtgacagatgcgtcaaatttgacgaacggaccgagcagctcgggaagtagctcagacaacagtaccagctcttcggatccccctgcgcaagcttcagccatttcacaacgagtcagcggaccactgctggtcttcacgatggtcggcgcatttttgttcggtctctcccgtttcggacgacccatgaggaagaagcctgagaaaactggggtctggggctatactcagccatttcgcggtattgacccagatggacggctgagtactgagaaccttgctggctcccccgcagatgacccatcgaagctccccaccataccgatgaccgagaaagagagcctcctggctgccaagctgtga

SEQ ID NO: 13408 - protein, 320 aa, Muscodor strobelii
  misc_feature: SGI Peptide ID NO. 564391
  misc_feature (20)..(201): NCBI GI: 39974265 Blast Desc: MGG_00721 [Magnaporthe grisea 70-15] gi|145018347|gb|EDK02626.1| MGG_00721 [Magnaporthe grisea 70-15]
  misc_feature (1)..(197): NCBI GI: 154289754 Blast Desc: BC1G_16006 [Botryotinia fuckeliana B05.10] gi|150848787|gb|EDN23980.1| BC1G_16006 [Botryotinia fuckeliana B05.10]
  misc_feature (20)..(204): NCBI GI: 261351594 Blast Desc: conserved [Verticillium albo-atrum VaMs.102]
  misc_feature (1)..(197): NCBI GI: 145602262 Blast Desc: [Magnaporthe grisea 70-15] gi|145010698|gb|EDJ95354.1| [Magnaporthe grisea 70-15]
  misc_feature (1)..(196): NCBI GI: 189209766 Blast Desc: conserved [Pyrenophora tritici-repentis Pt-1C-BFP] gi|187977308|gb|EDU43934.1| conserved [Pyrenophora tritici-repentis Pt-1C-BFP]
  misc_feature (3)..(196): NCBI GI: 169615585 Blast Desc: SNOG_10951 [Phaeosphaeria nodorum SN15] gi|111060330|gb|EAT81450.1| SNOG_10951 [Phaeosphaeria nodorum SN15]
  misc_feature (1)..(196): NCBI GI: 242811943 Blast Desc: conserved [Talaromyces stipitatus ATCC 10500] gi|218714196|gb|EED13619.1| conserved [Talaromyces stipitatus ATCC 10500]
  misc_feature (1)..(194): NCBI GI: 242809416 Blast Desc: conserved [Talaromyces stipitatus ATCC 10500] gi|218715989|gb|EED15411.1| conserved [Talaromyces stipitatus ATCC 10500]
  misc_feature (32)..(150): NCBI GI: 224552413 Blast Desc: mother of FT and TFL1-like protein [Physcomitrella patens]
  misc_feature (1)..(207): NCBI GI: 256724370 Blast Desc: NECHADRAFT_88114 [Nectria haematococca mpVI 77-13-4]
MLSKSVVALVATVTGALAATPSGFEPASENSLIVTFGNVAALDGVEVEKAATASAPSIGTQSKLDGTSFAVIMVDLDIPTNNPPATSTLLHWMQTGLAQSSSATALNTTTGTLSAYLLSVADGQTAFASYISPNPPARIPLSHRYTEILIDTSDATDDGLATLQTAATNRSAFNAEDVLTRAGLVDKVVAGNFFNVTNPGPVTDASNLTNGPSSSGSSSDNSTSSSDPPAQASAISQRVSGPLLVFTMVGAFLFGLSRFGRPMRKKPEKTGVWGYTQPFRGIDPDGRLSTENLAGSPADDPSKLPTIPMTEKESLLAAKL

SEQ ID NO: 13409 - DNA, 1125 bp, Muscodor strobelii
  misc_feature: SGI cDNA ID NO. 564392
  misc_feature: Reduced expression when VOC is produced
  misc_feature: Encodes the peptide sequence at SEQ ID NO 13410
atggcgcgattcgatagcctgcctgtcgagctgcgtctcgtaatctggagttttgttgcacctactgtacgcccccgacgcgacgctcaaatttttgagctctcactgggaatcttcggtctcccggatgataaagcaccctctgatgacgaggcgccggatggtgttgtcgatgatgcgccttatgttgacgagacagctaggtatagagcaccgtactacgttttcctacctgttcagatgaaacggcaattgaaagcgcaaacggcgagcgtaagagtcatgctgtcagtcaaccaagagagccgggcagaggctctgaaatatttccctcatgcgctcacaattaacgatccaacgggagcaattgttcgcttcgatcgtgaccgcgacctagttcgtctttcagccaatccatccctcgcagtatctacgactactccccaggagtacaacaacctcgactggctgaaacgaagctggaatcacaagatcgacaacttcaccacgtccatacgacacctcgggttcgggaatggtatgctaggccttctacgtaaaggcttggagcacaagtacaaaggcattcatctcatatggtatatcatgatgttcctccgaccattcacaaatctcgttgcagtctacacactctcggtcggtaacgggttgactgattacgagctgcgttggtgtgcttccgacaaagccaatcacaggatgatagaggacggtccactgtcgagtgtttcttgctggccagatctggccaacaatctgtactacgctgtgagcgaggaaacgctttgtgacagagcgcgcaagcttccgaccaacttgtttgagattatgacacatctcttgttacgcgaaccctactggtctacgaatgacaaagtacagatccgcgccggtattgaggggcacctaaatcaagaagacctgtggcgattgagcgctgtcgagctttgggaaattctagttctggtatcgcacgaaggtgtagcacgattccgcgctttgaacccagatcataacaagccacccacggaccggacgattccgtctccaaaagatttaggcggcatgagcagcatgtataccatgcgtattgcaaacatgtga

SEQ ID NO: 13410 - protein, 374 aa, Muscodor strobelii
  misc_feature: SGI Peptide ID NO. 564392
  misc_feature (3)..(291): NCBI GI: 256729571 Blast Desc: NECHADRAFT_47302 [Nectria haematococca mpVI 77-13-4]
  misc_feature (3)..(258): NCBI GI: 116205732 Blast Desc: CHGG_02159 [Chaetomium globosum CBS 148.51] gi|88182756|gb|EAQ90224.1| CHGG_02159 [Chaetomium globosum CBS 148.51]
  misc_feature (1)..(259): NCBI GI: 39942782 Blast Desc: MGG_03471 [Magnaporthe grisea 70-15] gi|145009979|gb|EDJ94635.1| MGG_03471 [Magnaporthe grisea 70-15]
  misc_feature (1)..(239): NCBI GI: 171678253 Blast Desc: protein product [Podospora anserina] gi|170937196|emb|CAP61853.1| protein product [Podospora anserina]
  misc_feature: Useful for introducing or modulating the production of volatile compounds
MARFDSLPVELRLVIWSFVAPTVRPRRDAQIFELSLGIFGLPDDKAPSDDEAPDGVVDDAPYVDETARYRAPYYVFLPVQMKRQLKAQTASVRVMLSVNQESRAEALKYFPHALTINDPTGAIVRFDRDRDLVRLSANPSLAVSTTTPQEYNNLDWLKRSWNHKIDNFTTSIRHLGFGNGMLGLLRKGLEHKYKGIHLIWYIMMFLRPFTNLVAVYTLSVGNGLTDYELRWCASDKANHRMIEDGPLSSVSCWPDLANNLYYAVSEETLCDRARKLPTNLFEIMTHLLLREPYWSTNDKVQIRAGIEGHLNQEDLWRLSAVELWEILVLVSHEGVARFRALNPDHNKPPTDRTIPSPKDLGGMSSMYTMRIANM

SEQ ID NO: 13411 - DNA, 2132 bp, Muscodor strobelii
  misc_feature: SGI EST ID NO. CUFF.32050.0
  misc_feature: Variant of the nucleotide sequence at SEQ ID NO 13409
cgagaagtcagactactcagaggattgattaatctatcactcagtattttagatgttgggatactcggtagtgccatttatcttgactactgcctggtggtaggtgctatgactccgagcatttacctcatcccgcctcgctcttgcttgctatctcagcactgccaactacgacgcaccttccatccatctagacttaccaaaaccttttcgccacaaagctagcacataccgtatgctttcatactgggacaaaatttagtcgcctcgcatcctgtcttagccctccattttcgcatcgaccccggtcacaacatggcgcgattcgatagcctgcctgtcgagctgcgtctcgtaatctggagttttgttgcacctactgtacgcccccgacgcgacgctcaaatttttgagctctcactgggaatcttcggtctcccggatgataaagcaccctctgatgacgaggcgccggatggtgttgtcgatgatgcgccttatgttgacgagacagctaggtatagagcaccgtactacgttttcctacctgttcagatgaaacggcaattgaaagcgcaaacggcgagcgtaagagtcatgctgtcagtcaaccaagagagccgggcagaggctctgaaatatttccctcatgcgctcacaattaacgatccaacgggagcaattgttcgcttcgatcgtgaccgcgacctagttcgtctttcagccaatccatccctcgcagtatctacgactactccccaggagtacaacaacctcgactggctgaaacgaagctggaatcacaagatcgacaacttcaccacgtccatacgacacctcgggttcgggaatggtatgctaggccttctacgtaaaggcttggagcacaagtacaaaggcattcatctcatatggtatatcatgatgttcctccgaccattcacaaatctcgttgcagtctacacactctcggtcggtaacgggttgactgattacgagctgcgttggtgtgcttccgacaaagccaatcacaggatgatagaggacggtccactgtcgagtgtttcttgctggccagatctggccaacaatctgtactacgctgtgagcgaggaaacgctttgtgacagagcgcgcaagcttccgaccaacttgtttgagattatgacacatctcttgttacgcgaaccctactggtctacgaatgacaaagtacagatccgcgccggtattgaggggcacctaaatcaagaagacctgtggcgattgagcgctgtcgagctttgggaaattctagttctggtatcgcacgaaggtgtagcacgattccgcgctttgaacccagatcataacaagccacccacggaccggacgattccgtctccaaaagatttaggcggcatgagcagcatgtataccatgcgtattgcaaacatgtgagacccacgttcgtcaaaaagcgtatgagttgggcggaaaggctcacaacgaggtgtaatcgatacggtctcccgttgcgtgtcgtgggaatgggaggactccgtttttatccagtcaaataggagcacgaaatagactctgcgacgagacgatggcagagacgagctggtggatagcaccacaagacagtgttctacttttgcgagtgatacagagcttcggataattctaactcaataaaatgttcaaagtcggatcgaaatccgcataaaacctgcgttgagcagtctatgtctctttcgtttaaatatacgtagactcgtataatgacttcaatagttctaggtgcataactcttagtggaaaagtagttcagtataagaagaagttttgcggtgctatttcattttggactcgcctggactcagaacatcgttccgcaacttgcgttcaactgcattgaacgaggtcgcaacttcaagaaatttgattgatgttttcccatcccataagacttataacgcaatacaccggatttatgaatagaagtaatgtctgttgtgttatgactggtaatgacgatctgtgtggtttcttgacctgataattcgaaatgatcataagagaagggccgaatgcgcacgcatttcggtcaagactcgttttcacggtggtcaacagtgtcattgaat

SEQ ID NO: 13412 - DNA, 3933 bp, Muscodor strobelii
  misc_feature: SGI cDNA ID NO. 564393
  misc_feature: Reduced expression when VOC is produced
  misc_feature: Encodes the peptide sequence at SEQ ID NO 13413
atgcatcgacctggaatgcagccctctggaatctaccccgaactagatcgatatcgtgatatccaggttccttattctcgagacgcgctcggcagagatgctctattcaagctcgccactgaagacttgccacctccaacacctcaattttctggagcgagcagccacagccagttgagcacatttagcggaagtccatcaaccagattctcggggtccccaggaccggggccgtacagccgagacacgacacctacatccatgtgttcacagtctccagggtttgtcgcaccgttacgtctacctgccgccagagtaagacaagcaagtccagccgaaacgagaccgcccgtgacccgaagaagagccggtagtgtatcgaatgagggagggtcctttagcgccgacccccaaggacttgctgccgtaagagaggctttgacttcgtcttcgtcaaactcgacggtgcgagcagaggaaaagaaagagaattccaaacgtgcccgagggccggcgcaaccaaatccgccgccgaggaagtcctcgcagaagttcaacaaagctcaaagcatagacgaaacttcttcgaatgtccctcgcatacacggacaaccagtggttccgtctccttcccccagccagacggctcgatctctccataaccgcaacccaagttctacattgtcaccgcagtctcggccaggtattccgtctcgccctagcagagacggaacacccgatctatattcacaatttggtggccctgttcctgtcattcacagcaacttgtcttctagtagtctccctgaaagacgctacagtggtcaggcattctccagttcactgcctgtctcatcattaccggaccgtcccggatcagcgcggcctccacacagccgcgaacccactccggcaccacgctctggcgtcccaagtgaaagacagattaccaaagcagagaccagcaaatccaaaaagcctgcgagcccagcaattcctgccccaaaatccaaattttcgttattcggccgacgaaccaaaaccgacaccgaagtctctcagctggaaaagaaaaaggagaaggtccctcgtaagggtccagcagcagggacaggccatgaaggctatggcagggtcggcgcagtcaaaagacgaagcagcacggcctcgagtctccaaggtggacggccaggtcctgtctcgtcatctgaaagtcttgcaagcacgctttcggctgatccgtttctactggaacgaatgaatccggttatcattgctggtggcgaagtggtcgaaaatcgcaacactagttcggagctaatccgaagcgaaagtaaccagagcgtcacgtggaggaggccaagcttagactcccgtaactcatcaaacgtgtcccttaccaccaaggaagagagtcgtcaaacactctggccgtctccattccctcgtggcacagtaccttcgcgtcggccttcggacagcagcgaatctgaggctgtgacaatgaactccacacttgcctaccggcggtcgattcgtggcctcaagtcgccagatggaacttcattcagtatcccaaggcctatcaacacacgagcaccttccgctgcgagcatggccacgacaatctacacagacgattcttttccagatatccaatctgagcgggtcgtcgagccggtccaagtggttgcaactagtaagaagctaacaaaaaagcccaagtcccctcgcaagtggaatctgttcggcaagagccagatcagtacaagttctaaaaaagatgctgacgtcggtgttcctcctgaagtgatgcctgcacagagcaagccaatgcctttctacgcaattatggactctcctgatcaggatgacaatgataatgaacaagatgtcaatgccattctgcgtgaagcagatattcttccaccaagaatggagcctcgcagcttcgagtatgagagaagaccttcaatagcatcgacaagcagtcattcagcgaaagctcctcacgtgtccccaaatcctggttacctcaatacttctccgcaaccgagcaactctgtcccacagatgtggcagcttgacctcaagcaagaacagtcaaatgcacagaataagtcgacagtgacaacttctaccggtcgtccgagtagactaccccaagtcggcagaatcccgaaagttgtgacaacgcgcccaaatcaaacatctccaaaaagcttttctcgtcctttcaataggatcagcgtccagttctccaccctggaagcagccaacctagatcagagctcggttgcaaaaggcccaagtcctcctgaatcatccactccagacacaacacgcgcagaatccccagcgaagccgatgacggtgcagcatctagaggaggaaaccccgcaagaaaccccacatcaagacatgaaaatcgatcaagattttcttgcatttcccccacgaaagggatctgaatgcaccgcgagctctagctctacttcctcaggtgcgatgggctacactgaatacaccgcgaaagtaccagagcccgaagcgcccctaggagaggatgagctgtgggatgagtacaacgacttccttgaggatgcgcctccatcgccatcatcttcttgtggtgttccgtttcatctcgagacatacacttcgaaattggtcaaaaagtcaacgaagccccttgaatcaccgactatcaagacagaactagtacaagatgttcgtgactctatcaacaccgccagaaccgccaccacgtctagccactatagtgcagatatgactgcgcggataaatgctgctttccgatttgattctgatcccccagcaacaccattctcagtcaccgactttgtgtcaggatatggcgatcggaacaatggcaaggtgcagtcaggcgccgagcgcgatgagtctccgcggagaacttcatcctctcagcgaagtgagaaagagaaaccacccagcgccagaagctcaggcagtagtcaatacagccaagagaccgcgctctcacaggtcaacttgcgagtaggctcaatgacagttagcaaatggctcaccttcggccatgtcatgttcagcccagtacgggatgacttggtcaatgacgatggttctctcaagcgccaatcgatacttgttgtggacggtctgggtaatgacgattggtctttctacgcggccgagacttaccccatggctaacttcttcaatctctctcctcgcgcaccgctactccaagagcagcagaccacctcgttcccaatgtcgccgccaaatcatcatcaaatccaatacacctctcacgccgacaaattccccttcggccctgaaagtttcactgcgattgtcttccgcttcccgtctgcggcgcccgagggccactacaggaacatcattacagaggcacgacgtgtgttgaagcccggtgggttcatcgagctctccatcctcgacgttgatttgaacaatgtgggcaaccgcacacgacgctcagtccgtcgattgaaggagcgagtcaatgctcgtaatcccgacttcaatctcagcagtaccgcagacatcattctgcgactgctgggagcaaagggctttgtcgatatcaagacttgccgcgttggagttccagttgccagctccatcacggacgccaaaaccaaagatggcaaaaaagacgaacgcagtcttgcagagatgatgaatgacgacacagagttaggtgacgagaacatcacaaagatggtttccaaagttggccgatggtggtacaaccgatgttacgaagtcccgaccggcatgagcaagagcatttggaacgaccgcgctctgctagccgaatgtgaagaatggggaacaagcttaaagctgatggtctgtcacgcaagaatgcctgatagagcacgagttgcaagcatttaa

SEQ ID NO: 13413 - protein, 1310 aa, Muscodor strobelii
  misc_feature: SGI Peptide ID NO. 564393
  misc_feature (7)..(1310): NCBI GI: 171692401 Blast Desc: protein product [Podospora anserina] gi|170946149|emb|CAP72950.1| protein product [Podospora anserina]
  misc_feature (11)..(1310): NCBI GI: 85102112 Blast Desc: NCU04112 [Neurospora crassa OR74A] gi|21622332|emb|CAD36973.1| [Neurospora crassa] gi|28922811|gb|EAA32032.1| [Neurospora crassa OR74A]
  misc_feature (3)..(1302): NCBI GI: 256728512 Blast Desc: NECHADRAFT_96869 [Nectria haematococca mpVI 77-13-4]
  misc_feature (11)..(1310): NCBI GI: 116198347 Blast Desc: CHGG_07329 [Chaetomium globosum CBS 148.51] gi|88178608|gb|EAQ86076.1| CHGG_07329 [Chaetomium globosum CBS 148.51]
  misc_feature (11)..(1306): NCBI GI: 156051680 Blast Desc: SS1G_07247 [Sclerotinia sclerotiorum 1980] gi|154705025|gb|EDO04764.1| SS1G_07247 [Sclerotinia sclerotiorum 1980]
  misc_feature (715)..(1310): NCBI GI: 145605525 Blast Desc: MGG_09215 [Magnaporthe grisea 70-15] gi|145013347|gb|EDJ97988.1| MGG_09215 [Magnaporthe grisea 70-15]
  misc_feature (243)..(1306): NCBI GI: 154312688 Blast Desc: BC1G_05045 [Botryotinia fuckeliana B05.10] gi|150849747|gb|EDN24940.1| BC1G_05045 [Botryotinia fuckeliana B05.10]
  misc_feature (40)..(1302): NCBI GI: 225677923 Blast Desc: conserved [Paracoccidioides brasiliensis Pb03]
  misc_feature (43)..(1302): NCBI GI: 119189215 Blast Desc: CIMG_04655 [Coccidioides immitis RS]
  misc_feature (11)..(628): NCBI GI: 145605525 Blast Desc: MGG_09215 [Magnaporthe grisea 70-15] gi|145013347|gb|EDJ97988.1| MGG_09215 [Magnaporthe grisea 70-15]
  misc_feature: Useful for introducing or modulating the production of volatile compounds
MHRPGMQPSGIYPELDRYRDIQVPYSRDALGRDALFKLATEDLPPPTPQFSGASSHSQLSTFSGSPSTRFSGSPGPGPYSRDTTPTSMCSQSPGFVAPLRLPAARVRQASPAETRPPVTRRRAGSVSNEGGSFSADPQGLAAVREALTSSSSNSTVRAEEKKENSKRARGPAQPNPPPRKSSQKFNKAQSIDETSSNVPRIHGQPVVPSPSPSQTARSLHNRNPSSTLSPQSRPGIPSRPSRDGTPDLYSQFGGPVPVIHSNLSSSSLPERRYSGQAFSSSLPVSSLPDRPGSARPPHSREPTPAPRSGVPSERQITKAETSKSKKPASPAIPAPKSKFSLFGRRTKTDTEVSQLEKKKEKVPRKGPAAGTGHEGYGRVGAVKRRSSTASSLQGGRPGPVSSSESLASTLSADPFLLERMNPVIIAGGEVVENRNTSSELIRSESNQSVTWRRPSLDSRNSSNVSLTTKEESRQTLWPSPFPRGTVPSRRPSDSSESEAVTMNSTLAYRRSIRGLKSPDGTSFSIPRPINTRAPSAASMATTIYTDDSFPDIQSERVVEPVQVVATSKKLTKKPKSPRKWNLFGKSQISTSSKKDADVGVPPEVMPAQSKPMPFYAIMDSPDQDDNDNEQDVNAILREADILPPRMEPRSFEYERRPSIASTSSHSAKAPHVSPNPGYLNTSPQPSNSVPQMWQLDLKQEQSNAQNKSTVTTSTGRPSRLPQVGRIPKVVTTRPNQTSPKSFSRPFNRISVQFSTLEAANLDQSSVAKGPSPPESSTPDTTRAESPAKPMTVQHLEEETPQETPHQDMKIDQDFLAFPPRKGSECTASSSSTSSGAMGYTEYTAKVPEPEAPLGEDELWDEYNDFLEDAPPSPSSSCGVPFHLETYTSKLVKKSTKPLESPTIKTELVQDVRDSINTARTATTSSHYSADMTARINAAFRFDSDPPATPFSVTDFVSGYGDRNNGKVQSGAERDESPRRTSSSQRSEKEKPPSARSSGSSQYSQETALSQVNLRVGSMTVSKWLTFGHVMFSPVRDDLVNDDGSLKRQSILVVDGLGNDDWSFYAAETYPMANFFNLSPRAPLLQEQQTTSFPMSPPNHHQIQYTSHADKFPFGPESFTAIVFRFPSAAPEGHYRNIITEARRVLKPGGFIELSILDVDLNNVGNRTRRSVRRLKERVNARNPDFNLSSTADIILRLLGAKGFVDIKTCRVGVPVASSITDAKTKDGKKDERSLAEMMNDDTELGDENITKMVSKVGRWWYNRCYEVPTGMSKSIWNDRALLAECEEWGTSLKLMVCHARMPDRARVASI

SEQ ID NO: 13414 - DNA, 6928 bp, Muscodor strobelii
  misc_feature: SGI EST ID NO. CUFF.32419.0
  misc_feature: Variant of the nucleotide sequence at SEQ ID NO 13412
cccacatctgctattatctccaggcaagccagtacactggagatgctgttgctgagaccagtcattctagctggcgtcgatgctcatttctctcacgggatctagctccgattgatcttgttggagtcgattgatatatgacgcttcgcgatgaacaattcgctctatccatagctgagtgctgcatccgtctggtcactatcgtatctgcttgtcttgtcctggcaactgctccattccttgtgtgactcaaacatcctccattggcattaacagtacatgacgactgctcgcctgccgatccccttaggccttgctccgcagagcccgctctggccgctgccaaccagaccgcatttctcggtgattcctggacgcagcgcttgacagaaagaccctgtcccgagcctgtctgaacccacacggttgctcgccctgtctcctcttattctggcgacaggggttttgcgccacagagacccatcccgcatcctcgctcctctgcatgtctaagtaccatcttcctcacatgctccctcttggtacatcgatatcagtggccaacaagtaaaactaaacgaccaatccaagtaattctgtcatgtatctatcttatatacttgggaccatctcgcctcctcttgtactccctgatgcttccaccgattttatatcactctttacgtctaattctcggtattgatactgactgttaattctccttgtgctcattcattatcgatttctcaagcctgatctcttagaaactatacccggttatcaacaacaccatcatcaaccatcactgtctcggctgtgtcaaaatttcaaaattcgaagcgtttgggcgtatatttgagaactctgaaggtgtcttgtacgccgaagtcagcgccaagctccaacgcttactagcacctctatcacacccaaaattttgagcttcatgcggaacggtcctcgcagtcaccagaatatcgactagtctgtccgggattcttcaacgatcttccttgctctgccctctagccattccgcagtcataagcctcatattcacttgacctcgttgatatattctttcttaccctttttctgcgcttgttcttgtgatactctatcgtgtaaagagtggcgattcatacactgttagtgctgtcttcctagtggcacttcagttcctaatgccaaattatagagaacagtctggtcctaggattatgaggatttaattcttgataatatgagtgaaaggctatactaccggctagcgtcgatgaggaataggcaacatggcttctactatcccagtctctagtaaacctcgagctcgtcgggttggggctctgatggatctttctcgaggaggaccccctttagctgctgcaattcagccaacttcgcgaaaacaggcagaaaagaaggcgcctgaagcttcaatcggctctcaatctcgaccttctgcaagccgaatacctcagaatccatcgatccggaaaccggcggcgcaacctgaagccaaggcttctcggcctccgctgacacatgaaactcaatcatggtcaactaattccagtgcctcaaaaccaatgtcgaaaggctcaatggtgacagcaggttatatggagcccccgaagcagcagagaaatgtcttacgtcgaaaacagtctactatgctgagagagcctagcaatcatcatatgcggcatccatcccattccgattctagcagaacaggctcggcgtcttcagtcacaaggtctcaagccattcacgatccaagcaactcctttccagatcgcagtacaactgatagtccggttgagatccaagttggacaaaaggttgaaatgcatcgacctggaatgcagccctctggaatctaccccgaactagatcgatatcgtgatatccaggttccttattctcgagacgcgctcggcagagatgctctattcaagctcgccactgaagacttgccacctccaacacctcaattttctggagcgagcagccacagccagttgagcacatttagcggaagtccatcaaccagattctcggggtccccaggaccggggccgtacagccgagacacgacacctacatccatgtgttcacagtctccagggtttgtcgcaccgttacgtctacctgccgccagagtaagacaagcaagtccagccgaaacgagaccgcccgtgacccgaagaagagccggtagtgtatcgaatgagggagggtcctttagcgccgacccccaaggacttgctgccgtaagagaggctttgacttcgtcttcgtcaaactcgacggtgcgagcagaggaaaagaaagagaattccaaacgtgcccgagggccggcgcaaccaaatccgccgccgaggaagtcctcgcagaagttcaacaaagctcaaagcatagacgaaacttcttcgaatgtccctcgcatacacggacaaccagtggttccgtctccttcccccagccagacggctcgatctctccataaccgcaacccaagttctacattgtcaccgcagtctcggccaggtattccgtctcgccctagcagagacggaacacccgatctatattcacaatttggtggccctgttcctgtcattcacagcaacttgtcttctagtagtctccctgaaagacgctacagtggtcaggcattctccagttcactgcctgtctcatcattaccggaccgtcccggatcagcgcggcctccacacagccgcgaacccactccggcaccacgctctggcgtcccaagtgaaagacagattaccaaagcagagaccagcaaatccaaaaagcctgcgagcccagcaattcctgccccaaaatccaaattttcgttattcggccgacgaaccaaaaccgacaccgaagtctctcagctggaaaagaaaaaggagaaggtccctcgtaagggtccagcagcagggacaggccatgaaggctatggcagggtcggcgcagtcaaaagacgaagcagcacggcctcgagtctccaaggtggacggccaggtcctgtctcgtcatctgaaagtcttgcaagcacgctttcggctgatccgtttctactggaacgaatgaatccggttatcattgctggtggcgaagtggtcgaaaatcgcaacactagttcggagctaatccgaagcgaaagtaaccagagcgtcacgtggaggaggccaagcttagactcccgtaactcatcaaacgtgtcccttaccaccaaggaagagagtcgtcaaacactctggccgtctccattccctcgtggcacagtaccttcgcgtcggccttcggacagcagcgaatctgaggctgtgacaatgaactccacacttgcctaccggcggtcgattcgtggcctcaagtcgccagatggaacttcattcagtatcccaaggcctatcaacacacgagcaccttccgctgcgagcatggccacgacaatctacacagacgattcttttccagatatccaatctgagcgggtcgtcgagccggtccaagtggttgcaactagtaagaagctaacaaaaaagcccaagtcccctcgcaagtggaatctgttcggcaagagccagatcagtacaagttctaaaaaagatgctgacgtcggtgttcctcctgaagtgatgcctgcacagagcaagccaatgcctttctacgcaattatggactctcctgatcaggatgacaatgataatgaacaagatgtcaatgccattctgcgtgaagcagatattcttccaccaagaatggagcctcgcagcttcgagtatgagagaagaccttcaatagcatcgacaagcagtcattcagcgaaagctcctcacgtgtccccaaatcctggttacctcaatacttctccgcaaccgagcaactctgtcccacagatgtggcagcttgacctcaagcaagaacagtcaaatgcacagaataagtcgacagtgacaacttctaccggtcgtccgagtagactaccccaagtcggcagaatcccgaaagttgtgacaacgcgcccaaatcaaacatctccaaaaagcttttctcgtcctttcaataggatcagcgtccagttctccaccctggaagcagccaacctagatcagagctcggttgcaaaaggcccaagtcctcctgaatcatccactccagacacaacacgcgcagaatccccagcgaagccgatgacggtgcagcatctagaggaggaaaccccgcaagaaaccccacatcaagacatgaaaatcgatcaagattttcttgcatttcccccacgaaagggatctgaatgcaccgcgagctctagctctacttcctcaggtgcgatgggctacactgaatacaccgcgaaagtaccagagcccgaagcgcccctaggagaggatgagctgtgggatgagtacaacgacttccttgaggatgcgcctccatcgccatcatcttcttgtggtgttccgtttcatctcgagacatacacttcgaaattggtcaaaaagtcaacgaagccccttgaatcaccgactatcaagacagaactagtacaagatgttcgtgactctatcaacaccgccagaaccgccaccacgtctagccactatagtgcagatatgactgcgcggataaatgctgctttccgatttgattctgatcccccagcaacaccattctcagtcaccgactttgtgtcaggatatggcgatcggaacaatggcaaggtgcagtcaggcgccgagcgcgatgagtctccgcggagaacttcatcctctcagcgaagtgagaaagagaaaccacccagcgccagaagctcaggcagtagtcaatacagccaagagaccgcgctctcacaggtcaacttgcgagtaggctcaatgacagttagcaaatggctcaccttcggccatgtcatgttcagcccagtacgggatgacttggtcaatgacgatggttctctcaagcgccaatcgatacttgttgtggacggtctgggtaatgacgattggtctttctacgcggccgagacttaccccatggctaacttcttcaatctctctcctcgcgcaccgctactccaagagcagcagaccacctcgttcccaatgtcgccgccaaatcatcatcaaatccaatacacctctcacgccgacaaattccccttcggccctgaaagtttcactgcgattgtcttccgcttcccgtctgcggcgcccgagggccactacaggaacatcattacagaggcacgacgtgtgttgaagcccggtgggttcatcgagctctccatcctcgacgttgatttgaacaatgtgggcaaccgcacacgacgctcagtccgtcgattgaaggagcgagtcaatgctcgtaatcccgacttcaatctcagcagtaccgcagacatcattctgcgactgctgggagcaaagggctttgtcgatatcaagacttgccgcgttggagttccagttgccagctccatcacggacgccaaaaccaaagatggcaaaaaagacgaacgcagtcttgcagagatgatgaatgacgacacagagttaggtgacgagaacatcacaaagatggtttccaaagttggccgatggtggtacaaccgatgttacgaagtcccgaccggcatgagcaagagcatttggaacgaccgcgctctgctagccgaatgtgaagaatggggaacaagcttaaagctgatggtctgtcacgcaagaatgcctgatagagcacgagttgcaagcatttaattggtctttatgcatttccaatctcatttcacccttcctactttctagaactgctgcaatagcagcatagaaaagatgtttcacaacatcctgatttccttctctttaaaaaaagattcccccggcgcaagccaaccatgtcataacattactacatataaatggcaggacccaaagactcagtgtcgacttaccacaacgagaccggaaatccatctgactcgttttatcaggccactgtgccttgattctattcaccgacatataagatacacatgttggctgactacatgccatacacatggctacaaccaactacatacctatgcacatgcactgtgctcactacccaatcgccgcaggacggagcctctacactatttgggattcttcatgcttttagttaagctaggggcgttgaggaacagggcgataataaggaaaccttttgatctgcgatttgggaggctctccgtcattcttttacttcgaaacatacgcggcgattggctgggctacatcacgcactacattacatactatccacatgacctacctctgcctcatacgtactggtcgacggattaatggttttaaccggtgagcgaaaggctcaaagttgtttatttggatttcgcggggacacgataaggagtacagtcatgacatgatgcgagcggtgatgacgatttgtttttgcgcttacgacgacatgaacatggcattccattcatttgatgatgatttactggctggaagctgaagcgagcgagcgatgcattgatgtcccgcgtttacaaaataagtttgaaatcatggaggaaagcgagagcaagataataggtagttagttgtgacttattagagatacccctcggtcctatccgatcgtcaatcaatgagttcatatcattcattcaacgcatcccaagatcttatgactgtgctactgtaccgaatcaaaaacaagaactagatccaagttgatagaatgaattctcttattttatgctcacagtgttgaatcaaatcgtacctgaaagtcgtcgccgtcggcgcgctatccgatgacctgcttcaagatatcctctcttttgaagttggtgttcctccatctcgagatataatcgtcacgatttacttgag

SEQ ID NO: 13415 - DNA, 804 bp, Muscodor strobelii
  misc_feature: SGI cDNA ID NO. 564394
  misc_feature: Elevated expression when VOC is produced
  misc_feature: Encodes the peptide sequence at SEQ ID NO 13416
atggaggctgtcggcaaattgacggacatgatcaagcgaaacggattcgtcttcgtaacaggagttcccacggagtcagcagacccgacaaagggcgtgttggagaagattgcattcatcagagaaactcactacggaggattctacgatttcataccggatcttgctctcgcagacacggcctacacaaacatagcccttgctgcgcacacagacaccacgtacttcactgatccggctggactccaggcatttcacttgctctcacatacggatacaagcacggcaaagggttctgagaagactcttggcgggcagtcattgcttgtcgatggtttccacgcggccgatattctaaagaaagaggatccggagtcatttgacatcctaagttctgtgaatctcccatggcatgctagtggtaacgaaggcatcacgatgtctcccgacaagctctaccccgtacttgaatttgactctgggaagcaagcgatgcatcgagttagatggaataacgatgatcgcggcgtcgtcccatttggtggaaaatatacaccggccgattggtacaaagcggcgcgaaagtggaatcagattctgaagcgcaaagagatcgagtattggttccagctggaaccgggtaatctgctaatcttcgacaactggcgggttatgcatggcagaagcgccttcacgggtgttcgaagaatctgtggtgcttacataaatcgtgacgattatatctcgagatggaggaacaccaacttcaaaagagaggatatcttgaagcaggtcatcggatag

SEQ ID NO: 13416 - protein, 267 aa, Muscodor strobelii
  misc_feature: SGI Peptide ID NO. 564394
  misc_feature (3)..(249): Pfam Id: PF02668 Pfam Desc: Taurine catabolism dioxygenase TauD, TfdA family
  misc_feature (197)..(249): Pfam Id: PF02668 Pfam Desc: Taurine catabolism dioxygenase TauD, TfdA family
  misc_feature (13)..(133): Pfam Id: PF02668 Pfam Desc: Taurine catabolism dioxygenase TauD, TfdA family
  misc_feature (12)..(267): NCBI GI: 261351543 Blast Desc: trimethyllysine dioxygenase [Verticillium albo-atrum VaMs.102]
  misc_feature (12)..(267): NCBI GI: 171694135 Blast Desc: protein product [Podospora anserina] gi|170947016|emb|CAP73820.1| protein product [Podospora anserina]
  misc_feature (2)..(267): NCBI GI: 22022943 Blast Desc: trimethyllysine hydroxylase [Neurospora crassa]
  misc_feature (2)..(267): NCBI GI: 21542288 Blast Desc: trimethyllysine hydroxylase [Neurospora crassa]
  misc_feature (2)..(267): NCBI GI: 164426919 Blast Desc: trimethyllysine dioxygenase [Neurospora crassa OR74A] gi|157071530|gb|EAA31955.2| trimethyllysine dioxygenase [Neurospora crassa OR74A]
  misc_feature (2)..(267): NCBI GI: 39972305 Blast Desc: MGG_07454 [Magnaporthe grisea 70-15] gi|145016640|gb|EDK01070.1| MGG_07454 [Magnaporthe grisea 70-15]
  misc_feature (2)..(262): NCBI GI: 256731430 Blast Desc: NECHADRAFT_49296 [Nectria haematococca mpVI 77-13-4]
  misc_feature (4)..(267): NCBI GI: 116198197 Blast Desc: CHGG_07254 [Chaetomium globosum CBS 148.51] gi|88178533|gb|EAQ86001.1| CHGG_07254 [Chaetomium globosum CBS 148.51]
  misc_feature (2)..(264): NCBI GI: 46123455 Blast Desc: FG06105.1 [Gibberella zeae PH-1]
  misc_feature (2)..(219): NCBI GI: 16944572 Blast Desc: conserved [Neurospora crassa]
  misc_feature (2)..(267): SWISSPROT Homolog: EC 1.14.11.8 Trimethyllysine dioxygenase
  misc_feature: Useful for introducing or modulating the production of volatile compounds
MEAVGKLTDMIKRNGFVFVTGVPTESADPTKGVLEKIAFIRETHYGGFYDFIPDLALADTAYTNIALAAHTDTTYFTDPAGLQAFHLLSHTDTSTAKGSEKTLGGQSLLVDGFHAADILKKEDPESFDILSSVNLPWHASGNEGITMSPDKLYPVLEFDSGKQAMHRVRWNNDDRGVVPFGGKYTPADWYKAARKWNQILKRKEIEYWFQLEPGNLLIFDNWRVMHGRSAFTGVRRICGAYINRDDYISRWRNTNFKREDILKQVIG

SEQ ID NO: 13417 - DNA, 7975 bp, Muscodor strobelii
  misc_feature: SGI EST ID NO. CUFF.32420.1
  misc_feature: Variant of the nucleotide sequence at SEQ ID NO 13415
cgcgtgcattcatcaggacactagacagcggaatttcgatacgttcgcgatgcctgaaaacatctacccgtcaaatcttcgagtattggtagatggaatacaaatcaactggtcacacggctcgcacgagagtgtgtatacgtgggacttcctcaagtcttacatcgaaggcaacaggccagaaccagagcccacacctatccaatatttcggagctggagggtgccagagctcgaaagtttcatatagcgatttcgataagaacgagatggaggctgtcggcaaattgacggacatgatcaagcgaaacggattcgtcttcgtaacaggagttcccacggagtcagcagacccgacaaagggcgtgttggagaagattgcattcatcagagaaactcactacggaggattctacgatttcataccggatcttgctctcgcagacacggcctacacaaacatagcccttgctgcgcacacagacaccacgtacttcactgatccggctggactccaggcatttcacttgctctcacatacggatacaagcacggcaaagggttctgagaagactcttggcgggcagtcattgcttgtcgatggtttccacgcggccgatattctaaagaaagaggatccggagtcatttgacatcctaagttctgtgaatctcccatggcatgctagtggtaacgaaggcatcacgatgtctcccgacaagctctaccccgtacttgaatttgactctgggaagcaagcgatgcatcgagttagatggaataacgatgatcgcggcgtcgtcccatttggtggaaaatatacaccggccgattggtacaaagcggcgcgaaagtggaatcagattctgaagcgcaaagagatcgagtattggttccagctggaaccgggtaatctgctaatcttcgacaactggcgggttatgcatggcagaagcgccttcacgggtgttcgaagaatctgtggtgcttacataaatcgtgacgattatatctcgagatggaggaacaccaacttcaaaagagaggatatcttgaagcaggtcatcggatagcgcgccgacggcgacgactttcaggtacgatttgattcaacactgtgagcataaaataagagaattcattctatcaacttggatctagttcttgtttttgattcggtacagtagcacagtcataagatcttgggatgcgttgaatgaatgatatgaactcattgattgacgatcggataggaccgaggggtatctctaataagtcacaactaactacctattatcttgctctcgctttcctccatgatttcaaacttattttgtaaacgcgggacatcaatgcatcgctcgctcgcttcagcttccagccagtaaatcatcatcaaatgaatggaatgccatgttcatgtcgtcgtaagcgcaaaaacaaatcgtcatcaccgctcgcatcatgtcatgactgtactccttatcgtgtccccgcgaaatccaaataaacaactttgagcctttcgctcaccggttaaaaccattaatccgtcgaccagtacgtatgaggcagaggtaggtcatgtggatagtatgtaatgtagtgcgtgatgtagcccagccaatcgccgcgtatgtttcgaagtaaaagaatgacggagagcctcccaaatcgcagatcaaaaggtttccttattatcgccctgttcctcaacgcccctagcttaactaaaagcatgaagaatcccaaatagtgtagaggctccgtcctgcggcgattgggtagtgagcacagtgcatgtgcataggtatgtagttggttgtagccatgtgtatggcatgtagtcagccaacatgtgtatcttatatgtcggtgaatagaatcaaggcacagtggcctgataaaacgagtcagatggatttccggtctcgttgtggtaagtcgacactgagtctttgggtcctgccatttatatgtagtaatgttatgacatggttggcttgcgccgggggaatctttttttaaagagaaggaaatcaggatgttgtgaaacatcttttctatgctgctattgcagcagttctagaaagtaggaagggtgaaatgagattggaaatgcataaagaccaattaaatgcttgcaactcgtgctctatcaggcattcttgcgtgacagaccatcagctttaagcttgttccccattcttcacattcggctagcagagcgcggtcgttccaaatgctcttgctcatgccggtcgggacttcgtaacatcggttgtaccaccatcggccaactttggaaaccatctttgtgatgttctcgtcacctaactctgtgtcgtcattcatcatctctgcaagactgcgttcgtcttttttgccatctttggttttggcgtccgtgatggagctggcaactggaactccaacgcggcaagtcttgatatcgacaaagccctttgctcccagcagtcgcagaatgatgtctgcggtactgctgagattgaagtcgggattacgagcattgactcgctccttcaatcgacggactgagcgtcgtgtgcggttgcccacattgttcaaatcaacgtcgaggatggagagctcgatgaacccaccgggcttcaacacacgtcgtgcctctgtaatgatgttcctgtagtggccctcgggcgccgcagacgggaagcggaagacaatcgcagtgaaactttcagggccgaaggggaatttgtcggcgtgagaggtgtattggatttgatgatgatttggcggcgacattgggaacgaggtggtctgctgctcttggagtagcggtgcgcgaggagagagattgaagaagttagccatggggtaagtctcggccgcgtagaaagaccaatcgtcattacccagaccgtccacaacaagtatcgattggcgcttgagagaaccatcgtcattgaccaagtcatcccgtactgggctgaacatgacatggccgaaggtgagccatttgctaactgtcattgagcctactcgcaagttgacctgtgagagcgcggtctcttggctgtattgactactgcctgagcttctggcgctgggtggtttctctttctcacttcgctgagaggatgaagttctccgcggagactcatcgcgctcggcgcctgactgcaccttgccattgttccgatcgccatatcctgacacaaagtcggtgactgagaatggtgttgctgggggatcagaatcaaatcggaaagcagcatttatccgcgcagtcatatctgcactatagtggctagacgtggtggcggttctggcggtgttgatagagtcacgaacatcttgtactagttctgtcttgatagtcggtgattcaaggggcttcgttgactttttgaccaatttcgaagtgtatgtctcgagatgaaacggaacaccacaagaagatgatggcgatggaggcgcatcctcaaggaagtcgttgtactcatcccacagctcatcctctcctaggggcgcttcgggctctggtactttcgcggtgtattcagtgtagcccatcgcacctgaggaagtagagctagagctcgcggtgcattcagatccctttcgtgggggaaatgcaagaaaatcttgatcgattttcatgtcttgatgtggggtttcttgcggggtttcctcctctagatgctgcaccgtcatcggcttcgctggggattctgcgcgtgttgtgtctggagtggatgattcaggaggacttgggccttttgcaaccgagctctgatctaggttggctgcttccagggtggagaactggacgctgatcctattgaaaggacgagaaaagctttttggagatgtttgatttgggcgcgttgtcacaactttcgggattctgccgacttggggtagtctactcggacgaccggtagaagttgtcactgtcgacttattctgtgcatttgactgttcttgcttgaggtcaagctgccacatctgtgggacagagttgctcggttgcggagaagtattgaggtaaccaggatttggggacacgtgaggagctttcgctgaatgactgcttgtcgatgctattgaaggtcttctctcatactcgaagctgcgaggctccattcttggtggaagaatatctgcttcacgcagaatggcattgacatcttgttcattatcattgtcatcctgatcaggagagtccataattgcgtagaaaggcattggcttgctctgtgcaggcatcacttcaggaggaacaccgacgtcagcatcttttttagaacttgtactgatctggctcttgccgaacagattccacttgcgaggggacttgggcttttttgttagcttcttactagttgcaaccacttggaccggctcgacgacccgctcagattggatatctggaaaagaatcgtctgtgtagattgtcgtggccatgctcgcagcggaaggtgctcgtgtgttgataggccttgggatactgaatgaagttccatctggcgacttgaggccacgaatcgaccgccggtaggcaagtgtggagttcattgtcacagcctcagattcgctgctgtccgaaggccgacgcgaaggtactgtgccacgagggaatggagacggccagagtgtttgacgactctcttccttggtggtaagggacacgtttgatgagttacgggagtctaagcttggcctcctccacgtgacgctctggttactttcgcttcggattagctccgaactagtgttgcgattttcgaccacttcgccaccagcaatgataaccggattcattcgttccagtagaaacggatcagccgaaagcgtgcttgcaagactttcagatgacgagacaggacctggccgtccaccttggagactcgaggccgtgctgcttcgtcttttgactgcgccgaccctgccatagccttcatggcctgtccctgctgctggacccttacgagggaccttctcctttttcttttccagctgagagacttcggtgtcggttttggttcgtcggccgaataacgaaaatttggattttggggcaggaattgctgggctcgcaggctttttggatttgctggtctctgctttggtaatctgtctttcacttgggacgccagagcgtggtgccggagtgggttcgcggctgtgtggaggccgcgctgatccgggacggtccggtaatgatgagacaggcagtgaactggagaatgcctgaccactgtagcgtctttcagggagactactagaagacaagttgctgtgaatgacaggaacagggccaccaaattgtgaatatagatcgggtgttccgtctctgctagggcgagacggaatacctggccgagactgcggtgacaatgtagaacttgggttgcggttatggagagatcgagccgtctggctgggggaaggagacggaaccactggttgtccgtgtatgcgagggacattcgaagaagtttcgtctatgctttgagctttgttgaacttctgcgaggacttcctcggcggcggatttggttgcgccggccctcgggcacgtttggaattctctttcttttcctctgctcgcaccgtcgagtttgacgaagacgaagtcaaagcctctcttacggcagcaagtccttgggggtcggcgctaaaggaccctccctcattcgatacactaccggctcttcttcgggtcacgggcggtctcgtttcggctggacttgcttgtcttactctggcggcaggtagacgtaacggtgcgacaaaccctggagactgtgaacacatggatgtaggtgtcgtgtctcggctgtacggccccggtcctggggaccccgagaatctggttgatggacttccgctaaatgtgctcaactggctgtggctgctcgctccagaaaattgaggtgttggaggtggcaagtcttcagtggcgagcttgaatagagcatctctgccgagcgcgtctcgagaataaggaacctggatatcacgatatcgatctagttcggggtagattccagagggctgcattccaggtcgatgcatttcaaccttttgtccaacttggatctcaaccggactatcagttgtactgcgatctggaaaggagttgcttggatcgtgaatggcttgagaccttgtgactgaagacgccgagcctgttctgctagaatcggaatgggatggatgccgcatatgatgattgctaggctctctcagcatagtagactgttttcgacgtaagacatttctctgctgcttcgggggctccatataacctgctgtcaccattgagcctttcgacattggttttgaggcactggaattagttgaccatgattgagtttcatgtgtcagcggaggccgagaagccttggcttcaggttgcgccgccggtttccggatcgatggattctgaggtattcggcttgcagaaggtcgagattgagagccgattgaagcttcaggcgccttcttttctgcctgttttcgcgaagttggctgaattgcagcagctaaagggggtcctcctcgagaaagatccatcagagccccaacccgacgagctcgaggtttactagagactgggatagtagaagccatgttgcctattcctcatcgacgctagccggtagtatagcctttcactcatattatcaagaattaaatcctcataatcctaggaccagactgttctctataatttggcattaggaactgaagtgccactaggaagacagcactaacagtgtatgaatcgccactctttacacgatagagtatcacaagaacaagcgcagaaaaagggtaagaaagaatatatcaacgaggtcaagtgaatatgaggcttatgactgcggaatggctagagggcagagcaaggaagatcgttgaagaatcccggacagactagtcgatattctggtgactgcgaggaccgttccgcatgaagctcaaaattttgggtgtgatagaggtgctagtctgttgtcttgttagtcatggtcgtagtggtggtggggagcaggtaacaagggcgtctaacaagcgttggagcttggcgctgacttcggcgtacaagacaccttcagagttctcaaatatacgcccaaacgcttcgaattttgaaattttgacacagccgagacagtgatggttgatgatggtgttgttgataaccgggtatagtttctaagagatcaggcttgagaaatcgataatgaatgagcacaaggagaattaacagtcagtatcaataccgagaattagacgtaaagagtgatataaaatcggtggaagcatcagggagtacaagaggaggcgagatggtcccaagtatataagatagatacatgacagaattacttggattggtcgtttagttttacttgttggccactgatatcgatgtaccaagagggagcatgtgaggaagatggtacttagacatgcagaggagcgaggatgcgggatgggtctctgtggcgcaaaacccctgtcgccagaataagaggagacagggcgagcaaccgtgtgggttcagacaggctcgggacagggtctttctgtcaagcgctgcgtccaggaatcaccgagaaatgcggtctggttggcagcggccagagcgggctctgcggagcaaggcctaaggggatcggcaggcgagcagtcgtcatgtactgttaatgccaatggaggatgtttgagtcacacaaggaatggagcagttgccaggacaagacaagcagatacgatagtgaccagacggatgcagcactcagctatggatagagcgaattgttcatcgcgaagcgtcatatatcaatcgactccaacaagatcaatcggagctagatcccgtgagagaaatgagcatcgacgccagctagaatgactggtctcagcaacagcatctccagtgtactggcttgcctggagataatagcagatgtggg

SEQ ID NO: 13418 - DNA, 1335 bp, Muscodor strobelii
  misc_feature: SGI cDNA ID NO. 564395
  misc_feature: Encodes the peptide sequence at SEQ ID NO 13419
atgttggcaactagaggcggccctttatctatctgccggcttggtagtagaatcgctcaaggcaggcgattgctaatctcccagaggagattccttgggtccgagaggggcaaattgtcggtgtcgaattgggaccgtcgtgatggacatgtcgcgttcacttatgaagtccttatatatggctacggttggttattttgtgtctcgaatacgaaaggatccgcgtcacactcatctatatctagagataactgccgctgtaacgcgtgcattcatcaggacactagacagcggaatttcgatacgttcgcgatgcctgaaaacatctacccgtcaaatcttcgagtattggtagatggaatacaaatcaactggtcacacggctcgcacgagagtgtgtatacgtgggacttcctcaagtcttacatcgaaggcaacaggccagaaccagagcccacacctatccaatatttcggagctggagggtgccagagctcgaaagtttcatatagcgatttcgataagaacgagatggaggctgtcggcaaattgacggacatgatcaagcgaaacggattcgtcttcgtaacaggagttcccacggagtcagcagacccgacaaagggcgtgttggagaagattgcattcatcagagaaactcactacggaggattctacgatttcataccggatcttgctctcgcagacacggcctacacaaacatagcccttgctgcgcacacagacaccacgtacttcactgatccggctggactccaggcatttcacttgctctcacatacggatacaagcacggcaaagggttctgagaagactcttggcgggcagtcattgcttgtcgatggtttccacgcggccgatattctaaagaaagaggatccggagtcatttgacatcctaagttctgtgaatctcccatggcatgctagtggtaacgaaggcatcacgatgtctcccgacaagctctaccccgtacttgaatttgactctgggaagcaagcgatgcatcgagttagatggaataacgatgatcgcggcgtcgtcccatttggtggaaaatatacaccggccgattggtacaaagcggcgcgaaagtggaatcagattctgaagcgcaaagagatcgagtattggttccagctggaaccgggtaatctgctaatcttcgacaactggcgggttatgcatggcagaagcgccttcacgggtgttcgaagaatctgtggtgcttacataaatcgtgacgattatatctcgagatggaggaacaccaacttcaaaagagaggatatcttgaagcaggtcatcggatag

SEQ ID NO: 13419 - protein, 444 aa, Muscodor strobelii
  misc_feature: SGI Peptide ID NO. 564395
  misc_feature (151)..(426): Pfam Id: PF02668 Pfam Desc: Taurine catabolism dioxygenase TauD, TfdA family
  misc_feature (374)..(426): Pfam Id: PF02668 Pfam Desc: Taurine catabolism dioxygenase TauD, TfdA family
  misc_feature (151)..(310): Pfam Id: PF02668 Pfam Desc: Taurine catabolism dioxygenase TauD, TfdA family
  misc_feature (82)..(444): NCBI GI: 22022943 Blast Desc: trimethyllysine hydroxylase [Neurospora crassa]
  misc_feature (82)..(444): NCBI GI: 261351543 Blast Desc: trimethyllysine dioxygenase [Verticillium albo-atrum VaMs.102]
  misc_feature (82)..(444): NCBI GI: 164426919 Blast Desc: trimethyllysine dioxygenase [Neurospora crassa OR74A] gi|157071530|gb|EAA31955.2| trimethyllysine dioxygenase [Neurospora crassa OR74A]
  misc_feature (81)..(439): NCBI GI: 256731430 Blast Desc: NECHADRAFT_49296 [Nectria haematococca mpVI 77-13-4]
  misc_feature (130)..(444): NCBI GI: 171694135 Blast Desc: protein product [Podospora anserina] gi|170947016|emb|CAP73820.1| protein product [Podospora anserina]
  misc_feature (97)..(444): NCBI GI: 39972305 Blast Desc: MGG_07454 [Magnaporthe grisea 70-15] gi|145016640|gb|EDK01070.1| MGG_07454 [Magnaporthe grisea 70-15]
  misc_feature (82)..(396): NCBI GI: 16944572 Blast Desc: conserved [Neurospora crassa]
  misc_feature (82)..(442): NCBI GI: 225556568 Blast Desc: trimethyllysine dioxygenase [Ajellomyces capsulatus G186AR]
  misc_feature (168)..(444): NCBI GI: 116198197 Blast Desc: CHGG_07254 [Chaetomium globosum CBS 148.51] gi|88178533|gb|EAQ86001.1| CHGG_07254 [Chaetomium globosum CBS 148.51]
  misc_feature (82)..(442): NCBI GI: 240273683 Blast Desc: trimethyllysine dioxygenase [Ajellomyces capsulatus H143]
  misc_feature (82)..(444): SWISSPROT Homolog: EC 1.14.11.8 Trimethyllysine dioxygenase
MLATRGGPLSICRLGSRIAQGRRLLISQRRFLGSERGKLSVSNWDRRDGHVAFTYEVLIYGYGWLFCVSNTKGSASHSSISRDNCRCNACIHQDTRQRNFDTFAMPENIYPSNLRVLVDGIQINWSHGSHESVYTWDFLKSYIEGNRPEPEPTPIQYFGAGGCQSSKVSYSDFDKNEMEAVGKLTDMIKRNGFVFVTGVPTESADPTKGVLEKIAFIRETHYGGFYDFIPDLALADTAYTNIALAAHTDTTYFTDPAGLQAFHLLSHTDTSTAKGSEKTLGGQSLLVDGFHAADILKKEDPESFDILSSVNLPWHASGNEGITMSPDKLYPVLEFDSGKQAMHRVRWNNDDRGVVPFGGKYTPADWYKAARKWNQILKRKEIEYWFQLEPGNLLIFDNWRVMHGRSAFTGVRRICGAYINRDDYISRWRNTNFKREDILKQVIG

SEQ ID NO: 13420 - DNA, 7975 bp, Muscodor strobelii; identical to SEQ ID NO: 13417
  misc_feature: SGI EST ID NO. CUFF.32420.1
  misc_feature: Variant of the nucleotide sequence at SEQ ID NO 13418

SEQ ID NO: 13421 - DNA, 1692 bp, Muscodor strobelii
  misc_feature: SGI cDNA ID NO. 564396
  misc_feature: Reduced expression when VOC is produced
  misc_feature: Encodes the peptide sequence at SEQ ID NO 13422
atgatgacgcgacgcattgtacgcaccatcacacagctcgccgccgccgcctctttcgccttcatcgtcatatttctgcttgaccgtaatttccgcctgttgcccaatgccgtccacgagtacatgccccagcaccaccacgggcttgtcgtcaccgatatcactgtcaccaagtgctccaaggtcaatgtcttctcctcctgcaagctggacccggagctgtggcatcgcgtggacaagaatctctacctgaacaatgcttgggtttccagtgcctacgtacatgtccaacgcaagaaggaggaagacctgaccgccgatgacagggtcgtcatcgacgtcaaagtcggtggcaaagtcccggacgccctgcccaaggaccagaccaatgctaagtgggagtctagacccgcaggggtatggattctgcgctctgccaaacctcatgcgagcgactccaaggaggccatcatctctgtcgacgtgctctttggcgacgacagtgtcgaggtacggccaggctggcatatacagggaaccccgttattgctcgacctcagcccggacatgccctcggcgcatctcactatcaggcgtggcggccacgacgagcccctgaagccacaaccccgcatcagggacaacggcaggttcaagattatgcagctggcggatctgcatctcagtactggcctggggcattgccgtgatccagtcccagacgaatatgacgggggtccatgtgaggcagatcctcgcacgctcgactttgtgaccaagatgatcgaggaagagaagccagacttggttgtgttgagcggcgatcaggttaatggcgagaccgcccccgacgcgcaaacggctatcttcaagtatgcgcagatactcattcggcataagatcccctatgtgtcgatatttgggaaccacgacgacgaaggctccatgtcccgcgcgggtcaaatggcactgattgagcagttgccgtactcactctccagggccggccctgaagacatcgccggtgtgggcaactattatctcgaagtcctcgcgcagggcaactcgaagcattccgccctcaccttgtacatgcttgatacacactcctattctcccgatgaacggaaatggcctggctatgattggatcaagaaaactcaaattgactggttcaagcagacggcagctcgtctcaagaaaaaccacaaagagtatacacatatacacatggatctggcttttattcatattcctctgcctgaatatgtcgttcccggaaatcctttcatcggcgcacctctagaaggcgtgacagctcccgtattcaactcaggattccatgacgccttagttgaggaaggagttgtcatggtcagttgcggacatgaccatgccaatgattattgcatgctatcgcttgatcaggaacagagcagacctcaaatttggatgtgctatggcggtggcagtgggtttggcggctatggtggttatgatggttatattcgacgaattcgattcttcgacatcgacatgaataccgcacgcattactacttacaagcgactcgaatatggagatatggaaacgcgcattgacaaacaggtgatagttgatggtgggcatgtaataccgcctccggtacaagatgtcccgaccgaacaggaacctccatttccagcacagtga

SEQ ID NO: 13422 - protein, 563 aa, Muscodor strobelii
  misc_feature: SGI Peptide ID NO. 564396
  misc_feature (218)..(467): Pfam Id: PF00149 Pfam Desc: Calcineurin-like phosphoesterase
  misc_feature (2)..(549): NCBI GI: 154316091 Blast Desc: BC1G_03630 [Botryotinia fuckeliana B05.10] gi|150846417|gb|EDN21610.1| BC1G_03630 [Botryotinia fuckeliana B05.10]
  misc_feature (2)..(547): NCBI GI: 116198351 Blast Desc: CHGG_07331 [Chaetomium globosum CBS 148.51] gi|88178610|gb|EAQ86078.1| CHGG_07331 [Chaetomium globosum CBS 148.51]
  misc_feature (2)..(548): NCBI GI: 256728685 Blast Desc: [Nectria haematococca mpVI 77-13-4]
  misc_feature (2)..(547): NCBI GI: 85102108 Blast Desc: NCU04111 [Neurospora crassa OR74A] gi|21622331|emb|CAD36972.1| conserved [Neurospora crassa] gi|28922810|gb|EAA32031.1| NCU04111 [Neurospora crassa OR74A]
  misc_feature (2)..(547): NCBI GI: 171692399 Blast Desc: protein product [Podospora anserina] gi|170946148|emb|CAP72949.1| protein product [Podospora anserina]
  misc_feature (2)..(552): NCBI GI: 46109928 Blast Desc: FG01846.1 [Gibberella zeae PH-1]
  misc_feature (42)..(548): NCBI GI: 145605531 Blast Desc: MGG_09209 [Magnaporthe grisea 70-15] gi|145013353|gb|EDJ97994.1| MGG_09209 [Magnaporthe grisea 70-15]
  misc_feature (2)..(547): NCBI GI: 261360879 Blast Desc: phosphatase DCR2 [Verticillium albo-atrum VaMs.102]
  misc_feature (2)..(544): NCBI GI: 242770025 Blast Desc: phosphoesterase, [Talaromyces stipitatus ATCC 10500] gi|218725089|gb|EED24506.1| phosphoesterase, [Talaromyces stipitatus ATCC 10500]
  misc_feature (2)..(547): NCBI GI: 255947072 Blast Desc: Pc22g02590 [Penicillium chrysogenum Wisconsin 54-1255] gi|211591320|emb|CAP97547.1| Pc22g02590 [Penicillium chrysogenum Wisconsin 54-1255]
  misc_feature: Useful for introducing or modulating the production of volatile compounds
MMTRRIVRTITQLAAAASFAFIVIFLLDRNFRLLPNAVHEYMPQHHHGLVVTDITVTKCSKVNVFSSCKLDPELWHRVDKNLYLNNAWVSSAYVHVQRKKEEDLTADDRVVIDVKVGGKVPDALPKDQTNAKWESRPAGVWILRSAKPHASDSKEAIISVDVLFGDDSVEVRPGWHIQGTPLLLDLSPDMPSAHLTIRRGGHDEPLKPQPRIRDNGRFKIMQLADLHLSTGLGHCRDPVPDEYDGGPCEADPRTLDFVTKMIEEEKPDLVVLSGDQVNGETAPDAQTAIFKYAQILIRHKIPYVSIFGNHDDEGSMSRAGQMALIEQLPYSLSRAGPEDIAGVGNYYLEVLAQGNSKHSALTLYMLDTHSYSPDERKWPGYDWIKKTQIDWFKQTAARLKKNHKEYTHIHMDLAFIHIPLPEYVVPGNPFIGAPLEGVTAPVFNSGFHDALVEEGVVMVSCGHDHANDYCMLSLDQEQSRPQIWMCYGGGSGFGGYGGYDGYIRRIRFFDIDMNTARITTYKRLEYGDMETRIDKQVIVDGGHVIPPPVQDVPTEQEPPFPAQ

SEQ ID NO: 13423 - DNA, 5713 bp, Muscodor strobelii
  misc_feature: SGI EST ID NO. CUFF.32440.1
  misc_feature: Variant of the nucleotide sequence at SEQ ID NO 13421
tgaacaagtattgtgagtggctttacaagatagggcgctatcgagggctatgtaagtgatatcccgcgttagtggcccgccaatgcatttcactgagatggtgatcttcctgtatacgcgtctcagagtcgctgaatccatatttagcagtataatccacttcgccaagacctcgtaatgttctcgtacttgtactcgtacatggacacctattttcttgagagttgagtgcggctctcagtggtccttttcttgcggcaagctagtgggtgattctcccgtccgcgccgttccccgttaccggtatccaataacacaaagtcgaacaccaggttcccttggctgtggcaataccctacgcatttcgacagcgacaatggttgatgggagttgagtctgcgccgatccaccactcttccactgctctctatgtggtcggctgttggacgctccgaggtcgccggcagatggtcgccgggtccactaattcgtcggcatgccagtgggagttgcggaagttggattcagcttcagagccgctaataagattgtccacagcacccattcgactttcagatccattcgattgggtgtcccccttcgtataaacatatgcttcctctagcgttttctttaacgacaagacatgcgaaactcgagggccgttgacctctcggagagaccgtgccttgcataattagtagacacatgcattgcgtgggcctacaccacgaaaggggcagaaacctgtttgagggttctcatatggtgtggcagcgatgtaaccctctaacggcaaccagcacgacgacaatgatgaagacttttttttacagagacctcatacgactggaagatttcaccgcttcttcgagcgattcaggaatttcaacagccacgtggtaatgctctttgcagcctcagcccagatgtcgtcgatacgagttattcagtgtatcactcgagtaaatactgctgttctatacggtctgcacagcagatagctacgtcggtcatgagtcatgaactccgaagtcctagattatcgatgccaagcgagacggcgaacaataaaacgaaacatctactggagtgataaagctgacggaagtctagtgtcgctaactttgggaccgttatttgagggctggaagagattacgtgtataacgaccgaaatagtgtggtcatttcccaaggcccggttgtcagttgaaaaagtgtctagatgatgagagacgacggcaaaagaaaaaagagaatagtagggcagaacgtggcataccctccttccccagactcctgactcaagttgtgtaagctgacaccaagcaaccagactatcacgactcgaaacttgtgctacaacaacttgctacttagtaccgtacctaccgacctaccgacctacctatggcaacgttgagatcacgtgtgcgcttgatatagtggattggtgatctcacgagacgatctcggcggagaatcgatctcgggacaatcgcaagcaaccccagtacttctagaacatctgaagcttccatatggcctgacaatttagagtgctcgatgttttagaagcatcatttccgaggatgcatcaacagcgccttccctgctcccatcctgcagggctggaacttgctacaccgagatgggtaaggctgcccggttgtccggctgccaccgtctgccaccgccttcgactaatagtgtctgacacttggatggatgcaaccccagctttcataagctttctagtaaaccggcactgtctcgagtgctaatagctgtcgtaaagtgggctcatttgatgaagcggctgaaaagcttcaataaatggtgagcgccacgatctgcccacgatctgctcggagggaccgagatctggatatagaaccgtttttctcgtgttgatggttcggaccccaacatcagtatgtagggtaggccacgatatcaggccatgatatcagaagcaagccaatgccttttctatggttgtatgctcggtgggcatgcgcgggcagtgaggtgtgcactgaccgtatatgcccaaaagggcaaaggcggagattagtcatcagacacacactgggcagaaagcggcatgtcttgcgacttgcagtgccggctgcaaggctccgcctggcgactggctcgactggaatgctggcatttagcagccctgccagcaaattgccattcgcgtccaagaattgtccattgtcgaattcggggctgacactcgcgaatttccatacacgtaatctgcaggctaaggtccagcgtcggtcacgaatttgtctgccgctgcgtcactcccacaccgcaacccatcctctcgacggcgcagcgatacacgcagtgcttgctgcttgctcgctgcttgtttctgctagtctgtgcgcgctacatgaccgcgcatcgtatgattcgcatgatttggaacgttgaaaatgactcgtagcgagctgcagctgcccctattgctacattgctgctgctcttgccgaacttgtgccgtcaccaagcgcgccccctacgtgagcgcctacgtgagatagcctactagtcgtctagtcggcaacctcacgcctccctctcgcgatgatgacgcgacgcattgtacgcaccatcacacagctcgccgccgccgcctctttcgccttcatcgtcatatttctgcttgaccgtaatttccgcctgttgcccaatgccgtccacgagtacatgccccagcaccaccacgggcttgtcgtcaccgatatcactgtcaccaagtgctccaaggtcaatgtcttctcctcctgcaagctggacccggagctgtggcatcgcgtggacaagaatctctacctgaacaatgcttgggtttccagtgcctacgtacatgtccaacgcaagaaggaggaagacctgaccgccgatgacagggtcgtcatcgacgtcaaagtcggtggcaaagtcccggacgccctgcccaaggaccagaccaatgctaagtgggagtctagacccgcaggggtatggattctgcgctctgccaaacctcatgcgagcgactccaaggaggccatcatctctgtcgacgtgctctttggcgacgacagtgtcgaggtacggccaggctggcatatacagggaaccccgttattgctcgacctcagcccggacatgccctcggcgcatctcactatcaggcgtggcggccacgacgagcccctgaagccacaaccccgcatcagggacaacggcaggttcaagattatgcagctggcggatctgcatctcagtactggcctggggcattgccgtgatccagtcccagacgaatatgacgggggtccatgtgaggcagatcctcgcacgctcgactttgtgaccaagatgatcgaggaagagaagccagacttggttgtgttgagcggcgatcaggttaatggcgagaccgcccccgacgcgcaaacggctatcttcaagtatgcgcagatactcattcggcataagatcccctatgtgtcgatatttgggaaccacgacgacgaaggctccatgtcccgcgcgggtcaaatggcactgattgagcagttgccgtactcactctccagggccggccctgaagacatcgccggtgtgggcaactattatctcgaagtcctcgcgcagggcaactcgaagcattccgccctcaccttgtacatgcttgatacacactcctattctcccgatgaacggaaatggcctggctatgattggatcaagaaaactcaaattgactggttcaagcagacggcagctcgtctcaagaaaaaccacaaagagtatacacatatacacatggatctggcttttattcatattcctctgcctgaatatgtcgttcccggaaatcctttcatcggcgcacctctagaaggcgtgacagctcccgtattcaactcaggattccatgacgccttagttgaggaaggagttgtcatggtcagttgcggacatgaccatgccaatgattattgcatgctatcgcttgatcaggaacagagcagacctcaaatttggatgtgctatggcggtggcagtgggtttggcggctatggtggttatgatggttatattcgacgaattcgattcttcgacatcgacatgaataccgcacgcattactacttacaagcgactcgaatatggagatatggaaacgcgcattgacaaacaggtgatagttgatggtgggcatgtaataccgcctccggtacaagatgtcccgaccgaacaggaacctccatttccagcacagtgaagagaaccatacaagatcagaagtattcgaattttgataaaggcgaccacattgcttcggttttaccgtgaggcatcgccagtactgggcatatgatttgtgccgacctacggctctacgaaacctcactacgatgcgcatagacttggctcatcgtaatgttttgattactaagtgatgtatccgtcttttatagacttcgcggagccatcctgacggtggtcatccatgtgcgaccgtttttaagagacactactggtgaagaatacagtgttctcatgccagagccacgcacaccagttagaggtgcttgatcgccaatcgaactcggaatcgaccggtgaaatgcgaagcattttgatgaatgagagaggatcaagaggagtaaggctctctgctacaatgacggacatctgcagtgctcttgtgcgacctaatttattggacagtcgagcttatgtccgaggtcggcacgtgtatatggggctgatgttaccctctactaaggccgacaaggctgtggaatcaagcgtttagccgcacggaaacggccatgagactagctgagaagtgggttgtaggataggtggcgatgtatatattatgtgctatcttggaataaagatagggattctgtgcccttagtaatcaatatattcactgcctttgtaccttttattgtgtgtgatccccaggacagtggatattttacggcgggatggtagatagtatgttgtttgtatattgaacatatatctcttctataatatgctgctcttctctgctactaatccccttccagttgtttagtagacctctgatatcaagctgatcgactcagagataacccggcggctgggtctgcgcagcacttgaaacatatgatggcttaactgggaaccttctgtttctcttactacttcttcgcactggaatccctgatgtggggagaggtcttgcgccttggggcttttgtgatggtgtaggataggtgactgggtattgggtctgatggcgagatactgggactgagcctgggggtcctgggataaggaagtgggggatgtcgttttgatggttgatcgggttggttgtttgtggtggatggcgaggggtgcgtaggggactgggtatcatttctggattggggatttggcggtctgcatgggtgcttgatggtatgtttgggccgtgagaacttggttgtgtggattgataggggatggggtgttgtggatgttggtttgtgatgcctgtgtaatgttgagttgagggctgtttctgagctctgtgctgtctagctgtggatgggatgggtcttcttgtttcgctacccgttgatggcatatgaggttgtgtatgagagaaaacgcgagatgtgttcctttgagcttttgatcgtgatggcaggg

SEQ ID NO: 13424 - DNA, 963 bp, Muscodor strobelii
  misc_feature: SGI cDNA ID NO. 564397
  misc_feature: Elevated expression when VOC is produced
  misc_feature: Encodes the peptide sequence at SEQ ID NO 13425
atgtcagaaggctcagaaggtagtgtaggaaccagcgcagatgagattgttgtcgaagtaacaccaccatatctaccgccgtacactcctacgatacagccaccgcgaacagcaatggaacttcgcgcagacctgactcaacaagccagtattactgtgatacttgaagtcatgcacggccttcctctgatgatgactaacacggagacgttgccattgttcttccatagacctagcatggagaccaacttacccgaggccgtcagcaaatgcatgcaaatatcgcggctatttctacaccgtaacgcgagcccgcaggatagacagatgtacctatcagttttgaatgaggagattgcacgactcgttcacgtacatccaaatgcatccaaagccgaccttatcgcaggactccaagtactccaaatatacgcaactatgacagcactcgatagtgaggcctctcggacaaatttggcgcctgagatgcaagacgaatactccttttatatgatggtctacaaccgccagctttttacatatgacaactacagtgcattcgacattgataatattggtcatgacaacgaaacatgggaagacttcatatacgcggaaacgcgacgaagagcagcaatattttggttcctgcaaagcagagtcctgaacatcaataggggtttcgtctcccctcctgtaatgggataccgtggtctggcccttcctgccccagaagctctctggatggcaaagacgcgggatgaatggcacgctacgcgcgcccgattacggacaccaggattacagcacgggccctacgggacaagcatgcgaacactgggagatctcatcgatgcgcaaaatgcacccttcgattcctattacgccgaacagcgacagcagtggctcgccaactccggcaaagaaggagtcctactccttatcggagcaagcatgatctga

SEQ ID NO: 13425 - protein, 320 aa, Muscodor strobelii
  misc_feature: SGI Peptide ID NO. 564397
  misc_feature (52)..(320): NCBI GI: 242783875 Blast Desc: conserved [Talaromyces stipitatus ATCC 10500] gi|218720421|gb|EED19840.1| conserved [Talaromyces stipitatus ATCC 10500]
  misc_feature (52)..(320): NCBI GI: 212545625 Blast Desc: conserved [Penicillium marneffei ATCC 18224] gi|210064486|gb|EEA18581.1| conserved [Penicillium marneffei ATCC 18224]
  misc_feature (25)..(260): NCBI GI: 46115252 Blast Desc: FG03468.1 [Gibberella zeae PH-1]
  misc_feature (47)..(319): NCBI GI: 212527562 Blast Desc: C6 finger domain protein, [Penicillium marneffei ATCC 18224] gi|210073336|gb|EEA27423.1| C6 finger domain protein, [Penicillium marneffei ATCC 18224]
  misc_feature (30)..(262): NCBI GI: 115387607 Blast Desc: [Aspergillus terreus NIH2624] gi|114195393|gb|EAU37093.1| [Aspergillus terreus NIH2624]
  misc_feature (50)..(256): NCBI GI: 121714589 Blast Desc: C6 finger domain protein, [Aspergillus clavatus NRRL 1] gi|119403059|gb|EAW13479.1| C6 finger domain protein, [Aspergillus clavatus NRRL 1]
  misc_feature (51)..(256): NCBI GI: 119487381 Blast Desc: C6 finger domain protein, [Neosartorya fischeri NRRL 181] gi|119410640|gb|EAW20586.1| C6 finger domain protein, [Neosartorya fischeri NRRL 181]
  misc_feature (22)..(308): NCBI GI: 242798338 Blast Desc: conserved [Talaromyces stipitatus ATCC 10500] gi|218716494|gb|EED15915.1| conserved [Talaromyces stipitatus ATCC 10500]
  misc_feature (62)..(256): NCBI GI: 159122254 Blast Desc: C6 finger domain protein, [Aspergillus fumigatus A1163]
  misc_feature (62)..(256): NCBI GI: 70981977 Blast Desc: C6 finger domain protein [Aspergillus fumigatus Af293] gi|66844140|gb|EAL84479.1| C6 finger domain protein, [Aspergillus fumigatus Af293]
  misc_feature: Useful for introducing or modulating the production of volatile compounds
MSEGSEGSVGTSADEIVVEVTPPYLPPYTPTIQPPRTAMELRADLTQQASITVILEVMHGLPLMMTNTETLPLFFHRPSMETNLPEAVSKCMQISRLFLHRNASPQDRQMYLSVLNEEIARLVHVHPNASKADLIAGLQVLQIYATMTALDSEASRTNLAPEMQDEYSFYMMVYNRQLFTYDNYSAFDIDNIGHDNETWEDFIYAETRRRAAIFWFLQSRVLNINRGFVSPPVMGYRGLALPAPEALWMAKTRDEWHATRARLRTPGLQHGPYGTSMRTLGDLIDAQNAPFDSYYAEQRQQWLANSGKEGVLLLIGASMI

SEQ ID NO: 13426 - DNA, 2543 bp, Muscodor strobelii
  misc_feature: SGI EST ID NO. CUFF.32108.0
  misc_feature: Variant of the nucleotide sequence at SEQ ID NO 13424
ccaattctgactggatggcgatggtggtcgaatcgaccaatctacactaccactcggggatcaccttgatgtttgacgtcttgttcgtcaatccatctaatccaggtttatattgttgatgcgaagggcaaaaccacttcggcggcgaacgatatctgaataattgagagtcattggacccctaccgttacatacaccgttgtacactacatatataccgaaatccccctcgaataatcatcacttcagtgtcgaacgcgaatcgcattacaaccattttgtactacgaagaagatttgaaataatcagagccagatgtcgacaacaacgaaggacaacgatgggggtggtatacgcttctgtaaactatgcaacaagccgataatgagtgaaagtgcttataagcgtcacgttaactactgtcgtcgcacgttgaccaagcctaagaaacgcaagcgttcttgcaaaagctgtcatatcgctaaagccaagtgctcctttgaatcaccatgtgctcgctgcgtttcgaaaggactactctgcgaatatgagaagtcccaggcatcaacacccggcaatgagtcaccgactgagcctcaagacgcagcaatgtcagaaggctcagaaggtagtgtaggaaccagcgcagatgagattgttgtcgaagtaacaccaccatatctaccgccgtacactcctacgatacagccaccgcgaacagcaatggaacttcgcgcagacctgactcaacaagccagtattactgtgatacttgaagtcatgcacggccttcctctgatgatgactaacacggagacgttgccattgttcttccatagacctagcatggagaccaacttacccgaggccgtcagcaaatgcatgcaaatatcgcggctatttctacaccgtaacgcgagcccgcaggatagacagatgtacctatcagttttgaatgaggagattgcacgactcgttcacgtacatccaaatgcatccaaagccgaccttatcgcaggactccaagtactccaaatatacgcaactatgacagcactcgatagtgaggcctctcggacaaatttggcgcctgagatgcaagacgaatactccttttatatgatggtctacaaccgccagctttttacatatgacaactacagtgcattcgacattgataatattggtcatgacaacgaaacatgggaagacttcatatacgcggaaacgcgacgaagagcagcaatattttggttcctgcaaagcagagtcctgaacatcaataggggtttcgtctcccctcctgtaatgggataccgtggtctggcccttcctgccccagaagctctctggatggcaaagacgcgggatgaatggcacgctacgcgcgcccgattacggacaccaggattacagcacgggccctacgggacaagcatgcgaacactgggagatctcatcgatgcgcaaaatgcacccttcgattcctattacgccgaacagcgacagcagtggctcgccaactccggcaaagaaggagtcctactccttatcggagcaagcatgatctgacttcgacgtaatgataacgacgcaaatgtaaactgtatattatggaaacaaggtatctacgcatgggaggagcacaatatggcacactttcggtattcaaacatccacttttaatactactgtgatgaatctgatggttcttcaaatgccgcagcggatcgaagatctcttagtttcgactgtgttgttgagcacgaagaggtattaattagcctcgcaatatgttcccactcatgagaaggtaaagagacgtttgtcggtcccgtagcatctatttacgcctaaagaggaaaatgtcggttccgtaacatggaggaaatggcaacatctagaaggtcgcatttcaggttacgcgcttcacacggcatctaatgacgaagccgtcccttcgcaacattgaccacgacaggagttctggatccgcgaacgttctattcgatacattctgtcggcgaacgccgtgccttgcattcaaggccactgccgcgaatgctgcaagagctgctggtccttggacaattactaattctacatatctttgtctcccacttgctccacaccaagtcctggcaactacaccaaattcatggagtcgcatacatacattattcatttttggagcttgaacccttgaacatctctatccacttactgcaagcaacgtcgatcaaacacgattaacggcgggggtcgaaacggattttctcatgaggatcacaagcaattaggcagctggtaataataggtacaaatgtaagctgctaagatataacaagacaaggcatcctagttcatagacaacgtcggcccgcaacggcaacattatcaaataatcagttcaatttttccaatccccacacagaatcgcgtcggctatgtaaagtactcttagcgagcggcttcagaagtgagccgtctgagctgtaccatgctctcttccagtgcctcggccatgctccacccatgttcag

SEQ ID NO: 13427 - DNA, 966 bp, Muscodor strobelii
  misc_feature: SGI cDNA ID NO. 564398
  misc_feature: Reduced expression when VOC is produced
  misc_feature: Encodes the peptide sequence at SEQ ID NO 13428
atgtcagaaggctcagaaggtagtgtaggaaccagcgcagatgagattgttgtcgaagtaacaccaccatatctaccgccgtacactcctacgatacagccaccgcgaacagcaatggaacttcgcgcagacctgactcaacaagccagtattactgtgatacttgaagtcatgcacggccttcctctgatgatgactaacacggagacgttgccattgttcttccatagacctagcatggagaccaacttacccgaggccgtcagcaaatgcatgcaaatatcgcggctatttctacaccgtaacgcgagcccgcaggatagacagatgtacctatcagttttgaatgaggagattgcacgactcgttcacgtacatccaaatgcatccaaagccgaccttatcgcaggactccaagtactccaaatatacgcaactatgacagcactcgatagtgaggcctctcggacaaatttggcgcctgagatgcaagacgaatactccttttatatgatgcaggtctacaaccgccagctttttacatatgacaactacagtgcattcgacattgataatattggtcatgacaacgaaacatgggaagacttcatatacgcggaaacgcgacgaagagcagcaatattttggttcctgcaaagcagagtcctgaacatcaataggggtttcgtctcccctcctgtaatgggataccgtggtctggcccttcctgccccagaagctctctggatggcaaagacgcgggatgaatggcacgctacgcgcgcccgattacggacaccaggattacagcacgggccctacgggacaagcatgcgaacactgggagatctcatcgatgcgcaaaatgcacccttcgattcctattacgccgaacagcgacagcagtggctcgccaactccggcaaagaaggagtcctactccttatcggagcaagcatgatctga

SEQ ID NO: 13428 - protein, 321 aa, Muscodor strobelii
  misc_feature: SGI Peptide ID NO. 564398
  misc_feature (52)..(321): NCBI GI: 242783875 Blast Desc: conserved [Talaromyces stipitatus ATCC 10500] gi|218720421|gb|EED19840.1| conserved [Talaromyces stipitatus ATCC 10500]
  misc_feature (52)..(321): NCBI GI: 212545625 Blast Desc: conserved [Penicillium marneffei ATCC 18224] gi|210064486|gb|EEA18581.1| conserved [Penicillium marneffei ATCC 18224]
  misc_feature (25)..(258): NCBI GI: 46115252 Blast Desc: FG03468.1 [Gibberella zeae PH-1]
  misc_feature (47)..(320): NCBI GI: 212527562 Blast Desc: C6 finger domain protein, [Penicillium marneffei ATCC 18224] gi|210073336|gb|EEA27423.1| C6 finger domain protein, [Penicillium marneffei ATCC 18224]
  misc_feature (30)..(263): NCBI GI: 115387607 Blast Desc: [Aspergillus terreus NIH2624] gi|114195393|gb|EAU37093.1| [Aspergillus terreus NIH2624]
  misc_feature (30)..(318): NCBI GI: 242771303 Blast Desc: conserved [Talaromyces stipitatus ATCC 10500] gi|218721435|gb|EED20853.1| conserved [Talaromyces stipitatus ATCC 10500]
  misc_feature (51)..(257): NCBI GI: 119487381 Blast Desc: C6 finger domain protein, [Neosartorya fischeri NRRL 181] gi|119410640|gb|EAW20586.1| C6 finger domain protein, [Neosartorya fischeri NRRL 181]
  misc_feature (50)..(257): NCBI GI: 121714589 Blast Desc: C6 finger domain protein, [Aspergillus clavatus NRRL 1] gi|119403059|gb|EAW13479.1| C6 finger domain protein, [Aspergillus clavatus NRRL 1]
  misc_feature (62)..(257): NCBI GI: 159122254 Blast Desc: C6 finger domain protein, [Aspergillus fumigatus A1163]
  misc_feature (62)..(257): NCBI GI: 70981977 Blast Desc: C6 finger domain protein [Aspergillus fumigatus Af293] gi|66844140|gb|EAL84479.1| C6 finger domain protein, [Aspergillus fumigatus Af293]
  misc_feature: Useful for introducing or modulating the production of volatile compounds
MSEGSEGSVGTSADEIVVEVTPPYLPPYTPTIQPPRTAMELRADLTQQASITVILEVMHGLPLMMTNTETLPLFFHRPSMETNLPEAVSKCMQISRLFLHRNASPQDRQMYLSVLNEEIARLVHVHPNASKADLIAGLQVLQIYATMTALDSEASRTNLAPEMQDEYSFYMMQVYNRQLFTYDNYSAFDIDNIGHDNETWEDFIYAETRRRAAIFWFLQSRVLNINRGFVSPPVMGYRGLALPAPEALWMAKTRDEWHATRARLRTPGLQHGPYGTSMRTLGDLIDAQNAPFDSYYAEQRQQWLANSGKEGVLLLIGASMI

SEQ ID NO: 13429 - DNA, 2543 bp, Muscodor strobelii; identical to SEQ ID NO: 13426
  misc_feature: SGI EST ID NO. CUFF.32108.0
  misc_feature: Variant of the nucleotide sequence at SEQ ID NO 13427

SEQ ID NO: 13430 - DNA, 900 bp, Muscodor strobelii
  misc_feature: SGI cDNA ID NO. 564399
  misc_feature: Encodes the peptide sequence at SEQ ID NO 13431
atgacccacgatcaccaaattacggagcattcgacccccagaacaggtaccagtctgtcggtccgaccccctggaacggcaggcaatcgccggcttatgggacaggcattgtcgaccaggggagcggccaccccttcggcgagcccatccaaacatcttcatcccgtgtcggcgacaagcaatcaacaggatgcgaacctggtgtcttcccaatctctgcgtgattccttgcgccctgtgaagaatttgacggccttgaagcaggagtcgcaagacaatttgccaaagcatactactgacgaaagtcgcactgggttgccgagcttgggtactatggtcccgtatcaagaagagcctccagtcggactgttcatgcggccgagctcggccgcctctacaaatcagagctttaattacggacgatcctctgcaatggatcatggtgaagtcagcacgagacagacgagtgggaactctatgctttatgcgcaaattcgtggcctgcagcgtctagtcgagttccggaatgaggaagtgtcgcagttgagacgacagctagagacgcaaaatcatatggacattgggaccctaagtgaacagctgagagaggcaaagcgcgagtctgccatgtggcgtaaacgggccgagagtgcggagcgacggtgcaaggtattcatgaggttcaccgggaagtttagtgagttggagtctgaggatggggtctctgcgcacacggagagcgaggagacggtgcaggagaggatcaaacatgatattgagagcaaggggaagggcaaaggaaaagagaagcagattgtacaacaggggctgggaccggatggtagttgggatggtgcggtcttcgatgatcactattatggtggctcatatgctttgtga

SEQ ID NO: 13431 - protein, 299 aa, Muscodor strobelii
  misc_feature: SGI Peptide ID NO. 564399
  misc_feature (106)..(235): NCBI GI: 261359001 Blast Desc: conserved [Verticillium albo-atrum VaMs.102]
  misc_feature (107)..(262): NCBI GI: 256728022 Blast Desc: NECHADRAFT_46451 [Nectria haematococca mpVI 77-13-4]
  misc_feature (108)..(240): NCBI GI: 46130888 Blast Desc: FG08999.1 [Gibberella zeae PH-1]
  misc_feature (158)..(265): NCBI GI: 154310638 Blast Desc: BC1G_06793 [Botryotinia fuckeliana B05.10] gi|150851333|gb|EDN26526.1| BC1G_06793 [Botryotinia fuckeliana B05.10]
  misc_feature (157)..(245): NCBI GI: 156058446 Blast Desc: SS1G_03234 [Sclerotinia sclerotiorum 1980] gi|154701022|gb|EDO00761.1| SS1G_03234 [Sclerotinia sclerotiorum 1980]
  misc_feature (90)..(225): NCBI GI: 171692691 Blast Desc: protein product [Podospora anserina] gi|170946294|emb|CAP73095.1| protein product [Podospora anserina]
MTHDHQITEHSTPRTGTSLSVRPPGTAGNRRLMGQALSTRGAATPSASPSKHLHPVSATSNQQDANLVSSQSLRDSLRPVKNLTALKQESQDNLPKHTTDESRTGLPSLGTMVPYQEEPPVGLFMRPSSAASTNQSFNYGRSSAMDHGEVSTRQTSGNSMLYAQIRGLQRLVEFRNEEVSQLRRQLETQNHMDIGTLSEQLREAKRESAMWRKRAESAERRCKVFMRFTGKFSELESEDGVSAHTESEETVQERIKHDIESKGKGKGKEKQIVQQGLGPDGSWDGAVFDDHYYGGSYAL

SEQ ID NO: 13432 - DNA, 2945 bp, Muscodor strobelii
  misc_feature: SGI EST ID NO. CUFF.32096.0
  misc_feature: Variant of the nucleotide sequence at SEQ ID NO 13430
ggggcaaacagtcatcccagactccagcctctcgtgtaagacttggttgcgaatagaattctcagcagacagatgatgtggaacaacccgaaccgttgtgtcctttcaaaatcacagtcacgcctgcaaaggccagcgaggtaacatcagaatgcggcttttctccccagttgtcgtcggaacctcacacctacgatacggagcgacccccgcctcaatttttctctaaccgttggagaagcatgaatggttcaaatgaaacggatgagcaatccctagtcatgtcaatgggagtaaagcatagaccccacccggctggcaatgtgtcttccaatatcactcgggactcgccgatggaggcaggctcaagaccacagactccagaatggaaacggcaattaatcaagaagaaagtggaacagagagcgaaacttccaaagcttctagaaagcagaggaacggtgggaaacacgccagggtcaaatgggtcggaccgagatacaactccgattcgtacgaacgatgacacttcgccaatcaaggggcgcagcgtggggtcgattataccgaaggaacagagaaagagctccaaacccatgccaggcgctatgaaggccatggcagctttgtttaataacgctgtgaagacgtcaccagtttatcaaacgccaactctgacagggagaaatcggggtggcatgcttgatcgctctgagcaatacaatcttgacgcgtcaccatctaagaaccttcatcagaaacgttcctttttgccgagcaagccgttggtgaatgaagaggatgtgcgacgtgggagcatgtcagcacagcatggatcttccagaaaaagtacgtcggtgtcagggtcttcccatgccacgcgaatgacccacgatcaccaaattacggagcattcgacccccagaacaggtaccagtctgtcggtccgaccccctggaacggcaggcaatcgccggcttatgggacaggcattgtcgaccaggggagcggccaccccttcggcgagcccatccaaacatcttcatcccgtgtcggcgacaagcaatcaacaggatgcgaacctggtgtcttcccaatctctgcgtgattccttgcgccctgtgaagaatttgacggccttgaagcaggagtcgcaagacaatttgccaaagcatactactgacgaaagtcgcactgggttgccgagcttgggtactatggtcccgtatcaagaagagcctccagtcggactgttcatgcggccgagctcggccgcctctacaaatcagagctttaattacggacgatcctctgcaatggatcatggtgaagtcagcacgagacagacgagtgggaactctatgctttatgcgcaaattcgtggcctgcagcgtctagtcgagttccggaatgaggaagtgtcgcagttgagacgacagctagagacgcaaaatcatatggacattgggaccctaagtgaacagctgagagaggcaaagcgcgagtctgccatgtggcgtaaacgggccgagagtgcggagcgacggtgcaaggtattcatgaggttcaccgggaagtttagtgagttggagtctgaggatggggtctctgcgcacacggagagcgaggagacggtgcaggagaggatcaaacatgatattgagagcaaggggaagggcaaaggaaaagagaagcagattgtacaacaggggctgggaccggatggtagttgggatggtgcggtcttcgatgatcactattatggtggctcatatgctttgtgatgggaatgagtacagggattggtagtagacttacacaagacctagggcttacgaagcggaggcatggtgtattattatgaggctgagagtagcagatgagaatacgcttctgtggtagcttagaggcatgactgacagatagagtagtttatagtcttagtctagtgtgcggcaatagagtagatacatgtttgttggattgatgagggactatgaacgggaagtgttgaattcgtgatgtttcatggttagggactaagaggagatggatgttgtgattgtgtactgatgctatattgttctacatgtagttacatcgagtgttgtgattattgatataatcgtctgagtatatgttttatgttctattcacatgaatgcgggaaacaaatacagtgtgctgtacgaggccgcagtgggaatcatttcacacgtgcagctttgcttagtgagagggaaagaagttgtatagagatagagaaaagagcgcaacctctttccctctcactaagcataccacacgtgtgaaagaagtgttatgtggtaatatcgcgtttcatgtttacggattagtgaactaaggacatggagagtttgataagtatatgtatgagtgacgtgagcgatatagttatagcgtaatttgatatatagctagaataggggtttgggggttgggggttcagaggtttaggggtcgagtgggttttagggtggacgaacaggcacggtttgggatcgcttgtgtcgagttggagatgaattcatcgcagagcgatgtgggtgtgcaacatggtcgtacttcggcgttgtttgttttggagtttgatgcttctgtggcaggtggcaaaattaagaataggaggccgtatcatgtgtgttttgagggtgtggtgtgtagatggtgtttgaggatacggctacttccgtttggaatgggttcttgtttatagttcacctgctttgccgagcggctaccatgtttggatttagatggagggcatagatatatgtggcttggctgtgttgtgtatgggtattacatgtttaattctggagtgaggtattattattatgtctcgtagggcacttgttggtttggtgcgggaacgtgggtatcatcccgttcttaggggctaacgggtactacctagctaatat

SEQ ID NO: 13433 - DNA, 1593 bp, Muscodor strobelii
  misc_feature: SGI cDNA ID NO. 564400
  misc_feature: Encodes the peptide sequence at SEQ ID NO 13434
atggtaagctacctcaggaaacaagtcccgctgaataacgtcaggcttattaacgaaaaacaagcggatacgaaaggaatcttccgcgtgcctggttcaatgcgggtttcgaatacactgtatgagtattatagcgccggaaccaagaccagaggcgtatctagcactacgatgtgtccagccgttccagcacacatcaaatgcaacccccacgatattgcatccactttcaaacgactattagctggattacctggcggtatactaggctcattatccgtattcgatgccctcgttgcggtgtacggccgactgcaaattggtccggaacaatatcgcacgaaagaaacgaaattgagagctcgtctcatcgctctggctattggaacagtcaagtcgcaatatcaacgagagctcatttgcggtgtatttggattgttatgccttgttggtcgagccgcagagacaaccgcccgtgaagatgacaaagggcgcccactacctactacgcaactaatgggctaccatgccttaggtatcactttcggacctcttttgattggtgaccagatcgacacttatgtcatgaagatggctactttctcaaccgggctggtcctgctccctattgcgcaaccgatgtcaaggaaagagagacatcgagaaaggcatagagagcacagagaaaagcgtatggagagacatagacagaaacatctatatcgacataatcaacatgcaaatcgccatgaggagactgctgcttgcgagcaatctagtatgacggtggacaaaattcatgtcgcgaacgccatcacggaaatgctgattgtcaattggagggaagtggtgaggcagatgcggagtctagggtcagtgaaatcaggacgtgaaatcgagggcctacagcaacgtgccgagagcgaggtatctatgactgatttaccgcctcccatgtctccaatcatgtacatgacggaaccgagatctgcgagtcagaagacggtcacggagagaccaccagggcgtcttcaagcagaggcttcaacacagcttcccatgaattcgagacccgagtcgttacgcgtatcccgtctgaatgatgtcgcagagtgtggctggactgctcaagatgcccaggaggaggaaccccctgagatacaatgtctgaggccagatcaaactcaagtacaaaagggtgaggagtgcgaaatcaacttccaagctcagaaacaagactctcctgagattgattgtccaaccccacaagtgcctacgcggtcgagacaacagtcttctagaatagccaaagcgaaaaaggcagagggatgtgaatggtcgcctcaagatgacaaggagcgggacacttttgaggtagactgtccaccgctgcagaaagcgacacattcagagtatcaatcgtcaaaagtagctcacatggaacacgtacaagagtgcgaattggctccccgattcagcatcgaacccgaccctcctggtttagaacacttagagcgcctagaccggccctcaccagaactccggtctgagccatcttatcatcaaaccagcaaatctccagtatgcgactag

SEQ ID NO: 13434 - protein, 530 aa, Muscodor strobelii
  misc_feature: SGI Peptide ID NO. 564400
  misc_feature (10)..(193): Pfam Id: PF00620 Pfam Desc: RhoGAP domain
  misc_feature (22)..(295): NCBI GI: 171692693 Blast Desc: protein product [Podospora anserina] gi|170946295|emb|CAP73096.1| protein product [Podospora anserina]
  misc_feature (24)..(290): NCBI GI: 256728022 Blast Desc: NECHADRAFT_46451 [Nectria haematococca mpVI 77-13-4]
  misc_feature (23)..(290): NCBI GI: 85081590 Blast Desc: NCU01472 [Neurospora crassa OR74A] gi|28917825|gb|EAA27513.1| NCU01472 [Neurospora crassa OR74A]
  misc_feature (23)..(290): NCBI GI: 38566838 Blast Desc: conserved [Neurospora crassa]
  misc_feature (24)..(291): NCBI GI: 46130888 Blast Desc: FG08999.1 [Gibberella zeae PH-1]
  misc_feature (24)..(323): NCBI GI: 154310638 Blast Desc: BC1G_06793 [Botryotinia fuckeliana B05.10] gi|150851333|gb|EDN26526.1| BC1G_06793 [Botryotinia fuckeliana B05.10]
  misc_feature (25)..(293): NCBI GI: 145607131 Blast Desc: MGG_04006 [Magnaporthe grisea 70-15] gi|145014728|gb|EDJ99296.1| MGG_04006 [Magnaporthe grisea 70-15]
  misc_feature (53)..(297): NCBI GI: 261359002 Blast Desc: conserved [Verticillium albo-atrum VaMs.102]
  misc_feature (38)..(217): NCBI GI: 116199347 Blast Desc: CHGG_07829 [Chaetomium globosum CBS 148.51] gi|88179108|gb|EAQ86576.1| CHGG_07829 [Chaetomium globosum CBS 148.51]
  misc_feature (124)..(323): NCBI GI: 156058446 Blast Desc: SS1G_03234 [Sclerotinia sclerotiorum 1980] gi|154701022|gb|EDO00761.1| SS1G_03234 [Sclerotinia sclerotiorum 1980]
MVSYLRKQVPLNNVRLINEKQADTKGIFRVPGSMRVSNTLYEYYSAGTKTRGVSSTTMCPAVPAHIKCNPHDIASTFKRLLAGLPGGILGSLSVFDALVAVYGRLQIGPEQYRTKETKLRARLIALAIGTVKSQYQRELICGVFGLLCLVGRAAETTAREDDKGRPLPTTQLMGYHALGITFGPLLIGDQIDTYVMKMATFSTGLVLLPIAQPMSRKERHRERHREHREKRMERHRQKHLYRHNQHANRHEETAACEQSSMTVDKIHVANAITEMLIVNWREVVRQMRSLGSVKSGREIEGLQQRAESEVSMTDLPPPMSPIMYMTEPRSASQKTVTERPPGRLQAEASTQLPMNSRPESLRVSRLNDVAECGWTAQDAQEEEPPEIQCLRPDQTQVQKGEECEINFQAQKQDSPEIDCPTPQVPTRSRQQSSRIAKAKKAEGCEWSPQDDKERDTFEVDCPPLQKATHSEYQSSKVAHMEHVQECELAPRFSIEPDPPGLEHLERLDRPSPELRSEPSYHQTSKSPVCD

SEQ ID NO: 13435 - DNA, 320 bp, Muscodor strobelii
  misc_feature: SGI EST ID NO. CUFF.32099.0
  misc_feature: Variant of the nucleotide sequence at SEQ ID NO 13433
cacttttgaggtagactgtccaccgctgcagaaagcgacacattcagagtatcaatcgtcaaaagtagctcacatggaacacgtacaagagtgcgaattggctccccgattcagcatcgaacccgaccctcctggtttagaacacttagagcgcctagaccggccctcaccagaactccggtctgagccatcttatcatcaaaccagcaaatctccagtatgcgactagtcctctcaactggtacctgagagtgaagcatctgatatcgaatgcgagacaccacggagaggctcagtggtacggcatcaacccacacacg

SEQ ID NO: 13436 - DNA, 1242 bp, Muscodor strobelii
  misc_feature: SGI cDNA ID NO. 564401
  misc_feature: Encodes the peptide sequence at SEQ ID NO 13437
atggacttagaagagcccgggagcagagggatgggaggaattcctactgacgagccacacgatgcacctacgcctgcgccccctgctgggccagctcacgcagcagcagcagccaagctctcgtcgggcacattaggctctataggcaccatcccgccgctcgccagggccggtcacgagctccctttcgtccagccgtcctcgtacctgcgaccttccaacagtcgcacagttccctccctaccgaccccgatgagtcccatcgacgaagagcagatgcaaggcctgagaggcgttcgcgactttctgcgtgtccgaaccagctacgatgtcttgccgctgtccttccgcctcatcatcctcgacaacaacctgctcatcaagaagagcctagccatcttgagccagaacggcatcgtgtccgcgcctctctgggactcccatcattccagattcgccgggctcttgaccgccacagactacatcaacctgatccaatactactgccaattcccagagcacatcgataatgtcgataagttccgcctcagcagtcttcgagacatcgagaaagccattggcgtcctgcccatcgagaccgtctccgtccatccctcccagccgttgtacgaagcgttgaaacgcatgcttaatagccgggcgcgccgtattcctctggtcgacatcgatgaagagacgggcagggagacagtcgtcagcgtcatcacgcagtaccgtatcctcaagttcattgctgtcaacacggaacctcacacggcgctcctcaagaagacggttcgagaaatcaatttgggaacctacaaaaacctgaagtcggcctctatgaaccaatcggtcctcgaggtcatcaataccatggtgacctgcaacatttccgctgtccccattgtcgacaagaacaatgtggtccttaatgtattcgaggctgtcgatgtaataccaatcctgaaaaacggagtggtggaggaattagaaaccaccgtgggcgagtctatgtccaagagaggagacgactttggcggtatctatacgtgccaggaagacgaccgcttagactcgatattcacgactttacggcaatcacgggtacacagactgattgtcattgacgaccattggcatctgaagggagttatttctttgtcggacatcctcaaatatgtcttattccatggcgacgagggcgagtacttccctttaatgacgaaagtccatgactga

SEQ ID NO: 13437 - protein, 413 aa, Muscodor strobelii
  misc_feature: SGI Peptide ID NO. 564401
  misc_feature (271)..(396): Pfam Id: PF00571 Pfam Desc: CBS domain pair
  misc_feature (112)..(252): Pfam Id: PF00571 Pfam Desc: CBS domain pair
  misc_feature (275)..(396): Pfam Id: PF00571 Pfam Desc: CBS domain pair
  misc_feature (117)..(252): Pfam Id: PF00571 Pfam Desc: CBS domain pair
  misc_feature (17)..(401): NCBI GI: 116199345 Blast Desc: CHGG_07828 [Chaetomium globosum CBS 148.51] gi|88179107|gb|EAQ86575.1| CHGG_07828 [Chaetomium globosum CBS 148.51]
  misc_feature (21)..(401): NCBI GI: 85081586 Blast Desc: nuclear protein SNF4 [Neurospora crassa OR74A] gi|28917824|gb|EAA27512.1| nuclear protein SNF4 [Neurospora crassa OR74A] gi|38566837|emb|CAE76143.1| nuclear protein SNF4
  misc_feature (58)..(403): NCBI GI: 39943988 Blast Desc: MGG_04005 [Magnaporthe grisea 70-15] gi|145014727|gb|EDJ99295.1| MGG_04005 [Magnaporthe grisea 70-15]
  misc_feature (19)..(401): NCBI GI: 46130886 Blast Desc: FG08998.1 [Gibberella zeae PH-1]
  misc_feature (58)..(401): NCBI GI: 256728023 Blast Desc: NECHADRAFT_16667 [Nectria haematococca mpVI 77-13-4]
  misc_feature (97)..(403): NCBI GI: 171692695 Blast Desc: protein product [Podospora anserina] gi|170946296|emb|CAP73097.1| protein product [Podospora anserina]
  misc_feature (16)..(403): NCBI GI: 225561683 Blast Desc: nuclear protein SNF4 [Ajellomyces capsulatus G186AR]
  misc_feature (16)..(403): NCBI GI: 240275287 Blast Desc: nuclear protein SNF4 [Ajellomyces capsulatus H143]
  misc_feature (36)..(403): NCBI GI: 259480448 Blast Desc: TPA: Snf1 protein kinase complex subunit Snf4, (AFU_orthologue; AFUA_5G12990) [Aspergillus nidulans FGSC A4]
  misc_feature (16)..(403): NCBI GI: 154283107 Blast Desc: nuclear protein SNF4 [Ajellomyces capsulatus NAm1] gi|150410529|gb|EDN05917.1| nuclear protein SNF4 [Ajellomyces capsulatus NAm1]
MDLEEPGSRGMGGIPTDEPHDAPTPAPPAGPAHAAAAAKLSSGTLGSIGTIPPLARAGHELPFVQPSSYLRPSNSRTVPSLPTPMSPIDEEQMQGLRGVRDFLRVRTSYDVLPLSFRLIILDNNLLIKKSLAILSQNGIVSAPLWDSHHSRFAGLLTATDYINLIQYYCQFPEHIDNVDKFRLSSLRDIEKAIGVLPIETVSVHPSQPLYEALKRMLNSRARRIPLVDIDEETGRETVVSVITQYRILKFIAVNTEPHTALLKKTVREINLGTYKNLKSASMNQSVLEVINTMVTCNISAVPIVDKNNVVLNVFEAVDVIPILKNGVVEELETTVGESMSKRGDDFGGIYTCQEDDRLDSIFTTLRQSRVHRLIVIDDHWHLKGVISLSDILKYVLFHGDEGEYFPLMTKVHD

SEQ ID NO: 13438 - DNA, 2041 bp, Muscodor strobelii
  misc_feature: SGI EST ID NO. CUFF.32305.3
  misc_feature: Variant of the nucleotide sequence at SEQ ID NO 13436
caaaggcgcccctcccctctttccccccaatccgatccggtgaggaccatccacaaatactctgcatccaatccgacgacacccagcgaagccttcgtgcccctgtgacaacgtgacctcgtgcgtcttgccaggaaggggatctcaaactgtcactgtgtgcaatcgctgtgtcgcttttttacgcagcgcacacctcacgtcacccgacgccatagctagctcacgccctccagccatctttttttaattgttttacctagcacacgcctcggtgagcagaaggggccagtgacggggcggctactgggccacaagcacagctcgccaccggacagcgtcacagctttgttgccgctgcattgggaattgggtgctgctgtatgctgtcccagtctgagtcgaagccacgatggacttagaagagcccgggagcagagggatgggaggaattcctactgacgagccacacgatgcacctacgcctgcgccccctgctgggccagctcacgcagcagcagcagccaagctctcgtcgggcacattaggctctataggcaccatcccgccgctcgccagggccggtcacgagctccctttcgtccagccgtcctcgtacctgcgaccttccaacagtcgcacagttccctccctaccgaccccgatgagtcccatcgacgaagagcagatgcaaggcctgagaggcgttcgcgactttctgcgtgtccgaaccagctacgatgtcttgccgctgtccttccgcctcatcatcctcgacaacaacctgctcatcaagaagagcctagccatcttgagccagaacggcatcgtgtccgcgcctctctgggactcccatcattccagattcgccgggctcttgaccgccacagactacatcaacctgatccaatactactgccaattcccagagcacatcgataatgtcgataagttccgcctcagcagtcttcgagacatcgagaaagccattggcgtcctgcccatcgagaccgtctccgtccatccctcccagccgttgtacgaagcgttgaaacgcatgcttaatagccgggcgcgccgtattcctctggtcgacatcgatgaagagacgggcagggagacagtcgtcagcgtcatcacgcagtaccgtatcctcaagttcattgctgtcaacacggaacctcacacggcgctcctcaagaagacggttcgagaaatcaatttgggaacctacaaaaacctgaagtcggcctctatgaaccaatcggtcctcgaggtcatcaataccatggtgacctgcaacatttccgctgtccccattgtcgacaagaacaatgtggtccttaatgtattcgaggctgtcgatgtaataccaatcctgaaaaacggagtggtggaggaattagaaaccaccgtgggcgagtctatgtccaagagaggagacgactttggcggtatctatacgtgccaggaagacgaccgcttagactcgatattcacgactttacggcaatcacgggtacacagactgattgtcattgacgaccattggcatctgaagggagttatttctttgtcggacatcctcaaatatgtcttattccatggcgacgagggcgagtacttccctttaatgacgaaagtccatgactgaaaagaggatatgtggataatatggtgggatttggagggcaggtagtctgactaacggagtctgggagagggcattgcacaggtgtaaggcgtttcaagaagacataggcaaggttgcatacgggatgcgcgtttctattagactttctctacccctaatctcgggaccccgatttcaggccatactcagaatgaagagactacatacggtgtctcacccccctctcagaaaaccagtatacttcaacgagatgcatgaatgagttttgagacccaagctgcaaagcatgaacgcgattggttatggaccaaaatgagcgtatgctgcccaacagagacgggtatatcagtaacgtgcctttctcgacacggaaaaactatcctcgcc

SEQ ID NO: 13439 - DNA, 297 bp, Muscodor strobelii
  misc_feature: SGI cDNA ID NO. 564402
  misc_feature: Encodes the peptide sequence at SEQ ID NO 13440
atgcgtctcaccaagaacttctttaccctcatcacgtccctgctactcgtctccggcgcccaggcgacctacgtgctggccgtatactctgatgacgattgcaagacacccgtggaagcaggatacaagtccatcatggtccttcacaaatgggcctcgcctgccggcacgatcacgttctacgaaactccttactgcctctccaccgacgtccaaacatataccctccataatcctgataagaacaaatgccataacttagggtttaaggcacaagccgttggtctcattggatga

SEQ ID NO: 13440 - protein, 98 aa, Muscodor strobelii
  misc_feature: SGI Peptide ID NO. 564402
MRLTKNFFTLITSLLLVSGAQATYVLAVYSDDDCKTPVEAGYKSIMVLHKWASPAGTITFYETPYCLSTDVQTYTLHNPDKNKCHNLGFKAQAVGLIG

SEQ ID NO: 13441 - DNA, 348 bp, Muscodor strobelii
  misc_feature: SGI cDNA ID NO. 564403
  misc_feature: Encodes the peptide sequence at SEQ ID NO 13442
atgcatctcaccaacttcctcacccttatcacgtccctactgctcgcttcgcgcgttcaggctacctacgtgcttgctgtattttccgataacgaatgcaagactccggtggagaaccaagccgaaacccaagtgctctcgggaacgtgcgataccaacgtcaaagccggcttcaactccaccatagtcctccacaaatgggcctcgcctgctggtacggtcacattctactccgagcctcactgcctcagcgccactttttcgcaccagaaaagctaccataaccctgataagggcttatgccgtaccttcggattcaccgcgcatgccgttgggctcgcaggataa

SEQ ID NO: 13442 - protein, 115 aa, Muscodor strobelii
  misc_feature: SGI Peptide ID NO. 564403
MHLTNFLTLITSLLLASRVQATYVLAVFSDNECKTPVENQAETQVLSGTCDTNVKAGFNSTIVLHKWASPAGTVTFYSEPHCLSATFSHQKSYHNPDKGLCRTFGFTAHAVGLAG

SEQ ID NO: 13443 - DNA, 312 bp, Muscodor strobelii
  misc_feature: SGI EST ID NO. CUFF.32117.0
  misc_feature: Variant of the nucleotide sequence at SEQ ID NO 13441
cacaaatgggcctcgcctgctggtacggtcacattctactccgagcctcactgcctcagcgccactttttcgcaccagaaaagctaccataaccctgataagggcttatgccgtaccttcggattcaccgcgcatgccgttgggctcgcaggataagcagtccgtagactggctgccggctgtttgaggagcatgggaagtttagtgggtttatgagaaggtcactgttttcgccatcatgcactggttaatggtcatggcaggagttttggcgatgattctgagctgtatgttgttcgagatggataaaac

SEQ ID NO: 13444 - DNA, 813 bp, Muscodor strobelii
  misc_feature: SGI cDNA ID NO. 564404
  misc_feature: Reduced expression when VOC is produced
  misc_feature: Encodes the peptide sequence at SEQ ID NO 13445
atgccagaacaagccgtctacacccacggacaccacgcctcagtagtgcgctcccacgggcgccgcaccgcagcgaactcctccgcgtatttacttccgcacatcaagcccacggacaagatcctcgacatcgggtgcgggcccggcagcataacagtcgactacgcggctctcgtgccccaaggctccgtcctcggcatcgacgcagttcagtccgttcttgattctgcaaaaactctggctgctgagcggggtctgagtaatatcacgttccaagcacatgatgcgaatgaactgccctttggggatggggagttcgatatagtggtctgtcaccaggtgctccagcatgttaaagatccagtaggtgtgttgaggaagatgaggagagtttgtaagagtggggggatagtagcggcgagggaggcggattataagagttttgcttggttccctgaattaccgggtctggacacttgggggagggtgtatcaagatgttgcgaaggctaatggaggggaacctaacgctgggagatatgtcaagagctgggcgatggaagctgggtttaggaaggatgacgtaaggttctcgtgggattgctggaattatcaggatgaggaagcggttgtttggagtaagaattggacggagaggacgctgaagagtagttttgcggatacgagtttggagaggggcatttgtacgaacgaggatttgcaggggattagtgaggcttggagggtgtggggggagaaagagggcgcgtttatcgttattgggaatggggagattttgtgtaggaagacatga

SEQ ID NO: 13445 - protein, 270 aa, Muscodor strobelii
  misc_feature: SGI Peptide ID NO. 564404
  misc_feature (42)..(140): Pfam Id: PF08241 Pfam Desc: Methyltransferase domain
  misc_feature (42)..(138): Pfam Id: PF08242 Pfam Desc: Methyltransferase domain
  misc_feature (11)..(165): Pfam Id: PF05175 Pfam Desc: Methyltransferase small domain
  misc_feature (13)..(182): Pfam Id: PF01209 Pfam Desc: ubiE/COQ5 methyltransferase family
  misc_feature (40)..(138): Pfam Id: PF01209 Pfam Desc: ubiE/COQ5 methyltransferase family
  misc_feature (1)..(269): NCBI GI: 145246190 Blast Desc: An12g02650 [Aspergillus niger] gi|134080057|emb|CAK41104.1| protein product [Aspergillus niger]
  misc_feature (3)..(269): NCBI GI: 119483056 Blast Desc: ubiE/COQ5 methyltransferase, [Neosartorya fischeri NRRL 181] gi|119409711|gb|EAW19659.1| ubiE/COQ5 methyltransferase, [Neosartorya fischeri NRRL 181]
  misc_feature (3)..(269): NCBI GI: 70986829 Blast Desc: ubiE/COQ5 methyltransferase [Aspergillus fumigatus Af293] gi|66846532|gb|EAL86864.1| ubiE/COQ5 methyltransferase, [Aspergillus fumigatus Af293]
  misc_feature (3)..(269): NCBI GI: 159123330 Blast Desc: ubiE/COQ5 methyltransferase, [Aspergillus fumigatus A1163]
  misc_feature (1)..(268): NCBI GI: 256775430 Blast Desc: UbiE family methyltransferase [Streptomyces hygroscopicus ATCC 53653]
  misc_feature (1)..(269): NCBI GI: 108743442 Blast Desc: methyltransferase-UbiE family [Streptomyces kanamyceticus]
  misc_feature (3)..(262): NCBI GI: 242779831 Blast Desc: ubiE/COQ5 methyltransferase, [Talaromyces stipitatus ATCC 10500] gi|218719615|gb|EED19034.1| ubiE/COQ5 methyltransferase, [Talaromyces stipitatus ATCC 10500]
  misc_feature (3)..(269): NCBI GI: 212526022 Blast Desc: ubiE/COQ5 methyltransferase, [Penicillium marneffei ATCC 18224] gi|210072566|gb|EEA26653.1| ubiE/COQ5 methyltransferase, [Penicillium marneffei ATCC 18224]
  misc_feature (3)..(269): NCBI GI: 254405079 Blast Desc: SAM-dependent methyltransferase [Streptomyces sviceus ATCC 29083] gi|197714533|gb|EDY58567.1| SAM-dependent methyltransferase [Streptomyces sviceus ATCC 29083]
  misc_feature (1)..(268): NCBI GI: 254820506 Blast Desc: methyltransferase-UbiE family protein [Mycobacterium intracellulare ATCC 13950]
  misc_feature: Useful for introducing or modulating the production of volatile compounds
MPEQAVYTHGHHASVVRSHGRRTAANSSAYLLPHIKPTDKILDIGCGPGSITVDYAALVPQGSVLGIDAVQSVLDSAKTLAAERGLSNITFQAHDANELPFGDGEFDIVVCHQVLQHVKDPVGVLRKMRRVCKSGGIVAAREADYKSFAWFPELPGLDTWGRVYQDVAKANGGEPNAGRYVKSWAMEAGFRKDDVRFSWDCWNYQDEEAVVWSKNWTERTLKSSFADTSLERGICTNEDLQGISEAWRVWGEKEGAFIVIGNGEILCRKT

SEQ ID NO: 13446 - DNA, 1109 bp, Muscodor strobelii
  misc_feature: SGI EST ID NO. CUFF.32124.0
  misc_feature: Variant of the nucleotide sequence at SEQ ID NO 13444
atcagaatcccgatccttcctcagataaagttactcagggaatccgttatcatcaagtgtcgcttcgctttatagcttcgtgatctaccttccacccacatatccccatcatcacaaccaacccacaaaatgccagaacaagccgtctacacccacggacaccacgcctcagtagtgcgctcccacgggcgccgcaccgcagcgaactcctccgcgtatttacttccgcacatcaagcccacggacaagatcctcgacatcgggtgcgggcccggcagcataacagtcgactacgcggctctcgtgccccaaggctccgtcctcggcatcgacgcagttcagtccgttcttgattctgcaaaaactctggctgctgagcggggtctgagtaatatcacgttccaagcacatgatgcgaatgaactgccctttggggatggggagttcgatatagtggtctgtcaccaggtgctccagcatgttaaagatccagtaggtgtgttgaggaagatgaggagagtttgtaagagtggggggatagtagcggcgagggaggcggattataagagttttgcttggttccctgaattaccgggtctggacacttgggggagggtgtatcaagatgttgcgaaggctaatggaggggaacctaacgctgggagatatgtcaagagctgggcgatggaagctgggtttaggaaggatgacgtaaggttctcgtgggattgctggaattatcaggatgaggaagcggttgtttggagtaagaattggacggagaggacgctgaagagtagttttgcggatacgagtttggagaggggcatttgtacgaacgaggatttgcaggggattagtgaggcttggagggtgtggggggagaaagagggcgcgtttatcgttattgggaatggggagattttgtgtaggaagacatgagaggttatttcaaggttgagactagactgtaagtgtgtgtgtattccagatgtctcacgtcttgtgtgatgggaacccctgacctttaaagtaggacagggtctagtatatcatgtttcttgccaccttaatgttgtcttttcacacgtaaaatactgatagtgata

SEQ ID NO: 13447 - DNA, 1782 bp, Muscodor strobelii
  misc_feature: SGI cDNA ID NO. 564405
  misc_feature: Encodes the peptide sequence at SEQ ID NO 13448
atgtctttccgcgacactttgaacaaactgaagatgacggccgacgagctactcgggcccggccggccacagcaaggatatggtgctccgtatccgccgtatcaacagcagcctgcgtacgggcagccttatcaacagccgtatcccccgggtccgggttatcatccggtgcaaggcggtcctcattcggcgcaagcgcaatgggagcaagccgctgcggcgcagtggcaggaatatactgaccatggaccagcatggcaacagcagagacctccgcatctagaaccgcaaccgtcgacccagccgggaccagagcctctgcctggacagcaacaaccactttctgggcatcaacagccactatcaccaccactggctggacaggcaccgcatctaggcccgcaaccactgtcgccgccatttcctagtcagcaacagacactatctggacatcaacaacccttctcaccaccactaccggggcaccaacagccggtatcgccacccctacctttacccggacatcaaccaccactacctgggccgcagcaacatccacatactccacctttgccaggaccaggacaacatccaggctcgcattcactaccaccaccattccccagccagcaacagccattatccatacatcatcaaccgttctcaccggcactactgcctggacaccaacagtcggtatcaccgccgctacctggacatcaactaccactatcaccacctttaccaggaccagtgcagcatccgttgtcatcatcacatcaaggaccgcctcaatcgctttcacctccacaggcagtatcgccaccaccgccaggacaaggatcacgacaaggccctcccccagcgcaagctaattacaactcacatccatcatccgagccgatgcctcctcctatcccctttcactccaagcccccaagccgcgctacatctttcaattacacgaatcctagtatctactggaaaccacatttcacaacagatattccagtatctcacgaattcgagcacaagcaaggacacggcgatccatggggatggggcaacaacgagttgcagaattactcatcagacattggaaacagcttccacacacctgacggcaaactagtactcaaagctatttctgcgcctgatcatccaaatgaagaggctcgcttcacatctgcgaggcttgtgagccgagccacgctgggtaaacgcgatggctgtctgactgcgtggctcactctcccctgcgctgagggtatctggccagccttttggctattgccacgcgagccctttgtttggccccatgaaggtgaagtcgatatcgctgaaagctggatgggcgactgtgagaaccactcatgtctgcattggggcttttatactgcagaggatcatcataagcaccttgtgcggggaacacatatacctgacatgccgacccggactattcggttcgatttcgtatggcaatgcagccggacaggggtccgagcagacgggaaatcagcgggtggcggcagactcatgtggtacattgatgaacggcccgttatgaagaatctgatgccagccgggacccgaccgatcgaggattggactatattgctcaatattgcgatgggaggggatgtgtgcgacggtaaacagccgcgagagggattttatgatatgatcgtgcatggactacagatgagcgagatgcctgatggtggatggccccgtttcgacacggattggcagcattgtgtcgatggtgctttcatgtga

SEQ ID NO: 13448 - protein, 593 aa, Muscodor strobelii
  misc_feature: SGI Peptide ID NO. 564405
  misc_feature (326)..(584): NCBI GI: 46110761 Blast Desc: FG02262.1 [Gibberella zeae PH-1]
  misc_feature (326)..(584): NCBI GI: 256726649 Blast Desc: glycoside hydrolase family 16 [Nectria haematococca mpVI 77-13-4]
  misc_feature (303)..(593): NCBI GI: 255945697 Blast Desc: Pc20g11270 [Penicillium chrysogenum Wisconsin 54-1255] gi|211588351|emb|CAP86456.1| Pc20g11270 [Penicillium chrysogenum Wisconsin 54-1255]
  misc_feature (326)..(593): NCBI GI: 169597247 Blast Desc: SNOG_01407 [Phaeosphaeria nodorum SN15] gi|111069936|gb|EAT91056.1| SNOG_01407 [Phaeosphaeria nodorum SN15]
  misc_feature (327)..(593): NCBI GI: 156034549 Blast Desc: SS1G_13209 [Sclerotinia sclerotiorum 1980] gi|154698613|gb|EDN98351.1| SS1G_13209 [Sclerotinia sclerotiorum 1980]
  misc_feature (303)..(593): NCBI GI: 154291770 Blast Desc: BC1G_15044 [Botryotinia fuckeliana B05.10] gi|150846623|gb|EDN21816.1| BC1G_15044 [Botryotinia fuckeliana B05.10]
  misc_feature (445)..(584): NCBI GI: 189192897 Blast Desc: beta-1,3-glucanase [Pyrenophora tritici-repentis Pt-1C-BFP] gi|187978351|gb|EDU44977.1| beta-1,3-glucanase [Pyrenophora tritici-repentis Pt-1C-BFP]
  misc_feature (106)..(313): NCBI GI: 156549332 Blast Desc: : similar to Sec24B protein, [Nasonia vitripennis]
MSFRDTLNKLKMTADELLGPGRPQQGYGAPYPPYQQQPAYGQPYQQPYPPGPGYHPVQGGPHSAQAQWEQAAAAQWQEYTDHGPAWQQQRPPHLEPQPSTQPGPEPLPGQQQPLSGHQQPLSPPLAGQAPHLGPQPLSPPFPSQQQTLSGHQQPFSPPLPGHQQPVSPPLPLPGHQPPLPGPQQHPHTPPLPGPGQHPGSHSLPPPFPSQQQPLSIHHQPFSPALLPGHQQSVSPPLPGHQLPLSPPLPGPVQHPLSSSHQGPPQSLSPPQAVSPPPPGQGSRQGPPPAQANYNSHPSSEPMPPPIPFHSKPPSRATSFNYTNPSIYWKPHFTTDIPVSHEFEHKQGHGDPWGWGNNELQNYSSDIGNSFHTPDGKLVLKAISAPDHPNEEARFTSARLVSRATLGKRDGCLTAWLTLPCAEGIWPAFWLLPREPFVWPHEGEVDIAESWMGDCENHSCLHWGFYTAEDHHKHLVRGTHIPDMPTRTIRFDFVWQCSRTGVRADGKSAGGGRLMWYIDERPVMKNLMPAGTRPIEDWTILLNIAMGGDVCDGKQPREGFYDMIVHGLQMSEMPDGGWPRFDTDWQHCVDGAFM

SEQ ID NO: 13449 - DNA, 1680 bp, Muscodor strobelii
  misc_feature: SGI cDNA ID NO. 564406
  misc_feature: Reduced expression when VOC is produced
  misc_feature: Encodes the peptide sequence at SEQ ID NO 13450
atgggtatctgccagtcatcatgctgcggaggcaaatcccgcgatggtctctatgagccagtccttgccgatagcgagagagaggccgttgccgatctgctgcaatacttagagaatcgtggcgagaccgatttcttctccggcgaaccccttcgtgccctgagtacgctcgtcttctcagacaacatcgatctacagcgcagtgctagcttgactttcgccgagataacggaaagagatgtgcgcgaggtcgaccgagacacccttgaaccgatcctgttcctcctgcagagccccgacatagaagtccagcgggctgccagtgcggcacttggaaacttggccgttaacaccgagaacaaggttctgatagtccagctcggaggcctgacccctctgatccgccagatgctgtccccgaacgtcgaagtgcagtgcaacgctgtaggatgcattaccaacctggcgacacacgaggacaacaaggccaagattgcgcgatccggagccctcggccccctcacacgactggccaaatcgcgcgatatgagagttcagcgtaacgctaccggcgctttgctcaacatgacccattccgacgagaaccgcatacagctcgtgaacgccggggccatccctgtacttgtccagctcctgtcgtctcctgatgtcgatgtccaatactattgtacgacggccctcagcaatattgccgttgatgcaaacaaccgcaggaaactggcgtcatccgagtcgaaacttgtacagtctctggtgaacctgatggactcgtcatctccaaaggttcagtgtcaagccgctctcgctcttcggaacctggcatccgatgagaagtatcagctcgacatcgttcgtgcccaaggtctcagccctctcctgcgcctcctccagtcgtcatatctgccacttatcctctccgctgttgcctgtatccgcaacatttccattcatcctttgaacgagtctccgataatcgaggcaggcttcttgaagccgctggtggatttgttgggatcgactgaacacgaagagattcagtgccatgccatatccacacttagaaatctggcggccagctcagaccgaaacaaggctctagtcctcgaggccggtgcggtgcagaagtgcaagcagctggtcttggacgttccggtcaccgtccagtccgaaatgacagcagctatcgcggtgttggcgctgtctgatgatctcaagcagcacttgctgaatctcggagtgtttgatgtattgatacccctcacccattcaccgagcatagaagtccaaggtaacagcgctgcagctcttgggaacttgtcatctaaagtgggcgattattccatcttcatccaaagctggcttgaacctaatggggggatccatggctacctgagccgattcctagcaagtggcgatgcgacattccagcacattgccatctggacacttctacagctactcgagtccgaggataagaccttgattggtcacattggcaagtcggaagaaatcgttgatatgatcaagcagatttcgaatcggcaggtcgagtcagataatgagtttgaagacgatgacgaaggcgaggttgtcaacctcgctcaacgctgcctcgagttgctcggtcagagcacgtcgaaggcacacatcgaaggatga

SEQ ID NO: 13450 - protein, 559 aa, Muscodor strobelii
  misc_feature: SGI Peptide ID NO. 564406
  misc_feature (199)..(239): Pfam Id: PF00514 Pfam Desc: Armadillo/beta-catenin-like repeat
  misc_feature (117)..(157): Pfam Id: PF00514 Pfam Desc: Armadillo/beta-catenin-like repeat
  misc_feature (158)..(198): Pfam Id: PF00514 Pfam Desc: Armadillo/beta-catenin-like repeat
  misc_feature (324)..(365): Pfam Id: PF00514 Pfam Desc: Armadillo/beta-catenin-like repeat
  misc_feature (408)..(448): Pfam Id: PF00514 Pfam Desc: Armadillo/beta-catenin-like repeat
  misc_feature (242)..(282): Pfam Id: PF00514 Pfam Desc: Armadillo/beta-catenin-like repeat
  misc_feature (283)..(323): Pfam Id: PF00514 Pfam Desc: Armadillo/beta-catenin-like repeat
  misc_feature (77)..(116): Pfam Id: PF00514 Pfam Desc: Armadillo/beta-catenin-like repeat
  misc_feature (1)..(559): NCBI GI: 171692697 Blast Desc: protein product [Podospora anserina] gi|170946297|emb|CAP73098.1| protein product [Podospora anserina]
  misc_feature (1)..(559): NCBI GI: 85081582 Blast Desc: vacuolar protein 8 [Neurospora crassa OR74A] gi|74628406|sp|Q7RXW1.3|VAC8_NEUCR RecName: Full=Vacuolar protein 8 gi|28917823|gb|EAA27511.1| vacuolar protein 8 [Neurospora VAC8
  misc_feature (2)..(559): NCBI GI: 156058450 Blast Desc: SS1G_03236 [Sclerotinia sclerotiorum 1980] gi|154701024|gb|EDO00763.1| SS1G_03236 [Sclerotinia sclerotiorum 1980]
  misc_feature (1)..(559): NCBI GI: 256727862 Blast Desc: [Nectria haematococca mpVI 77-13-4]
  misc_feature (1)..(559): NCBI GI: 116199343 Blast Desc: conserved [Chaetomium globosum CBS 148.51] gi|118597391|sp|Q2GW27.3|VAC8_CHAGB RecName: Full=Vacuolar protein 8 gi|88179106|gb|EAQ86574.1| conserved [Chaetomium CBS
  misc_feature (6)..(559): NCBI GI: 259480510 Blast Desc: TPA: VAC8 (JCVI) [Aspergillus nidulans FGSC A4]
  misc_feature (4)..(559): NCBI GI: 70997091 Blast Desc: vacuolar armadillo repeat protein Vac8 [Aspergillus fumigatus Af293] gi|74673651|sp|Q4WVW4.1|VAC8_ASPFU RecName: Full=Vacuolar protein 8 gi|66850936|gb|EAL91262.1| vacuolar Vac8,
  misc_feature (4)..(559): NCBI GI: 119478155 Blast Desc: vacuolar armadillo repeat protein Vac8, [Neosartorya fischeri NRRL 181] gi|119407486|gb|EAW17435.1| vacuolar armadillo repeat protein Vac8, [Neosartorya fischeri NRRL 181]
  misc_feature (11)..(559): NCBI GI: 240275276 Blast Desc: armadillo repeat protein [Ajellomyces capsulatus H143]
  misc_feature (13)..(559): NCBI GI: 145607129 Blast Desc: MGG_04004 [Magnaporthe grisea 70-15] gi|145014726|gb|EDJ99294.1| MGG_04004 [Magnaporthe grisea 70-15]
  misc_feature: Useful for introducing or modulating the production of volatile compounds
MGICQSSCCGGKSRDGLYEPVLADSEREAVADLLQYLENRGETDFFSGEPLRALSTLVFSDNIDLQRSASLTFAEITERDVREVDRDTLEPILFLLQSPDIEVQRAASAALGNLAVNTENKVLIVQLGGLTPLIRQMLSPNVEVQCNAVGCITNLATHEDNKAKIARSGALGPLTRLAKSRDMRVQRNATGALLNMTHSDENRIQLVNAGAIPVLVQLLSSPDVDVQYYCTTALSNIAVDANNRRKLASSESKLVQSLVNLMDSSSPKVQCQAALALRNLASDEKYQLDIVRAQGLSPLLRLLQSSYLPLILSAVACIRNISIHPLNESPIIEAGFLKPLVDLLGSTEHEEIQCHAISTLRNLAASSDRNKALVLEAGAVQKCKQLVLDVPVTVQSEMTAAIAVLALSDDLKQHLLNLGVFDVLIPLTHSPSIEVQGNSAAALGNLSSKVGDYSIFIQSWLEPNGGIHGYLSRFLASGDATFQHIAIWTLLQLLESEDKTLIGHIGKSEEIVDMIKQISNRQVESDNEFEDDDEGEVVNLAQRCLELLGQSTSKAHIEG

SEQ ID NO: 13451 - DNA, 2750 bp, Muscodor strobelii
  misc_feature: SGI EST ID NO. CUFF.32256.0
  misc_feature: Variant of the nucleotide sequence at SEQ ID NO 13449
atttatgttagatgccgtagttgggaggcgatatacatagacgtcgtcgactctgcagtgattcatgagtcgattttgatattattcccccgctctttctcttcttgtggcggactttggacggtttggacgttttaggcgtggagcgcgacagatacccacccggcatcccattacgagggcttgcgcttgtgctgcaaggtcctcctccactgtgcctacccgactttgcccatcgaaacctcccgtcccgtcgacgtcaatagactccttccactgaagacttcacccgaccgccttccctctctcccatcaccatacccatcgccctctgttccgccgcgggtctgctcatcttctgccgtacacgaggcagtagaatcaccccaaccaccactcattcgacagtgtcattccttaacccgactggagctccacgcctgcccagtcccagtcaccggcgacatccaccgaagcttcgtttcttcgcgtccgagcccgcagaacctatcgtccatcgcctatcgaccgatacatccgctcgattgcgatcgagcgcctagcccagcgcgatgggtatctgccagtcatcatgctgcggaggcaaatcccgcgatggtctctatgagccagtccttgccgatagcgagagagaggccgttgccgatctgctgcaatacttagagaatcgtggcgagaccgatttcttctccggcgaaccccttcgtgccctgagtacgctcgtcttctcagacaacatcgatctacagcgcagtgctagcttgactttcgccgagataacggaaagagatgtgcgcgaggtcgaccgagacacccttgaaccgatcctgttcctcctgcagagccccgacatagaagtccagcgggctgccagtgcggcacttggaaacttggccgttaacaccgagaacaaggttctgatagtccagctcggaggcctgacccctctgatccgccagatgctgtccccgaacgtcgaagtgcagtgcaacgctgtaggatgcattaccaacctggcgacacacgaggacaacaaggccaagattgcgcgatccggagccctcggccccctcacacgactggccaaatcgcgcgatatgagagttcagcgtaacgctaccggcgctttgctcaacatgacccattccgacgagaaccgcatacagctcgtgaacgccggggccatccctgtacttgtccagctcctgtcgtctcctgatgtcgatgtccaatactattgtacgacggccctcagcaatattgccgttgatgcaaacaaccgcaggaaactggcgtcatccgagtcgaaacttgtacagtctctggtgaacctgatggactcgtcatctccaaaggttcagtgtcaagccgctctcgctcttcggaacctggcatccgatgagaagtatcagctcgacatcgttcgtgcccaaggtctcagccctctcctgcgcctcctccagtcgtcatatctgccacttatcctctccgctgttgcctgtatccgcaacatttccattcatcctttgaacgagtctccgataatcgaggcaggcttcttgaagccgctggtggatttgttgggatcgactgaacacgaagagattcagtgccatgccatatccacacttagaaatctggcggccagctcagaccgaaacaaggctctagtcctcgaggccggtgcggtgcagaagtgcaagcagctggtcttggacgttccggtcaccgtccagtccgaaatgacagcagctatcgcggtgttggcgctgtctgatgatctcaagcagcacttgctgaatctcggagtgtttgatgtattgatacccctcacccattcaccgagcatagaagtccaaggtaacagcgctgcagctcttgggaacttgtcatctaaagtgggcgattattccatcttcatccaaagctggcttgaacctaatggggggatccatggctacctgagccgattcctagcaagtggcgatgcgacattccagcacattgccatctggacacttctacagctactcgagtccgaggataagaccttgattggtcacattggcaagtcggaagaaatcgttgatatgatcaagcagatttcgaatcggcaggtcgagtcagataatgagtttgaagacgatgacgaaggcgaggttgtcaacctcgctcaacgctgcctcgagttgctcggtcagagcacgtcgaaggcacacatcgaaggatgattgactactactgttctggttgtgtagcatcgtgccgtctttgcggtttgcgtttcatcaggtcgtgggcatcatctttaggttactttacagcatcccaagcgggcaggggcggcgcaggaggagtttaaggcgtattttatataagccagcgtgtgtattctttggacgacggctacaaagatccccaccatggagtctacgtagtctttgatacctttctcacacggctgcatatgtgcattggaaggtccggatcacggcccaggcgtttccttctttcagtttcccaacccagcaaggctacgaggggatttcttagtacaaacatgtcacaggcagttactcgatacccggcccaggctgtgtctagaatggactagtcatcgaatagcaggtgttatgttttcaagtattcgagtacatacttgtgtaattagatccgctgtgcgctgcaaagatacttaataatcgataagtaatttcattacaagtgtg

SEQ ID NO: 13452 - DNA, 966 bp, Muscodor strobelii
  misc_feature: SGI cDNA ID NO. 564407
  misc_feature: Elevated expression when VOC is produced
  misc_feature: Encodes the peptide sequence at SEQ ID NO 13453
atgtctttcgggtttgctgttggcgatgtcgtcgccgtacttggtctttttgaacgcgtggccatagagctacgaaactacaagcatgcaccagctcattttcagcagctaagtgtcgaacttgacctcctacggagcacgctacaacatattctcagtctctatccacagacatcagaacctgaagagcgacggatcctggaacaagcccgggcgattacaatccactgcctacagccacttcaggcgttcgcgaccaagatggagattaagcaaagcagtctcggacactttcgaacgaacagaactttaagaactatggggacaaggctgcattggtccatgatcgagaagaaagatgtcgatgagctgaggaacatagttgtgtcccaaatggctgctatcagcttacttctgattgcacaacagctgcctcagtttaagagtttagcaacaagccaggagcgatccaatgatgccttgtcggcaaagcttgcaagatgcacaggagacatgctcaaggccattagccgcaatactcggatgcttcttgatatagccaatcacatgaaatatatagcgaaagcaattgaggctattccaatacatttgtcagttggcatcatacgttttgacgatgctttgggcgagagctggggcctgccgattcaggcttctggtagccggagctcattcaccaacctgcttaggacagttgtcttcccaaacaagagccggggaacacaaaatgttcttgatggatgctctgttctcactctgcagaaaaatggcaaagaaatcttcttgttcaattgggaacaatgtatcactgccggagctcacatcagacaagctatgctggtcgactctacgagcccagatcagggtcaaccatgcttacggcccggctgcaatggctccttagtcgacatagcaggagatgaaagcggtttaaaatcatggtaa

SEQ ID NO: 13453 - protein, 321 aa, Muscodor strobelii
  misc_feature: SGI Peptide ID NO. 564407
  misc_feature (1)..(144): NCBI GI: 46105190 Blast Desc: FG00223.1 [Gibberella zeae PH-1]
  misc_feature (165)..(309): NCBI GI: 116207464 Blast Desc: [Chaetomium globosum CBS 148.51] gi|88183622|gb|EAQ91090.1| [Chaetomium globosum CBS 148.51]
  misc_feature (172)..(272): NCBI GI: 46105188 Blast Desc: FG00222.1 [Gibberella zeae PH-1]
  misc_feature (182)..(267): NCBI GI: 256725895 Blast Desc: NECHADRAFT_43464 [Nectria haematococca mpVI 77-13-4]
  misc_feature (1)..(317): NCBI GI: 116201235 Blast Desc: CHGG_08502 [Chaetomium globosum CBS 148.51] gi|88177020|gb|EAQ84488.1| CHGG_08502 [Chaetomium globosum CBS 148.51]
  misc_feature (3)..(143): NCBI GI: 238844501 Blast Desc: conserved [Microsporum canis CBS 113480]
  misc_feature (1)..(156): NCBI GI: 116206132 Blast Desc: [Chaetomium globosum CBS 148.51] gi|88182956|gb|EAQ90424.1| [Chaetomium globosum CBS 148.51]
  misc_feature (24)..(147): NCBI GI: 169623582 Blast Desc: SNOG_15034 [Phaeosphaeria nodorum SN15] gi|111056457|gb|EAT77577.1| SNOG_15034 [Phaeosphaeria nodorum SN15]
  misc_feature (1)..(165): NCBI GI: 240107045 Blast Desc: CPC735_018360 [Coccidioides posadasii C735 delta SOWgp]
  misc_feature (1)..(159): NCBI GI: 154313093 Blast Desc: BC1G_05548 [Botryotinia fuckeliana B05.10] gi|150849633|gb|EDN24826.1| BC1G_05548 [Botryotinia fuckeliana B05.10]
  misc_feature: Useful for introducing or modulating the production of volatile compounds
MSFGFAVGDVVAVLGLFERVAIELRNYKHAPAHFQQLSVELDLLRSTLQHILSLYPQTSEPEERRILEQARAITIHCLQPLQAFATKMEIKQSSLGHFRTNRTLRTMGTRLHWSMIEKKDVDELRNIVVSQMAAISLLLIAQQLPQFKSLATSQERSNDALSAKLARCTGDMLKAISRNTRMLLDIANHMKYIAKAIEAIPIHLSVGIIRFDDALGESWGLPIQASGSRSSFTNLLRTVVFPNKSRGTQNVLDGCSVLTLQKNGKEIFLFNWEQCITAGAHIRQAMLVDSTSPDQGQPCLRPGCNGSLVDIAGDESGLKSW

SEQ ID NO: 13454 - DNA, 1975 bp, Muscodor strobelii
  misc_feature: SGI EST ID NO. CUFF.32131.0
  misc_feature: Variant of the nucleotide sequence at SEQ ID NO 13452
gaaagatcaggagtgcttagctgattaggcgatgtggtgtgacttagcttcctggaaacctctttacctgatagagtgccatttgatgatgaaggcttagcggtatgccctcaacactgagtaacggtatcctagtgcacgcggccttgtgccaccgttggttggtcggttccggcgcggctggtgcaagccattgccgtaggacagatgacctgcacaaggcccccaaagacgatacagcctcgaatgccgtactccagttttctcaactcattactcaacacaacacttcagtatgtctttcgggtttgctgttggcgatgtcgtcgccgtacttggtctttttgaacgcgtggccatagagctacgaaactacaagcatgcaccagctcattttcagcagctaagtgtcgaacttgacctcctacggagcacgctacaacatattctcagtctctatccacagacatcagaacctgaagagcgacggatcctggaacaagcccgggcgattacaatccactgcctacagccacttcaggcgttcgcgaccaagatggagattaagcaaagcagtctcggacactttcgaacgaacagaactttaagaactatggggacaaggctgcattggtccatgatcgagaagaaagatgtcgatgagctgaggaacatagttgtgtcccaaatggctgctatcagcttacttctgattgcacaacagctgcctcagtttaagagtttagcaacaagccaggagcgatccaatgatgccttgtcggcaaagtttgacacacaggccagtgctctctcattacgcaaacttcactgatcttgcggttagttgcaggtacacctgatgcaattgccaatctacaaactcaagccaaagatcaagcatgccaaacccagtctctcctagcaggattggaatcgaccatgtcttctgtcgaagctctttcacatgagtcaagcgcgaccacagaagcagtccaaacatatactcgctcggtccaccggacagaaagcagaatgttccgcattctgcaagatattcggaaactgattctcttgcttgcaagatgcacaggagacatgctcaaggccattagccgcaatactcggatgcttcttgatatagccaatcacatgaaatatatagcgaaagcaattgaggctattccaatacatttgtcagttggcatcatacgttttgacgatgctttgggcgagagctggggcctgccgattcaggcttctggtagccggagctcattcaccaacctgcttaggacagttgtcttcccaaacaagagccggggaacacaaaatgttcttgatggatgctctgttctcactctgcagaaaaatggcaaagaaatcttcttgttcaattgggaacaatgtatcactgccggagctcacatcagacaagctatgctggtcgactctacgagcccagatcagggtcaaccatgcttacggcccggctgcaatggctccttagtcgacatagcaggagatgaaagcggtttaaaatcatgctcaaggtgtttgcaaatgtcgagacatgctcgaatacgggactttgctgctggcgaatggaccgtgtctgtcaataaacggcccgtcatttggaacattatcgatccatcgaaaaatgacggactagagtcaaggcataaaatggccgtgaatgccgatattcaatgcttccatcgattgtgcggcaccacgcggtcggaacgcatccgcgattacgaagcggcggaggagttatggtttgacaaaagggttagcgttaggaaccaccatgtttttctacattctgtcgaattttggaacctttccttagaatgctccatcaaatgagggaatgattagaatattgtattgtatgatcgatccgaactgtgattctttcaaggcgctggtgagatcgaggaaattgaatcgcgcgatctgacgagtttgg

SEQ ID NO: 13455 - DNA, 897 bp, Muscodor strobelii
  misc_feature: SGI cDNA ID NO. 564408
  misc_feature: Encodes the peptide sequence at SEQ ID NO 13456
atgcgtcaatctacactgatcgccgttctttcaggcgctgccccgacactcgctgtgccactgcttgagaagcgggctgacttcgacccccttccggcgttctaccaagagggtgttgccaactacactgaggctgagttctgcgacgctggtctccctaaggatgtctacaacaacctcaagacaatctactacgacgagcaacaacacgtctccttcctagcaaccgcattaggcgactcggcagtccacgaggcaacatacagcttcccctcaacaaccgcctcccagttcctagcactagcaggagtgctcgagggcgtcggtgtctccgcctatctcggcgccgcagcagcaatcgccaacaaggcatatgtgcccatcgctggatcaatcttaaccacggaggcgcgtcactcagcttacatccgccacgcattgggtcaaaagttcgctcccaagccttacgatacacctcttgacttcaaccaagtctacagtctagccgcacagttcatcaccggttttgcccccggcgacccagcactcccctttaaggccttccctcctttgaccgccatgccaagctcgcccgtcgtcaaacagggtcaatcatcgatcacgttcaagggtgccgctaagaatgctgggcttaaggctggaactaaggtttatgccgtgttctactcgggcttggatacttactacgctcctgtgactcagagcggtgacgactacacactcgccaaggttcctggtgcgaatttcgcctctcagggccaactcgcgcccacaggccaggtttatgttgttctcagcaccgctgatggtggtagcgccaaggcgaatgacgagaataccatttctggtgttgctatcgttccattccagtcttaa

SEQ ID NO: 13456 - protein, 298 aa, Muscodor strobelii
  misc_feature: SGI Peptide ID NO. 564408
  misc_feature (1)..(294): NCBI GI: 261352783 Blast Desc: conserved [Verticillium albo-atrum VaMs.102]
  misc_feature (34)..(298): NCBI GI: 169613212 Blast Desc: SNOG_09736 [Phaeosphaeria nodorum SN15] gi|111061881|gb|EAT83001.1| SNOG_09736 [Phaeosphaeria nodorum SN15]
  misc_feature (5)..(294): NCBI GI: 255939400 Blast Desc: Pc16g00470 [Penicillium chrysogenum Wisconsin 54-1255] gi|211585092|emb|CAP92717.1| Pc16g00470 [Penicillium chrysogenum Wisconsin 54-1255]
  misc_feature (34)..(298): NCBI GI: 46121187 Blast Desc: FG04972.1 [Gibberella zeae PH-1]
  misc_feature (34)..(298): NCBI GI: 256729781 Blast Desc: [Nectria haematococca mpVI 77-13-4]
  misc_feature (33)..(294): NCBI GI: 189210990 Blast Desc: conserved [Pyrenophora tritici-repentis Pt-1C-BFP] gi|187977919|gb|EDU44545.1| conserved [Pyrenophora tritici-repentis Pt-1C-BFP]
  misc_feature (31)..(298): NCBI GI: 58263160 Blast Desc: [Cryptococcus neoformans var. neoformans JEC21] gi|134107778|ref|XP_777500.1| CNBB0740 [Cryptococcus neoformans var. neoformans B-3501A] gi|50260192|gb|EAL22853.1| CNBB0740 var.
  misc_feature (34)..(294): NCBI GI: 255714441 Blast Desc: KLTH0E00286p [Lachancea thermotolerans] gi|238934884|emb|CAR23065.1| KLTH0E00286p [Lachancea thermotolerans]
  misc_feature (22)..(294): NCBI GI: 255711886 Blast Desc: KLTH0B10164p [Lachancea thermotolerans] gi|238933604|emb|CAR21788.1| KLTH0B10164p [Lachancea thermotolerans]
  misc_feature (33)..(294): NCBI GI: 71022959 Blast Desc: UM05562.1 [Ustilago maydis 521] gi|46101095|gb|EAK86328.1| UM05562.1 [Ustilago maydis 521]
MRQSTLIAVLSGAAPTLAVPLLEKRADFDPLPAFYQEGVANYTEAEFCDAGLPKDVYNNLKTIYYDEQQHVSFLATALGDSAVHEATYSFPSTTASQFLALAGVLEGVGVSAYLGAAAAIANKAYVPIAGSILTTEARHSAYIRHALGQKFAPKPYDTPLDFNQVYSLAAQFITGFAPGDPALPFKAFPPLTAMPSSPVVKQGQSSITFKGAAKNAGLKAGTKVYAVFYSGLDTYYAPVTQSGDDYTLAKVPGANFASQGQLAPTGQVYVVLSTADGGSAKANDENTISGVAIVPFQS

SEQ ID NO: 13457 - DNA, 573 bp, Muscodor strobelii
  misc_feature: SGI cDNA ID NO. 564409
  misc_feature: Encodes the peptide sequence at SEQ ID NO 13458
atgcccttcctaggccatccattccgggtgctcctcgcaacggcgcaaggcttcgcgcttctccacgtcctctggtcccggggcgttagcgtagcacccggctacggtccgtcaatgatgcctaccttcctcacaatgaacgactggttcgtaaccgacaagcgctatcgccgaggtaaagatgtccgtgtcggagactgtgtcacattcaccatccccgtagaaccgaatcaagaaggattgaaacgcgtgattggaatgccgggtgactatgtccttctgaactcgccaccctcaactgtcagggagacataccatcccggaggggaggtggttgccgtagaccgcgtaggacggggagtcgggagagaaaatatgatacaggtaccgaaaggtcattgttacgtagtcggagacaatctcccctggtcacgcgatagtcgagactacgggccgataccgctggccctcatcaaaggaaaagtgaccgcaaagatctgtctggagggtttgaatcccatgagttggtttaccaaaatcgagaatgggctgcagaagcccgaaagggcataa

SEQ ID NO: 13458 - protein, 190 aa, Muscodor strobelii
  misc_feature: SGI Peptide ID NO. 564409
  misc_feature (33)..(98): Pfam Id: PF00717 Pfam Desc: Peptidase S24-like
  misc_feature (10)..(186): NCBI GI: 261359007 Blast Desc: conserved [Verticillium albo-atrum VaMs.102]
  misc_feature (3)..(187): NCBI GI: 256728024 Blast Desc: NECHADRAFT_46404 [Nectria haematococca mpVI 77-13-4]
  misc_feature (9)..(179): NCBI GI: 255954259 Blast Desc: Pc21g08430 [Penicillium chrysogenum Wisconsin 54-1255] gi|211589593|emb|CAP95740.1| Pc21g08430 [Penicillium chrysogenum Wisconsin 54-1255]
  misc_feature (30)..(185): NCBI GI: 242762090 Blast Desc: mitochondrial inner membrane protease subunit 1, [Talaromyces stipitatus ATCC 10500] gi|218723504|gb|EED22921.1| mitochondrial inner membrane protease subunit 1, [Talaromyces
  misc_feature (5)..(185): NCBI GI: 121713916 Blast Desc: mitochondrial inner membrane protease subunit 1, [Aspergillus clavatus NRRL 1] gi|119402722|gb|EAW13143.1| mitochondrial inner membrane protease subunit 1, [Aspergillus 1]
  misc_feature (5)..(188): NCBI GI: 145249832 Blast Desc: An14g06320 [Aspergillus niger] gi|134081939|emb|CAK97205.1| protein product [Aspergillus niger]
  misc_feature (5)..(185): NCBI GI: 169779319 Blast Desc: [Aspergillus oryzae RIB40] gi|238499957|ref|XP_002381213.1| mitochondrial inner membrane protease subunit 1, [Aspergillus flavus NRRL3357] protein product
  misc_feature (36)..(185): NCBI GI: 212529836 Blast Desc: mitochondrial inner membrane protease subunit 1, [Penicillium marneffei ATCC 18224] gi|210074473|gb|EEA28560.1| mitochondrial inner membrane protease subunit 1, [Penicillium
  misc_feature (5)..(185): NCBI GI: 70997238 Blast Desc: mitochondrial inner membrane protease subunit 1 [Aspergillus fumigatus Af293] gi|66851007|gb|EAL91333.1| mitochondrial inner membrane protease subunit 1, [Aspergillus 1,
  misc_feature (7)..(185): NCBI GI: 119478682 Blast Desc: mitochondrial inner membrane protease subunit 1, [Neosartorya fischeri NRRL 181] gi|119407566|gb|EAW17515.1| mitochondrial inner membrane protease subunit 1, [Neosartorya
MPFLGHPFRVLLATAQGFALLHVLWSRGVSVAPGYGPSMMPTFLTMNDWFVTDKRYRRGKDVRVGDCVTFTIPVEPNQEGLKRVIGMPGDYVLLNSPPSTVRETYHPGGEVVAVDRVGRGVGRENMIQVPKGHCYVVGDNLPWSRDSRDYGPIPLALIKGKVTAKICLEGLNPMSWFTKIENGLQKPERA

SEQ ID NO: 13459 - DNA, 2968 bp, Muscodor strobelii
  misc_feature: SGI EST ID NO. CUFF.32149.0
  misc_feature: Variant of the nucleotide sequence at SEQ ID NO 13457
gtcctacgtacgggataaaatggagggcgcaaaacccatgcagaaggaccgaatctgtgtaggaaatactcagaaaggcgattgaagggcggctcttatactatcttgttagtgcttatctatttgtccctggacttccgcgccgctattgaaactgtgatagcttgtggatgcgcagtcaggcttgcatatggtaggtcatcttgcggtgatcaggagggggatagagcagtataaataaaagagaaagaagacaaaatcgagtccaatgaacagcagctacattggggaccaactaggtctgcgcgcctaacggcctaaaaatctgccagactggttatgcggtcgatgaccagtgccagttctcctgtatagacatgcgaataaacaaacgtataaacgcacattcaaactgtcgtattactacttatcgacaagctcagatatacactcacctacatacatgtatatacatacacaatcgtacactcaccatcacaccgtttccttctccttcttcttctttggcccctgccaaatcatcttgagctgctcgcccacgacaccctccggctttctaacctccgtcgtgccggcgacactctctgcagtttccttaactccaccaaccagtccgtcaacctcctccctcgtagccttcctcgtaccctttttccgcgcaaggagtatctcaaccttataccccttctcaagaaactccttcatcctcttcatcttatgtcccaaatcacccggggcaatcgcccagttcaactctagcgtcttggttcccttctctagtctcttagcttcggcttcagcctccgcaactttagcccgttctgctttcacatcaaagatcttgcagattggttctgcaggactctttgggtcttctggtttcggcggcgatagcatgacgagtgagtgaccctttttaaggtgtgagagtacgagggtcgtgagttgcggctcggagagagatcctgtttcttcgtcgcgtaggcggatgaatgtgtaggggattgcggcgtcttttatgtatgaattgtctaggaacgaccggatggtgactttggtctttttcatttgcatgcgatgtcgtgggacggttgttgagaggaggcgtgcgttggtcggactccattgtggtatggtttgcgcggtcaggcatgctgaggcgacgctggcgctgagttcgaggagaaaaactcggtgcagcgcccgcgcgggcgtgagaaggtgggcggaatgtatcattgtgtcgagcgcaatatgtatttagcggtcgtaatgtttcggccctagaaacgcgacactggagatgggatgatagatattgttgcgcatggtggtgttgaattgggaaagtcgcaaatgtacggaggatcgtcgttagagctttcgaggtgagcttctgcgccaatcagagccgagcgggtagctgcataggagctttgacgaacgccaagactttggatgcacgtttgtcaatgacacgtcttattcagcaatacaaccacggctctaatcattcattcaacatacactccaacaaatctggcaaagtttcttgatgggttcgtgtggttaagtctgcgtcgacgagcttgggaatctggtttaggatgccctgtccggatatcgtaatggagtcctaaccgatctttctcattctcatccatccgtcatctcatacacactttcaccctcgcgatcgcatcatgcccttcctaggccatccattccgggtgctcctcgcaacggcgcaaggcttcgcgcttctccacgtcctctggtcccggggcgttagcgtagcacccggctacggtccgtcaatgatgcctaccttcctcacaatgaacgactggttcgtaaccgacaagcgctatcgccgaggtaaagatgtccgtgtcggagactgtgtcacattcaccatccccgtagaaccgaatcaagaaggattgaaacgcgtgattggaatgccgggtgactatgtccttctgaactcgccaccctcaactgtcagggagacataccatcccggaggggaggtggttgccgtagaccgcgtaggacggggagtcgggagagaaaatatgatacaggtaccgaaaggtcattgttacgtagtcggagacaatctcccctggtcacgcgatagtcgagactacgggccgataccgctggccctcatcaaaggaaaagtgaccgcaaagatctgtctggagggtttgaatcccatgagttggtttaccaaaatcgagaatgggctgcagaagcccgaaagggcataaaagacttcaacagagacgagcgcccgcgtgtatagcttgaacgtgtacgaatagacattgtacgatattttttgacagctgcgaattaactgtcgaatttgtaaataagggcgcccgagcgacatgatcatgaattcgactaatgtcgatcttcgagcacgaagtaccagccgcagaagcggtcgggactgcgccgcaagcccggcgtggaagaaaaaaaaatatttttgtcttcaacccaaagctttggatacctcggagatgagttggaatatgacaccggaacacgtgcgctgtctctgtctatctggttgacccttgagcgctccgcccatggacgcaaatctacaatgacgagctgcactcaagggcaaagtagcccggacaacccacactgttttcttcacatgtgcatcgattgatcacgaaaagaagctcgaattgattgcatatcgagattttgtatttacattaagattaagagttcaagtatttgaataaagtccgtgacaacgaagtcaacctcagacaggtatagtatgccaacctgtctctcgacagtccagtacaatctccctattttaccaaggtcaacttaagactggaatggaacgatagcaacaccagaaatggtattctcgtcattcgccttggcgctaccaccatcagcg

SEQ ID NO: 13460 - DNA, 765 bp, Muscodor strobelii
  misc_feature: SGI cDNA ID NO. 564410
  misc_feature: Reduced expression when VOC is produced
  misc_feature: Encodes the peptide sequence at SEQ ID NO 13461
atgatacattccgcccaccttctcacgcccgcgcgggcgctgcaccgagtttttctcctcgaactcagcgccagcgtcgcctcagcatgcctgaccgcgcaaaccataccacaatggagtccgaccaacgcacgcctcctctcaacaaccgtcccacgacatcgcatgcaaatgaaaaagaccaaagtcaccatccggtcgttcctagacaattcatacataaaagacgccgcaatcccctacacattcatccgcctacgcgacgaagaaacaggatctctctccgagccgcaactcacgaccctcgtactctcacaccttaaaaagggtcactcactcgtcatgctatcgccgccgaaaccagaagacccaaagagtcctgcagaaccaatctgcaagatctttgatgtgaaagcagaacgggctaaagttgcggaggctgaagccgaagctaagagactagagaagggaaccaagacgctagagttgaactgggcgattgccccgggtgatttgggacataagatgaagaggatgaaggagtttcttgagaaggggtataaggttgagatactccttgcgcggaaaaagggtacgaggaaggctacgagggaggaggttgacggactggttggtggagttaaggaaactgcagagagtgtcgccggcacgacggaggttagaaagccggagggtgtcgtgggcgagcagctcaagatgatttggcaggggccaaagaagaagaaggagaaggaaacggtgtga

SEQ ID NO: 13461 - protein, 254 aa, Muscodor strobelii
  misc_feature: SGI Peptide ID NO. 564410
  misc_feature (1)..(248): NCBI GI: 116199339 Blast Desc: CHGG_07825 [Chaetomium globosum CBS 148.51] gi|88179104|gb|EAQ86572.1| CHGG_07825 [Chaetomium globosum CBS 148.51]
  misc_feature (7)..(244): NCBI GI: 156058452 Blast Desc: SS1G_03237 [Sclerotinia sclerotiorum 1980] gi|154701025|gb|EDO00764.1| SS1G_03237 [Sclerotinia sclerotiorum 1980]
  misc_feature (5)..(245): NCBI GI: 169625686 Blast Desc: SNOG_16119 [Phaeosphaeria nodorum SN15] gi|160705707|gb|EAT76491.2| SNOG_16119 [Phaeosphaeria nodorum SN15]
  misc_feature (5)..(246): NCBI GI: 189207545 Blast Desc: conserved [Pyrenophora tritici-repentis Pt-1C-BFP] gi|187976199|gb|EDU42825.1| conserved [Pyrenophora tritici-repentis Pt-1C-BFP]
  misc_feature (1)..(250): NCBI GI: 38566834 Blast Desc: related to translation initiation factor IF-3 [Neurospora crassa]
  misc_feature (1)..(244): NCBI GI: 171692699 Blast Desc: protein product [Podospora anserina] gi|170946298|emb|CAP73099.1| protein product [Podospora anserina]
  misc_feature (1)..(250): NCBI GI: 85081578 Blast Desc: NCU01469 [Neurospora crassa OR74A] gi|28917822|gb|EAA27510.1| [Neurospora crassa OR74A]
  misc_feature (1)..(241): NCBI GI: 121701557 Blast Desc: translation initiation factor IF3, [Aspergillus clavatus NRRL 1] gi|119397186|gb|EAW07617.1| translation initiation factor IF3, [Aspergillus clavatus NRRL 1]
  misc_feature (1)..(241): NCBI GI: 115491747 Blast Desc: ATEG_00415 [Aspergillus terreus NIH2624] gi|114197361|gb|EAU39061.1| ATEG_00415 [Aspergillus terreus NIH2624]
  misc_feature (94)..(253): NCBI GI: 39944030 Blast Desc: MGG_04026 [Magnaporthe grisea 70-15] gi|145014749|gb|EDJ99317.1| MGG_04026 [Magnaporthe grisea 70-15]
  misc_feature: Useful for introducing or modulating the production of volatile compounds
MIHSAHLLTPARALHRVFLLELSASVASACLTAQTIPQWSPTNARLLSTTVPRHRMQMKKTKVTIRSFLDNSYIKDAAIPYTFIRLRDEETGSLSEPQLTTLVLSHLKKGHSLVMLSPPKPEDPKSPAEPICKIFDVKAERAKVAEAEAEAKRLEKGTKTLELNWAIAPGDLGHKMKRMKEFLEKGYKVEILLARKKGTRKATREEVDGLVGGVKETAESVAGTTEVRKPEGVVGEQLKMIWQGPKKKKEKETV

SEQ ID NO: 13462 - DNA, 1386 bp, Muscodor strobelii
  misc_feature: SGI cDNA ID NO. 564411
  misc_feature: Encodes the peptide sequence at SEQ ID NO 13463
atgcgacgagtaataaatatagtgggcgctttgggcctactatctagcacagcaaacggtttacagttagatatcactagtgatgactcaataaaacaatcggccagcacagtcgcatatggtctattaaagtactacaccggcaacgtaacaggcgatacaccaggcaacctaccagatccatacttctggtgggaagccggagcaatgtttgggacattgatagactactggctctacacaggcgatgacacatacaacgacataacaatacaagcgatgcttcaccaagcaggcgacgacgcagacttcatgccaacaaatcaaaccaaaaccgaaggaaatgatgatcagggattctgggcgatggctgccatgtcagcagcagaaaacaacttcccaaatcctccgtccgatcaaccgcagtggcttgccctggcacaagcagtattcaacgaatatgtcagtcggtgggacccagatacctgcggcggcgggctacgatggcagatcttcacattcaacaacggcttcaattacaaaaactccatttcgaacgggtgtttcttcaacatcgccgcgcgactcgctaaatacacgggaaaccagacctatgcggactgggcagaaaaagtatgggactggatggaagaagtcgaattcatcgactcatccttcaatgtcgtcgacggcgcgggcgtggagcaaaactgcacaaagcacagtccagagcaatggacctacaacgcggggatattccttcatggcgccgcggtgctgtataacttcacgaacggaagtgaaatatggaaagagcgaactcaaggactcgctacgcgtgccactgaattgttcttcgaggatggtgtggtctttgagcaggcttgtgagccgtttggtcagtgtaacaacgatcagcagagtttcaaggggtatcttatgcggtggtttactgcttcgtcgcaagttgcgaatttcactttcgatacgcttatgccgctcgttcagagcagtgctgaagcggcggcgacgcagtgttcggggtcaccgcctgcagatcagtataaaggagatcctggaacggcgtgcgggttcaagtgggcaaataccactggattcgacggacttgtgggcgtaggagagcagatgagcgcgctttctgcgatgcaatattcgcttgtcaagaaagtcgatacgttcaaggggcctgtcagcgcgaagactggcgggacgtcggtgggcaatgtgaatgctggcgctacggatgagtctaagatacctgagttgccgccaataacgttgacgcaacgtgtggctgctggattcgttaccacggctgcggtacttggtgtggttcttggtagttttttcgtgatgaaggaatag

SEQ ID NO: 13463 - protein, 461 aa, Muscodor strobelii
  misc_feature: SGI Peptide ID NO. 564411
  misc_feature (22)..(405): Pfam Id: PF03663 Pfam Desc: Glycosyl hydrolase family 76
  misc_feature (3)..(459): NCBI GI: 116198159 Blast Desc: CHGG_07235 [Chaetomium globosum CBS 148.51] gi|88178514|gb|EAQ85982.1| CHGG_07235 [Chaetomium globosum CBS 148.51]
  misc_feature (13)..(459): NCBI GI: 39944008 Blast Desc: MGG_04015 [Magnaporthe grisea 70-15] gi|145014737|gb|EDJ99305.1| MGG_04015 [Magnaporthe grisea 70-15]
  misc_feature (30)..(459): NCBI GI: 256731019 Blast Desc: NECHADRAFT_123408 [Nectria haematococca mpVI 77-13-4]
  misc_feature (15)..(459): NCBI GI: 154310531 Blast Desc: BC1G_07186 [Botryotinia fuckeliana B05.10] gi|150851517|gb|EDN26710.1| BC1G_07186 [Botryotinia fuckeliana B05.10]
  misc_feature (15)..(459): NCBI GI: 156055516 Blast Desc: SS1G_05110 [Sclerotinia sclerotiorum 1980] gi|154702894|gb|EDO02633.1| SS1G_05110 [Sclerotinia sclerotiorum 1980]
  misc_feature (15)..(459): NCBI GI: 156039499 Blast Desc: SS1G_11886 [Sclerotinia sclerotiorum 1980] gi|154697623|gb|EDN97361.1| SS1G_11886 [Sclerotinia sclerotiorum 1980]
  misc_feature (15)..(459): NCBI GI: 154301222 Blast Desc: BC1G_10281 [Botryotinia fuckeliana B05.10] gi|150856182|gb|EDN31374.1| BC1G_10281 [Botryotinia fuckeliana B05.10]
  misc_feature (1)..(459): NCBI GI: 46125277 Blast Desc: FG07016.1 [Gibberella zeae PH-1]
  misc_feature (1)..(461): NCBI GI: 154313639 Blast Desc: BC1G_05669 [Botryotinia fuckeliana B05.10] gi|150849251|gb|EDN24444.1| BC1G_05669 [Botryotinia fuckeliana B05.10]
  misc_feature (26)..(459): NCBI GI: 258569046 Blast Desc: conserved [Uncinocarpus reesii 1704] gi|237906713|gb|EEP81114.1| conserved [Uncinocarpus reesii 1704]
  misc_feature (4)..(453): SWISSPROT Homolog: EC 3.2.1.101 Mannan endo-1,6-alpha-mannosidase
MRRVINIVGALGLLSSTANGLQLDITSDDSIKQSASTVAYGLLKYYTGNVTGDTPGNLPDPYFWWEAGAMFGTLIDYWLYTGDDTYNDITIQAMLHQAGDDADFMPTNQTKTEGNDDQGFWAMAAMSAAENNFPNPPSDQPQWLALAQAVFNEYVSRWDPDTCGGGLRWQIFTFNNGFNYKNSISNGCFFNIAARLAKYTGNQTYADWAEKVWDWMEEVEFIDSSFNVVDGAGVEQNCTKHSPEQWTYNAGIFLHGAAVLYNFTNGSEIWKERTQGLATRATELFFEDGVVFEQACEPFGQCNNDQQSFKGYLMRWFTASSQVANFTFDTLMPLVQSSAEAAATQCSGSPPADQYKGDPGTACGFKWANTTGFDGLVGVGEQMSALSAMQYSLVKKVDTFKGPVSAKTGGTSVGNVNAGATDESKIPELPPITLTQRVAAGFVTTAAVLGVVLGSFFVMKE

SEQ ID NO: 13464 - DNA, 2432 bp, Muscodor strobelii
  misc_feature: SGI EST ID NO. CUFF.32179.0
  misc_feature: Variant of the nucleotide sequence at SEQ ID NO 13462
gctaactattcgagaccccgattgcaatatcaatactcattgtcggcggacaccatatatgtgcgttccgatcttcgattcgcaatgatttgcagattatgacaatcacaaggtgaagaccgcgcggtgaggtgcttacttcatctcagctagggggcggaaaaaccacactccaaacgcgggtagtgcgcacgagacgacgaacaccccggtctggaacctcacaagtttcacattcgcctatgaacaacacagcctcgtagtctcagcatcggcaccccgtgctcggctgccaagctcaaacgatgcattcaagctacgcggttgctttgagggccatgccacagtagtatggagtggggatgactagttgcgtgcttgtgttgcagaacactgggcggctgtttgtgcgagatgagatgagatgatggactgtcgccatcctacccaaccctatccgatgtttctagatcttcacctattttcgttttcccttctctttcttactatagtactacttctaaattgaagcttcattttcgtttcttcattgttgctaaggcgacctttttttcaacattcctttgtttccattcgttactcccggccgagttctttatgatacttccacattcttcgtcccggtgaccttttgactcgaaagctggattcttggagcatttgttttttcttgactcagaaggactttaaacaacggaactcaagtcgatttggctattgttggcccatagcctagacggcaattccagcgacgcgaaataagaaactagaaatgtattagtgaaatcatcgcctgcctttcaatcgttcgacaggcactacattccgtgtccgacggtccattcattcggtcgacccttcaatcctttttcctacgatgcgacgagtaataaatatagtgggcgctttgggcctactatctagcacagcaaacggtttacagttagatatcactagtgatgactcaataaaacaatcggccagcacagtcgcatatggtctattaaagtactacaccggcaacgtaacaggcgatacaccaggcaacctaccagatccatacttctggtgggaagccggagcaatgtttgggacattgatagactactggctctacacaggcgatgacacatacaacgacataacaatacaagcgatgcttcaccaagcaggcgacgacgcagacttcatgccaacaaatcaaaccaaaaccgaaggaaatgatgatcagggattctgggcgatggctgccatgtcagcagcagaaaacaacttcccaaatcctccgtccgatcaaccgcagtggcttgccctggcacaagcagtattcaacgaatatgtcagtcggtgggacccagatacctgcggcggcgggctacgatggcagatcttcacattcaacaacggcttcaattacaaaaactccatttcgaacgggtgtttcttcaacatcgccgcgcgactcgctaaatacacgggaaaccagacctatgcggactgggcagaaaaagtatgggactggatggaagaagtcgaattcatcgactcatccttcaatgtcgtcgacggcgcgggcgtggagcaaaactgcacaaagcacagtccagagcaatggacctacaacgcggggatattccttcatggcgccgcggtgctgtataacttcacgaacggaagtgaaatatggaaagagcgaactcaaggactcgctacgcgtgccactgaattgttcttcgaggatggtgtggtctttgagcaggcttgtgagccgtttggtcagtgtaacaacgatcagcagagtttcaaggggtatcttatgcggtggtttactgcttcgtcgcaagttgcgaatttcactttcgatacgcttatgccgctcgttcagagcagtgctgaagcggcggcgacgcagtgttcggggtcaccgcctgcagatcagtataaaggagatcctggaacggcgtgcgggttcaagtgggcaaataccactggattcgacggacttgtgggcgtaggagagcagatgagcgcgctttctgcgatgcaatattcgcttgtcaagaaagtcgatacgttcaaggggcctgtcagcgcgaagactggcgggacgtcggtgggcaatgtgaatgctggcgctacggatgagtctaagatacctgagttgccgccaataacgttgacgcaacgtgtggctgctggattcgttaccacggctgcggtacttggtgtggttcttggtagttttttcgtgatgaaggaatagaatagggttgagaatgtgggtgttggataatgggttatgattgggaatgatgggacataattgcatgcataatagatgcaccatggcgttctggtgttagacagctttgaaagctagagtcttataaacatgaataaattgaacacaa

SEQ ID NO: 13465 - DNA, 984 bp, Muscodor strobelii
  misc_feature: SGI cDNA ID NO. 564412
  misc_feature: Reduced expression when VOC is produced
  misc_feature: Encodes the peptide sequence at SEQ ID NO 13466
atggcagatcccattgaagataacaatgccacttacgagcagctgcaagatctccagagagaattcgatgagattgagattgagataatccggcagcagcatgctctttccaagtctctgtacgagaagagagagaagctcattgccaagattcccaacttctggccgttggttcttgagcaggcacctccggaggttgaccagtatatccagccttcggactctgctgtattgctctcttccctggaatctatctcggtcactcattttgagattgataacggtggcaagggccacccccgcagcatatctatcgcactcaagttcggccctaacgattactttgaagacaaagttcttgaaaagaaattctggttccgccgtagcaagaccggttcaatgggtctagttagcgaacccgtccctattaagtggaagggagacgacaaggaccttacgcagggtcttctggacctggctgtcaaggtgtgggagcaagacaagaagaagacaagcgaagagaggaagaagacgaaacctaaagactggacgccggagcaacgcgctcttagggagaagatcaattcttttggtcttggtggtgtttccttcttctgctggttcggctttcgtggcgaggacatatcgtcggaggagaatgaaaccgcaatcgcagaggacaaacagaaaagggccgatatcgccgctggtaaggctcggaaagaggctgaagatgaagaggaagaagaagaagaagatgacgaggatcctttcgctctcgaaatctttccagatggcgacgagctggcgatcgcatttgaccaagacttgtatcccgcagccatcacttacttcatccaagctcaggaggccgatggtatcagcgatgcagacttcgaagacatggatgaggatgatatgattgaaggtgaagacgacgatgatgacgatgaggcacctccccttaagaaggtgaaggcctag

SEQ ID NO: 13466 - protein, 327 aa, Muscodor strobelii
  misc_feature: SGI Peptide ID NO. 564412
  misc_feature (13)..(290): Pfam Id: PF00956 Pfam Desc: Nucleosome assembly protein (NAP)
  misc_feature (1)..(290): NCBI GI: 85101245 Blast Desc: NCU03769 [Neurospora crassa OR74A] gi|16944623|emb|CAD11393.1| related to phosphatase 2a inhibitor [Neurospora crassa] gi|28922654|gb|EAA31879.1| conserved crassa
  misc_feature (8)..(293): NCBI GI: 145607137 Blast Desc: MGG_04016 [Magnaporthe grisea 70-15] gi|145014738|gb|EDJ99306.1| MGG_04016 [Magnaporthe grisea 70-15]
  misc_feature (2)..(295): NCBI GI: 116198161 Blast Desc: CHGG_07236 [Chaetomium globosum CBS 148.51] gi|88178515|gb|EAQ85983.1| CHGG_07236 [Chaetomium globosum CBS 148.51]
  misc_feature (6)..(295): NCBI GI: 261355705 Blast Desc: NapB [Verticillium albo-atrum VaMs.102]
  misc_feature (10)..(294): NCBI GI: 171694075 Blast Desc: protein product [Podospora anserina] gi|170946986|emb|CAP73790.1| protein product [Podospora anserina]
  misc_feature (1)..(294): NCBI GI: 156052581 Blast Desc: SS1G_06457 [Sclerotinia sclerotiorum 1980] gi|154704236|gb|EDO03975.1| SS1G_06457 [Sclerotinia sclerotiorum 1980]
  misc_feature (10)..(294): NCBI GI: 256731305 Blast Desc: NECHADRAFT_105263 [Nectria haematococca mpVI 77-13-4]
  misc_feature (11)..(294): NCBI GI: 46125999 Blast Desc: FG07377.1 [Gibberella zeae PH-1]
  misc_feature (1)..(294): NCBI GI: 154313221 Blast Desc: BC1G_05612 [Botryotinia fuckeliana B05.10] gi|150849697|gb|EDN24890.1| BC1G_05612 [Botryotinia fuckeliana B05.10]
  misc_feature (29)..(285): NCBI GI: 189207100 Blast Desc: NAP family protein [Pyrenophora tritici-repentis Pt-1C-BFP] gi|187975977|gb|EDU42603.1| NAP family protein [Pyrenophora tritici-repentis Pt-1C-BFP]
  misc_feature: Useful for introducing or modulating the production of volatile compounds
MADPIEDNNATYEQLQDLQREFDEIEIEIIRQQHALSKSLYEKREKLIAKIPNFWPLVLEQAPPEVDQYIQPSDSAVLLSSLESISVTHFEIDNGGKGHPRSISIALKFGPNDYFEDKVLEKKFWFRRSKTGSMGLVSEPVPIKWKGDDKDLTQGLLDLAVKVWEQDKKKTSEERKKTKPKDWTPEQRALREKINSFGLGGVSFFCWFGFRGEDISSEENETAIAEDKQKRADIAAGKARKEAEDEEEEEEEDDEDPFALEIFPDGDELAIAFDQDLYPAAITYFIQAQEADGISDADFEDMDEDDMIEGEDDDDDDEAPPLKKVKA

SEQ ID NO: 13467 - DNA, 1339 bp, Muscodor strobelii
  misc_feature: SGI EST ID NO. CUFF.32182.0
  misc_feature: Variant of the nucleotide sequence at SEQ ID NO 13465
cgattcctccagctccaccatagctgccgtttgtgttcaagtaattcacctttcgactcgcgtggccgatgaaaacccttcacctctcaccgaagtatcctcactttcgtcccatttctttctttcctgattgcacacgcatttctggcgcctgacttccaagactttttgtaccttaccatggcagatcccattgaagataacaatgccacttacgagcagctgcaagatctccagagagaattcgatgagattgagattgagataatccggcagcagcatgctctttccaagtctctgtacgagaagagagagaagctcattgccaagattcccaacttctggccgttggttcttgagcaggcacctccggaggttgaccagtatatccagccttcggactctgctgtattgctctcttccctggaatctatctcggtcactcattttgagattgataacggtggcaagggccacccccgcagcatatctatcgcactcaagttcggccctaacgattactttgaagacaaagttcttgaaaagaaattctggttccgccgtagcaagaccggttcaatgggtctagttagcgaacccgtccctattaagtggaagggagacgacaaggaccttacgcagggtcttctggacctggctgtcaaggtgtgggagcaagacaagaagaagacaagcgaagagaggaagaagacgaaacctaaagactggacgccggagcaacgcgctcttagggagaagatcaattcttttggtcttggtggtgtttccttcttctgctggttcggctttcgtggcgaggacatatcgtcggaggagaatgaaaccgcaatcgcagaggacaaacagaaaagggccgatatcgccgctggtaaggctcggaaagaggctgaagatgaagaggaagaagaagaagaagatgacgaggatcctttcgctctcgaaatctttccagatggcgacgagctggcgatcgcatttgaccaagacttgtatcccgcagccatcacttacttcatccaagctcaggaggccgatggtatcagcgatgcagacttcgaagacatggatgaggatgatatgattgaaggtgaagacgacgatgatgacgatgaggcacctccccttaagaaggtgaaggcctaggtggtctacgttctgttttcatttgcttacctgcttaactcagacgtttgaaatccaaagttgtagtgcgacagatagtctttgataccaatttaattcttttcttttcactcgctttatgggaaggtaactatctacctttcgactcatagtcccgcgttgctggtagttgcgc

SEQ ID NO: 13468 - DNA, 525 bp, Muscodor strobelii
  misc_feature: SGI cDNA ID NO. 564413
  misc_feature: Reduced expression when VOC is produced
  misc_feature: Encodes the peptide sequence at SEQ ID NO 13469
atgaacaacttaccaggaggtatcggcgccgcctcagggcggacatacgaccctaatgatcccaatatcaaggctatgaacgccatgatggagtcatgtttcgggaaatctgctatttctggtgtcatgggctttggtatgggcggtcttttcggcatgttcatggcatcgatgtcatacgatacaccataccacaccgccggcgcacccggtggccctccgaagccgctcgccgaacttcctatgcgcgaacagatcaaagtcggattcaaggacataggaacccgatcattcagcacagccaagaacttcggcaaggttggattaatgttcagcggcatagaatgcggcatcgagggtttccgtgcaaagaatgatctagccaatggcgtagcagcagggtgcctcaccgggggtatcctcgcgcgtagtggtgggccaacagcagttgccggaggatgtgctgcttttgctgctttcagtgctgctatcgacgcctacatgcgacagcctaaggaagaatga

SEQ ID NO: 13469 - protein, 174 aa, Muscodor strobelii
  misc_feature: SGI Peptide ID NO. 564413
  misc_feature (26)..(171): Pfam Id: PF02466 Pfam Desc: Tim17/Tim22/Tim23 family
  misc_feature (6)..(174): NCBI GI: 116198189 Blast Desc: CHGG_07250 [Chaetomium globosum CBS 148.51] gi|88178529|gb|EAQ85997.1| CHGG_07250 [Chaetomium globosum CBS 148.51]
  misc_feature (16)..(174): NCBI GI: 13447155 Blast Desc: AF343074_1 TIM22 [Neurospora crassa]
  misc_feature (16)..(174): NCBI GI: 90101774 Blast Desc: TIM22_NEUCR RecName: Full=Mitochondrial import inner membrane translocase subunit tim-22 gi|16944570|emb|CAC18237.2| Tim22, subunit of the Tim22-complex [Neurospora crassa]
  misc_feature (20)..(174): NCBI GI: 171694125 Blast Desc: protein product [Podospora anserina] gi|170947011|emb|CAP73815.1| protein product [Podospora anserina]
  misc_feature (18)..(174): NCBI GI: 46123485 Blast Desc: FG06120.1 [Gibberella zeae PH-1]
  misc_feature (18)..(174): NCBI GI: 256731435 Blast Desc: NECHADRAFT_84886 [Nectria haematococca mpVI 77-13-4]
  misc_feature (30)..(174): NCBI GI: 164426913 Blast Desc: NCU03798 [Neurospora crassa OR74A] gi|157071527|gb|EAA31951.2| [Neurospora crassa OR74A]
  misc_feature (3)..(174): NCBI GI: 39972335 Blast Desc: MGG_07469 [Magnaporthe grisea 70-15] gi|145016656|gb|EDK01086.1| MGG_07469 [Magnaporthe grisea 70-15]
  misc_feature (19)..(174): NCBI GI: 261351716 Blast Desc: mitochondrial import inner membrane translocase subunit tim-22 [Verticillium albo-atrum VaMs.102]
  misc_feature (9)..(173): NCBI GI: 154285032 Blast Desc: mitochondrial import inner membrane translocase subunit tim22 [Ajellomyces capsulatus NAm1] gi|150406952|gb|EDN02493.1| mitochondrial import inner membrane
  misc_feature: Useful for introducing or modulating the production of volatile compounds
MNNLPGGIGAASGRTYDPNDPNIKAMNAMMESCFGKSAISGVMGFGMGGLFGMFMASMSYDTPYHTAGAPGGPPKPLAELPMREQIKVGFKDIGTRSFSTAKNFGKVGLMFSGIECGIEGFRAKNDLANGVAAGCLTGGILARSGGPTAVAGGCAAFAAFSAAIDAYMRQPKEE

SEQ ID NO: 13470 - DNA, 907 bp, Muscodor strobelii
  misc_feature: SGI EST ID NO. CUFF.32184.0
  misc_feature: Variant of the nucleotide sequence at SEQ ID NO 13468
agaaaatttgagcggtcgcgccgggcagaaaaagaataccatcctctatgagccgtgcttatcgcatccgataacattatcatttcatcgcgactgtcgacaaacctccctacaattcatcacaaaacaccgtcgcacaacatgaacaacttaccaggaggtatcggcgccgcctcagggcggacatacgaccctaatgatcccaatatcaaggctatgaacgccatgatggagtcatgtttcgggaaatctgctatttctggtgtcatgggctttggtatgggcggtcttttcggcatgttcatggcatcgatgtcatacgatacaccataccacaccgccggcgcacccggtggccctccgaagccgctcgccgaacttcctatgcgcgaacagatcaaagtcggattcaaggacataggaacccgatcattcagcacagccaagaacttcggcaaggttggattaatgttcagcggcatagaatgcggcatcgagggtttccgtgcaaagaatgatctagccaatggcgtagcagcagggtgcctcaccgggggtatcctcgcgcgtagtggtgggccaacagcagttgccggaggatgtgctgcttttgctgctttcagtgctgctatcgacgcctacatgcgacagcctaaggaagaatgatgaaaaggagaagacaaatgtaatagagaacaacgggatgtacgattatcggctctgtatcagttggcgcattgggactttgcatagcactacggcgttctttgggtcgggcaatgtatagagaagatgataccatctccacttgggttgttagaaattcctggcaatattttgtagcacgggttaatagagttcgaaataaacacagggcgagggactcgtccgctcgacatatccgcat

SEQ ID NO: 13471 - DNA, 1209 bp, Muscodor strobelii
  misc_feature: SGI cDNA ID NO. 564414
  misc_feature: Reduced expression when VOC is produced
  misc_feature: Encodes the peptide sequence at SEQ ID NO 13472
atgggttcgcgagatttcggctacccaagcggggcgggtcccgagttctataataccaacggtggtcgattccatcattcagcttcgaattccacgttcgacgtcaagcgtgattacgaggaaaagacgattccgtacagaggagagagagacatgacgtaccagaattccgccgcgccgtggtggcagccgagacattggggaaagaagacttgggcgattgttgcgggcatcatcgtcgttattcttatcattgtcattgtggttccggtcgaagtcgcgaaggcaaaccgatatccgaactactctgaactcaattactcactagtcgacacctactccgggacgaatttcttcgacaatttcgattactttacgggttacgacccggcacagggcttcgtccactatgtcccacaggcacaggcccagagccttaatctcacatatgcatcggagagctcagccgtattgagagtcgatacgagcgttggcaatacctcaacaccggatgcgtcaacaggcagattttctgtgcgtgttacctcgacgaagcagtatgacgagggtcttttcatcttcgatgtgaagcatactccctacgggtgtggaacatggccagcgctatggctcagtgatcaggacaattggccatacaacggagagatcgatgtcatggaggccgtgaaccaggcgacggatggcaaccagatgacgctgcacacgaccgacgattgctctatgggcggagtcaaacgattgatgaccggatcatcccttcacggtaactgtttcaacggttcagattccaatgcaggctgcggtgtctcgggatcgacgagctcttacggcaccgggttcaacaacgcgaacggcggtatcatggcgatggagtggcggagcgccggaatccgcatgtggcagtttggacgaaactcgatccctaccgatatcacctcaaatgcaccagacccaagtacttggggcaaggccgcagctgatttcccaaatactgactgcaatatcggatcgcatttccgtaatcagagcatcattgtgaacattgatctctgtggtcagtatgctggtggtgtttacgctcagagtggatgtccctcgaattgcacagattacgtcgcgaataatccgcaggcatttgaaaatgcattctgggaattcggaaccttccaggtttaccaggcatcatga

SEQ ID NO: 13472 - protein, 402 aa, Muscodor strobelii
  misc_feature: SGI Peptide ID NO. 564414
  misc_feature (39)..(402): NCBI GI: 256731044 Blast Desc: NECHADRAFT_63674 [Nectria haematococca mpVI 77-13-4]
  misc_feature (41)..(401): NCBI GI: 46123483 Blast Desc: FG06119.1 [Gibberella zeae PH-1]
  misc_feature (57)..(402): NCBI GI: 154309455 Blast Desc: BC1G_07198 [Botryotinia fuckeliana B05.10] gi|150852221|gb|EDN27413.1| BC1G_07198 [Botryotinia fuckeliana B05.10]
  misc_feature (62)..(401): NCBI GI: 116198191 Blast Desc: CHGG_07251 [Chaetomium globosum CBS 148.51] gi|88178530|gb|EAQ85998.1| CHGG_07251 [Chaetomium globosum CBS 148.51]
  misc_feature (95)..(400): NCBI GI: 145609271 Blast Desc: MGG_07473 [Magnaporthe grisea 70-15] gi|145016660|gb|EDK01090.1| MGG_07473 [Magnaporthe grisea 70-15]
  misc_feature (56)..(363): NCBI GI: 156045707 Blast Desc: SS1G_10048 [Sclerotinia sclerotiorum 1980] gi|154694437|gb|EDN94175.1| SS1G_10048 [Sclerotinia sclerotiorum 1980]
  misc_feature (48)..(401): NCBI GI: 119499089 Blast Desc: endo-1,3(4)-beta-glucanase, [Neosartorya fischeri NRRL 181] gi|119414466|gb|EAW24405.1| endo-1,3(4)-beta-glucanase, [Neosartorya fischeri NRRL 181]
  misc_feature (58)..(401): NCBI GI: 238502831 Blast Desc: endo-1,3(4)-beta-glucanase, [Aspergillus flavus NRRL3357] gi|220691459|gb|EED47807.1| endo-1,3(4)-beta-glucanase, [Aspergillus flavus NRRL3357]
  misc_feature (58)..(401): NCBI GI: 169776137 Blast Desc: [Aspergillus oryzae RIB40] gi|83771270|dbj|BAE61402.1| protein product [Aspergillus oryzae]
  misc_feature (45)..(401): NCBI GI: 121719178 Blast Desc: endo-1,3(4)-beta-glucanase, [Aspergillus clavatus NRRL 1] gi|119404510|gb|EAW14886.1| endo-1,3(4)-beta-glucanase, [Aspergillus clavatus NRRL 1]
  misc_feature: Useful for introducing or modulating the production of volatile compounds
MGSRDFGYPSGAGPEFYNTNGGRFHHSASNSTFDVKRDYEEKTIPYRGERDMTYQNSAAPWWQPRHWGKKTWAIVAGIIVVILIIVIVVPVEVAKANRYPNYSELNYSLVDTYSGTNFFDNFDYFTGYDPAQGFVHYVPQAQAQSLNLTYASESSAVLRVDTSVGNTSTPDASTGRFSVRVTSTKQYDEGLFIFDVKHTPYGCGTWPALWLSDQDNWPYNGEIDVMEAVNQATDGNQMTLHTTDDCSMGGVKRLMTGSSLHGNCFNGSDSNAGCGVSGSTSSYGTGFNNANGGIMAMEWRSAGIRMWQFGRNSIPTDITSNAPDPSTWGKAAADFPNTDCNIGSHFRNQSIIVNIDLCGQYAGGVYAQSGCPSNCTDYVANNPQAFENAFWEFGTFQVYQAS

SEQ ID NO: 13473 - DNA, 3587 bp, Muscodor strobelii
  misc_feature: SGI EST ID NO. CUFF.32266.0
  misc_feature: Variant of the nucleotide sequence at SEQ ID NO 13471
tgccaactcagcaacgacaaatcggccaaataccccaattcagggtctaggcagcaggtataagtctatctgaactctcggcgcaactttggggatccaatcaatcgcagccagctcaagggtttaagccggataaaacgctatagacgccagaagctctagatccgtactcggttacgcggcttactggaaaggtcgagataaaaaaccatacgagataccgcagcacagcctacaaatatgggttcgcgagatttcggctacccaagcggggcgggtcccgagttctataataccaacggtggtcgattccatcattcagcttcgaattccacgttcgacgtcaagcgtgattacgaggaaaagacgattccgtacagaggagagagagacatgacgtaccagaattccgccgcgccgtggtggcagccgagacattggggaaagaagacttgggcgattgttgcgggcatcatcgtcgttattcttatcattgtcattgtggttccggtcgaagtcgcgaaggcaaaccgatatccgaactactctgaactcaattactcactagtcgacacctactccgggacgaatttcttcgacaatttcgattactttacgggttacgacccggcacagggcttcgtccactatgtcccacaggcacaggcccagagccttaatctcacatatgcatcggagagctcagccgtattgagagtcgatacgagcgttggcaatacctcaacaccggatgcgtcaacaggcagattttctgtgcgtgttacctcgacgaagcagtatgacgagggtcttttcatcttcgatgtgaagcatactccctacgggtgtggaacatggccagcgctatggctcagtgatcaggacaattggccatacaacggagagatcgatgtcatggaggccgtgaaccaggcgacggatggcaaccagatgacgctgcacacgaccgacgattgctctatgggcggagtcaaacgattgatgaccggatcatcccttcacggtaactgtttcaacggttcagattccaatgcaggctgcggtgtctcgggatcgacgagctcttacggcaccgggttcaacaacgcgaacggcggtatcatggcgatggagtggcggagcgccggaatccgcatgtggcagtttggacgaaactcgatccctaccgatatcacctcaaatgcaccagacccaagtacttggggcaaggccgcagctgatttcccaaatactgactgcaatatcggatcgcatttccgtaatcagagcatcattgtgaacattgatctctgtggtcagtatgctggtggtgtttacgctcagagtggatgtccctcgaattgcacagattacgtcgcgaataatccgcaggcatttgaaaatgcattctgggaattcggaaccttccaggtttaccaggcatcatgaggcggattatggaggacgggtatttacgggtcctacttatcttatcttggcccgtcggattacgtgatcacgcccgatatggaactgcattcttgtcttggcgagttgatgctggctttcgcatagttcacaaaagccacacttttcggcattctacatgatcgatgagcagtcggcatgtcatcgacaatgctcaatagccccgtcgaggatacctgccaggcttcctcgaagcgaaactagaatcgaacccgttgacaagtcgatgacggacgcaataacgggatagaggagttgggagtttgatcgtgctcgtgccgagtagctgggcgctgtgagaaatttctcggcaaacgagtgacggttgcgagatgcgcgattcgaaaagcgacgcaggttggcgatctattaaagacttatcgaacgctgccgccttttatttagtgcatccgattggtcgagttccgttccccgcagaggggggtttcaacgagaagatcgaggacgacgagaagtatttggagctttcatcgtgtatcactatcgcttctaaagctaccactcttagggaacaaacatttacacacttatattctcccatcgtcttgtttcttaaatggacttatgttagataccgggatgaccattcatgttgtgatttctctggcccagcgtcttacaatttgtcttgtccaaagtcgccttttcacatccaacgcgtcctcctaagcggcgtccgtctcatgaattacaaataggagaaaccgaaatttctcaaaaaaggaaacatccatcaatactccaacccttcgcccacgtcctcggttttatatgatgttgctcatgaccacaggaagttcattctcgcgcgtcgcccgccatttcaaagaaacaaaggagaggaatacgattaaagatacaagaaatagagttgcgtctaatcaatgaaatacaacgagcgataagagggagaggcttcatatcgtttgagtttctttcatcgactaatatgaacgagaagggacgtagggacgtccgacgccgaggcttcgacaaggaaggcccatcagtcatcaatcggaccatcgatacgttcctttgccagtgtattcacctcattggatgcttaagaagagccgtagcgacgactcgggcgatgggccctgtctctatgacgacgatgatgacgatatcgacgaccgtcttgagtcgacgacagattccctacccttgcggcatccgacgagtgcccggtcaagtgattgggcgatggggtggtaggaggtacaatgcccatgaattgagcaccaacctgttggacatcttgttcggtttgagtcgatgcctcctgcccattactcggagcttgtgccgatgcgggatacacgatgaaaggatcatgcgccctcatcgagacaggaaggactgcgtaggaatatgcaccatgtgcagtggccgcgtgttcttgttgggagttatgctgatacggttgaatgaagtacgacgaccctggccctccgtgaggagcactggtatgagatgaagagctggggactacttcgcagaaacatttcgacgtgctttcctgtgccgcacagcgacatggacttctagtgcaggatatgtgtatgccactggccccatcctcaaagttaaacaccgcggcaagacaacgaacacaatgcttaggaaaggagtctgctcgaggagacggctcaaatcgatctcggtcgctacggtagcaacccgcgtcagtgctctgcgagatactggagtgatgattcgaagtgtaatatgccatgttccgtttcgaaacggtctatgtggtatgaccaattcaaatcaccaatgttggatagggtttgatgaggtatagaaggcaagggaaaacggaacgaaagtcatcagagaagatgagaggggcaagaagtagcagtataccacgaaagacagggtctcgttttggacatcgcccgtatgaacttgtgaaggggaaactagttgtgatattggaacacatgttgaggaagggggatggcagcggatcttataagtcatgattgctgtacaagctgctgtgcagttccaatgctttctacgaggaatcaccatgaattaaccagacgattgaaaaaatg

SEQ ID NO: 13474 - DNA, 1740 bp, Muscodor strobelii
  misc_feature: SGI cDNA ID NO. 564415
  misc_feature: Reduced expression when VOC is produced
  misc_feature: Encodes the peptide sequence at SEQ ID NO 13475
atggcggcatcgctcgcggctgccttgcctaaaccgcgatacaccggcgaagatgaggagatcccggtctacgctcagcagcgtgggcctcgtattgtctctcgaagccagatagacgagtcacagattgtcctccgaagaactggcccacctccttacggtcaacgcgcgggatggagacccagagccgaggaggattttggagatggaggcgccttccccgaaatccccgtcgcgcagtatccgctacaaatgggaaagaagggctccgacaatagcaatgcactcgccttgcaggttgatgctgagggaaaagtcaagtacgatgccatcgcaaagcagggccatgccgatggtcgcattgtccatgcatccttcaaagatctcatcccactacgacagcgagccgacgcaggagaaatcagtctcgcgcgcccgactgctgagcaggttgccgaaaccacagagaagaccaagaatgcactagccgcgcttgtcggcaccgccgttgcagcacataagccaaagaaccttaacacgaacaataagcgggaagcaacttttgtgcgctacacaccagcgaaccagatgggtgacaactcgaagaagcaagatcgtatcatgaagatcgtcgagcgccaaaaggatcctatggaaccacccaagttcaagcataagaagatccctagaggaccgccgagccctccgcccccgattctgcgatctccgcctcgaaagttgacagccgaagaccaagaagcctggcgcatcccaccacccgtgtccaactggaagaatcccaagggtttcactgtacccctcgacaaacgcctggctgccgatggaaggggcttgcaagatgttgctattaacgacaaattcgcccagttcagtgaatcgcttttcatggccgatagacatgctcgtgaagaagtgaggcagcgcgcgcagatgcagcagcgcctggctgagaaggagaagcagcaaaaagaggataatctgcgtatgctggcacagaaagctcgagaagaacgcgccggagcgtcaaaacggagagactcccgagactcgcgcgacgattcccgatctcggtcacggtcacgtagctacagctactccgattcaggatctgatagtgaaacttcagagatcagggaaagagagaaggctcgtgcagagaggcggaaggaagaagagagaaaattgcgacaatctcgtatgggtgccgagagacgtatacaggttatggcgcgcgagcaaaatcgtgatatctcagagaagattgcacttggtctggcaaagccaacggcacaagcggaatccatgtacgactcccggctcttcaaccaatcgagtggtttcgacagcggtatcaacgaggacaacccctacgacaagcccctatttgctgctcaggatgccatcaatagcatttatcgacccagcgcgaatatggaggatctagacgatgaggcggctggagatagggaaatggccaagattcaaaagaccagccgatttggtgaggcattgggccgtggtacattcaagggatctggagatgctgaggcacgagagggacccgttcagttcgagcgtgatactgtggcaaatgaccctttccagatggacaagttcatggcagaggtggatcagagctcttcgtcgaagagagggtatggattacaggacggtgaatcgagggagccaaagagggctagggtcgatgaggatgaatga

SEQ ID NO: 13475 - protein, 579 aa, Muscodor strobelii
  misc_feature: SGI Peptide ID NO. 564415
  misc_feature (186)..(351): Pfam Id: PF02731 Pfam Desc: SKIP/SNW domain
  misc_feature (1)..(579): NCBI GI: 46123477 Blast Desc: FG06116.1 [Gibberella zeae PH-1]
  misc_feature (1)..(579): NCBI GI: 154309459 Blast Desc: BC1G_07200 [Botryotinia fuckeliana B05.10] gi|150852223|gb|EDN27415.1| BC1G_07200 [Botryotinia fuckeliana B05.10]
  misc_feature (1)..(579): NCBI GI: 156045705 Blast Desc: SS1G_10047 [Sclerotinia sclerotiorum 1980] gi|154694436|gb|EDN94174.1| SS1G_10047 [Sclerotinia sclerotiorum 1980]
  misc_feature (1)..(579): NCBI GI: 145609269 Blast Desc: MGG_07472 [Magnaporthe grisea 70-15] gi|145016659|gb|EDK01089.1| MGG_07472 [Magnaporthe grisea 70-15]
  misc_feature (1)..(579): NCBI GI: 85101656 Blast Desc: pre-mRNA splicing factor prp45 [Neurospora crassa OR74A] gi|11595618|emb|CAC18238.1| puff-specific nuclear protein Bx42 [Neurospora crassa] gi|28922729|gb|EAA31952.1| pre-mRNA
  misc_feature (1)..(578): NCBI GI: 70985064 Blast Desc: transcriptional regulator Cwf13/SkiP [Aspergillus fumigatus Af293] gi|74667937|sp|Q4WEH7.1|PRP45_ASPFU RecName: Full=Pre-mRNA-processing protein 45 gi|66845666|gb|EAL86000.1|
  misc_feature (1)..(578): NCBI GI: 119498939 Blast Desc: transcriptional regulator Cwf13/SkiP, [Neosartorya fischeri NRRL 181] gi|119414391|gb|EAW24330.1| transcriptional regulator Cwf13/SkiP, [Neosartorya fischeri NRRL 181]
  misc_feature (1)..(578): NCBI GI: 121718886 Blast Desc: transcriptional regulator Cwf13/SkiP, [Aspergillus clavatus NRRL 1] gi|119404423|gb|EAW14799.1| transcriptional regulator Cwf13/SkiP, [Aspergillus clavatus NRRL 1]
  misc_feature (1)..(575): NCBI GI: 116198193 Blast Desc: CHGG_07252 [Chaetomium globosum CBS 148.51] gi|88178531|gb|EAQ85999.1| CHGG_07252 [Chaetomium globosum CBS 148.51]
  misc_feature (1)..(579): NCBI GI: 225684910 Blast Desc: pre-mRNA-processing protein [Paracoccidioides brasiliensis Pb03]
  misc_feature: Useful for introducing or modulating the production of volatile compounds
MAASLAAALPKPRYTGEDEEIPVYAQQRGPRIVSRSQIDESQIVLRRTGPPPYGQRAGWRPRAEEDFGDGGAFPEIPVAQYPLQMGKKGSDNSNALALQVDAEGKVKYDAIAKQGHADGRIVHASFKDLIPLRQRADAGEISLARPTAEQVAETTEKTKNALAALVGTAVAAHKPKNLNTNNKREATFVRYTPANQMGDNSKKQDRIMKIVERQKDPMEPPKFKHKKIPRGPPSPPPPILRSPPRKLTAEDQEAWRIPPPVSNWKNPKGFTVPLDKRLAADGRGLQDVAINDKFAQFSESLFMADRHAREEVRQRAQMQQRLAEKEKQQKEDNLRMLAQKAREERAGASKRRDSRDSRDDSRSRSRSRSYSYSDSGSDSETSEIREREKARAERRKEEERKLRQSRMGAERRIQVMAREQNRDISEKIALGLAKPTAQAESMYDSRLFNQSSGFDSGINEDNPYDKPLFAAQDAINSIYRPSANMEDLDDEAAGDREMAKIQKTSRFGEALGRGTFKGSGDAEAREGPVQFERDTVANDPFQMDKFMAEVDQSSSSKRGYGLQDGESREPKRARVDEDE

SEQ ID NO: 13476 - DNA, 2010 bp, Muscodor strobelii
  misc_feature: SGI EST ID NO. CUFF.32263.0
  misc_feature: Variant of the nucleotide sequence at SEQ ID NO 13474
cacaacgcgacgcaggcatccaacgaccaggatacgccactacccttgtagcgccagggcttctacaatttccaagtcacgacggctacctccatgcaatagacacgactacctttagacactgattcgcacgaccctccctcacgatggcggcatcgctcgcggctgccttgcctaaaccgcgatacaccggcgaagatgaggagatcccggtctacgctcagcagcgtgggcctcgtattgtctctcgaagccagatagacgagtcacagattgtcctccgaagaactggcccacctccttacggtcaacgcgcgggatggagacccagagccgaggaggattttggagatggaggcgccttccccgaaatccccgtcgcgcagtatccgctacaaatgggaaagaagggctccgacaatagcaatgcactcgccttgcaggttgatgctgagggaaaagtcaagtacgatgccatcgcaaagcagggccatgccgatggtcgcattgtccatgcatccttcaaagatctcatcccactacgacagcgagccgacgcaggagaaatcagtctcgcgcgcccgactgctgagcaggttgccgaaaccacagagaagaccaagaatgcactagccgcgcttgtcggcaccgccgttgcagcacataagccaaagaaccttaacacgaacaataagcgggaagcaacttttgtgcgctacacaccagcgaaccagatgggtgacaactcgaagaagcaagatcgtatcatgaagatcgtcgagcgccaaaaggatcctatggaaccacccaagttcaagcataagaagatccctagaggaccgccgagccctccgcccccgattctgcgatctccgcctcgaaagttgacagccgaagaccaagaagcctggcgcatcccaccacccgtgtccaactggaagaatcccaagggtttcactgtacccctcgacaaacgcctggctgccgatggaaggggcttgcaagatgttgctattaacgacaaattcgcccagttcagtgaatcgcttttcatggccgatagacatgctcgtgaagaagtgaggcagcgcgcgcagatgcagcagcgcctggctgagaaggagaagcagcaaaaagaggataatctgcgtatgctggcacagaaagctcgagaagaacgcgccggagcgtcaaaacggagagactcccgagactcgcgcgacgattcccgatctcggtcacggtcacgtagctacagctactccgattcaggatctgatagtgaaacttcagagatcagggaaagagagaaggctcgtgcagagaggcggaaggaagaagagagaaaattgcgacaatctcgtatgggtgccgagagacgtatacaggttatggcgcgcgagcaaaatcgtgatatctcagagaagattgcacttggtctggcaaagccaacggcacaagcggaatccatgtacgactcccggctcttcaaccaatcgagtggtttcgacagcggtatcaacgaggacaacccctacgacaagcccctatttgctgctcaggatgccatcaatagcatttatcgacccagcgcgaatatggaggatctagacgatgaggcggctggagatagggaaatggccaagattcaaaagaccagccgatttggtgaggcattgggccgtggtacattcaagggatctggagatgctgaggcacgagagggacccgttcagttcgagcgtgatactgtggcaaatgaccctttccagatggacaagttcatggcagaggtggatcagagctcttcgtcgaagagagggtatggattacaggacggtgaatcgagggagccaaagagggctagggtcgatgaggatgaatgatagtgtatattggtaaagatagcatgttgtatatgaaacatactcagcgttgtctatcccgtcatacagagcgaaattattcgtgaagtttatatttcttgattgttcaaaagctcgctgctca

SEQ ID NO: 13477 - DNA, 633 bp, Muscodor strobelii
  misc_feature: SGI cDNA ID NO. 564416
  misc_feature: Encodes the peptide sequence at SEQ ID NO 13478
atgaagtcgacattattatcagtcgggctctttgcctgcctgtcgtcgctcgtttctgccactgctttgacgtacaaaatccaagcgaacgagcaagcatgcttctacgcggcgcccagcaaggagaaccagaagatggccttctactttgctgtgcaatcgggaggttcattcgacgtcaactacaaagtcacgggacccaatgacaagatcatcttggagggagagaaggagcgccagggcgacttcgtgttcacggcacagcagatgggcgagtacaagttctgcttcgataacgatatgagtacctattcggagaaatttgtcgatttcgagattgctgttgaggatgaagtgcgcgcacagctccccgcaaagcagggctcttcctcagagcagcactcggctctagaggagtcgatatataaagtgtcgggccagctctcgaccatcacacgaaaccagaaatacttccgcacgcgcgagaaccgaaacttcagcaccgtccgaagcaccgagtccaggattgtcaacttcagtattctccagatcatcatggtcattgccatgggcgggctgcaggttttcgttgtcagattcttcttccagggagcgagaaagggctacgtctaa

SEQ ID NO: 13478 - protein, 210 aa, Muscodor strobelii
  misc_feature: SGI Peptide ID NO. 564416
  misc_feature (53)..(115): Pfam Id: PF01105 Pfam Desc: emp24/gp25L/p24 family/GOLD
  misc_feature (1)..(210): NCBI GI: 116198195 Blast Desc: CHGG_07253 [Chaetomium globosum CBS 148.51] gi|88178532|gb|EAQ86000.1| CHGG_07253 [Chaetomium globosum CBS 148.51]
  misc_feature (1)..(210): NCBI GI: 154309461 Blast Desc: BC1G_07201 [Botryotinia fuckeliana B05.10] gi|150852224|gb|EDN27416.1| BC1G_07201 [Botryotinia fuckeliana B05.10]
  misc_feature (1)..(210): NCBI GI: 256731040 Blast Desc: [Nectria haematococca mpVI 77-13-4]
  misc_feature (1)..(210): NCBI GI: 164426915 Blast Desc: NCU03800 [Neurospora crassa OR74A] gi|157071528|gb|EAA31953.2| NCU03800 [Neurospora crassa OR74A]
  misc_feature (15)..(210): NCBI GI: 171694131 Blast Desc: protein product [Podospora anserina] gi|170947014|emb|CAP73818.1| protein product [Podospora anserina]
  misc_feature (1)..(210): NCBI GI: 46123475 Blast Desc: FG06115.1 [Gibberella zeae PH-1]
  misc_feature (1)..(210): NCBI GI: 115433150 Blast Desc: conserved [Aspergillus terreus NIH2624] gi|114189564|gb|EAU31264.1| conserved [Aspergillus terreus NIH2624]
  misc_feature (1)..(204): NCBI GI: 156045703 Blast Desc: SS1G_10046 [Sclerotinia sclerotiorum 1980] gi|154694435|gb|EDN94173.1| SS1G_10046 [Sclerotinia sclerotiorum 1980]
  misc_feature (1)..(210): NCBI GI: 238503129 Blast Desc: endosomal cargo receptor (Erp3), [Aspergillus flavus NRRL3357] gi|220691608|gb|EED47956.1| endosomal cargo receptor (Erp3), [Aspergillus flavus NRRL3357]
  misc_feature (1)..(210): NCBI GI: 261351540 Blast Desc: ERP3 [Verticillium albo-atrum VaMs.102]
MKSTLLSVGLFACLSSLVSATALTYKIQANEQACFYAAPSKENQKMAFYFAVQSGGSFDVNYKVTGPNDKIILEGEKERQGDFVFTAQQMGEYKFCFDNDMSTYSEKFVDFEIAVEDEVRAQLPAKQGSSSEQHSALEESIYKVSGQLSTITRNQKYFRTRENRNFSTVRSTESRIVNFSILQIIMVIAMGGLQVFVVRFFFQGARKGYV

SEQ ID NO: 13479 - DNA, 988 bp, Muscodor strobelii
  misc_feature: SGI EST ID NO. CUFF.32275.0
  misc_feature: Variant of the nucleotide sequence at SEQ ID NO 13477
cctcagtgtcaattcaggaccggcaaaccaaaccattggtagcgaccagctgtccacacgagacctgaccatcaaagggccatctctgtattccatcacacacaaccgtcgccatgaagtcgacattattatcagtcgggctctttgcctgcctgtcgtcgctcgtttctgccactgctttgacgtacaaaatccaagcgaacgagcaagcatgcttctacgcggcgcccagcaaggagaaccagaagatggccttctactttgctgtgcaatcgggaggttcattcgacgtcaactacaaagtcacgggacccaatgacaagatcatcttggagggagagaaggagcgccagggcgacttcgtgttcacggcacagcagatgggcgagtacaagttctgcttcgataacgatatgagtacctattcggagaaatttgtcgatttcgagattgctgttgaggatgaagtgcgcgcacagctccccgcaaagcagggctcttcctcagagcagcactcggctctagaggagtcgatatataaagtgtcgggccagctctcgaccatcacacgaaaccagaaatacttccgcacgcgcgagaaccgaaacttcagcaccgtccgaagcaccgagtccaggattgtcaacttcagtattctccagatcatcatggtcattgccatgggcgggctgcaggttttcgttgtcagattcttcttccagggagcgagaaagggctacgtctaaacatcttgggggggagataggggtacatttgtcaggttattttctgtcaagcatataaagcgagcttggactggtatacgggccatcaatatgtacatcataggcgtcaaaaaggaactggagtctgtggcttataggcgagaccaacgacttaggtagaggggagaggcgcctcatccaatggaaaccaaatctcacagtcctatgctattcctgagtcaataaaattcggaattaatgca

SEQ ID NO: 13480 - DNA, 1890 bp, Muscodor strobelii
  misc_feature: SGI cDNA ID NO. 564417
  misc_feature: Encodes the peptide sequence at SEQ ID NO 13481
atgcctttgcccttacttgcactcatattccttcatctctaccccttcttcacctcttcttactctttattgtttcgttctcgcaccacggagccattcagtagatctctagctgcattcacctcgagcttcatccgaatcgcatctctatgctttctccgacttgttgctattcctcacctattgaatgccatatacactctattcgccatatattcaactacattcatacgcagctggggaattgagtctaagagcccgttagcggatcaggccgatgtcaacgctaagaaccaagatgctatcttaccaaaaaagaagcgcacttcctggcagacagcccttcttcgcgggacgccaacttcagggtccttgttcaatatcctcaccttcctagtgaatattgtctgtgtcgctatggttacagatctcgccttttctcctaggtggtttcatcaaagtcatgacttgtccttcgctcgagtcggatatgtctccgacaccgaagcgaagctcctgctcagagagcccgatcagtccaaattacccatcacggtccagttccacatcaaggatcctcaaccaccattcgatgacccgacttggcagacggctggaaatgtgcacttgacgacagaggattctgactatacaactgtcgttacgattcccttattgaactcctatcaacgggtatatcagtggactacctcgaataaccattctggcgaattcgtatcagcccccaaaccaggagcagcgcccgaactcttcgatggcaaattcaccttcttgtcaacatcttgcatcatcccaagactgccatataatctcttcgatcaccccctggcgttccctggaatgagacacctagctaaggttctgcccgatcttggagcgcaattcatgttattccttggagacttcatctacatcgacgttcctcggcaatttgggcagtctgttgaacactacagacagaaataccgacaagtatacgcctctcccgattggcctgccattggtcaaaatctcagctggattcatgtcttggatgatcatgagattcgcaacgattgggataagagggaaactggggtttacaatactgccgtggatccatggcaccattatcagaccgctgtcaacccacccgaggcgatgagagccgatagagcaggtttataccctcggagtggcgctacctacttcgccttcacgcagggaccagcgagcttcttcatgctcgacactagatcgtaccgctccaagaattccgaaccgtttgaaagcgaaaacaagacgatgctcggtgatacgcaacttgaggacttcatagcttggttgcaccgagctgagcccaagggtgtcaagtggaaggtagttgccagctctgtaccgtttactaaaaactggagagtaaataccagagatacttggggtggattccttgtcgagcggaggaaagtcctcgaggctatgtgggatgctggcacgaaaggcgtgggtgtcgtcatcttatctggcgatcgtcatgaattcggtgccactgctttcccaccgccaaaggatggtaaatggtccgagaatgtcacggtacatgagttctcagccagtcctctcaaccagttcttctcgccaataggaacctacaagcaaacggacgaagaggatgtcaaacttgcatacattaacagaggcaacacgaaattcggcgccatcacgattgagaagacaccaactgagcagagcagcttgcattatagagtctacgtcgacggagaaaatgcttggaacacgacgattctgtctccgtacgtcgccgaaacgccgagcgtgatcggagcgaaagccagttccttctgggatagaattaggggcggcatctag

SEQ ID NO: 13481 - protein, 629 aa, Muscodor strobelii
  misc_feature: SGI Peptide ID NO. 564417
  misc_feature (113)..(586): Pfam Id: PF09423 Pfam Desc: PhoD-like phosphatase
  misc_feature (154)..(586): Pfam Id: PF09423 Pfam Desc: PhoD-like phosphatase
  misc_feature (33)..(625): NCBI GI: 39972337 Blast Desc: MGG_07470 [Magnaporthe grisea 70-15] gi|145016657|gb|EDK01087.1| MGG_07470 [Magnaporthe grisea 70-15]
  misc_feature (38)..(624): NCBI GI: 164426917 Blast Desc: NCU03801 [Neurospora crassa OR74A] gi|157071529|gb|EAA31954.2| conserved [Neurospora crassa OR74A]
  misc_feature (38)..(624): NCBI GI: 11595620 Blast Desc: conserved [Neurospora crassa]
  misc_feature (38)..(628): NCBI GI: 261351541 Blast Desc: alkaline phosphatase family protein [Verticillium albo-atrum VaMs.102]
  misc_feature (37)..(622): NCBI GI: 116198197 Blast Desc: CHGG_07254 [Chaetomium globosum CBS 148.51] gi|88178533|gb|EAQ86001.1| CHGG_07254 [Chaetomium globosum CBS 148.51]
  misc_feature (37)..(628): NCBI GI: 171694133 Blast Desc: protein product [Podospora anserina] gi|170947015|emb|CAP73819.1| protein product [Podospora anserina]
  misc_feature (36)..(625): NCBI GI: 256731434 Blast Desc: NECHADRAFT_49419 [Nectria haematococca mpVI 77-13-4]
  misc_feature (35)..(626): NCBI GI: 46123473 Blast Desc: FG06114.1 [Gibberella zeae PH-1]
  misc_feature (35)..(617): NCBI GI: 156045715 Blast Desc: SS1G_10052 [Sclerotinia sclerotiorum 1980] gi|154694441|gb|EDN94179.1| SS1G_10052 [Sclerotinia sclerotiorum 1980]
  misc_feature (104)..(605): NCBI GI: 189206900 Blast Desc: conserved [Pyrenophora tritici-repentis Pt-1C-BFP] gi|187975877|gb|EDU42503.1| conserved [Pyrenophora tritici-repentis Pt-1C-BFP]
MPLPLLALIFLHLYPFFTSSYSLLFRSRTTEPFSRSLAAFTSSFIRIASLCFLRLVAIPHLLNAIYTLFAIYSTTFIRSWGIESKSPLADQADVNAKNQDAILPKKKRTSWQTALLRGTPTSGSLFNILTFLVNIVCVAMVTDLAFSPRWFHQSHDLSFARVGYVSDTEAKLLLREPDQSKLPITVQFHIKDPQPPFDDPTWQTAGNVHLTTEDSDYTTVVTIPLLNSYQRVYQWTTSNNHSGEFVSAPKPGAAPELFDGKFTFLSTSCIIPRLPYNLFDHPLAFPGMRHLAKVLPDLGAQFMLFLGDFIYIDVPRQFGQSVEHYRQKYRQVYASPDWPAIGQNLSWIHVLDDHEIRNDWDKRETGVYNTAVDPWHHYQTAVNPPEAMRADRAGLYPRSGATYFAFTQGPASFFMLDTRSYRSKNSEPFESENKTMLGDTQLEDFIAWLHRAEPKGVKWKVVASSVPFTKNWRVNTRDTWGGFLVERRKVLEAMWDAGTKGVGVVILSGDRHEFGATAFPPPKDGKWSENVTVHEFSASPLNQFFSPIGTYKQTDEEDVKLAYINRGNTKFGAITIEKTPTEQSSLHYRVYVDGENAWNTTILSPYVAETPSVIGAKASSFWDRIRGGI

SEQ ID NO: 13482 - DNA, 2494 bp, Muscodor strobelii
  misc_feature: SGI EST ID NO. CUFF.32478.0
  misc_feature: Variant of the nucleotide sequence at SEQ ID NO 13480
tttagtgcctgtcgtcaccaatccgacccgcgcaattacacacgttcatacacaccactctatgagatcgactgaccgcgtcgtgtcgtagattgttgcctccatcgcgaagttggagacagcaaaaaaacacgtccagctgtattcatcaacttttcgtcaatgtgatatcacagtcgccacgatgcctttgcccttacttgcactcatattccttcatctctaccccttcttcacctcttcttactctttattgtttcgttctcgcaccacggagccattcagtagatctctagctgcattcacctcgagcttcatccgaatcgcatctctatgctttctccgacttgttgctattcctcacctattgaatgccatatacactctattcgccatatattcaactacattcatacgcagctggggaattgagtctaagagcccgttagcggatcaggccgatgtcaacgctaagaaccaagatgctatcttaccaaaaaagaagcgcacttcctggcagacagcccttcttcgcgggacgccaacttcagggtccttgttcaatatcctcaccttcctagtgaatattgtctgtgtcgctatggttacagatctcgccttttctcctaggtggtttcatcaaagtcatgacttgtccttcgctcgagtcggatatgtctccgacaccgaagcgaagctcctgctcagagagcccgatcagtccaaattacccatcacggtccagttccacatcaaggatcctcaaccaccattcgatgacccgacttggcagacggctggaaatgtgcacttgacgacagaggattctgactatacaactgtcgttacgattcccttattgaactcctatcaacgggtatatcagtggactacctcgaataaccattctggcgaattcgtatcagcccccaaaccaggagcagcgcccgaactcttcgatggcaaattcaccttcttgtcaacatcttgcatcatcccaagactgccatataatctcttcgatcaccccctggcgttccctggaatgagacacctagctaaggttctgcccgatcttggagcgcaattcatgttattccttggagacttcatctacatcgacgttcctcggcaatttgggcagtctgttgaacactacagacagaaataccgacaagtatacgcctctcccgattggcctgccattggtcaaaatctcagctggattcatgtcttggatgatcatgagattcgcaacgattgggataagagggaaactggggtttacaatactgccgtggatccatggcaccattatcagaccgctgtcaacccacccgaggcgatgagagccgatagagcaggtttataccctcggagtggcgctacctacttcgccttcacgcagggaccagcgagcttcttcatgctcgacactagatcgtaccgctccaagaattccgaaccgtttgaaagcgaaaacaagacgatgctcggtgatacgcaacttgaggacttcatagcttggttgcaccgagctgagcccaagggtgtcaagtggaaggtagttgccagctctgtaccgtttactaaaaactggagagtaaataccagagatacttggggtggattccttgtcgagcggaggaaagtcctcgaggctatgtgggatgctggcacgaaaggcgtgggtgtcgtcatcttatctggcgatcgtcatgaattcggtgccactgctttcccaccgccaaaggatggtaaatggtccgagaatgtcacggtacatgagttctcagccagtcctctcaaccagttcttctcgccaataggaacctacaagcaaacggacgaagaggatgtcaaacttgcatacattaacagaggcaacacgaaattcggcgccatcacgattgagaagacaccaactgagcagagcagcttgcattatagagtctacgtcgacggagaaaatgcttggaacacgacgattctgtctccgtacgtcgccgaaacgccgagcgtgatcggagcgaaagccagttccttctgggatagaattaggggcggcatctaggaaatgtatgaatacaatctgcttgctatggagtatgactatggccactacatgactgagttgattgtggctgggaggaagcaattgaatacttcgctgcataatagtcgcgttgatttagatggatttccggttgaggggcgcggcttcggaagacgggatttcctctcttcttacactgaggcttagaggtattcgtcatagacgcaatcatccgtaaagagtatagcacgtgttgtttctaagaggtctgctgaacggaacgcgtcgcgcgatttgagtagttcatacatacctatccgaaaggtgcctatttcgggagaaagctgtaacatctactcgtggcaggtcgtagtggtgaattaaagccattgcgttaagtatctagtggcgcctatggcgataatatataccaccgac

SEQ ID NO: 13483 - DNA, 2466 bp, Muscodor strobelii
  misc_feature: SGI cDNA ID NO. 564418
  misc_feature: Encodes the peptide sequence at SEQ ID NO 13484
atggatccgctgtccgctctcagtctggcaggcactgtcgtccagttcgtccagttcgcagtcagcctcattaacaatgcaaggagaattcatgccaccggtcatgcaatcgagactgagaccctcgacggaatctatcgccaactttctgacttcagtcaagacctaggcgctcagtgtgttggacaacaacagcaacaacaacaactctccgatcttcaacggttagcagatcgaaacgccgcctcggtcggaagcctggctactaaatgcaaaattgattgcgacaagcttttggagcttgtaactcgtttgaagacaagcagtatcaccggaccacgatggtgggcgtccttcgttgtggcactaaaggtggtggccaaggctaaggaagtcaaggagctccgagaacgcatcgaagtctgtcagagccagatgacactatatttgtgcgcaacttctaagaaagctatagaagagatctcgtcacaagttaaagaactctgctccttaacgaagtcagcacagaaccagaggcaccagcatctcagaagcttagaggatgagcttcatgagctccgtgacaaaattgacagtctcagcaaacaacctgaaaaaagcagcctctctaaagacgaaatcgatatgctcaccacaagagtgtctaaattatcgttgactagcaggacttacgcgaaggaacatcatattctcgctgatcttgattacgacgggagacgggcaaggcatgccaagattcacaacgcccacgagaacacttttctctgggttgttgataatgcatcaaaagaagccatcgctgggcggagaatgcgggcttggttagaacacgggaacggtactttctgggtatcgggaaagccaggggctgggaagtctaccttcatgaaattcgtcggcgaccactctagcacggaaaaggctctccgccgttgggcttcctcagaccgcgccatactagcttcacattactttgacttggacgggactcacattcaaagatctcttgaagggcttctacgttctctactgtaccatattcttcatcaagcgccggaactcattcctaccgttctcccagagcgctggcgtgagctaggacagcatcaattcattccgtttgaacgcgagaacatttggactgtcactgagcttcaagatggcatttcaaaaataacggaggatatgacgaaaacattgaaggtcaagatctgtttccttatcgacgggctcgatgaatttgacggataccatgaggggatttgccgaaccctcaaagacttgtgtaaatcgcctaaactaaagatcctcttgtcgagtcgaccctggaacatttttgaggaaaattttggtgcgagcgaagacacgaagctctatatccataaccacaccaagcatgatatccaaacctacgtagaaagccgactacgtagccacccacagtggaacaccattgtctccgaaaccgcagaggcggtgattttagtcgcagaggttacagagagagcacacggtgtgtttttatgggtatatcttgtcgttaggctccttgaggaaggaatgactaatgatgatacaattcacgagctgcaacagcggcttgatacgataccggatgatcttgagagcttcttgcagcatatcatcgattctgttgactcgttctatcgcgaaaagatggcaaaatacctattaatggctatggcagcggacaagccacttccaattgcggtttatgttttccacgaacgagagaataacgacagaacttacgcgactacagaaagcgtagaacggtgggatgaaactcgatggaaagctttcgaaaaacagttctacaggcgtctcaatgctcgctgtcgaggactgcttgagatcaatggtacatgcgtcgaattcctgcatcgcacagtcagtgacttccttcgaaccagggacgtacaacaattcttgtgtcgaacggcaaaagcagacttcgacccatgcttctctattttccaagcatatgcggctctactcaagcacggcaacttcttccgcgagcgatcggctccggaaaaaataaggtccttagaccagtactgcgtagaagctttcacagaaattttcccttacgtccatcgcgcccagtcccataatgacaagcatatcgaagacataatagatgatcttgagtggtcagttgagactattattcaacaggctagcgaaacgaacgattatatcatgcgcggcactgcaaacggcgcgaccatctttcgcgagtgcgtcgtagggttcgctttgtatgattacgttatgcgaaagctacagcaatatcctaactatttcgccgtacttcggaaacctgcgttagcctggctaatcgatgggtccacattcgcgtatccgaaagacaactcaccaccacggctcgacgcgccatctttgtacgccatggtctga

SEQ ID NO: 13484 - protein, 821 aa, Muscodor strobelii
  misc_feature: SGI Peptide ID NO. 564418
  misc_feature (1)..(686): NCBI GI: 256725921 Blast Desc: NECHADRAFT_82115 [Nectria haematococca mpVI 77-13-4]
  misc_feature (1)..(784): NCBI GI: 256730922 Blast Desc: NECHADRAFT_84637 [Nectria haematococca mpVI 77-13-4]
  misc_feature (213)..(777): NCBI GI: 171678826 Blast Desc: protein product [Podospora anserina] gi|170937483|emb|CAP62141.1| protein product [Podospora anserina]
  misc_feature (4)..(652): NCBI GI: 169616506 Blast Desc: SNOG_11426 [Phaeosphaeria nodorum SN15] gi|160703200|gb|EAT81134.2| SNOG_11426 [Phaeosphaeria nodorum SN15]
  misc_feature (274)..(789): NCBI GI: 171687547 Blast Desc: protein product [Podospora anserina] gi|170943735|emb|CAP69387.1| protein product [Podospora anserina]
  misc_feature (327)..(644): NCBI GI: 256732148 Blast Desc: NECHADRAFT_93635 [Nectria haematococca mpVI 77-13-4]
  misc_feature (1)..(685): NCBI GI: 261190024 Blast Desc: conserved [Ajellomyces dermatitidis SLH14081] gi|239591250|gb|EEQ73831.1| conserved [Ajellomyces dermatitidis SLH14081]
  misc_feature (1)..(681): NCBI GI: 225684243 Blast Desc: conserved [Paracoccidioides brasiliensis Pb03]
  misc_feature (1)..(681): NCBI GI: 226293863 Blast Desc: conserved [Paracoccidioides brasiliensis Pb18]
  misc_feature (2)..(650): NCBI GI: 255956529 Blast Desc: Pc21g20270 [Penicillium chrysogenum Wisconsin 54-1255] gi|211590728|emb|CAP96924.1| Pc21g20270 [Penicillium chrysogenum Wisconsin 54-1255]
MDPLSALSLAGTVVQFVQFAVSLINNARRIHATGHAIETETLDGIYRQLSDFSQDLGAQCVGQQQQQQQLSDLQRLADRNAASVGSLATKCKIDCDKLLELVTRLKTSSITGPRWWASFVVALKVVAKAKEVKELRERIEVCQSQMTLYLCATSKKAIEEISSQVKELCSLTKSAQNQRHQHLRSLEDELHELRDKIDSLSKQPEKSSLSKDEIDMLTTRVSKLSLTSRTYAKEHHILADLDYDGRRARHAKIHNAHENTFLWVVDNASKEAIAGRRMRAWLEHGNGTFWVSGKPGAGKSTFMKFVGDHSSTEKALRRWASSDRAILASHYFDLDGTHIQRSLEGLLRSLLYHILHQAPELIPTVLPERWRELGQHQFIPFERENIWTVTELQDGISKITEDMTKTLKVKICFLIDGLDEFDGYHEGICRTLKDLCKSPKLKILLSSRPWNIFEENFGASEDTKLYIHNHTKHDIQTYVESRLRSHPQWNTIVSETAEAVILVAEVTERAHGVFLWVYLVVRLLEEGMTNDDTIHELQQRLDTIPDDLESFLQHIIDSVDSFYREKMAKYLLMAMAADKPLPIAVYVFHERENNDRTYATTESVERWDETRWKAFEKQFYRRLNARCRGLLEINGTCVEFLHRTVSDFLRTRDVQQFLCRTAKADFDPCFSIFQAYAALLKHGNFFRERSAPEKIRSLDQYCVEAFTEIFPYVHRAQSHNDKHIEDIIDDLEWSVETIIQQASETNDYIMRGTANGATIFRECVVGFALYDYVMRKLQQYPNYFAVLRKPALAWLIDGSTFAYPKDNSPPRLDAPSLYAMV

SEQ ID NO: 13485 - DNA, 801 bp, Muscodor strobelii
  misc_feature: SGI cDNA ID NO. 564419
  misc_feature: Encodes the peptide sequence at SEQ ID NO 13486
atgcgcccacgcactctcacttcggccctcttctctgtatccagacttgcctcatcttccagcgtagcatcagcaccaacttgtccagcccgacttttcaagccctcgagcctactcagagccaccacttgctcccccgctgccaccactagacccttttccacgagcccttctacctcctccagcaacatgtctgcctcctcttccactctcctcgaagccttcaaggctcgccgctccttctaccagctcaacaaggagttgcccatctcctccgacaagatcacctccatcgtccaagaggctctcatccagattccctcctccttcaactcccagtccaaccgtgtcctcgtcctctacggcgctgagcacgacaagctctgggatatcacttccgatgtcttgaagcccattgtccccgccgactcgtgggagagcaccgctcagcgcaacgccggcttcaaggccgctgccggcaccgttctcttcttcatcgacaacacatccatctcgggcatgcaggagaagttcgctctctacgccgaccgcttccccacctggggcgaacacagcactgccatgctgcagtttgcctgctggaccaccctcgaggccgagggtctcggcgccaacctccagcactacaaccctctgatcgaccagcgcgtcgccaaggagtggaatatcccctccaactggaccctgactgcccagctcgtcttcggtggaaaggctggtgaggccggccccaaggaccacctgcctcttgaggagaccttcaaggttgctggtgcttga

SEQ ID NO: 13486 - protein, 266 aa, Muscodor strobelii
  misc_feature: SGI Peptide ID NO. 564419
  misc_feature (22)..(266): NCBI GI: 171694195 Blast Desc: protein product [Podospora anserina] gi|170947046|emb|CAP73851.1| protein product [Podospora anserina]
  misc_feature (67)..(266): NCBI GI: 46109968 Blast Desc: FG01866.1 [Gibberella zeae PH-1]
  misc_feature (31)..(262): NCBI GI: 261360904 Blast Desc: fatty acid repression mutant protein [Verticillium albo-atrum VaMs.102]
  misc_feature (67)..(266): NCBI GI: 116198311 Blast Desc: CHGG_07311 [Chaetomium globosum CBS 148.51] gi|88178590|gb|EAQ86058.1| CHGG_07311 [Chaetomium globosum CBS 148.51]
  misc_feature (67)..(266): NCBI GI: 256728497 Blast Desc: NECHADRAFT_64155 [Nectria haematococca mpVI 77-13-4]
  misc_feature (60)..(266): NCBI GI: 85103226 Blast Desc: NCU03696 [Neurospora crassa OR74A] gi|11595577|emb|CAC18179.1| conserved [Neurospora crassa] gi|28923018|gb|EAA32236.1| NCU03696 [Neurospora crassa OR74A]
  misc_feature (67)..(265): NCBI GI: 225024523 Blast Desc: EIKCOROL_01398 [Eikenella corrodens ATCC 23834] gi|224942674|gb|EEG23883.1| EIKCOROL_01398 [Eikenella corrodens ATCC 23834]
  misc_feature (67)..(266): NCBI GI: 145605529 Blast Desc: MGG_09212 [Magnaporthe grisea 70-15] gi|145013350|gb|EDJ97991.1| MGG_09212 [Magnaporthe grisea 70-15]
  misc_feature (68)..(266): NCBI GI: 154305024 Blast Desc: BC1G_08602 [Botryotinia fuckeliana B05.10] gi|150853765|gb|EDN28957.1| BC1G_08602 [Botryotinia fuckeliana B05.10]
  misc_feature (57)..(266): NCBI GI: 156044853 Blast Desc: SS1G_09615 [Sclerotinia sclerotiorum 1980] gi|154694010|gb|EDN93748.1| SS1G_09615 [Sclerotinia sclerotiorum 1980]
MRPRTLTSALFSVSRLASSSSVASAPTCPARLFKPSSLLRATTCSPAATTRPFSTSPSTSSSNMSASSSTLLEAFKARRSFYQLNKELPISSDKITSIVQEALIQIPSSFNSQSNRVLVLYGAEHDKLWDITSDVLKPIVPADSWESTAQRNAGFKAAAGTVLFFIDNTSISGMQEKFALYADRFPTWGEHSTAMLQFACWTTLEAEGLGANLQHYNPLIDQRVAKEWNIPSNWTLTAQLVFGGKAGEAGPKDHLPLEETFKVAGA

SEQ ID NO: 13487 - DNA, 1836 bp, Muscodor strobelii
  misc_feature: SGI cDNA ID NO. 564420
  misc_feature: Reduced expression when VOC is produced
  misc_feature: Encodes the peptide sequence at SEQ ID NO 13488
atggtcactcaagttgaccagattcttgccacctccacggcggggtgcattcccaaagaacctaacaccccgtccatcgccccttcgctcacatactccacatattctgaggactcagaagaccaagatgagcctagattacctgagccccctcggaggcggcgtgcctctacgcgactaatctctcagagcgctgccgatatccagcggatcactggcgagtcaacccagcagttgatcagccggtgttgtggcggaggatgttgtatgaacctccagaagaagaaagagggcatcacttacgagagtgtccctttgcctgagaacagcgcattccagtccctaggcttaaggattggcgatatacccaccgtcctcacagccatcacggatctgcccgaacagttcacatttctggagaagccggctcggcgcgtgtctcagtcctcgtcccctacagattccgccatatctgtaggaacaactgacagcttggagaaaagcatccaaaagctggagcttgaggaccttgacacttcaattcaaccaccctcattcgtccaacctcacccgccgtatcacgtacatccagccaaggtccataatacacgggagctgactaaggctggcgccgagaagaggacatttcacttcgatctggatattaccgattatcctgaggaggacgacacagaatggaaagtgggaggcgccattggcgtctctgcaccaaatgattctaccgaggttgatgcggttttggatcttctcatggtcccccgctttctacgtgacaagccagtacttctacgaacaactaaaggtcgatggccaacagtttggggaaaggacaaggcacgagaactcataacaactcgccgagctctcctgacctggtgctctgatatccaatcctacccgcccaccaagcctcttctacgcgtacttgccgagtacactcacgatcccaacgagaagaagatcctgatgttcctgtgctctggagaagggcagggcgttttctgtgatttccgcacgggacctcatatctccatatctcagatcctcagtgcatttccttccgccaagcctcccatggacgcactcttgtcagttctccaaccactgatgccacgattctactctctctccaacgacccacacgagtcattcgaaatccgtgatggcaagcagcataggcttgtcgagatcgccgtcactgttcatgagacagcggactggcgcggaggcaatcgcactggtgttgggtccgggttcttccagcgccaagctctcaacttcttggacctacaaggcaaaggaaacaaggcaccccagatttatattcccatgttcaaaggcttgatggccaaccctcttgcgaggcagtttgtgtctgatggtccgatgctccttattggggctggcgtcggcatcgcaccattccgagggttcgttcagcgacgcttgaagaacgccaattgtgccaacaaagtatgggtcctccagggaatccgcgactccctcgtcgatgagatatacagcggcgaatggggtgttcatgaggacgaggtcaagcgtgtaatccagagccgacgtggggagggccgctacgtccaagaagaagtagctaaccaggcagatctagtctggtatatcatcaactcgcttgatgggcgagtgtttgtctgtggaagcagcaggggaatgggtgaaggtgttgaagaagcactcatcaaggttgccatggccaagggcaacctcgagcacgacgaagcgaagaagttctgggatctgaagaaggaagttggccaatacattgctgagacatggtga

SEQ ID NO: 13488 - protein, 611 aa, Muscodor strobelii
  misc_feature: SGI Peptide ID NO. 564420
  misc_feature (191)..(426): Pfam Id: PF00667 Pfam Desc: FAD binding domain
  misc_feature (471)..(576): Pfam Id: PF00175 Pfam Desc: Oxidoreductase NAD-binding domain
  misc_feature (1)..(611): NCBI GI: 39957904 Blast Desc: MGG_09211 [Magnaporthe grisea 70-15] gi|145013351|gb|EDJ97992.1| MGG_09211 [Magnaporthe grisea 70-15]
  misc_feature (1)..(611): NCBI GI: 85103230 Blast Desc: NCU03697 [Neurospora crassa OR74A] gi|11595578|emb|CAC18180.1| conserved [Neurospora crassa] gi|28923019|gb|EAA32237.1| NCU03697 [Neurospora crassa OR74A]
  misc_feature (1)..(611): NCBI GI: 171694197 Blast Desc: protein product [Podospora anserina] gi|170947047|emb|CAP73852.1| protein product [Podospora anserina]
  misc_feature (1)..(611): NCBI GI: 116198309 Blast Desc: CHGG_07310 [Chaetomium globosum CBS 148.51] gi|88178589|gb|EAQ86057.1| CHGG_07310 [Chaetomium globosum CBS 148.51]
  misc_feature (23)..(611): NCBI GI: 256728496 Blast Desc: [Nectria haematococca mpVI 77-13-4]
  misc_feature (24)..(611): NCBI GI: 46109970 Blast Desc: FG01867.1 [Gibberella zeae PH-1]
  misc_feature (7)..(611): NCBI GI: 156044851 Blast Desc: SS1G_09614 [Sclerotinia sclerotiorum 1980] gi|154694009|gb|EDN93747.1| SS1G_09614 [Sclerotinia sclerotiorum 1980]
  misc_feature (53)..(611): NCBI GI: 258569957 Blast Desc: conserved [Uncinocarpus reesii 1704] gi|237904052|gb|EEP78453.1| conserved [Uncinocarpus reesii 1704]
  misc_feature (95)..(611): NCBI GI: 154305028 Blast Desc: BC1G_08604 [Botryotinia fuckeliana B05.10] gi|150853767|gb|EDN28959.1| BC1G_08604 [Botryotinia fuckeliana B05.10]
  misc_feature (21)..(611): NCBI GI: 226290381 Blast Desc: FAD binding domain-containing protein [Paracoccidioides brasiliensis Pb18]
  misc_feature (290)..(611): SWISSPROT Homolog: EC 1.16.1.8 [Methionine synthase] reductase
  misc_feature: Useful for introducing or modulating the production of volatile compounds
MVTQVDQILATSTAGCIPKEPNTPSIAPSLTYSTYSEDSEDQDEPRLPEPPRRRRASTRLISQSAADIQRITGESTQQLISRCCGGGCCMNLQKKKEGITYESVPLPENSAFQSLGLRIGDIPTVLTAITDLPEQFTFLEKPARRVSQSSSPTDSAISVGTTDSLEKSIQKLELEDLDTSIQPPSFVQPHPPYHVHPAKVHNTRELTKAGAEKRTFHFDLDITDYPEEDDTEWKVGGAIGVSAPNDSTEVDAVLDLLMVPRFLRDKPVLLRTTKGRWPTVWGKDKARELITTRRALLTWCSDIQSYPPTKPLLRVLAEYTHDPNEKKILMFLCSGEGQGVFCDFRTGPHISISQILSAFPSAKPPMDALLSVLQPLMPRFYSLSNDPHESFEIRDGKQHRLVEIAVTVHETADWRGGNRTGVGSGFFQRQALNFLDLQGKGNKAPQIYIPMFKGLMANPLARQFVSDGPMLLIGAGVGIAPFRGFVQRRLKNANCANKVWVLQGIRDSLVDEIYSGEWGVHEDEVKRVIQSRRGEGRYVQEEVANQADLVWYIINSLDGRVFVCGSSRGMGEGVEEALIKVAMAKGNLEHDEAKKFWDLKKEVGQYIAETW

SEQ ID NO: 13489 - DNA, 1389 bp, Muscodor strobelii
  misc_feature: SGI cDNA ID NO. 564421
  misc_feature: Encodes the peptide sequence at SEQ ID NO 13490
atggcaaagtattttcgagacacggtatatgaggtgaagtccacagaaggtctgcgtactatcatcccaccgacattagtgggcgagctcaaaggcttaccggaagatgttttgagtgcaaaaacagcagtcagcgaggcgatgctgagcgactacacacagctatccgcggatgcacatgcggacacattaactttgctattaaaaaccaaggccacccagaacttacctcgcatggtaccacatctcaaagaagagctcgagtatataatagagaatgagttcccacaaactgaggattggacgccgttcaaagtacagccgttcatggttagggcggtttcgcgtctaagtggacgagccttcgtgggctcgcagcttagtcgttgcgaagaatggatggatgtcagcatcaacttcgccatcacggctttcatcgcagtaaccaagctgcaattctttccgccttggatgcgcccagcagcacaatatcttgtcccagaactgaagaccattcgaaaggacctcgccaaggcacaacatatgctgcaacccttgattgaagaacgactcgataatctagataataataaacgctgcgatcccgacgacttcattcaatggctatcggatgcattgccagaagaacaaaaacgagattattacattcaagcgaagatgcaactactccttagcgcgtcttctatacatactactagcaacttaacaactgactgtatttacgatcttgctgtacatcaagatatgcaggaagtattgcgacaagaggcagccgacgtgttcggtgaagacgaaataggctggggagagagagacagcatatcgcgactgaagaaaatggatagcttcatcaaagaatcacagaggctatctggaaatatcacatccttcattcgcaaagtcatgaaaccaatcgacctatccgatggcacacatctatcgccaggcactaatctgctcacgccattagcaggcgtagccgttgatgagcgcttcttcccagaccccgaagttttcgacggccttcgattctggaaattgcgacagcttcaatcgccctctttatctccttctccatccgcctcaactagttccctcgatgtatcatcgcactcgctccctaatgcaagtaaataccaattcactagcataggcgacacgagcatgaatttcggcctcggaaaacacgcctgtccagggcgcttcttcgcagcgcaggaaatcaagctcatacttgcttatctccttctacactacgagatcaaactccctgagggcgcaactcgtccgaaacctatgaccttcatgatgacgagggcacccagccaaacagctgagatactatttcgacggaggagggctgtatga

SEQ ID NO: 13490 - protein, 462 aa, Muscodor strobelii
  misc_feature: SGI Peptide ID NO. 564421
  misc_feature (23)..(456): Pfam Id: PF00067 Pfam Desc: Cytochrome P450
  misc_feature (287)..(456): Pfam Id: PF00067 Pfam Desc: Cytochrome P450
  misc_feature (5)..(459): NCBI GI: 261360907 Blast Desc: ent-kaurene oxidase [Verticillium albo-atrum VaMs.102]
  misc_feature (5)..(462): NCBI GI: 46109972 Blast Desc: FG01868.1 [Gibberella zeae PH-1]
  misc_feature (5)..(459): NCBI GI: 256728668 Blast Desc: NECHADRAFT_50522 [Nectria haematococca mpVI 77-13-4]
  misc_feature (5)..(461): NCBI GI: 145605555 Blast Desc: MGG_09198 [Magnaporthe grisea 70-15] gi|145013368|gb|EDJ98009.1| MGG_09198 [Magnaporthe grisea 70-15]
  misc_feature (3)..(460): NCBI GI: 121714691 Blast Desc: cytochrome P450 [Aspergillus clavatus NRRL 1] gi|119403110|gb|EAW13530.1| cytochrome P450 [Aspergillus clavatus NRRL 1]
  misc_feature (5)..(457): NCBI GI: 46140043 Blast Desc: FG11536.1 [Gibberella zeae PH-1]
  misc_feature (2)..(459): NCBI GI: 259486929 Blast Desc: TPA: cytochrome P450, (Eurofung) [Aspergillus nidulans FGSC A4]
  misc_feature (2)..(459): NCBI GI: 67522282 Blast Desc: AN1598.2 [Aspergillus nidulans FGSC A4] gi|40745149|gb|EAA64305.1| AN1598.2 [Aspergillus nidulans FGSC A4]
  misc_feature (5)..(459): NCBI GI: 119494789 Blast Desc: cytochrome P450 monooxygenase, [Neosartorya fischeri NRRL 181] gi|119412362|gb|EAW22303.1| cytochrome P450 monooxygenase, [Neosartorya fischeri NRRL 181]
  misc_feature (3)..(459): NCBI GI: 242804557 Blast Desc: cytochrome P450, [Talaromyces stipitatus ATCC 10500] gi|218717744|gb|EED17165.1| cytochrome P450, [Talaromyces stipitatus ATCC 10500]
  misc_feature (5)..(459): SWISSPROT Homolog: EC 1.14.13.78 Ent-kaurene oxidase
MAKYFRDTVYEVKSTEGLRTIIPPTLVGELKGLPEDVLSAKTAVSEAMLSDYTQLSADAHADTLTLLLKTKATQNLPRMVPHLKEELEYIIENEFPQTEDWTPFKVQPFMVRAVSRLSGRAFVGSQLSRCEEWMDVSINFAITAFIAVTKLQFFPPWMRPAAQYLVPELKTIRKDLAKAQHMLQPLIEERLDNLDNNKRCDPDDFIQWLSDALPEEQKRDYYIQAKMQLLLSASSIHTTSNLTTDCIYDLAVHQDMQEVLRQEAADVFGEDEIGWGERDSISRLKKMDSFIKESQRLSGNITSFIRKVMKPIDLSDGTHLSPGTNLLTPLAGVAVDERFFPDPEVFDGLRFWKLRQLQSPSLSPSPSASTSSLDVSSHSLPNASKYQFTSIGDTSMNFGLGKHACPGRFFAAQEIKLILAYLLLHYEIKLPEGATRPKPMTFMMTRAPSQTAEILFRRRRAV

SEQ ID NO: 13491 - DNA, 435 bp, Muscodor strobelii
  misc_feature: SGI cDNA ID NO. 564422
  misc_feature: Encodes the peptide sequence at SEQ ID NO 13492
atgaatgcctccgatcgtgaagtgaagcggcaacgcccgaacaacgagatcttacaacaagtaccgaacgatgcatcgctcaaggaggccgaatggcgcaagaatggtagaagccgtgccattaacagcattaaggttaaactattgacggaatactcggaattcaaatacagagaggaagacatgaagccgtgggagaaaggaacgtttctcgagaaaggataccgctccttcgatgtcaaagaggttgaacagtcaggccggttatttctacaaatcaaggtcagagttgatgagatgggaaaggatcatctgaatgatgaagaagaagagaaactgagcaatctggttaaagaattattctccaaattgcctccaaatccagaggtaaaattcatatatgttccaaagaaagtcgggaatgaaagccgatga

SEQ ID NO: 13492 - protein, 144 aa, Muscodor strobelii
  misc_feature: SGI Peptide ID NO. 564422
MNASDREVKRQRPNNEILQQVPNDASLKEAEWRKNGRSRAINSIKVKLLTEYSEFKYREEDMKPWEKGTFLEKGYRSFDVKEVEQSGRLFLQIKVRVDEMGKDHLNDEEEEKLSNLVKELFSKLPPNPEVKFIYVPKKVGNESR

SEQ ID NO: 13493 - DNA, 262 bp, Muscodor strobelii
  misc_feature: SGI EST ID NO. CUFF.32310.0
  misc_feature: Variant of the nucleotide sequence at SEQ ID NO 13491
cggcaacgcccgaacaacgagatcttacaacaagtaccgaacgatgcatcgctcaaggaggccgaatggcgcaagaatggtagaagccgtgccattaacagcattaaggttaaactattgacggaatactcggaattcaaatacagagaggaagacatgaagccgtgggagaaaggaacgtttctcgagaaaggataccgctccttcgatgtcaaagaggttgaacagtcaggccggttatttctacaaatcaaggtcagag

SEQ ID NO: 13494 - DNA, 342 bp, Muscodor strobelii
  misc_feature: SGI cDNA ID NO. 564423
  misc_feature: Encodes the peptide sequence at SEQ ID NO 13495
atggacgatacgcgcgcagagcctgaccacccgagagaggaggaatcatggcttgatcgcaagagaagagcggagaagaatttcgaggaaaaactgaagcggacagtcttggatgcgcttggagaggacaccaaagtcgagctcaagcggattacaagaagagattaccctaatcacagtatcatgcagatcaaaatctccaaagactggccggaggattcggagttggaagaagcactgaaggtggttaggaaggaagcatgtggcgacgaatttggagttggcgatgacacccgtcttgaatttgccaaggccggatcatggacctattgggtagagtaa

SEQ ID NO: 13495 - protein, 113 aa, Muscodor strobelii
  misc_feature: SGI Peptide ID NO. 564423
MDDTRAEPDHPREEESWLDRKRRAEKNFEEKLKRTVLDALGEDTKVELKRITRRDYPNHSIMQIKISKDWPEDSELEEALKVVRKEACGDEFGVGDDTRLEFAKAGSWTYWVE

SEQ ID NO: 13496 - DNA, 453 bp, Muscodor strobelii
  misc_feature: SGI cDNA ID NO. 564424
  misc_feature: Encodes the peptide sequence at SEQ ID NO 13497
atggatctaaaacgtgaagtagaggaactcattggcagagtccggatgatagtcggactagataccgaggtctcgatttctcttgacttctcctcttgcgaccctcctatcgtagtgactctgaaaatttgcatctcaaagccttggacagactacatggtgggagaagcgacacacgcaaaacatgttactttcgaggcttgctggctagatcccagcatgattcagctgaaattcgaagatatctcctcgccggggctgaaacttaaggatgacgagccaagacaagaggatgcgaccgaggatgggaaaatgaacgtaatcgagattgcgatcacacacgaggcagagactacgcatatggcggacactgcacacaagaatgagagggagaaaattgcagaaatctcatctgattttcgagacctcactctgtcaaatgtcaaacgatga

SEQ ID NO: 13497 - protein, 150 aa, Muscodor strobelii
  misc_feature: SGI Peptide ID NO. 564424
MDLKREVEELIGRVRMIVGLDTEVSISLDFSSCDPPIVVTLKICISKPWTDYMVGEATHAKHVTFEACWLDPSMIQLKFEDISSPGLKLKDDEPRQEDATEDGKMNVIEIAITHEAETTHMADTAHKNEREKIAEISSDFRDLTLSNVKR

SEQ ID NO: 13498 - DNA, 1725 bp, Muscodor strobelii
  misc_feature: SGI cDNA ID NO. 564425
  misc_feature: Encodes the peptide sequence at SEQ ID NO 13499
atgcaaagcaaagcacctccccgggccaggctagacggcgaccacccaccctgcacacccccgcagcagtctggcgacgaccagcgcaacacgcacgtcgacaatgccattcgcgctatccgccacaagaagcccctgcccgagatcgacttcaccatccacaccatggaagacggcacccaggtcaacaccaccgaacgagtctgcaaagatgtccaggcgcccgccatgttcaagccttccgacgaccagttcttccaagacgaatcccataccaagcccaacattaccttcctgaagcagcacttctaccgcgagggccgcctgaccgaggagcaggccttatggattatcaagactggtaccgaacttctgcgccaggagcccaacctccttgagatggacgcccccataaccgtctgcggtgacgtgcatggccagtactacgatctcatgaagctgttcgaggtcggcggtgacccggccgagaccagatatctctttcttggagactacgtcgacagaggctacttcagtatcgaatgtgtgctctatctgtggtccctgaagatacactaccccaagaccctgtggctgctgcgcggcaatcacgagtgtcgccacttgaccgactatttcaccttcaagctcgaatgcaagcacaagtactccgaagttgtctacgacgcctgcatggagtctttctgcagcctcccgctggctgccgttatgaacaaacagttcctgtgcatacacggcgggctgagccccgagctgcacaccctcgacgacttgcgcaacatcgaccgtttccgagagcctcccacccagggcttgatgtgtgacattctttgggccgacccgctcgaagatttcggtcaggagaaaacaaacgagtacttcatgcacaaccacgtacgcggttgctcctatttcttctcgtaccacgccgcctgcaacttcttggagaagaataacctcttgtctatcatccgcgcgcatgaggcccaagacgcgggctaccgaatgtaccgcaagacacggacgactggtttccccagtgttatgaccattttctcggcgcccaactatcttgatgtctataacaataaggcagcggtattgaaatatgagaacaatgttatgaatattcgacagttcaactgcacgcctcacccctactggcttcccaacttcatggacgtcttcacctggtctctgcccttcgtgggagagaagatcaccgacatgctcatcgccatcctgagcacatgctccgaggaagagcttcagcaagacacaccctcgtccacggcagggccccactctcctcctatcgccagcccggccgatgcctcgttggaggctcgaaagcgcgccgtcaagaacaagatcttggcaattggacgcatgtcacgtgtcttcaacgtcctgcgagaggaatctgagagagtcacggagctcaagaccgtgtctggtggccggctgcctgccggtacgctaatgctcggtgccgaaggaatcaagaatgcaattaccaatttcgaagacgccagaaaagttgacctgcaaaacgagcgcttgccaccaagccacgaagaagttgtcaagacgcagcaggaggagcgccagcaggcactggagcaagcgtctcgcgaggccgagaatgataccaaacttcagtcactttccaggaggcttagcatggatcgtaagcgatcgtga

SEQ ID NO: 13499 - protein, 574 aa, Muscodor strobelii
  misc_feature: SGI Peptide ID NO. 564425
  misc_feature (136)..(338): Pfam Id: PF00149 Pfam Desc: Calcineurin-like phosphoesterase
  misc_feature (32)..(571): NCBI GI: 164426921 Blast Desc: serine/threonine-protein phosphatase 2B catalytic subunit [Neurospora crassa OR74A] gi|157071531|gb|EAA31957.2| serine/threonine-protein phosphatase 2B catalytic subunit crassa
  misc_feature (32)..(568): NCBI GI: 189042257 Blast Desc: serine/threonine-protein phosphatase 2B catalytic subunit [Neurospora crassa OR74A] gi|157071531|gb|EAA31957.2| serine/threonine-protein phosphatase 2B catalytic subunit crassa
  misc_feature (11)..(568): NCBI GI: 261351544 Blast Desc: serine/threonine-protein phosphatase 2B catalytic subunit [Verticillium albo-atrum VaMs.102]
  misc_feature (24)..(561): NCBI GI: 145609249 Blast Desc: calmodulin-dependent protein phosphatase [Magnaporthe grisea 70-15] gi|145016642|gb|EDK01072.1| calmodulin-dependent protein phosphatase [Magnaporthe grisea 70-15]
  misc_feature (25)..(573): NCBI GI: 171694139 Blast Desc: protein product [Podospora anserina] gi|170947018|emb|CAP73822.1| protein product [Podospora anserina]
  misc_feature (32)..(569): NCBI GI: 189210060 Blast Desc: serine/threonine-protein phosphatase 2B catalytic subunit A1 [Pyrenophora tritici-repentis Pt-1C-BFP] gi|187977455|gb|EDU44081.1| serine/threonine-protein phosphatase
  misc_feature (11)..(568): NCBI GI: 154319309 Blast Desc: serine/threonine protein phosphatase 2B catalytic subunit [Botryotinia fuckeliana B05.10] gi|150857037|gb|EDN32229.1| serine/threonine protein phosphatase
  misc_feature (56)..(568): NCBI GI: 168769 Blast Desc: calmodulin-dependent protein phosphatase [Neurospora crassa]
  misc_feature (32)..(573): NCBI GI: 156063344 Blast Desc: serine/threonine protein phosphatase 2B catalytic subunit [Sclerotinia sclerotiorum 1980] gi|154697124|gb|EDN96862.1| serine/threonine protein phosphatase
  misc_feature (56)..(568): NCBI GI: 11595623 Blast Desc: phosphoprotein phosphatase 3-alpha catalytic chain [Neurospora crassa]
  misc_feature (32)..(568): SWISSPROT Homolog: EC 3.1.3.16 Phosphoprotein phosphatase
MQSKAPPRARLDGDHPPCTPPQQSGDDQRNTHVDNAIRAIRHKKPLPEIDFTIHTMEDGTQVNTTERVCKDVQAPAMFKPSDDQFFQDESHTKPNITFLKQHFYREGRLTEEQALWIIKTGTELLRQEPNLLEMDAPITVCGDVHGQYYDLMKLFEVGGDPAETRYLFLGDYVDRGYFSIECVLYLWSLKIHYPKTLWLLRGNHECRHLTDYFTFKLECKHKYSEVVYDACMESFCSLPLAAVMNKQFLCIHGGLSPELHTLDDLRNIDRFREPPTQGLMCDILWADPLEDFGQEKTNEYFMHNHVRGCSYFFSYHAACNFLEKNNLLSIIRAHEAQDAGYRMYRKTRTTGFPSVMTIFSAPNYLDVYNNKAAVLKYENNVMNIRQFNCTPHPYWLPNFMDVFTWSLPFVGEKITDMLIAILSTCSEEELQQDTPSSTAGPHSPPIASPADASLEARKRAVKNKILAIGRMSRVFNVLREESERVTELKTVSGGRLPAGTLMLGAEGIKNAITNFEDARKVDLQNERLPPSHEEVVKTQQEERQQALEQASREAENDTKLQSLSRRLSMDRKRS

SEQ ID NO: 13500 - DNA, 2989 bp, Muscodor strobelii
  misc_feature: SGI EST ID NO. CUFF.32398.0
  misc_feature: Variant of the nucleotide sequence at SEQ ID NO 13498
cggcatcaatcaaagggattcagaagttgatagtcaaccacgtttttagcagattcatcgagccaaggaccaggccttgaacggtcttagctatcgggtatcttgcctgccctccttaaatcgacgataccccacacgcaagcacgcacagaggggggaagagaggggcaggagaccagaatgtaatgtaccctgtgcctatcgtatctcatcgtatcacagctgagcaagcggtgaagataccttgccccgaagtagatgtgatgcaaagcaaagcacctccccgggccaggctagacggcgaccacccaccctgcagtgaaggtgtagtgctttccttttcgccgcccaattctgaagtgcaagagccattctcgatccatcatcacctggcatctacgacctagacaatcgacactcttgccttgaagcctactgcttcaattccacctgcgacgtctcagttacgatatcctttgcagccattagctcccgcctaaaccaacccctgcgcccagtattgttatatagtcttttacctacctctgtattgttatcagccagcagcccctctctcctgatccaacttccagagccgcacgcccgcacgtccgacgagctgccacggcgcagcccacggccaacatggacgctgaaggcgagcacccccgcagcagtctggcgacgaccagcgcaacacgcacgtcgacaatgccattcgcgctatccgccacaagaagcccctgcccgagatcgacttcaccatccacaccatggaagacggcacccaggtcaacaccaccgaacgagtctgcaaagatgtccaggcgcccgccatgttcaagccttccgacgaccagttcttccaagacgaatcccataccaagcccaacattaccttcctgaagcagcacttctaccgcgagggccgcctgaccgaggagcaggccttatggattatcaagactggtaccgaacttctgcgccaggagcccaacctccttgagatggacgcccccataaccgtctgcggtgacgtgcatggccagtactacgatctcatgaagctgttcgaggtcggcggtgacccggccgagaccagatatctctttcttggagactacgtcgacagaggctacttcagtatcgaatgtgtgctctatctgtggtccctgaagatacactaccccaagaccctgtggctgctgcgcggcaatcacgagtgtcgccacttgaccgactatttcaccttcaagctcgaatgcaagcacaagtactccgaagttgtctacgacgcctgcatggagtctttctgcagcctcccgctggctgccgttatgaacaaacagttcctgtgcatacacggcgggctgagccccgagctgcacaccctcgacgacttgcgcaacatcgaccgtttccgagagcctcccacccagggcttgatgtgtgacattctttgggccgacccgctcgaagatttcggtcaggagaaaacaaacgagtacttcatgcacaaccacgtacgcggttgctcctatttcttctcgtaccacgccgcctgcaacttcttggagaagaataacctcttgtctatcatccgcgcgcatgaggcccaagacgcgggctaccgaatgtaccgcaagacacggacgactggtttccccagtgttatgaccattttctcggcgcccaactatcttgatgtctataacaataaggcagcggtattgaaatatgagaacaatgttatgaatattcgacagttcaactgcacgcctcacccctactggcttcccaacttcatggacgtcttcacctggtctctgcccttcgtgggagagaagatcaccgacatgctcatcgccatcctgagcacatgctccgaggaagagcttcagcaagacacaccctcgtccacggcagggccccactctcctcctatcgccagcccggccgatgcctcgttggaggctcgaaagcgcgccgtcaagaacaagatcttggcaattggacgcatgtcacgtgtcttcaacgtcctgcgagaggaatctgagagagtcacggagctcaagaccgtgtctggtggccggctgcctgccggtacgctaatgctcggtgccgaaggaatcaagaatgcaattaccaatttcgaagacgccagaaaagttgacctgcaaaacgagcgcttgccaccaagccacgaagaagttgtcaagacgcagcaggaggagcgccagcaggcactggagcaagcgtctcgcgaggccgagaatgataccaaacttcagtcactttccaggaggcttagcatggatcgtaagcgatcgtgagatgtcgtcattgtatacttgcttgagcgtcgatcgacgaatgataatggattagacctaagcttataccacttatgccaccttatgggattggaatgattctcctactgcgcagtgatgatggatgactcttatttccccgaggttttggcgttattgcggttcgatacgagatgtactctcctaataccattgtacggacaacctaaagagcctttgaaaacggagttgatgggcttgtcaatcgatagctgcgtataggcgcattggagacataaacagtgctcatatgataggtagtcttcatcgagtgacggactcgggtccgaaatatataaccgcaatgcccttatcggctttgtgcacattgttacgagttgaccacaatgaactgcgatacatgaatccataatgagtacttctaaattattcaaaggacgcagaaccttcgaaaagcaagacgaggaacaaatccaataattaaagctccatgatccgtgaggttaactcccctagttgatacaagcgacccaaaagtagccaaccccgcagttcagggaatcgcggccctccagcccaccacgggaagaagtccgaactgcagccgccttatgtaccacgccgcgtacattgtgttgacgacgtacatcgtcgtg

SEQ ID NO: 13501 - DNA, 1023 bp, Muscodor strobelii
  misc_feature: SGI cDNA ID NO. 564426
  misc_feature: Encodes the peptide sequence at SEQ ID NO 13502
atggcgccgccagtctccggattcaaattaaacaagaacggtgtaccagattttgaggatttaccaattcgcaaagatgcgcctcgtttggcagcttggggtttatacggcgataatgatcagctgggtttcttgaatagacttacggatgagcgggttgcggccgcggctaagggggagattaggacggggaaacgcgtctccctaaactggccaatgacagcccaaccgcaccgatcgttcttccaacgggcgctgttccatcaggaattgattaataaagcgccgagaacggtgaatgacgatacttggagtttcaatacccaggtgagtagtcagtgggatggattgagacattttgggtatcagaatgagaagatgttttatgggggggttacgcagagggatatacataagattggggaggggggtgaaaagagtgaggttttggggattcatgcgtggtcagaacaaggcataatgggccgtggcgtcctgatcgattaccatagctggcggacttcaccggaaggacaagcacagtctggggtcgagaaatatgatgcgtttgagactgttgccattccgcatgaggatctggaggcttgtcttagggctcaggggacggaactcaagtttggtgatattttatttattcgctccggcttcatggcggccctcgctacaaaatcccaacaagagatatcaaattatcaagacgtagtcccacaccactttgggggcgttcaacaatccgaagacgtcctccgctggatatgggataacttctccgccgtagcaggtgatcagccgtcgttcgaagcttggccgtcaaaggaggaatgggctttgcatgaagttctcttagcgggctggggctgtccgattggggagttgtttgatctggagaaattagctgagatgtgtaagaaggagggacggtggagtttcttctgtagtagtgagccttgtaatgttcctgggggtgttgcgagtccgccgaatgctgttgctattttctag

SEQ ID NO: 13502 - protein, 340 aa, Muscodor strobelii
  misc_feature: SGI Peptide ID NO. 564426
  misc_feature (9)..(331): NCBI GI: 145609251 Blast Desc: MGG_07457 [Magnaporthe grisea 70-15] gi|145016643|gb|EDK01073.1| MGG_07457 [Magnaporthe grisea 70-15]
  misc_feature (15)..(331): NCBI GI: 258577769 Blast Desc: conserved [Uncinocarpus reesii 1704] gi|237903332|gb|EEP77733.1| conserved [Uncinocarpus reesii 1704]
  misc_feature (15)..(331): NCBI GI: 240110147 Blast Desc: CPC735_061790 [Coccidioides posadasii C735 delta SOWgp]
  misc_feature (16)..(340): NCBI GI: 256728252 Blast Desc: [Nectria haematococca mpVI 77-13-4]
  misc_feature (16)..(340): NCBI GI: 46120344 Blast Desc: FG04819.1 [Gibberella zeae PH-1]
  misc_feature (16)..(340): NCBI GI: 145231226 Blast Desc: An01g14890 [Aspergillus niger] gi|134056008|emb|CAK37443.1| protein product [Aspergillus niger]
  misc_feature (9)..(271): NCBI GI: 261351545 Blast Desc: conserved [Verticillium albo-atrum VaMs.102]
  misc_feature (15)..(340): NCBI GI: 169777669 Blast Desc: [Aspergillus oryzae RIB40] gi|83772037|dbj|BAE62167.1| protein product [Aspergillus oryzae]
  misc_feature (15)..(340): NCBI GI: 238494858 Blast Desc: conserved [Aspergillus flavus NRRL3357] gi|220695315|gb|EED51658.1| conserved [Aspergillus flavus NRRL3357]
  misc_feature (16)..(340): NCBI GI: 169624276 Blast Desc: SNOG_15394 [Phaeosphaeria nodorum SN15] gi|111056207|gb|EAT77327.1| SNOG_15394 [Phaeosphaeria nodorum SN15]
MAPPVSGFKLNKNGVPDFEDLPIRKDAPRLAAWGLYGDNDQLGFLNRLTDERVAAAAKGEIRTGKRVSLNWPMTAQPHRSFFQRALFHQELINKAPRTVNDDTWSFNTQVSSQWDGLRHFGYQNEKMFYGGVTQRDIHKIGEGGEKSEVLGIHAWSEQGIMGRGVLIDYHSWRTSPEGQAQSGVEKYDAFETVAIPHEDLEACLRAQGTELKFGDILFIRSGFMAALATKSQQEISNYQDVVPHHFGGVQQSEDVLRWIWDNFSAVAGDQPSFEAWPSKEEWALHEVLLAGWGCPIGELFDLEKLAEMCKKEGRWSFFCSSEPCNVPGGVASPPNAVAIF

SEQ ID NO: 13503 - DNA, 1029 bp, Muscodor strobelii
  misc_feature: SGI cDNA ID NO. 564427
  misc_feature: Encodes the peptide sequence at SEQ ID NO 13504
atggcgccgccagtctccggattcaaattaaacaagaacggtgtaccagattttgaggatttaccaattcgcaaagatgcgcctcgtttggcagcttggggtttatacggcgataatgatcagctgggtttcttgaatagacttacggatgagcgggttgcggccgcggctaagggggagattaggacggggaaacgcgtctccctaaactggccaatgacagcccaaccgcaccgatcgttcttccaacgggcgctgttccatcaggaattgattaataaagcgccgagaacggtgaatgacgatacttggagtttcaatacccaggtgagtagtcagtgggatggattgagacattttgggtatcagaatgagaagatgttttatgggggggttacgcagagggatatacataagattggggaggggggtgaaaagagtgaggttttggggattcatggaacagcgtggtcagaacaaggcataatgggccgtggcgtcctgatcgattaccatagctggcggacttcaccggaaggacaagcacagtctggggtcgagaaatatgatgcgtttgagactgttgccattccgcatgaggatctggaggcttgtcttagggctcaggggacggaactcaagtttggtgatattttatttattcgctccggcttcatggcggccctcgctacaaaatcccaacaagagatatcaaattatcaagacgtagtcccacaccactttgggggcgttcaacaatccgaagacgtcctccgctggatatgggataacttctccgccgtagcaggtgatcagccgtcgttcgaagcttggccgtcaaaggaggaatgggctttgcatgaagttctcttagcgggctggggctgtccgattggggagttgtttgatctggagaaattagctgagatgtgtaagaaggagggacggtggagtttcttctgtagtagtgagccttgtaatgttcctgggggtgttgcgagtccgccgaatgctgttgctattttctag

SEQ ID NO: 13504 - protein, 342 aa, Muscodor strobelii
  misc_feature: SGI Peptide ID NO. 564427
  misc_feature (9)..(333): NCBI GI: 145609251 Blast Desc: MGG_07457 [Magnaporthe grisea 70-15] gi|145016643|gb|EDK01073.1| MGG_07457 [Magnaporthe grisea 70-15]
  misc_feature (15)..(333): NCBI GI: 258577769 Blast Desc: conserved [Uncinocarpus reesii 1704] gi|237903332|gb|EEP77733.1| conserved [Uncinocarpus reesii 1704]
  misc_feature (15)..(333): NCBI GI: 240110147 Blast Desc: CPC735_061790 [Coccidioides posadasii C735 delta SOWgp]
  misc_feature (16)..(342): NCBI GI: 256728252 Blast Desc: [Nectria haematococca mpVI 77-13-4]
  misc_feature (16)..(342): NCBI GI: 46120344 Blast Desc: FG04819.1 [Gibberella zeae PH-1]
  misc_feature (16)..(342): NCBI GI: 145231226 Blast Desc: An01g14890 [Aspergillus niger] gi|134056008|emb|CAK37443.1| protein product [Aspergillus niger]
  misc_feature (9)..(273): NCBI GI: 261351545 Blast Desc: conserved [Verticillium albo-atrum VaMs.102]
  misc_feature (15)..(342): NCBI GI: 169777669 Blast Desc: [Aspergillus oryzae RIB40] gi|83772037|dbj|BAE62167.1| protein product [Aspergillus oryzae]
  misc_feature (15)..(342): NCBI GI: 238494858 Blast Desc: conserved [Aspergillus flavus NRRL3357] gi|220695315|gb|EED51658.1| conserved [Aspergillus flavus NRRL3357]
  misc_feature (16)..(342): NCBI GI: 169624276 Blast Desc: SNOG_15394 [Phaeosphaeria nodorum SN15] gi|111056207|gb|EAT77327.1| SNOG_15394 [Phaeosphaeria nodorum SN15]
MAPPVSGFKLNKNGVPDFEDLPIRKDAPRLAAWGLYGDNDQLGFLNRLTDERVAAAAKGEIRTGKRVSLNWPMTAQPHRSFFQRALFHQELINKAPRTVNDDTWSFNTQVSSQWDGLRHFGYQNEKMFYGGVTQRDIHKIGEGGEKSEVLGIHGTAWSEQGIMGRGVLIDYHSWRTSPEGQAQSGVEKYDAFETVAIPHEDLEACLRAQGTELKFGDILFIRSGFMAALATKSQQEISNYQDVVPHHFGGVQQSEDVLRWIWDNFSAVAGDQPSFEAWPSKEEWALHEVLLAGWGCPIGELFDLEKLAEMCKKEGRWSFFCSSEPCNVPGGVASPPNAVAIF

SEQ ID NO: 13505 - DNA, 807 bp, Muscodor strobelii
  misc_feature: SGI cDNA ID NO. 564428
  misc_feature: Elevated expression when VOC is produced
  misc_feature: Encodes the peptide sequence at SEQ ID NO 13506
atgcactacctcctttatctcatcataatatctggcgttgcgctagctgtccagccactttcgatggaagtccacaacgatccaatggaagcccaaatctgctccgcggatgatgacgacgacgcctgttccatagatcaaggcattgcagagggagttatgaatgctatatttccgacagggttagactatgaagccctggattgggaccgcttcgagcgcatggctgctcgacagcaacgtagaaatgcaatattggaagccacagcgggtagcgctgcaatggaagagtttagtgtcgcatgctcagacttcatgatcgaggaacaaccactagcggagactcaagccgttctgaatcgtattcttcaacttgcaggagacaagtcacttttggatgagtacgcaaggttcgtcaatgcgccgctagataccgaagaacaacaagcagccgcgcgcgcgcatctgtgtgagatactcgaaattaagtcaacccggaaatggaaagagaattggaaagtgatccgagaaaccgaggagagggtcaccgctgctgcccggacatattggcttccagacgaacggagcaagtttgtgaatttcatggtcaagcttcacagccccatagacagacttgatcgacctcgtgagctagagaggagacagatgctccacgaggcggccatgtctgagccccaactacaagaacttgtcaaggcgtattttcaggagattgataagtttgaaccaaaagaggttgatgggcctccagcaagtgacccgcgcgagcagattcaagatctttga

SEQ ID NO: 13506 - protein, 268 aa, Muscodor strobelii
  misc_feature: SGI Peptide ID NO. 564428
  misc_feature: Useful for introducing or modulating the production of volatile compounds
MHYLLYLIIISGVALAVQPLSMEVHNDPMEAQICSADDDDDACSIDQGIAEGVMNAIFPTGLDYEALDWDRFERMAARQQRRNAILEATAGSAAMEEFSVACSDFMIEEQPLAETQAVLNRILQLAGDKSLLDEYARFVNAPLDTEEQQAAARAHLCEILEIKSTRKWKENWKVIRETEERVTAAARTYWLPDERSKFVNFMVKLHSPIDRLDRPRELERRQMLHEAAMSEPQLQELVKAYFQEIDKFEPKEVDGPPASDPREQIQDL

SEQ ID NO: 13507 - DNA, 1443 bp, Muscodor strobelii
  misc_feature: SGI EST ID NO. CUFF.32345.0
  misc_feature: Variant of the nucleotide sequence at SEQ ID NO 13505
ccgaaaacaggccactcaattaaatccattcaaggctctaagattctctggttgtccggaggctgcccccaaagctaccaacagagcaaggatcgagccaatcaattgcttggaagtcaaggtcttagcatcatctcctttcgggtcttgggggcgggcaacttgattgttactggtcagtgggagacaacaacatataaagactggaattgatcatagtctttcatcttcgaaactcattttacctgtaatactatccatcatacaagtgaaaagtaggaaggatcacctcaagacgatcgtccaaatacgtcttatctcattcatgctacagatgcactacctcctttatctcatcataatatctggcgttgcgctagctgtccagccactttcgatggaagtccacaacgatccaatggaagcccaaatctgctccgcggatgatgacgacgacgcctgttccatagatcaaggcattgcagagggagttatgaatgctatatttccgacagggttagactatgaagccctggattgggaccgcttcgagcgcatggctgctcgacagcaacgtagaaatgcaatattggaagccacagcgggtagcgctgcaatggaagagtttagtgtcgcatgctcagacttcatgatcgaggaacaaccactagcggagactcaagccgttctgaatcgtattcttcaacttgcaggagacaagtcacttttggatgagtacgcaaggttcgtcaatgcgccgctagataccgaagaacaacaagcagccgcgcgcgcgcatctgtgtgagatactcgaaattaagtcaacccggaaatggaaagagaattggaaagtgatccgagaaaccgaggagagggtcaccgctgctgcccggacatattggcttccagacgaacggagcaagtttgtgaatttcatggtcaagcttcacagccccatagacagacttgatcgacctcgtgagctagagaggagacagatgctccacgaggcggccatgtctgagccccaactacaagaacttgtcaaggcgtattttcaggagattgataagtttgaaccaaaagaggttgatgggcctccagcaagtgacccgcgcgagcagattcaagatctttgactggaacgccacctgaagtgatcaacacatccggccgcatgttcgtatatcatgtcaatggatgccgagcagccttctcattcgtcaactactacatttgtttcattgcttcttattccattcatgttccttgactctgatctcgaaacctactatggggaagaaggagactttcttgtctcgtattagcatgactctagataaaatttattcctcagtttaggtatgaaagacgacataggtgaaattgagacgtgcatactttcatttcagttatcctgtctctagcgcacaggcattca

SEQ ID NO: 13508 - DNA, 636 bp, Muscodor strobelii
  misc_feature: SGI cDNA ID NO. 564429
  misc_feature: Encodes the peptide sequence at SEQ ID NO 13509
atgtatctctccaagactactatcttgctttgtgcatggcttggtcttgcctctgcaagcgtgactggagcacgcgactctaccaccgatgaacgctggttcaagattggcgacaatgtgtggtccaacgtggatccgactatcggtatcgccgccacccgattcaatgattcggtgtcaaagatagatactccgacccaaacacagcatcctagcgttgaaaaacatccgtacaagatcaacgacaatctgtactccaatatgccacccggccttcgcgcggacaataagaatatcaacacggaacccacgagcgacgcaacaaactcaactgatctggagagaagggttgttgacgtgcatccctcccttgatgagttgaaagccaatttgaccttggcaatagaatggatggctttgatcccagagcctgacgaggctgaggaacacgatgatgttgttatggctcgctggggaaagtggaccgtcgcattttgtaaatgcgtactcgcaatggcacaatgcttagccagaagcgagaacaatcccaacttacctatcctcgagcaactcaacgggacagagaatgtgcttgacttcatgttccacagcataccgccgacgtttcaacagtag

SEQ ID NO: 13509 - protein, 211 aa, Muscodor strobelii
  misc_feature: SGI Peptide ID NO. 564429
MYLSKTTILLCAWLGLASASVTGARDSTTDERWFKIGDNVWSNVDPTIGIAATRFNDSVSKIDTPTQTQHPSVEKHPYKINDNLYSNMPPGLRADNKNINTEPTSDATNSTDLERRVVDVHPSLDELKANLTLAIEWMALIPEPDEAEEHDDVVMARWGKWTVAFCKCVLAMAQCLARSENNPNLPILEQLNGTENVLDFMFHSIPPTFQQ

SEQ ID NO: 13510 - DNA, 378 bp, Muscodor strobelii
  misc_feature: SGI cDNA ID NO. 564430
  misc_feature: Encodes the peptide sequence at SEQ ID NO 13511
atgtatctcactatcaaagccctcgtcgcacttgccagcctcttcgcgaccactacagccacttgttatggcacgggtcaaggaggaaactacggccagagtctcgatgctgtcgacggcttgaaaactgcgtgtctcggtttgataggcacctatgtcaaaggagaaagccggcagacttgtattcaagactccgacgggacgaagtggaactttgacttgaagcacatttctaaaggcactcgcacaatcgcactcgatgagtgtctttcgggcatgtcgaaagaagctcacggctgctatcgcggcggacatagcagttactggaactgggcatacaaagccgatcccaacactggtcattgtcttctatactag

SEQ ID NO: 13511 - protein, 125 aa, Muscodor strobelii
  misc_feature: SGI Peptide ID NO. 564430
  misc_feature (37)..(122): NCBI GI: 226292240 Blast Desc: PADG_03744 [Paracoccidioides brasiliensis Pb18]
  misc_feature (37)..(122): NCBI GI: 226282594 Blast Desc: PAAG_01081 [Paracoccidioides brasiliensis Pb01]
  misc_feature (37)..(122): NCBI GI: 225681061 Blast Desc: [Paracoccidioides brasiliensis Pb03]
  misc_feature (8)..(122): NCBI GI: 169618764 Blast Desc: SNOG_12574 [Phaeosphaeria nodorum SN15] gi|111058752|gb|EAT79872.1| SNOG_12574 [Phaeosphaeria nodorum SN15]
MYLTIKALVALASLFATTTATCYGTGQGGNYGQSLDAVDGLKTACLGLIGTYVKGESRQTCIQDSDGTKWNFDLKHISKGTRTIALDECLSGMSKEAHGCYRGGHSSYWNWAYKADPNTGHCLLY

SEQ ID NO: 13512 - DNA, 780 bp, Muscodor strobelii
  misc_feature: SGI cDNA ID NO. 564431
  misc_feature: Encodes the peptide sequence at SEQ ID NO 13513
atgcttttcactctcgggtccttcggcctcgcgctcctcttattcggccatcgcttgacggcatcttttcttccaaactcttcgattcttcttactcgccagaacttcatttatcctgtgatttcgacaggcatagatccaaatgacccacttcggggcgccagactctttcccaacccgactgaccaggggggtttccaagacgcatattacttagccagatgggcagttttaaccaagaacagagacatgaacaatcacattttcagtaaatattttgacccacgtgacaaggatatggtcattgacattttcacacgcatcacgaacgatgggtatgggaatccggctatggtcaatttaatggtgaaaggcacgtctattgatgcgccatccgaccaatttgaagcggacacgggcgaactagagactatgcacccagacacgatgctctacgaggacttttgggtataccaatctattggtagagatccaggcgcctgccagcagtgggaaaatgaaggcatgtctaaggacatgatcaccctgggtcatttactcttacacgaatacacgcattgggattggttgcttcaggatattcaccacggtcgtattgtcgatcaggattacggacgtggatgggaagattgcagggctcttgataggagcattgctaggtataatgctgatagccatgcctggtacgccacagagttgatatgggcgaacatttgttacaagccttatgggtatgatggagatgactccaagacttga

SEQ ID NO: 13513 - protein, 259 aa, Muscodor strobelii
  misc_feature: SGI Peptide ID NO. 564431
  misc_feature (63)..(250): NCBI GI: 171679293 Blast Desc: protein product [Podospora anserina] gi|170939272|emb|CAP64500.1| protein product [Podospora anserina]
  misc_feature (182)..(250): NCBI GI: 171683091 Blast Desc: protein product [Podospora anserina] gi|170941505|emb|CAP67157.1| protein product [Podospora anserina]
MLFTLGSFGLALLLFGHRLTASFLPNSSILLTRQNFIYPVISTGIDPNDPLRGARLFPNPTDQGGFQDAYYLARWAVLTKNRDMNNHIFSKYFDPRDKDMVIDIFTRITNDGYGNPAMVNLMVKGTSIDAPSDQFEADTGELETMHPDTMLYEDFWVYQSIGRDPGACQQWENEGMSKDMITLGHLLLHEYTHWDWLLQDIHHGRIVDQDYGRGWEDCRALDRSIARYNADSHAWYATELIWANICYKPYGYDGDDSKT

SEQ ID NO: 13514 - DNA, 226 bp, Muscodor strobelii
  misc_feature: SGI EST ID NO. CUFF.32356.0
  misc_feature: Variant of the nucleotide sequence at SEQ ID NO 13512
ctactctttatatatgggcgtctgcagcacttctagtatcgtccacgattattcatctctcacctccgtgagacaatctcatcatgcttttcactctcgggtccttcggcctcgcgctcctcttattcggccatcgcttgacggcatcttttcttccaaactcttcgattcttcttactcgccagaacttcatttatcctgtgatttcgacaggcatagatccaaa

SEQ ID NO: 13515 - DNA, 825 bp, Muscodor strobelii
  misc_feature: SGI cDNA ID NO. 564432
  misc_feature: Encodes the peptide sequence at SEQ ID NO 13516
atggcgactttccctccaatcagagcatgcctcttcgacatggatggccttctccttaacacagaagacctgtatacccaatgtgccaacatagttctcagcaagcatggcagaccccctctaccctggtctatcaaggctcagatgatgggcattccggggtcaagtaacggtgatacgtttcatttgtgggccaaactaccaatatcacgggagcagttcaaagaagagcaagcagagcagcaacgtcttctatttcccaaatgccaagcccttccaggagttcaaaggctgctgaaagatctcaggagagcaaagaatactgacggatatccattgcaaatggcactcgctacaagtagcatggtcgagaacttcgctctcaagactcgacgtccttcgacctgggccttgcttcatctgatccctcataggcatcacgtccttggcgacgatccaagagtacagagcggccgtgggaaaccggctcctgatatctatctgacagcactgaaatcgatcaatgatgcattacccgaagacgtaccgaagatcacgccagcagagtgtcttgtatttgaggatggtgttataggggtcgaagcgggtcggagagctggtatgaggaccgtctgggtccctcaccctgagctcctagcagaatatgaaggtaaagaagcggaagttctcgccggcagaatcggacttttccctattggcgatgacgaacagcttggtgagattggagatggatggggtgaactgcgcctcagtctagagaacttcccctatgagaaatatggcatagtgccacgaggatcatag

SEQ ID NO: 13516 - protein, 274 aa, Muscodor strobelii
  misc_feature: SGI Peptide ID NO. 564432
  misc_feature (7)..(216): Pfam Id: PF00702 Pfam Desc: haloacid dehalogenase-like hydrolase
  misc_feature (4)..(270): NCBI GI: 156053742 Blast Desc: SS1G_05718 [Sclerotinia sclerotiorum 1980] gi|154703499|gb|EDO03238.1| SS1G_05718 [Sclerotinia sclerotiorum 1980]
  misc_feature (5)..(270): NCBI GI: 154299825 Blast Desc: BC1G_10803 [Botryotinia fuckeliana B05.10] gi|150857083|gb|EDN32275.1| BC1G_10803 [Botryotinia fuckeliana B05.10]
  misc_feature (4)..(269): NCBI GI: 189200441 Blast Desc: haloacid dehalogenase-like hydrolase [Pyrenophora tritici-repentis Pt-1C-BFP] gi|187983656|gb|EDU49144.1| haloacid dehalogenase-like hydrolase [Pyrenophora tritici-repentis
  misc_feature (1)..(269): NCBI GI: 238839587 Blast Desc: GS1-like protein [Microsporum canis CBS 113480]
  misc_feature (4)..(269): NCBI GI: 242787330 Blast Desc: HAD superfamily hydrolase, [Talaromyces stipitatus ATCC 10500] gi|218721132|gb|EED20551.1| HAD superfamily hydrolase, [Talaromyces stipitatus ATCC 10500]
  misc_feature (3)..(269): NCBI GI: 171681234 Blast Desc: protein product [Podospora anserina] gi|170940575|emb|CAP65803.1| protein product [Podospora anserina]
  misc_feature (4)..(269): NCBI GI: 255948938 Blast Desc: Pc22g13090 [Penicillium chrysogenum Wisconsin 54-1255] gi|211592253|emb|CAP98597.1| Pc22g13090 [Penicillium chrysogenum Wisconsin 54-1255]
  misc_feature (3)..(270): NCBI GI: 119474445 Blast Desc: haloacid dehalogenase-like hydrolase, [Neosartorya fischeri NRRL 181] gi|119407251|gb|EAW17201.1| haloacid dehalogenase-like hydrolase, [Neosartorya fischeri NRRL 181]
  misc_feature (5)..(269): NCBI GI: 145613105 Blast Desc: MGG_11115 [Magnaporthe grisea 70-15] gi|145020245|gb|EDK04374.1| MGG_11115 [Magnaporthe grisea 70-15]
  misc_feature (2)..(270): NCBI GI: 46116694 Blast Desc: FG04189.1 [Gibberella zeae PH-1]
  misc_feature (7)..(221): SWISSPROT Homolog: EC 5.4.2.6 Beta-phosphoglucomutase
MATFPPIRACLFDMDGLLLNTEDLYTQCANIVLSKHGRPPLPWSIKAQMMGIPGSSNGDTFHLWAKLPISREQFKEEQAEQQRLLFPKCQALPGVQRLLKDLRRAKNTDGYPLQMALATSSMVENFALKTRRPSTWALLHLIPHRHHVLGDDPRVQSGRGKPAPDIYLTALKSINDALPEDVPKITPAECLVFEDGVIGVEAGRRAGMRTVWVPHPELLAEYEGKEAEVLAGRIGLFPIGDDEQLGEIGDGWGELRLSLENFPYEKYGIVPRGS

SEQ ID NO: 13517 - DNA, 3408 bp, Muscodor strobelii
  misc_feature: SGI EST ID NO. CUFF.32430.2
  misc_feature: Variant of the nucleotide sequence at SEQ ID NO 13515
ttcgatccgattacctttcgaaaattccagaactacatagctcccattttcccacgatactaagtccgaacaaacctaaaagcggtcacattttggagaaagagaatggacaatgttcaggtagtcgacgagtccttcccggctgcttcaaaggacgcgaccggtgaaatcgatggcatctcaaccaaggcctctgctttgttctttgctgataggatcctcttgacattatgccaggaaggcaaactttcgcaatggatacaagtccctttgtcagctccatcaccggcatctgtagacatggcattggcaagtccgactcttttacccatgtcgcatctcactccgaagacactacttggaggtggcggcgaggaacgcgagtctttggcgcagttgtatgctgtacaaattgcaagtttcattgctagaaaagatcctgaggagcgtcgtaccctggttttcggcctgggtcttgagaagctgcggcccgagcgagaagccttctttgatgtactggagctaatccagcaggtattgtgagctatacagagacatcgccacgaaactgccaaatacctccagatcaacacaactacactcatccagctacgaccgtggaactaggagccagtgccatcttggcttccttttccaggaactcatctcttccttgtttaaacctcaacaagcaccctgtaatgtgatatgtcagcctcgtcactaaacacgggaagggcactgcagcgtacagtcaccacagcagattggggtgtatttcgctgggttcgactccgaagtgcacgatgggacaacaccctcgacgcaattgaaattcaagcctaggagctgtcagaaacaaggtcaaatgaagatcaggcggcatggtacacaccgaagaagaaaggcaacgagacacgctcttgcgtagactcgtttgttacccggtggactgtggagatgtatctatcattgcagagacgcatcatgaaatcgccaatattcacaacgagagtattctcaattggaggtgcctttgaaagtcattagcaatcgctgccaacaatcttccagcgcggagcgtaccctgatccattgaccttcctgcgtcaaaatttgcaaacctcccacatgatcttgccacagcaacgtgaacagttgtaggtcagtgtggctaccgatgccaacgaagttctcctcgacttcctgctttgttctctgcgggtagtaattgaacacaccgctatttatacacatttagtggtaaccaattaaaaaaaaatcagacgaggatttgcgtgtattgtacttactctgcccctggatgcgtaactttgtcgtcccagtatccctcatcaagatcaagcgaaagagcaaacatgcgcaccaactttctagaaagtctgagacatgcgccccaatatgcaaggcaatcctctttgaaattgggcaaatgctttgtgccttcccatacgaagtcctcggccctgatccattgacggacttcttcaggcaattcggagatatcttttgggttatcgggatcgagctcaggggcgtaacgaaacgagaagctctcgcgcacgtcaagggactcgcttggtgataactgagattttcgactgcccagatatccgttgaagtacttgctatgtttgtgagattcgactagatctttcatctcttccgactgtttcatgaaagtaatggtttgctgtttgcaacgcgcaatggtttccggagcgatcccgtgattttcaatgtagaaaaatccattcttgactgctgcggctctgattgctgaactgactttcttgcgctccgatgcatcttcggagaacatgggtgttaggtcaatgactgggatctcatccggcgtgcagtctcggggtggattggccaagacatcccgatataccgggccgagagcggtgcgaagctcgagtttggtagtcgacatggctcaatacagacaatctgttccgagcacaaatgtagctgaggctcttgccaatcgcgatacaatcaaacaacgtgccttcggtgcacctgatactaaactataaatcaacaggagctcacggtttcaagtccaggagaggtgggcgcacctaagcggggtgcgttctgggtccgattgcgacttccgatcgggatcagtgaacgatgatgatgccgtttcaggcttctcgactgcgcaccgagctttgatgcctttttctagttgctgagctgcaatatcattattcccgccctgtattttgtgtcctgatttatcttcacctatatccgaacccctacggcttccggcgggctgcgacccctccactcagcttagttaagaacagcctcaaaccataccatcatatcagcagtcgatcttcatctagaggccaaataatcggacttcgagagattaggagaagagggggccatctccagacttgatagactacaagaaacgccgaagcccgtagattgcgcggaagagacgacacaatggcgactttccctccaatcagagcatgcctcttcgacatggatggccttctccttaacacagaagacctgtatacccaatgtgccaacatagttctcagcaagcatggcagaccccctctaccctggtctatcaaggctcagatgatgggcattccggggtcaagtaacggtgatacgtttcatttgtgggccaaactaccaatatcacgggagcagttcaaagaagagcaagcagagcagcaacgtcttctatttcccaaatgccaagcccttccaggagttcaaaggctgctgaaagatctcaggagagcaaagaatactgacggatatccattgcaaatggcactcgctacaagtagcatggtcgagaacttcgctctcaagactcgacgtccttcgacctgggccttgcttcatctgatccctcataggcatcacgtccttggcgacgatccaagagtacagagcggccgtgggaaaccggctcctgatatctatctgacagcactgaaatcgatcaatgatgcattacccgaagacgtaccgaagatcacgccagcagagtgtcttgtatttgaggatggtgttataggggtcgaagcgggtcggagagctggtatgaggaccgtctgggtccctcaccctgagctcctagcagaatatgaaggtaaagaagcggaagttctcgccggcagaatcggacttttccctattggcgatgacgaacagcttggtgagattggagatggatggggtgaactgcgcctcagtctagagaacttcccctatgagaaatatggcatagtgccacgaggatcatagattggaaacagagtactagtgagaatgtcctacggacgcatagatagtctagacccccttttagtaatacatctatcacctact

SEQ ID NO: 13518 - DNA, 1128 bp, Muscodor strobelii
  misc_feature: SGI cDNA ID NO. 564433
  misc_feature: Encodes the peptide sequence at SEQ ID NO 13519
atgtcgactaccaaactcgagcttcgcaccgctctcggcccggtatatcgggatgtcttggccaatccaccccgagactgcacgccggatgagatcccagtcattgacctaacacccatgttctccgaagatgcatcggagcgcaagaaagtcagttcagcaatcagagccgcagcagtcaagaatggatttttctacattgaaaatcacgggatcgctccggaaaccattgcgcgttgcaaacagcaaaccattactttcatgaaacagtcggaagagatgaaagatctagtcgaatctcacaaacatagcaagtacttcaacggatatctgggcagtcgaaaatctcagttatcaccaagcgagtcccttgacgtgcgcgagagcttctcgtttcgttacgcccctgagctcgatcccgataacccaaaagatatctccgaattgcctgaagaagtccgtcaatggatcagggccgaggacttcgtatgggaaggcacaaagcatttgcccaatttcaaagaggattgccttgcatattggggcgcatgtctcagactttctagaaagttggtgcgcatgtttgctctttcgcttgatcttgatgagggatactgggacgacaaagttacgcatccaggggcagacggtgtgttcaattactacccgcagagaacaaagcaggaagtcgaggagaacttcgttggcatcggtagccacactgacctacaactgttcacgttgctgtggcaagatcatgtgggaggtttgcaaattttgacgcaggaaggtcaatggatcagggcacctccaattgagaatactctcgttgtgaatattggcgatttcatgatgcgtctctgcaatgatagatacatctccacagtccaccgggtaacaaacgagtctacgcaagagcgtgtctcgttgcctttcttcttcggcttgaatttcaattgcgtcgagggtgttgtcccatcgtgcacttcggagtcgaacccagcgaaatacaccccaatctgctgtggtgactggtgcttgttgaggtttaaacaaggaagagatgagttcctggaaaaggaagccaagatggcactggctcctagttccacggtcgtagctggatga

SEQ ID NO: 13519 - protein, 375 aa, Muscodor strobelii
  misc_feature: SGI Peptide ID NO. 564433
  misc_feature (213)..(316): Pfam Id: PF03171 Pfam Desc: 2OG-Fe(II) oxygenase superfamily
  misc_feature (5)..(373): NCBI GI: 156048226 Blast Desc: SS1G_08844 [Sclerotinia sclerotiorum 1980] gi|154693241|gb|EDN92979.1| SS1G_08844 [Sclerotinia sclerotiorum 1980]
  misc_feature (2)..(373): NCBI GI: 154302901 Blast Desc: BC1G_09194 [Botryotinia fuckeliana B05.10] gi|150855118|gb|EDN30310.1| BC1G_09194 [Botryotinia fuckeliana B05.10]
  misc_feature (3)..(344): NCBI GI: 261357642 Blast Desc: flavonol synthase/flavanone 3-hydroxylase [Verticillium albo-atrum VaMs.102]
  misc_feature (3)..(346): NCBI GI: 145604869 Blast Desc: MGG_07958 [Magnaporthe grisea 70-15] gi|145012776|gb|EDJ97430.1| MGG_07958 [Magnaporthe grisea 70-15]
  misc_feature (4)..(349): NCBI GI: 256723681 Blast Desc: NECHADRAFT_86761 [Nectria haematococca mpVI 77-13-4]
  misc_feature (4)..(367): NCBI GI: 145248559 Blast Desc: An13g03980 [Aspergillus niger] gi|134081284|emb|CAK41789.1| protein product [Aspergillus niger]
  misc_feature (4)..(345): NCBI GI: 255936767 Blast Desc: Pc13g09880 [Penicillium chrysogenum Wisconsin 54-1255] gi|211584030|emb|CAP92057.1| Pc13g09880 [Penicillium chrysogenum Wisconsin 54-1255]
  misc_feature (4)..(351): NCBI GI: 46139851 Blast Desc: FG11440.1 [Gibberella zeae PH-1]
  misc_feature (2)..(355): NCBI GI: 85079414 Blast Desc: NCU05038 [Neurospora crassa OR74A] gi|28917406|gb|EAA27110.1| [Neurospora crassa OR74A]
  misc_feature (32)..(351): NCBI GI: 121712170 Blast Desc: 2OG-Fe(II) oxygenase family oxidoreductase, [Aspergillus clavatus NRRL 1] gi|119401852|gb|EAW12274.1| 2OG-Fe(II) oxygenase family oxidoreductase, [Aspergillus clavatus
  misc_feature (31)..(356): SWISSPROT Homolog: EC 1.14.11.20 Deacetoxyvindoline 4-hydroxylase
MSTTKLELRTALGPVYRDVLANPPRDCTPDEIPVIDLTPMFSEDASERKKVSSAIRAAAVKNGFFYIENHGIAPETIARCKQQTITFMKQSEEMKDLVESHKHSKYFNGYLGSRKSQLSPSESLDVRESFSFRYAPELDPDNPKDISELPEEVRQWIRAEDFVWEGTKHLPNFKEDCLAYWGACLRLSRKLVRMFALSLDLDEGYWDDKVTHPGADGVFNYYPQRTKQEVEENFVGIGSHTDLQLFTLLWQDHVGGLQILTQEGQWIRAPPIENTLVVNIGDFMMRLCNDRYISTVHRVTNESTQERVSLPFFFGLNFNCVEGVVPSCTSESNPAKYTPICCGDWCLLRFKQGRDEFLEKEAKMALAPSSTVVAG

SEQ ID NO: 13520 - DNA, 3382 bp, Muscodor strobelii
  misc_feature: SGI EST ID NO. CUFF.32429.1
  misc_feature: Variant of the nucleotide sequence at SEQ ID NO 13518
agtaggtgatagatgtattactaaaagggggtctagactatctatgcgtccgtaggacattctcactagtactctgtttccaatctatgatcctcgtggcactatgccatatttctcataggggaagttctctagactgaggcgcagttcaccccatccatctccaatctcaccaagctgttcgtcatcgccaatagggaaaagtccgattctgccggcgagaacttccgcttctttaccttcatattctgctaggagctcagggtgagggacccagacggtcctcataccagctctccgacccgcttcgacccctataacaccatcctcaaatacaagacactctgctggcgtgatcttcggtacgtcttcgggtaatgcatcattgatcgatttcagtgctgtcagatagatatcaggagccggtttcccacggccgctctgtactcttggatcgtcgccaaggacgtgatgcctatgagggatcagatgaagcaaggcccaggtcgaaggacgtcgagtcttgagagcgaagttctcgaccatgctacttgtagcgagtgccatttgcaatggatatccgtcagtattctttgctctcctgagatctttcagcagcctttgaactcctggaagggcttggcatttgggaaatagaagacgttgctgctctgcttgctcttctttgaactgctcccgtgatattggtagtttggcccacaaatgaaacgtatcaccgttacttgaccccggaatgcccatcatctgagccttgatagaccagggtagagggggtctgccatgcttgctgagaactatgttggcacattgggtatacaggtcttctgtgttaaggagaaggccatccatgtcgaagaggcatgctctgattggagggaaagtcgccattgtgtcgtctcttccgcgcaatctacgggcttcggcgtttcttgtagtctatcaagtctggagatggccccctcttctcctaatctcctgaatatctctgcgtcagctttgcgcactgatcaagctacatgacaaggacctagtgcaagcgataaaacaggagccctatctcttactcgaagtccgattatttggcctctagatgaagatcgactgctgatatgatggtatggtttgaggctgttcttaactaagctgagtggaggggtcgcagcccgccggaagccgtaggggttcggatataggtgaagataaatcaggacacaaaatacagggcgggaataatgatattgcagctcagcaactagaaaaaggcatcaaagctcggtgcgcagtcgagaagcctgaaacggcatcatcatcgttcactgatcccgatcggaagtcgcaatcggacccagaacgcaccccgcttagtatcaggtgcaccgaaggcacgttgtttgattgtatcgcgattggcaagagcctcagctacatttgtgctcggaacagattgtctgtattgagccatgtcgactaccaaactcgagcttcgcaccgctctcggcccggtatatcgggatgtcttggccaatccaccccgagactgcacgccggatgagatcccagtcattgacctaacacccatgttctccgaagatgcatcggagcgcaagaaagtcagttcagcaatcagagccgcagcagtcaagaatggatttttctacattgaaaatcacgggatcgctccggaaaccattgcgcgttgcaaacagcaaaccattactttcatgaaacagtcggaagagatgaaagatctagtcgaatctcacaaacatagcaagtacttcaacggatatctgggcagtcgaaaatctcagttatcaccaagcgagtcccttgacgtgcgcgagagcttctcgtttcgttacgcccctgagctcgatcccgataacccaaaagatatctccgaattgcctgaagaagtccgtcaatggatcagggccgaggacttcgtatgggaaggcacaaagcatttgcccaatttcaaagaggattgccttgcatattggggcgcatgtctcagactttctagaaagttggtgcgcatgtttgctctttcgcttgatcttgatgagggatactgggacgacaaagttacgcatccaggggcagacggtgtgttcaattactacccgcagagaacaaagcaggaagtcgaggagaacttcgttggcatcggtagccacactgacctacaactgttcacgttgctgtggcaagatcatgtgggaggtttgcaaattttgacgcaggaaggtcaatggatcagggcacctccaattgagaatactctcgttgtgaatattggcgatttcatgatgcgtctctgcaatgatagatacatctccacagtccaccgggtaacaaacgagtctacgcaagagcgtgtctcgttgcctttcttcttcggtgtgtaccatgccgcctgatcttcatttgaccttgtttctgacagctcctaggcttgaatttcaattgcgtcgagggtgttgtcccatcgtgcacttcggagtcgaacccagcgaaatacaccccaatctgctgtggtgactgtacgctgcagtgcccttcccgtgtttagtgacgaggctgacatatcacattacagggtgcttgttgaggtttaaacaaggaagagatgagttcctggaaaaggaagccaagatggcactggctcctagttccacggtcgtagctggatgagtgtagttgtgttgatctggaggtatttggcagtttcgtggcgatgtctctgtatagctcacaatacctgctggattagctccagtacatcaaagaaggcttctcgctcgggccgcagcttctcaagacccaggccgaaaaccagggtacgacgctcctcaggatcttttctagcaatgaaacttgcaatttgtacagcatacaactgcgccaaagactcgcgttcctcgccgccacctccaagtagtgtcttcggagtgagatgcgacatgggtaaaagagtcggacttgccaatgccatgtctacagatgccggtgatggagctgacaaagggacttgtatctataaattttgatgaaattaatttgagcgccttttgaattgtaattgatagtttgaactcacccattgcgaaagtttgccttcctggcataatgtcaagaggatcctatcagcaaagaacaaagcagaggccttggttgagatgccatcgatttcaccggtcgcgtcctttgaagcagccgggaaggactcgtcgactacctgaacattgtccattctctttctccaaaatgtgaccgcttttaggtttgttcggacttagtatcgtgggaaaatgggagctatgtagttctggaattttcgaaaggtaatcggatcgaa

SEQ ID NO: 13521 - DNA, 438 bp, Muscodor strobelii
  misc_feature: SGI cDNA ID NO. 564434
  misc_feature: Encodes the peptide sequence at SEQ ID NO 13522
atggacaatgttcaggtagtcgacgagtccttcccggctgcttcaaaggacgcgaccggtgaaatcgatggcatctcaaccaaggcctctgctttgttctttgctgataggatcctcttgacattatgccaggaaggcaaactttcgcaatggatacaagtccctttgtcagctccatcaccggcatctgtagacatggcattggcaagtccgactcttttacccatgtcgcatctcactccgaagacactacttggaggtggcggcgaggaacgcgagtctttggcgcagttgtatgctgtacaaattgcaagtttcattgctagaaaagatcctgaggagcgtcgtaccctggttttcggcctgggtcttgagaagctgcggcccgagcgagaagccttctttgatgtactggagctaatccagcaggtattgtga

SEQ ID NO: 13522 - protein, 145 aa, Muscodor strobelii
  misc_feature: SGI Peptide ID NO. 564434
  misc_feature (1)..(145): NCBI GI: 46123449 Blast Desc: FG06102.1 [Gibberella zeae PH-1]
  misc_feature (1)..(145): NCBI GI: 171694119 Blast Desc: protein product [Podospora anserina] gi|170947008|emb|CAP73812.1| protein product [Podospora anserina]
  misc_feature (9)..(145): NCBI GI: 39944060 Blast Desc: MGG_04041 [Magnaporthe grisea 70-15] gi|145014764|gb|EDJ99332.1| MGG_04041 [Magnaporthe grisea 70-15]
  misc_feature (1)..(145): NCBI GI: 256731035 Blast Desc: [Nectria haematococca mpVI 77-13-4]
  misc_feature (6)..(145): NCBI GI: 85101691 Blast Desc: NCU03807 [Neurospora crassa OR74A] gi|11595626|emb|CAC18246.1| [Neurospora crassa] gi|28922737|gb|EAA31960.1| conserved [Neurospora crassa OR74A]
  misc_feature (3)..(145): NCBI GI: 261351546 Blast Desc: conserved [Verticillium albo-atrum VaMs.102]
  misc_feature (3)..(145): NCBI GI: 156048230 Blast Desc: SS1G_08846 [Sclerotinia sclerotiorum 1980] gi|154693243|gb|EDN92981.1| SS1G_08846 [Sclerotinia sclerotiorum 1980]
  misc_feature (5)..(136): NCBI GI: 154302899 Blast Desc: BC1G_09193 [Botryotinia fuckeliana B05.10] gi|150855117|gb|EDN30309.1| BC1G_09193 [Botryotinia fuckeliana B05.10]
  misc_feature (11)..(145): NCBI GI: 119173547 Blast Desc: CIMG_10221 [Coccidioides immitis RS] gi|240111855|gb|EER30000.1| CPC735_013180 [Coccidioides posadasii C735 delta SOWgp]
  misc_feature (1)..(145): NCBI GI: 145250283 Blast Desc: An15g01155 [Aspergillus niger] gi|134082173|emb|CAK42285.1| protein product [Aspergillus niger]
MDNVQVVDESFPAASKDATGEIDGISTKASALFFADRILLTLCQEGKLSQWIQVPLSAPSPASVDMALASPTLLPMSHLTPKTLLGGGGEERESLAQLYAVQIASFIARKDPEERRTLVFGLGLEKLRPEREAFFDVLELIQQVL

SEQ ID NO: 13523 - DNA, 3408 bp, Muscodor strobelii; identical to SEQ ID NO: 13517
  misc_feature: SGI EST ID NO. CUFF.32430.2
  misc_feature: Variant of the nucleotide sequence at SEQ ID NO 13521

SEQ ID NO: 13524 - DNA, 3681 bp, Muscodor strobelii
  misc_feature: SGI cDNA ID NO. 564435
  misc_feature: Encodes the peptide sequence at SEQ ID NO 13525
atgagatggccaaaaaaattcgtaccaagacagcgaaagcacaaggtccttgctcggctagcccgggaggctgctgctgagcaggaagtcgacgatgcccaaaatggtgctcaatcactccccgacagcaacaccttggagatattgcctgaggataagaaagcagcgattgaggcaagaaggacgcagctgaaagcggatttgaaaggcgacgcaaagatgagtagtaagaaagctaagcgcctggaaaaatacatcgacaagaagttgcaaggagatgaaaacagagagcttctcaaaaagctagcggccaacaagatcgatacgagtcttttcgccagcagccgtaacctgggccagtccaaggagacgaagcgtgaaaagatgagcagagccttgagagagcaccaagcaggcatctcacagcacgaagacgtcttatttgagcagaggaaggtgcttgagagtggtcatgatggcatggaggacagtgatgacgaagacgaggatgagatgaaattcgtcacgatacagacaaacaccaagtcgatacatcacgatggcgatgcagccggggttgagaacaccgaaaggaccgcatctgttccagccatagccggatctggcctcaagaggcctttggacgtagatgacgaaggcaagcctgttttacggaaaagacagaagagaggcggcgtcaagtccaagttctcgtccaaacctcaaatcaccttgatcgatcccccgccggatggtaccgacgtcgaatcggaagcagatattgacgaagaccaggattctgaggaagaatggaacgggtttagctcggctgagtcgcaacatagctcagaaggctctgaggatgagttggagactgacacgagtaacaaagactcgtcctcgtctgaagaagatgaggaagatggagagggaacctctaaatcacggtcgtccatattcaaagcatgggcacatcaagcgcgaaacgaagccctcggctacaagtccgttgctaatgacactagtgcactcaatatcccagttccgaaggatttcaaaccgcggccgatagagcatgacccattgcctttggaacttcagccatcgaaagacacagatcgcaaggcattcagtgtcacagtcaacaggacgccagaaattcaagatgctcgtctgaagctgccggttgtcgcggaggagcaaagaataatggaggcaatccacaacaacaacacagttgtgctttgcggtgctactggatctggaaagagtacccagatccctcaaatgttgttcgaagctggatatgggtctccaaattcgcctacacccggaaaaattgtggtcactcagccacgaaaggtcgctgcagtctctgttagcaatcgcgtagcgcaagaacttggagatcaatccgctgcagtcgcatatcagatccgatttgatagcactacgactaagcaaacgaagctcaagtttgtgactgatggtgttctgttgagggaaatcggtaatgacatatccctgcgcgattactctgcggtaattattgacgaggcccatgagaggagtctcaatacggatattttgatcggattgctcagtaggacagtcaagcttcgagaggaactgtctaaggaggatccaaaagtatccccactgaaactgattattatgtctgccactctccgcgtggaagatgtgacgaattcgaccttgttcccgacaccaccacccgtgttaaacgtcgaaggccgacagtatccagtaacgatacacttctcaaggagaactcagcatgactacgtggatgaagcctgcaagaaaattctgcgaggacaccgaaagttgccgccggggagcatgcttgttttcctgactggtcacgacgagatctctagattgagcaagatgttgagggacaacactaccggtctaaagacagcttctctacctaaggtccgattttctgcggatgacgggccgcttgaggctgaagatattgagtttgggatgaactcggataacatagtggatgactacaacgaatcaaattctgacgatgacgaagagcttgataaggaagaagaagcagaattcgacgtacccagcgatggccctgacgactcgacaaaagccaaaccactcaaaatgcatatcttgcccctttactctttgctcccgacaagagagcaaatgcgagttttcgaagatccacctgaaggccaccgcgctatcatcctggcgacgaacgttgctgaaacgtctcttactataccgggtgtcaaatatgtaattgactgtggacgggcaaaggaacgtaaatacgaccccgcgaatggtgtccagcgctttgaagtcgggttcataagtaaagctagcgcgaaccagaggtccggacgagcaggccgtaccggtccaggtcacgcttggcgactctactcgtccgcagtatacgaaagagatcttccagagttcgccgtccccgaaatattgaagatgcccctagaaggagtcgttttgcaactcaaagcaatgaagctccaacacgtagtcaacttcccctttcccacatctccagatcgtcaaagtctcgccaaggcagaaaagctcctccagtacctctccgcgataagcccaagcggccaagcaactcaaatcggaacgacaatggcaaaattgcccttaccgccaagattcgcaagaatattattgatcggacacctacacgactgtctgccctacgcaatcgccctagtagcaggtctctcggtcccagagatcttcatcccagagactcaagccataccagcccaagcagcagctaacgagcaatcccacaaaacaaacgaggacatagtcgaagaaaacgccctagcacaagccagacgaaaatttaacgaagcccaccgcaacttccgctcgctagacgacgcgtcagacgctatgaagatcctccaagtcgtcggggagttcgcccatgcgccctcagaggaatggtgcacgtcccgctacgtgcggtacagagccctagtcgagacgcagaacctccgcgagcaaatcacgaagcttttgcaaaaggacatcccagcatatcgcaacttaacctacaaatcacaactcgacaagccgaaacctatacaagtcacggctttgaaacagatggtagcagcaggattcattgatcaagtcgccattcgaggtgatctcgccccgacacccccagaactccatcgtaaaccccgtcgtgcaatcgacgtaccctacataccgctccaacctatccacacaagccataacgatgacctgatcgacagagcggtgtacatccacccctcgtccaatctagcgcactacagcgtagcggaactaccggattatatcgtgtactccggcctacagcgctcttcatcaggcgctctcgataaaaagcctaagacgaggatgttagcactgaccaacgtctctggggctcaactgagtgcactagctaaggggacaccgctacttagctacggaaagcccatcaaagaagtgcaagtcgcgcccggcgcaacaagcagggaagtcttcgtagttccttatctcagagctgagaacacgggtggtcagggctggcctttaccagtcaagaaggtaacgcagaagagggtgtctgggaagggatgggtgacggagtag

SEQ ID NO: 13525 - protein, 1226 aa, Muscodor strobelii
  misc_feature: SGI Peptide ID NO. 564435
  misc_feature (1019)..(1168): Pfam Id: PF07717 Pfam Desc: Domain of function (DUF1605)
  misc_feature (867)..(986): Pfam Id: PF04408 Pfam Desc: Helicase associated domain (HA2)
  misc_feature (712)..(806): Pfam Id: PF00271 Pfam Desc: Helicase conserved C-terminal domain
  misc_feature (6)..(1226): NCBI GI: 46123447 Blast Desc: FG06101.1 [Gibberella zeae PH-1]
  misc_feature (6)..(1226): NCBI GI: 39944058 Blast Desc: MGG_04040 [Magnaporthe grisea 70-15] gi|145014763|gb|EDJ99331.1| MGG_04040 [Magnaporthe grisea 70-15]
  misc_feature (4)..(1226): NCBI GI: 116198205 Blast Desc: CHGG_07258 [Chaetomium globosum CBS 148.51] gi|88178537|gb|EAQ86005.1| CHGG_07258 [Chaetomium globosum CBS 148.51]
  misc_feature (6)..(1226): NCBI GI: 85101696 Blast Desc: NCU03808 [Neurospora crassa OR74A] gi|11595627|emb|CAC18247.1| conserved [Neurospora crassa] gi|28922738|gb|EAA31961.1| NCU03808 [Neurospora crassa OR74A]
  misc_feature (329)..(1226): NCBI GI: 261351547 Blast Desc: ATP-dependent RNA helicase DHX8 [Verticillium albo-atrum VaMs.102]
  misc_feature (314)..(1226): NCBI GI: 156048220 Blast Desc: SS1G_08841 [Sclerotinia sclerotiorum 1980] gi|154693238|gb|EDN92976.1| SS1G_08841 [Sclerotinia sclerotiorum 1980]
  misc_feature (314)..(1226): NCBI GI: 154302907 Blast Desc: BC1G_09197 [Botryotinia fuckeliana B05.10] gi|150855121|gb|EDN30313.1| BC1G_09197 [Botryotinia fuckeliana B05.10]
  misc_feature (6)..(1226): NCBI GI: 159122431 Blast Desc: DEAH-box RNA helicase (Dhr1), [Aspergillus fumigatus A1163]
  misc_feature (6)..(1226): NCBI GI: 70984258 Blast Desc: DEAH-box RNA helicase (Dhr1) [Aspergillus fumigatus Af293] gi|66845272|gb|EAL85607.1| DEAH-box RNA helicase (Dhr1), [Aspergillus fumigatus Af293]
  misc_feature (6)..(1226): NCBI GI: 119467664 Blast Desc: DEAH-box RNA helicase (Dhr1), [Neosartorya fischeri NRRL 181] gi|119405790|gb|EAW15741.1| DEAH-box RNA helicase (Dhr1), [Neosartorya fischeri NRRL 181]
MRWPKKFVPRQRKHKVLARLAREAAAEQEVDDAQNGAQSLPDSNTLEILPEDKKAAIEARRTQLKADLKGDAKMSSKKAKRLEKYIDKKLQGDENRELLKKLAANKIDTSLFASSRNLGQSKETKREKMSRALREHQAGISQHEDVLFEQRKVLESGHDGMEDSDDEDEDEMKFVTIQTNTKSIHHDGDAAGVENTERTASVPAIAGSGLKRPLDVDDEGKPVLRKRQKRGGVKSKFSSKPQITLIDPPPDGTDVESEADIDEDQDSEEEWNGFSSAESQHSSEGSEDELETDTSNKDSSSSEEDEEDGEGTSKSRSSIFKAWAHQARNEALGYKSVANDTSALNIPVPKDFKPRPIEHDPLPLELQPSKDTDRKAFSVTVNRTPEIQDARLKLPVVAEEQRIMEAIHNNNTVVLCGATGSGKSTQIPQMLFEAGYGSPNSPTPGKIVVTQPRKVAAVSVSNRVAQELGDQSAAVAYQIRFDSTTTKQTKLKFVTDGVLLREIGNDISLRDYSAVIIDEAHERSLNTDILIGLLSRTVKLREELSKEDPKVSPLKLIIMSATLRVEDVTNSTLFPTPPPVLNVEGRQYPVTIHFSRRTQHDYVDEACKKILRGHRKLPPGSMLVFLTGHDEISRLSKMLRDNTTGLKTASLPKVRFSADDGPLEAEDIEFGMNSDNIVDDYNESNSDDDEELDKEEEAEFDVPSDGPDDSTKAKPLKMHILPLYSLLPTREQMRVFEDPPEGHRAIILATNVAETSLTIPGVKYVIDCGRAKERKYDPANGVQRFEVGFISKASANQRSGRAGRTGPGHAWRLYSSAVYERDLPEFAVPEILKMPLEGVVLQLKAMKLQHVVNFPFPTSPDRQSLAKAEKLLQYLSAISPSGQATQIGTTMAKLPLPPRFARILLIGHLHDCLPYAIALVAGLSVPEIFIPETQAIPAQAAANEQSHKTNEDIVEENALAQARRKFNEAHRNFRSLDDASDAMKILQVVGEFAHAPSEEWCTSRYVRYRALVETQNLREQITKLLQKDIPAYRNLTYKSQLDKPKPIQVTALKQMVAAGFIDQVAIRGDLAPTPPELHRKPRRAIDVPYIPLQPIHTSHNDDLIDRAVYIHPSSNLAHYSVAELPDYIVYSGLQRSSSGALDKKPKTRMLALTNVSGAQLSALAKGTPLLSYGKPIKEVQVAPGATSREVFVVPYLRAENTGGQGWPLPVKKVTQKRVSGKGWVTE

SEQ ID NO: 13526 - DNA, 3730 bp, Muscodor strobelii
  misc_feature: SGI EST ID NO. CUFF.32374.0
  misc_feature: Variant of the nucleotide sequence at SEQ ID NO 13524
aaaaaattcgtaccaagacagcgaaagcacaaggtccttgctcggctagcccgggaggctgctgctgagcaggaagtcgacgatgcccaaaatggtgctcaatcactccccgacagcaacaccttggagatattgcctgaggataagaaagcagcgattgaggcaagaaggacgcagctgaaagcggatttgaaaggcgacgcaaagatgagtagtaagaaagctaagcgcctggaaaaatacatcgacaagaagttgcaaggagatgaaaacagagagcttctcaaaaagctagcggccaacaagatcgatacgagtcttttcgccagcagccgtaacctgggccagtccaaggagacgaagcgtgaaaagatgagcagagccttgagagagcaccaagcaggcatctcacagcacgaagacgtcttatttgagcagaggaaggtgcttgagagtggtcatgatggcatggaggacagtgatgacgaagacgaggatgagatgaaattcgtcacgatacagacaaacaccaagtcgatacatcacgatggcgatgcagccggggttgagaacaccgaaaggaccgcatctgttccagccatagccggatctggcctcaagaggcctttggacgtagatgacgaaggcaagcctgttttacggaaaagacagaagagaggcggcgtcaagtccaagttctcgtccaaacctcaaatcaccttgatcgatcccccgccggatggtaccgacgtcgaatcggaagcagatattgacgaagaccaggattctgaggaagaatggaacgggtttagctcggctgagtcgcaacatagctcagaaggctctgaggatgagttggagactgacacgagtaacaaagactcgtcctcgtctgaagaagatgaggaagatggagagggaacctctaaatcacggtcgtccatattcaaagcatgggcacatcaagcgcgaaacgaagccctcggctacaagtccgttgctaatgacactagtgcactcaatatcccagttccgaaggatttcaaaccgcggccgatagagcatgacccattgcctttggaacttcagccatcgaaagacacagatcgcaaggcattcagtgtcacagtcaacaggacgccagaaattcaagatgctcgtctgaagctgccggttgtcgcggaggagcaaagaataatggaggcaatccacaacaacaacacagttgtgctttgcggtgctactggatctggaaagagtacccagatccctcaaatgttgttcgaagctggatatgggtctccaaattcgcctacacccggaaaaattgtggtcactcagccacgaaaggtcgctgcagtctctgttagcaatcgcgtagcgcaagaacttggagatcaatccgctgcagtcgcatatcagatccgatttgatagcactacgactaagcaaacgaagctcaagtttgtgactgatggtgttctgttgagggaaatcggtaatgacatatccctgcgcgattactctgcggtaattattgacgaggcccatgagaggagtctcaatacggatattttgatcggattgctcagtaggacagtcaagcttcgagaggaactgtctaaggaggatccaaaagtatccccactgaaactgattattatgtctgccactctccgcgtggaagatgtgacgaattcgaccttgttcccgacaccaccacccgtgttaaacgtcgaaggccgacagtatccagtaacgatacacttctcaaggagaactcagcatgactacgtggatgaagcctgcaagaaaattctgcgaggacaccgaaagttgccgccggggagcatgcttgttttcctgactggtcacgacgagatctctagattgagcaagatgttgagggacaacactaccggtctaaagacagcttctctacctaaggtccgattttctgcggatgacgggccgcttgaggctgaagatattgagtttgggatgaactcggataacatagtggatgactacaacgaatcaaattctgacgatgacgaagagcttgataaggaagaagaagcagaattcgacgtacccagcgatggccctgacgactcgacaaaagccaaaccactcaaaatgcatatcttgcccctttactctttgctcccgacaagagagcaaatgcgagttttcgaagatccacctgaaggccaccgcgctatcatcctggcgacgaacgttgctgaaacgtctcttactataccgggtgtcaaatatgtaattgactgtggacgggcaaaggaacgtaaatacgaccccgcgaatggtgtccagcgctttgaagtcgggttcataagtaaagctagcgcgaaccagaggtccggacgagcaggccgtaccggtccaggtcacgcttggcgactctactcgtccgcagtatacgaaagagatcttccagagttcgccgtccccgaaatattgaagatgcccctagaaggagtcgttttgcaactcaaagcaatgaagctccaacacgtagtcaacttcccctttcccacatctccagatcgtcaaagtctcgccaaggcagaaaagctcctccagtacctctccgcgataagcccaagcggccaagcaactcaaatcggaacgacaatggcaaaattgcccttaccgccaagattcgcaagaatattattgatcggacacctacacgactgtctgccctacgcaatcgccctagtagcaggtctctcggtcccagagatcttcatcccagagactcaagccataccagcccaagcagcagctaacgagcaatcccacaaaacaaacgaggacatagtcgaagaaaacgccctagcacaagccagacgaaaatttaacgaagcccaccgcaacttccgctcgctagacgacgcgtcagacgctatgaagatcctccaagtcgtcggggagttcgcccatgcgccctcagaggaatggtgcacgtcccgctacgtgcggtacagagccctagtcgagacgcagaacctccgcgagcaaatcacgaagcttttgcaaaaggacatcccagcatatcgcaacttaacctacaaatcacaactcgacaagccgaaacctatacaagtcacggctttgaaacagatggtagcagcaggattcattgatcaagtcgccattcgaggtgatctcgccccgacacccccagaactccatcgtaaaccccgtcgtgcaatcgacgtaccctacataccgctccaacctatccacacaagccataacgatgacctgatcgacagagcggtgtacatccacccctcgtccaatctagcgcactacagcgtagcggaactaccggattatatcgtgtactccggcctacagcgctcttcatcaggcgctctcgataaaaagcctaagacgaggatgttagcactgaccaacgtctctggggctcaactgagtgcactagctaaggggacaccgctacttagctacggaaagcccatcaaagaagtgcaagtcgcgcccggcgcaacaagcagggaagtcttcgtagttccttatctcagagctgagaacacgggtggtcagggctggcctttaccagtcaagaaggtaacgcagaagagggtgtctgggaagggatgggtgacggagtagagtaggttatgtgttagatgttagagtatgctgtcgtataatcaagaggataagcaaccga

SEQ ID NO: 13527 - DNA, 372 bp, Muscodor strobelii
  misc_feature: SGI cDNA ID NO. 564436
  misc_feature: Reduced expression when VOC is produced
  misc_feature: Encodes the peptide sequence at SEQ ID NO 13528
atgcagcagccgttctcgtcgtccaaggtgacggtggagtacttcgacccgcacgacgtcttcaagctcgtggcgccgggcctgatgccgcgtctgccgctgcgcaacctgcactggcagtcgcacgcggggcctctgcgctccatcgacaccctccacgtcgagctcaacagcgccgccgccgccgcccccgccactggcaccaacgtcgtcgacggcagctctgtcgtctctcccgtcgcctctccgccgccgtcgtcctcccacaaccgccccgacagcgatggattccagacgcagcagctcggttctgctgcgaaccccaagcagtccaccgacaccctagacccaccaccatcaccacgccaatag

SEQ ID NO: 13528 - protein, 123 aa, Muscodor strobelii
  misc_feature: SGI Peptide ID NO. 564436
  misc_feature (1)..(121): NCBI GI: 171680709 Blast Desc: protein product [Podospora anserina] gi|170939982|emb|CAP65208.1| protein product [Podospora anserina]
  misc_feature (1)..(122): NCBI GI: 164426965 Blast Desc: NCU02225 [Neurospora crassa OR74A] gi|157071549|gb|EAA30402.2| conserved [Neurospora crassa OR74A]
  misc_feature (1)..(118): NCBI GI: 256727268 Blast Desc: NECHADRAFT_90679 [Nectria haematococca mpVI 77-13-4]
  misc_feature (1)..(123): NCBI GI: 261353933 Blast Desc: conserved [Verticillium albo-atrum VaMs.102]
  misc_feature (1)..(106): NCBI GI: 46121351 Blast Desc: FG05054.1 [Gibberella zeae PH-1]
  misc_feature (11)..(103): NCBI GI: 116200780 Blast Desc: CHGG_10935 [Chaetomium globosum CBS 148.51] gi|88175649|gb|EAQ83117.1| CHGG_10935 [Chaetomium globosum CBS 148.51]
  misc_feature (1)..(123): NCBI GI: 145616616 Blast Desc: MGG_01969 [Magnaporthe grisea 70-15] gi|145009222|gb|EDJ93933.1| MGG_01969 [Magnaporthe grisea 70-15]
  misc_feature (7)..(79): NCBI GI: 189195232 Blast Desc: conserved [Pyrenophora tritici-repentis Pt-1C-BFP] gi|187979833|gb|EDU46459.1| conserved [Pyrenophora tritici-repentis Pt-1C-BFP]
  misc_feature (4)..(56): NCBI GI: 225560123 Blast Desc: conserved [Ajellomyces capsulatus G186AR]
  misc_feature (4)..(56): NCBI GI: 240278869 Blast Desc: TMEM1 family protein [Ajellomyces capsulatus H143]
  misc_feature: Useful for introducing or modulating the production of volatile compounds
MQQPFSSSKVTVEYFDPHDVFKLVAPGLMPRLPLRNLHWQSHAGPLRSIDTLHVELNSAAAAAPATGTNVVDGSSVVSPVASPPPSSSHNRPDSDGFQTQQLGSAANPKQSTDTLDPPPSPRQ

SEQ ID NO: 13529 - DNA, 857 bp, Muscodor strobelii
  misc_feature: SGI EST ID NO. CUFF.32377.0
  misc_feature: Variant of the nucleotide sequence at SEQ ID NO 13527
gttagagtgtatacctggttgtgatcaacattcagcacaacgattacctccataaatatgacaatacacctcatcagtgcaggccgagtttatgataggtacaattctgtagtcccatttcccaagtcgatctccttcgcattttgccctgatacttaatgagcatgttgtcacgggtgagaatcgtgtatactgccgtacctgggggccgatgacgttgagggtaactacctcctcgtacgtcaattgcagggtagcatatcccagtaagttgaagctgcgtttccacaaacaacagctcccttcactgaaacatgcgagtcggaagggcggtctctggcgtacatgacgacgcgaccgtgtattttgactaaatgaatgcctattgcctaatgcctagactgctgctcgaatcagtataagaggcattgcacgagacgttttaggtttatctcgacagcgacttggacttggacggagacgactgaagcgatgagttgtccgcgatgcagcagccgttctcgtcgtccaaggtgacggtggagtacttcgacccgcacgacgtcttcaagctcgtggcgccgggcctgatgccgcgtctgccgctgcgcaacctgcactggcagtcgcacgcggggcctctgcgctccatcgacaccctccacgtcgagctcaacagcgccgccgccgccgcccccgccactggcaccaacgtcgtcgacggcagctctgtcgtctctcccgtcgcctctccgccgccgtcgtcctcccacaaccgccccgacagcgatggattccagacgcagcagctcggttctgctgcgaaccccaagcagtccaccgacaccctagaccca

SEQ ID NO: 13530 - DNA, 1767 bp, Muscodor strobelii
  misc_feature: SGI cDNA ID NO. 564437
  misc_feature: Encodes the peptide sequence at SEQ ID NO 13531
atggaacgttttgactgcgtagttatcggcgccggcttgaacgggctggccgctgcacgacaatttcactacacacagcccgaatgttcactagctatcttcgatgctcagtcgtcactcggcggaacgtgggcagaggaacggttatatcctggcctgaaaagcaataatctcctcggcacttatgagtatccaggatttcccatgagcagtgataaattcgatgtgaagcctcgcgagcatatcaaaggagcgtcgcttcattcttacctgaaagcatacgccaaagaaaatggtctcaccgatctcatccatcttcgaaccaaggtgctgtctgcagagcatcaggaaacagacgacggaggctggattttgatcgtccaggcatccggcgaaagagacagacaggtatttgcccgcaagctgattcttgcgacgggtctcacctccgatgcattcctccccgagtttgctggccaagatgactttgacggccgaatatttcatgccaagcacttccaacagaacagtgactctttgcgaacagcttcagccattacggtattcggtggctccaaatttgcgtgggatgccgtttatgcttatgccctggctggggtaaaggtgaattgggtgatccgttctagcggccatggcccatgctggattgccagcccttacgcaacgccattgaaactatggatggaaaaactcgctaatacccgcctcatcacctggttcagcccttgcatctggggtgaagcggacggctatagttggatcaggcgtctctttcacagtacgaccttgggacgatggcttgtggacttcttctggaatacgatgaagagcgacatcatggcacagaatggatatgatgcacatccagaggttgccaagctcaagccttggacggaggccatgttcgtaggcgacagcttcagcgtgctcaactacgaacaagacatcttttcgctcgtgaagagcgacatggtggatgtccatgtgggtgagattgatcacctcagcgctaaaagggtgcacttggcggacggcacaagttttgagtcggacgtgcttctttgcaacacaggatggaagcatgtgccagccatcaagttcttgccggaaggcattgcggcggaactgggcattccccatgcaccgacggaaacggcgccggtgcaggacctagcaaaccaaaagagcttatttgaagcagccgacaaagagatcatgaagcgcttcccgcgtctccagcggcagccggtgtggaatgcgcactacaagccgatgacagagcagaagggcatcgccagcacagacgaagtaacaccgtacacgccactcacgccttacatgctgtaccggttcctggtgccggcgtccccgcggtttctagctacgcgggacatcgcgttcgcgggaatgcagtcgaacttcagcaacgcgatcacggcgcacatgacgggtttgtggatcagcgcattcttctcgggccagttggcggtagaggcaaacgacgcgacactgtaccagacagtgctgcacaatcgctggggcaagtggcggtacccgacagactggggaaacaagcgaccgagcttcacgttcgacgcggtgccatactttgacttgttacagagggacctggggctcgacccgcatcgcaagggcggatggttcgcagagttgacgcaagcatacggtccggatgactatcaagacattgtggacgagtggctgcggaagcagaaaagcaactga

SEQ ID NO: 13531 - protein, 588 aa, Muscodor strobelii
  misc_feature: SGI Peptide ID NO. 564437
  misc_feature (1)..(584): NCBI GI: 261202360 Blast Desc: conserved [Ajellomyces dermatitidis SLH14081] gi|239590491|gb|EEQ73072.1| conserved [Ajellomyces dermatitidis SLH14081] gi|239612218|gb|EEQ89205.1| conserved [Ajellomyces
  misc_feature (1)..(588): NCBI GI: 256731213 Blast Desc: NECHADRAFT_96476 [Nectria haematococca mpVI 77-13-4]
  misc_feature (11)..(588): NCBI GI: 154285492 Blast Desc: conserved [Ajellomyces capsulatus NAm1] gi|150407182|gb|EDN02723.1| conserved [Ajellomyces capsulatus NAm1]
  misc_feature (11)..(576): NCBI GI: 240277706 Blast Desc: conserved [Ajellomyces capsulatus H143]
  misc_feature (11)..(576): NCBI GI: 225557159 Blast Desc: conserved [Ajellomyces capsulatus G186AR]
  misc_feature (1)..(585): NCBI GI: 256725724 Blast Desc: NECHADRAFT_81737 [Nectria haematococca mpVI 77-13-4]
  misc_feature (1)..(584): NCBI GI: 116195442 Blast Desc: CHGG_04319 [Chaetomium globosum CBS 148.51] gi|88180232|gb|EAQ87700.1| CHGG_04319 [Chaetomium globosum CBS 148.51]
  misc_feature (1)..(583): NCBI GI: 171691506 Blast Desc: protein product [Podospora anserina] gi|170945701|emb|CAP71814.1| protein product [Podospora anserina]
  misc_feature (1)..(584): NCBI GI: 164425185 Blast Desc: NCU06296 [Neurospora crassa OR74A] gi|157070823|gb|EAA33322.2| [Neurospora crassa OR74A]
  misc_feature (1)..(587): NCBI GI: 145606372 Blast Desc: MGG_02364 [Magnaporthe grisea 70-15] gi|145014052|gb|EDJ98693.1| MGG_02364 [Magnaporthe grisea 70-15]
MERFDCVVIGAGLNGLAAARQFHYTQPECSLAIFDAQSSLGGTWAEERLYPGLKSNNLLGTYEYPGFPMSSDKFDVKPREHIKGASLHSYLKAYAKENGLTDLIHLRTKVLSAEHQETDDGGWILIVQASGERDRQVFARKLILATGLTSDAFLPEFAGQDDFDGRIFHAKHFQQNSDSLRTASAITVFGGSKFAWDAVYAYALAGVKVNWVIRSSGHGPCWIASPYATPLKLWMEKLANTRLITWFSPCIWGEADGYSWIRRLFHSTTLGRWLVDFFWNTMKSDIMAQNGYDAHPEVAKLKPWTEAMFVGDSFSVLNYEQDIFSLVKSDMVDVHVGEIDHLSAKRVHLADGTSFESDVLLCNTGWKHVPAIKFLPEGIAAELGIPHAPTETAPVQDLANQKSLFEAADKEIMKRFPRLQRQPVWNAHYKPMTEQKGIASTDEVTPYTPLTPYMLYRFLVPASPRFLATRDIAFAGMQSNFSNAITAHMTGLWISAFFSGQLAVEANDATLYQTVLHNRWGKWRYPTDWGNKRPSFTFDAVPYFDLLQRDLGLDPHRKGGWFAELTQAYGPDDYQDIVDEWLRKQKSN

SEQ ID NO: 13532 - DNA, 2847 bp, Muscodor strobelii
  misc_feature: SGI EST ID NO. CUFF.32381.0
  misc_feature: Variant of the nucleotide sequence at SEQ ID NO 13530
actaaatgaagtaatatctggagcatgcaaccgttatattgcagatgcccattcccgtgctgagaccagtcgaccggggggtagcatggcatggctaccgtcgcatcggtatgcatgctactttgacacacaattccgatattgttggctcgttcatcgtgtagcggcgccagtggatgatgcaaggaaacgaaaagtacctctcgtcagggcaccttcacatcatccggaccccggcaggcatcgatgtaactccgtggcaaagggaatcgagttcgtcctactagtgcaagcagagacctcacgcgtgaaaaggtgaccatcggaaatctcgcacgtaggaagcgaatgagtgttctgcggttatagtttcatcttctggttcaatatggaacgttttgactgcgtagttatcggcgccggcttgaacgggctggccgctgcacgacaatttcactacacacagcccgaatgttcactagctatcttcgatgctcagtcgtcactcggcggaacgtgggcagaggaacggttatatcctggcctgaaaagcaataatctcctcggcacttatgagtatccaggatttcccatgagcagtgataaattcgatgtgaagcctcgcgagcatatcaaaggagcgtcgcttcattcttacctgaaagcatacgccaaagaaaatggtctcaccgatctcatccatcttcgaaccaaggtgctgtctgcagagcatcaggaaacagacgacggaggctggattttgatcgtccaggcatccggcgaaagagacagacaggtatttgcccgcaagctgattcttgcgacgggtctcacctccgatgcattcctccccgagtttgctggccaagatgactttgacggccgaatatttcatgccaagcacttccaacagaacagtgactctttgcgaacagcttcagccattacggtattcggtggctccaaatttgcgtgggatgccgtttatgcttatgccctggctggggtaaaggtgaattgggtgatccgttctagcggccatggcccatgctggattgccagcccttacgcaacgccattgaaactatggatggaaaaactcgctaatacccgcctcatcacctggttcagcccttgcatctggggtgaagcggacggctatagttggatcaggcgtctctttcacagtacgaccttgggacgatggcttgtggacttcttctggaatacgatgaagagcgacatcatggcacagaatggatatgatgcacatccagaggttgccaagctcaagccttggacggaggccatgttcgtaggcgacagcttcagcgtgctcaactacgaacaagacatcttttcgctcgtgaagagcgacatggtggatgtccatgtgggtgagattgatcacctcagcgctaaaagggtgcacttggcggacggcacaagttttgagtcggacgtgcttctttgcaacacaggatggaagcatgtgccagccatcaagttcttgccggaaggcattgcggcggaactgggcattccccatgcaccgacggaaacggcgccggtgcaggacctagcaaaccaaaagagcttatttgaagcagccgacaaagagatcatgaagcgcttcccgcgtctccagcggcagccggtgtggaatgcgcactacaagccgatgacagagcagaagggcatcgccagcacagacgaagtaacaccgtacacgccactcacgccttacatgctgtaccggttcctggtgccggcgtccccgcggtttctagctacgcgggacatcgcgttcgcgggaatgcagtcgaacttcagcaacgcgatcacggcgcacatgacgggtttgtggatcagcgcattcttctcgggccagttggcggtagaggcaaacgacgcgacactgtaccagacagtgctgcacaatcgctggggcaagtggcggtacccgacagactggggaaacaagcgaccgagcttcacgttcgacgcggtgccatactttgacttgttacagagggacctggggctcgacccgcatcgcaagggcggatggttcgcagagttgacgcaagcatacggtccggatgactatcaagacattgtggacgagtggctgcggaagcagaaaagcaactgaagccgggggtctgcgtttgactttggtgttatgggggtttctagatctgggttgcatgtttcgggagggcgtcttctcgggttctctttattctccccaagtcgtctcgtataagccacagagaaatcaagtctcaggcgacacgagctctctctatatatgtatgtagatggggttcttatcacatatacctttttgaaatgcgttgagtcaagcagtccaaggtacggactgacgaggagaatgttggttaacaggcacgtgctcgtgtcgtatcgtcgacccctatttggtaattctgtacgagtaccgcgcacatacagtatcctcgcaagaattcgacgttttatgagatagaattgggcaatacttgatcgttcatatatcaacttctttaaggctatccggacaagtcataaacagcgacatgaagtgaaattagctgatagttggtgcttattgagaatggccactatgaaatcaactaaacatcaggcgaggcagtaaagaggaagacggttcatttcactcatcctaaagaggacttaacaaggagtggtggtggtgatagatacgtagacgcagttcgtcaacatcgctggatgatttagtaaagcaccagcttgtgtgaagaccaaacgaataggatgcttgatctatcagacattcgccctacataattcgcatttcat

SEQ ID NO: 13533 - DNA, 2703 bp, Muscodor strobelii
  misc_feature: SGI cDNA ID NO. 564438
  misc_feature: Encodes the peptide sequence at SEQ ID NO 13534
atgacatctaacccagcgtcagaccctcttctctcgccgcccacacatcaagctctcgtcgtcagatctctcacgagtatcacatcggcagagcgcaagaggatccttgaagatgtcgaatacaatatattcgcctttcctgcgggactcgttgcctgtgactatctttctgattcaggcacctcggcgatgacagacctgcagtggtccgcattgataagaggagacgagagctatggtcgcaactggggatactattgtcttcttgagacatgccgagatgtatttgagcgggggaatgatcggcagtacgcagctcatagcatcgtgataggagccgccacccccgacttctatcggagcaagctgttgacaccgtacgaaggtggcttcgtaaacggcgggccacatcaactcgagagacccaatttcttcattgtcccacagggccgctgtgcggaattcttgctcttctctacactgaaggatgtaataggactgcagggctcgagcgcggccaaggtagtcgtaagcaacggcttctttgacacaacgggggcgaatgccgcagccgcaggcttcggtcttcaagtctttacacaacccgggcttactgacccgtttcccgaggaacttatcgggaagaataatccgttcaagggtaacctcgatgtggccgcaacagctgcctatctagatgaaaatcccggccaggtctgcatgatcttgatgaccattaccaacaattgggctgccgcgcagcccgtatctatggccaatatccgtgaagccgctctgctcgctcgtaaacattcgataccccttttctttgatgcttgccgttttgccgagaacgcatggtttatacgcgaattcgaagatggttatgcggaaaagacgattcctgaaattgtccaggagatgttcacgtacgccgaaggtttcacgattagtctcaagaaggacggtctttcgaacatgggcggtattctcagtttcaaagacaagggcttatttgctcagcaatacgaaggtatcggccatctcctgaaggagcgccaaattctattctatggtaacgattcctatggtggtatgagcggacgcgatctcatgacgaccaccgtaggtctttatgaagtcacaaaagaaccatatcttcgcagtcgtatgaaccaagtaaggatgttcgcgcagacactacttgacaacggtatttcggttctctcgcctcctggcggtcatgccgtataccttgacatggacgacttcttctatggctgtggcagatccccaggcgattttcctgctgttggtttcacactagagctcctcaaagactatggtatccgagcagccgaggccggaccattcgggtgggaatgggacaaaaagccacctgagttgcaagctacaataccgaacctcgtccgctttgcggtgccacgccatgtgctttccgatcaacatatcaattacacggttgcagccatcaaggagctacacaacaggcggcacatgatcccaaatgcgaaaattacaagaggaaaagatatgagactgcgccacttcgcggccggcctggcacctgttcctgttgaccacaaaaggacgactacgtatgtagcagaggcaaaacgacaaatatcgcttctgtctcgagcactggatcaagataatgcaaaagacggcttgatactcggcgctttggatgtgtcgacgcatggatggggagatgctcgaattcccgaggagctggattcctctcggtggattccttcggtcgctaatgatcactcgccctttgaatactcagtggtgctagagcagaggactggagacgccgagttgcgctttctaatcgaagcccaaccggcttccggcggaaccaagggagacctagccgaacttcagactgaagcattggcactaacggagcgcattgcttctgaatatagctcgagggtttctcttgagcgattcaatgccatccgtgacttgttcatgcccagcaagcccgagggtttctttgcggcatggcacagctacgcttcaggcaagaatggcccggagtggaagatctaccttaatccgggcagtggtgacagcgcagtagttgccacgcgtgcagcattcgaacgcatcgggctgggcgagtcatggtccattgtcgaaagcataatgcagccaggcgagtcggtcatctacttctcgctggatctttcatctgacgttgagcacgcgcgtgccaaagtgtatatcaatcacggaacgacgacggcatcaaaggtagctgcagcgcaagcagccatctgcccgcatgccaactcatacgagatccagagattctgtgagatcatgggcgacggttcactgggaccatacgaaggcaagccgttgctatcgtgctttgctttcaccagcgcagcgcccagagagcccgtgggtacggtgcactttcccatcagcgcatatgcttcaaccgacaaggagatgcagaggcgcatcgaacggtatatggcggctgtggcggtatcaccggtgtacagacagcgatacagaaaaatgatcagcgcggtgcaacgtcggccgctggaccggggagccggaatccacgcgtgggtgagtctgaagcaggcagctggcgccaagcaatcgaacacgttttacatctcgccgggtttgtttgtgagacccgaataa

SEQ ID NO: 13534 - protein, 900 aa, Muscodor strobelii
  misc_feature: SGI Peptide ID NO. 564438
  misc_feature (54)..(497): Pfam Id: PF01212 Pfam Desc: Beta-eliminating lyase
  misc_feature (109)..(896): NCBI GI: 171677516 Blast Desc: protein product [Podospora anserina] gi|170936826|emb|CAP61484.1| protein product [Podospora anserina]
  misc_feature (14)..(531): NCBI GI: 167379521 Blast Desc: tryptophanase [Entamoeba dispar SAW760] gi|165902966|gb|EDR28653.1| tryptophanase, [Entamoeba dispar SAW760]
  misc_feature (14)..(531): NCBI GI: 67465818 Blast Desc: tryptophanase [Entamoeba histolytica HM-1:IMSS] gi|56465420|gb|EAL43678.1| tryptophanase, [Entamoeba histolytica HM-1:IMSS]
  misc_feature (11)..(530): NCBI GI: 225405692 Blast Desc: CLOSTASPAR_04913 [Clostridium asparagiforme DSM 15981] gi|225042793|gb|EEG53039.1| CLOSTASPAR_04913 [Clostridium asparagiforme DSM 15981]
  misc_feature (14)..(530): NCBI GI: 212697216 Blast Desc: ANHYDRO_01784 [Anaerococcus hydrogenalis DSM 7454] gi|212675665|gb|EEB35272.1| ANHYDRO_01784 [Anaerococcus hydrogenalis DSM 7454]
  misc_feature (14)..(536): NCBI GI: 256846601 Blast Desc: tyrosine phenol-lyase [Fusobacterium sp. 3_1_36A2] gi|256718370|gb|EEU31926.1| tyrosine phenol-lyase [Fusobacterium sp. 3_1_36A2]
  misc_feature (14)..(536): NCBI GI: 260495573 Blast Desc: tyrosine phenol-lyase [Fusobacterium sp. 3_1_33] gi|260196915|gb|EEW94437.1| tyrosine phenol-lyase [Fusobacterium sp. 3_1_33]
  misc_feature (9)..(532): NCBI GI: 167772068 Blast Desc: ANACOL_03442 [Anaerotruncus colihominis DSM 17241] gi|167665866|gb|EDS09996.1| ANACOL_03442 [Anaerotruncus colihominis DSM 17241]
  misc_feature (14)..(536): NCBI GI: 237743707 Blast Desc: tryptophanase [Fusobacterium sp. 7_1] gi|229432738|gb|EEO42950.1| tryptophanase [Fusobacterium sp. 7_1]
  misc_feature (14)..(536): NCBI GI: 237741426 Blast Desc: tryptophanase [Fusobacterium sp. 4_1_13] gi|229430958|gb|EEO41170.1| tryptophanase [Fusobacterium sp. 4_1_13]
  misc_feature (21)..(530): SWISSPROT Homolog: EC 4.1.99.1 Tryptophanase
MTSNPASDPLLSPPTHQALVVRSLTSITSAERKRILEDVEYNIFAFPAGLVACDYLSDSGTSAMTDLQWSALIRGDESYGRNWGYYCLLETCRDVFERGNDRQYAAHSIVIGAATPDFYRSKLLTPYEGGFVNGGPHQLERPNFFIVPQGRCAEFLLFSTLKDVIGLQGSSAAKVVVSNGFFDTTGANAAAAGFGLQVFTQPGLTDPFPEELIGKNNPFKGNLDVAATAAYLDENPGQVCMILMTITNNWAAAQPVSMANIREAALLARKHSIPLFFDACRFAENAWFIREFEDGYAEKTIPEIVQEMFTYAEGFTISLKKDGLSNMGGILSFKDKGLFAQQYEGIGHLLKERQILFYGNDSYGGMSGRDLMTTTVGLYEVTKEPYLRSRMNQVRMFAQTLLDNGISVLSPPGGHAVYLDMDDFFYGCGRSPGDFPAVGFTLELLKDYGIRAAEAGPFGWEWDKKPPELQATIPNLVRFAVPRHVLSDQHINYTVAAIKELHNRRHMIPNAKITRGKDMRLRHFAAGLAPVPVDHKRTTTYVAEAKRQISLLSRALDQDNAKDGLILGALDVSTHGWGDARIPEELDSSRWIPSVANDHSPFEYSVVLEQRTGDAELRFLIEAQPASGGTKGDLAELQTEALALTERIASEYSSRVSLERFNAIRDLFMPSKPEGFFAAWHSYASGKNGPEWKIYLNPGSGDSAVVATRAAFERIGLGESWSIVESIMQPGESVIYFSLDLSSDVEHARAKVYINHGTTTASKVAAAQAAICPHANSYEIQRFCEIMGDGSLGPYEGKPLLSCFAFTSAAPREPVGTVHFPISAYASTDKEMQRRIERYMAAVAVSPVYRQRYRKMISAVQRRPLDRGAGIHAWVSLKQAAGAKQSNTFYISPGLFVRPE

SEQ ID NO: 13535 - DNA, 3282 bp, Muscodor strobelii
  misc_feature: SGI EST ID NO. CUFF.32536.1
  misc_feature: Variant of the nucleotide sequence at SEQ ID NO 13533
ttttggaaaacaggaattaatatgatagtaaactcataatcaaattcgcgcaaaattacaagaggcctgccatcaccctgttaggggcgagcccaactcacgctcgatttctaattaaaaggaacacatcagagcataacattaattattcttttcgatgtttagttagtcaacatacccaaccatgacatctaacccagcgtcagaccctcttctctcgccgcccacacatcaagctctcgtcgtcagatctctcacgagtatcacatcggcagagcgcaagaggatccttgaagatgtcgaatacaatatattcgcctttcctgcgggactcgttgcctgtgactatctttctgattcaggcacctcggcgatgacagacctgcagtggtccgcattgataagaggagacgagagctatggtcgcaactggggatactattgtcttcttgagacatgccgagatgtatttgagcgggggaatgatcggcagtacgcagctcatagcatcgtgataggagccgccacccccgacttctatcggagcaagctgttgacaccgtacgaaggtggcttcgtaaacggcgggccacatcaactcgagagacccaatttcttcattgtcccacagggccgctgtgcggaattcttgctcttctctacactgaaggatgtaataggactgcagggctcgagcgcggccaaggtagtcgtaagcaacggcttctttgacacaacgggggcgaatgccgcagccgcaggcttcggtcttcaagtctttacacaacccgggcttactgacccgtttcccgaggaacttatcgggaagaataatccgttcaagggtaacctcgatgtggccgcaacagctgcctatctagatgaaaatcccggccaggtctgcatgatcttgatgaccattaccaacaattgggctgccgcgcagcccgtatctatggccaatatccgtgaagccgctctgctcgctcgtaaacattcgataccccttttctttgatgcttgccgttttgccgagaacgcatggtttatacgcgaattcgaagatggttatgcggaaaagacgattcctgaaattgtccaggagatgttcacgtacgccgaaggtttcacgattagtctcaagaaggacggtctttcgaacatgggcggtattctcagtttcaaagacaagggcttatttgctcagcaatacgaaggtatcggccatctcctgaaggagcgccaaattctattctatggtaacgattcctatggtggtatgagcggacgcgatctcatgacgaccaccgtaggtctttatgaagtcacaaaagaaccatatcttcgcagtcgtatgaaccaagtaaggatgttcgcgcagacactacttgacaacggtatttcggttctctcgcctcctggcggtcatgccgtataccttgacatggacgacttcttctatggctgtggcagatccccaggcgattttcctgctgttggtttcacactagagctcctcaaagactatggtatccgagcagccgaggccggaccattcgggtgggaatgggacaaaaagccacctgagttgcaagctacaataccgaacctcgtccgctttgcggtgccacgccatgtgctttccgatcaacatatcaattacacggttgcagccatcaaggagctacacaacaggcggcacatgatcccaaatgcgaaaattacaagaggaaaagatatgagactgcgccacttcgcggccggcctggcacctgttcctgttgaccacaaaaggacgactacgtatgtagcagaggcaaaacgacaaatatcgcttctgtctcgagcactggatcaagataatgcaaaagacggcttgatactcggcgctttggatgtgtcgacgcatggatggggagatgctcgaattcccgaggagctggattcctctcggtggattccttcggtcgctaatgatcactcgccctttgaatactcagtggtgctagagcagaggactggagacgccgagttgcgctttctaatcgaagcccaaccggcttccggcggaaccaagggagacctagccgaacttcagactgaagcattggcactaacggagcgcattgcttctgaatatagctcgagggtttctcttgagcgattcaatgccatccgtgacttgttcatgcccagcaagcccgagggtttctttgcggcatggcacagctacgcttcaggcaagaatggcccggagtggaagatctaccttaatccgggcagtggtgacagcgcagtagttgccacgcgtgcagcattcgaacgcatcgggctgggcgagtcatggtccattgtcgaaagcataatgcagccaggcgagtcggtcatctacttctcgctggatctttcatctgacgttgagcacgcgcgtgccaaagtgtatatcaatcacggaacgacgacggcatcaaaggtagctgcagcgcaagcagccatctgcccgcatgccaactcatacgagatccagagattctgtgagatcatgggcgacggttcactgggaccatacgaaggcaagccgttgctatcgtgctttgctttcaccagcgcagcgcccagagagcccgtgggtacggtgcactttcccatcagcgcatatgcttcaaccgacaaggagatgcagaggcgcatcgaacggtatatggcggctgtggcggtatcaccggtgtacagacagcgatacagaaaaatgatcagcgcggtgcaacgtcggccgctggaccggggagccggaatccacgcgtgggtgagtctgaagcaggcagctggcgccaagcaatcgaacacgttttacatctcgccgggtttgtttgtgagacccgaataagtcacaatcagaggtgcttacagcattggtcacagtcacagtcacggtcatggtcatggttacggtcacggtgttaattggtttgtttggagtcatgtatataccacgtagctgttactagtactaggttttgttggtagtacttcgcctgcatatcaccctgcatattctccatctattcttctcgttcaagaacgtccttgccgacgctcggcctgtcgtggatttaaacttgggcgggttttcatgcatggaacttgcaagggatgatgagttagtgagtgttaatttgctaataagagcgagaatattaagaatatgacaacagtgcgtctgtgttgcactgataattccttaacatctcccttacttcggctgtgggtccaaggtctgcg

SEQ ID NO: 13536 - DNA, 1635 bp, Muscodor strobelii
  misc_feature: SGI cDNA ID NO. 564439
  misc_feature: Encodes the peptide sequence at SEQ ID NO 13537
atggccgacttagacgctgattacgtagtggtgggcggtggcctctctgggtgtgtcgtagcctcgcgattaagccaaagcgaaaagaaacccaaagtgatcctattggaagccggccctgatgcgaccggcaatcctgcctctgcttacttcttgagcggcctatctcttcagggcagcgagttcgactatctctacccaactgagcccattgcctctaccgccaaccgtgttcatcatttgagccaaggcaaggccctaggtggcggaacaatcatcaactatggtggctggcttcgaggagacgccgccgactacgatgaatgggctgagttggcaggagataaacgatggagttatcaaggcctgaagccttggtttgtgaagtcggagaacttctacgacactaatgctgaccctacggagcatggcttcgacggtcccatgcacgtcaccgcggtctctgctgccgaaggaggacagcgcgtttatcctctccgagagacggttaagaaggcttgggtcgagctcggtattcctgtcaatgtagacaggaagaatggtgcaagtgtgggcttaaacgagatgcatgagaactgtgacaagcaagggatgcgacagccgtccaatgttgtctatccgttgaaagacgtccaggtcctcaccaacacgcccgtgcaccgagtcacattcgatgacgatgcccaagctactggcgtggagctggttgacggccgcaaaatcactgctcgaaaggaggttatcctttctgctggatcgtaccggactccccaggttctactattgtcaggtatcggcccttctgcagagctcgctgagcacggcatcacgcagatatatgaatcgccgcacgttggccagaatctacatgatcattatgccgtacatctcgcatttcgattgcgcgatccctccttgggttatgcatttggtagcgctgcattccagaatcctgctttcctcaaaggattgccatgggaatgggtcgtaaatcagcctctcccagaggctatcttggccaagcacaagaatgaaaccaaacccgattgggataaacgaagtgtttttgaagcctttacagcttatgtggtaccaggtattccaggtattccagttgatggtagccacattgctacatcgacaatgcttcttcttcccacgtctcgtggtacagtcacgattcggtctagttcatcgaaagacacgccctgtattcgacctaattttctcgcaacccagctagaccgtgattctctcattcatgctgtccgtacgaccgttcgggcccttacggcaacagaaagcctaggcgccgttgtagcgggtgaatcgcctcctgtcaaggaaggcttggaagatctagtgccccttaccgccgacagcagcgatgaggtgatactagacagacttgaaaggacgggagagcagcaccaacactccggcggaacggcagcgatggggaaagtcgttgatgcagaaggcaaggttcttggcgttaagaacctccgggttgtcgacgccagtatcatcccagtgccagtaggcggacatccacaagcctcgctctatgccatggccgaacagctcgctagtatgatcgttgcggatcagtga

SEQ ID NO: 13537 - protein, 544 aa, Muscodor strobelii
  misc_feature: SGI Peptide ID NO. 564439
  misc_feature (7)..(450): Pfam Id: PF01266 Pfam Desc: FAD dependent oxidoreductase
  misc_feature (386)..(536): Pfam Id: PF05199 Pfam Desc: GMC oxidoreductase
  misc_feature (6)..(314): Pfam Id: PF00732 Pfam Desc: GMC oxidoreductase
  misc_feature (7)..(44): Pfam Id: PF01266 Pfam Desc: FAD dependent oxidoreductase
  misc_feature (486)..(536): Pfam Id: PF05199 Pfam Desc: GMC oxidoreductase
  misc_feature (386)..(431): Pfam Id: PF05199 Pfam Desc: GMC oxidoreductase
  misc_feature (6)..(161): Pfam Id: PF00732 Pfam Desc: GMC oxidoreductase
  misc_feature (219)..(314): Pfam Id: PF00732 Pfam Desc: GMC oxidoreductase
  misc_feature (7)..(45): Pfam Id: PF05834 Pfam Desc: Lycopene cyclase protein
  misc_feature (4)..(541): NCBI GI: 238501768 Blast Desc: glucose dehydrogenase, [Aspergillus flavus NRRL3357] gi|220692355|gb|EED48702.1| glucose dehydrogenase, [Aspergillus flavus NRRL3357]
  misc_feature (4)..(540): NCBI GI: 154308157 Blast Desc: BC1G_07824 [Botryotinia fuckeliana B05.10] gi|150852909|gb|EDN28101.1| BC1G_07824 [Botryotinia fuckeliana B05.10]
  misc_feature (7)..(541): NCBI GI: 67900560 Blast Desc: AN7267.2 [Aspergillus nidulans FGSC A4] gi|40741948|gb|EAA61138.1| AN7267.2 [Aspergillus nidulans FGSC A4] gi|259483387|tpe|CBF78736.1| TPA: conserved [Aspergillus FGSC
  misc_feature (7)..(543): NCBI GI: 46115062 Blast Desc: FG03373.1 [Gibberella zeae PH-1]
  misc_feature (7)..(544): NCBI GI: 242779381 Blast Desc: glucose dehydrogenase, [Talaromyces stipitatus ATCC 10500] gi|218723050|gb|EED22468.1| glucose dehydrogenase, [Talaromyces stipitatus ATCC 10500]
  misc_feature (7)..(536): NCBI GI: 145259027 Blast Desc: An04g08890 [Aspergillus niger] gi|134074864|emb|CAK38976.1| protein product [Aspergillus niger]
  misc_feature (1)..(542): NCBI GI: 67526147 Blast Desc: AN3531.2 [Aspergillus nidulans FGSC A4] gi|40739666|gb|EAA58856.1| AN3531.2 [Aspergillus nidulans FGSC A4] gi|259481951|tpe|CBF75954.1| TPA: GMC oxidoreductase nidulans
  misc_feature (7)..(541): NCBI GI: 145244078 Blast Desc: An11g05600 [Aspergillus niger] gi|134079234|emb|CAK40717.1| protein product [Aspergillus niger]
  misc_feature (7)..(544): NCBI GI: 212535270 Blast Desc: glucose-methanol-choline (gmc) oxidoreductase, [Penicillium marneffei ATCC 18224] gi|210070190|gb|EEA24280.1| glucose-methanol-choline (gmc) oxidoreductase, [Penicillium ATCC
  misc_feature (7)..(542): NCBI GI: 145234543 Blast Desc: An03g00130 [Aspergillus niger] gi|134057591|emb|CAK37991.1| protein product [Aspergillus niger]
  misc_feature (1)..(540): SWISSPROT Homolog: EC 1.1.99.1 Choline dehydrogenase
MADLDADYVVVGGGLSGCVVASRLSQSEKKPKVILLEAGPDATGNPASAYFLSGLSLQGSEFDYLYPTEPIASTANRVHHLSQGKALGGGTIINYGGWLRGDAADYDEWAELAGDKRWSYQGLKPWFVKSENFYDTNADPTEHGFDGPMHVTAVSAAEGGQRVYPLRETVKKAWVELGIPVNVDRKNGASVGLNEMHENCDKQGMRQPSNVVYPLKDVQVLTNTPVHRVTFDDDAQATGVELVDGRKITARKEVILSAGSYRTPQVLLLSGIGPSAELAEHGITQIYESPHVGQNLHDHYAVHLAFRLRDPSLGYAFGSAAFQNPAFLKGLPWEWVVNQPLPEAILAKHKNETKPDWDKRSVFEAFTAYVVPGIPGIPVDGSHIATSTMLLLPTSRGTVTIRSSSSKDTPCIRPNFLATQLDRDSLIHAVRTTVRALTATESLGAVVAGESPPVKEGLEDLVPLTADSSDEVILDRLERTGEQHQHSGGTAAMGKVVDAEGKVLGVKNLRVVDASIIPVPVGGHPQASLYAMAEQLASMIVADQ

SEQ ID NO: 13538 - DNA, 2498 bp, Muscodor strobelii
  misc_feature: SGI EST ID NO. CUFF.32509.0
  misc_feature: Variant of the nucleotide sequence at SEQ ID NO 13536
aacgcgcctcaaccttccaaggccgacagtgtaacatgaagaggggccgaggggcagcgacagctcacagcctttgtgagctcatcccttaactcctctcttgctcgcacggtcgcatataacttcttacatgtagtcaattacaatcttgctctactgactcgatctctctcctcgctttatatcgtgcccctaactctcactatttaggagcctcgtttcgaatcacttcagtcgcagacatggccgacttagacgctgattacgtagtggtgggcggtggcctctctgggtgtgtcgtagcctcgcgattaagccaaagcgaaaagaaacccaaagtgatcctattggaagccggccctgatgcgaccggcaatcctgcctctgcttacttcttgagcggcctatctcttcagggcagcgagttcgactatctctacccaactgagcccattgcctctaccgccaaccgtgttcatcatttgagccaaggcaaggccctaggtggcggaacaatcatcaactatggtggctggcttcgaggagacgccgccgactacgatgaatgggctgagttggcaggagataaacgatggagttatcaaggcctgaagccttggtttgtgaagtcggagaacttctacgacactaatgctgaccctacggagcatggcttcgacggtcccatgcacgtcaccgcggtctctgctgccgaaggaggacagcgcgtttatcctctccgagagacggttaagaaggcttgggtcgagctcggtattcctgtcaatgtagacaggaagaatggtgcaagtgtgggcttaaacgagatgcatgagaactgtgacaagcaagggatgcgacagccgtccaatgttgtctatccgttgaaagacgtccaggtcctcaccaacacgcccgtgcaccgagtcacattcgatgacgatgcccaagctactggcgtggagctggttgacggccgcaaaatcactgctcgaaaggaggttatcctttctgctggatcgtaccggactccccaggttctactattgtcaggtatcggcccttctgcagagctcgctgagcacggcatcacgcagatatatgaatcgccgcacgttggccagaatctacatgatcattatgccgtacatctcgcatttcgattgcgcgatccctccttgggttatgcatttggtagcgctgcattccagaatcctgctttcctcaaaggattgccatgggaatgggtcgtaaatcagcctctcccagaggctatcttggccaagcacaagaatgaaaccaaacccgattgggataaacgaagtgtttttgaagcctttacagcttatgtggtaccaggtattccaggtattccagttgatggtagccacattgctacatcgacaatgcttcttcttcccacgtctcgtggtacagtcacgattcggtctagttcatcgaaagacacgccctgtattcgacctaattttctcgcaacccagctagaccgtgattctctcattcatgctgtccgtacgaccgttcgggcccttacggcaacagaaagcctaggcgccgttgtagcgggtgaatcgcctcctgtcaaggaaggcttggaagatctagtgccccttaccgccgacagcagcgatgaggtgatactagacagacttgaaaggacgggagagcagcaccaacactccggcggaacggcagcgatggggaaagtcgttgatgcagaaggcaaggttcttggcgttaagaacctccgggttgtcgacgccagtatcatcccagtgccagtaggcggacatccacaagcctcgctctatgccatggccgaacagctcgctagtatgatcgttgcggatcagtgatacgtgtacctgacttggctctggattggcacgaaggttgcgaggaattacatacttcagggcatcatgaaccaagagactagcttgtattttagctcggtttatcagtcaggaacccgcttgcccgttagctccgttgcccgttgatagttaccgccgcggcgcctccggttcatgagagaagattccacatatgttcttcctacgtggatttcatcgctgtcgactattagacatatagcaggacggtggaattgatcaacaggtcgtgggcgaagcgagcaactagctaactcctcaagatgctacactctagtcatactggcctgtgcttagtgacttggtggagtaacactttgtgaccaacagcctcgtagctttagataaagatctctaccgtgtgcaggtcgcttcatgaatccccaagctctcgtatgtagacctaggtatatcaagggccatgtcagggtcatgtcggcgcaccccgcgtttctcaattgggaaggttctgggcctgtttttcgataattactcttcattcgtacaagtcccacgcagaatgatcaacatcatccatgaatccatgtgaaagggtcgacaaggataatatggtgactgcga

SEQ ID NO: 13539 - DNA, 1038 bp, Muscodor strobelii
  misc_feature: SGI cDNA ID NO. 564440
  misc_feature: Encodes the peptide sequence at SEQ ID NO 13540
atgacgctgggaccgtacagccagcaattggtcattggcctaggcgttggctccattgccattccgacattcttttttggactgcggttatgggcgagacggttgaggcgtacgcctctatccgctggcgattggttatgtttcgcgggcctgatagtttcatggacttgctgtagtcttcaactttatgctgccgttgacggtgacttgggccaacatcaacaccttgacgcaaatggccaaattattctagacgaccctagattcttagtttatgaacggaccaaactggccgtcaatgtcctcagcccaattgggtttgcactcgtgaagatgtcgattgtcgttttgtacgaaaagatcttccacaacatcgtgcccttccgctactgcgcctacgtaatggtcgtacttctcggactatggggaatatcattcttcttcgccaatctcttcatatgttatcccgtcactgcgctcatcgagccctactatggcaacaaatgcatcgaccaagctgcagtattcctttcgactcttcttaccgatttgatcttcgacatactcatcttgtcgatgccaatccctgtggttttgcgacttcatttgccttggagagacagattcggagtattgggaatgttccttctgggtgctattgtggtcgccgtcagtatcgctcgcctcatccagaacttggaagtgaacgcgcaatatctgaattttggtaacgatgtgacttactacacaacggctgtcttcttctggactaacatcgaattgtccattgctgtgattgcagcctgtctcccaactatgaaaccgatcttatcgtatttcttccccaaagcacccgcgacgacgaagtcagctcagtcgacacccagccactacatacaaattagcgaatcccgacagatttcgcataaatcgcgtcagtcccacatgtcagataactatcctgcgtactccgcgaacgcatacgcaggggatcacgacaagaataacatcgagctacactcgtttgacccggcgtga

SEQ ID NO: 13540 - protein, 345 aa, Muscodor strobelii
  misc_feature: SGI Peptide ID NO. 564440
  misc_feature (11)..(315): NCBI GI: 238501762 Blast Desc: conserved [Aspergillus flavus NRRL3357] gi|220692352|gb|EED48699.1| conserved [Aspergillus flavus NRRL3357]
  misc_feature (84)..(316): NCBI GI: 261357808 Blast Desc: conserved [Verticillium albo-atrum VaMs.102]
  misc_feature (101)..(309): NCBI GI: 67900566 Blast Desc: AN7270.2 [Aspergillus nidulans FGSC A4] gi|40741951|gb|EAA61141.1| AN7270.2 [Aspergillus nidulans FGSC A4] gi|259483384|tpe|CBF78730.1| TPA: conserved [Aspergillus FGSC
  misc_feature (6)..(291): NCBI GI: 169604304 Blast Desc: SNOG_05163 [Phaeosphaeria nodorum SN15] gi|111066434|gb|EAT87554.1| SNOG_05163 [Phaeosphaeria nodorum SN15]
  misc_feature (5)..(322): NCBI GI: 212534488 Blast Desc: conserved [Penicillium marneffei ATCC 18224] gi|210069799|gb|EEA23889.1| conserved [Penicillium marneffei ATCC 18224]
  misc_feature (14)..(312): NCBI GI: 119193702 Blast Desc: CIMG_01228 [Coccidioides immitis RS]
  misc_feature (28)..(310): NCBI GI: 67541837 Blast Desc: AN7082.2 [Aspergillus nidulans FGSC A4] gi|40742021|gb|EAA61211.1| AN7082.2 [Aspergillus nidulans FGSC A4]
  misc_feature (28)..(336): NCBI GI: 259483599 Blast Desc: TPA: conserved [Aspergillus nidulans FGSC A4]
  misc_feature (23)..(319): NCBI GI: 242816288 Blast Desc: conserved [Talaromyces stipitatus ATCC 10500] gi|218715084|gb|EED14507.1| conserved [Talaromyces stipitatus ATCC 10500]
  misc_feature (28)..(328): NCBI GI: 115401548 Blast Desc: conserved [Aspergillus terreus NIH2624] gi|114190303|gb|EAU32003.1| conserved [Aspergillus terreus NIH2624]
MTLGPYSQQLVIGLGVGSIAIPTFFFGLRLWARRLRRTPLSAGDWLCFAGLIVSWTCCSLQLYAAVDGDLGQHQHLDANGQIILDDPRFLVYERTKLAVNVLSPIGFALVKMSIVVLYEKIFHNIVPFRYCAYVMVVLLGLWGISFFFANLFICYPVTALIEPYYGNKCIDQAAVFLSTLLTDLIFDILILSMPIPVVLRLHLPWRDRFGVLGMFLLGAIVVAVSIARLIQNLEVNAQYLNFGNDVTYYTTAVFFWTNIELSIAVIAACLPTMKPILSYFFPKAPATTKSAQSTPSHYIQISESRQISHKSRQSHMSDNYPAYSANAYAGDHDKNNIELHSFDPA

SEQ ID NO: 13541 - DNA, 1797 bp, Muscodor strobelii
  misc_feature: SGI EST ID NO. CUFF.32445.0
  misc_feature: Variant of the nucleotide sequence at SEQ ID NO 13539
ctggaaactactttaacataccgacgagccgtttctctctaagtagtgtgacgtgagatctcaccatatcataattttctacctttgcacgaatttgatgtaactgttctattgttcctcatcaattcatcctttatggtactgctagacagactgccgcgatgacgctgggaccgtacagccagcaattggtcattggcctaggcgttggctccattgccattccgacattcttttttggactgcggttatgggcgagacggttgaggcgtacgcctctatccgctggcgattggttatgtttcgcgggcctgatagtttcatggacttgctgtagtcttcaactttatgctgccgttgacggtgacttgggccaacatcaacaccttgacgcaaatggccaaattattctagacgaccctagattcttagtttatgaacggaccaaactggccgtcaatgtcctcagcccaattgggtttgcactcgtgaagatgtcgattgtcgttttgtacgaaaagatcttccacaacatcgtgcccttccgctactgcgcctacgtaatggtcgtacttctcggactatggggaatatcattcttcttcgccaatctcttcatatgttatcccgtcactgcgctcatcgagccctactatggcaacaaatgcatcgaccaagctgcagtattcctttcgactcttcttaccgatttgatcttcgacatactcatcttgtcgatgccaatccctgtggttttgcgacttcatttgccttggagagacagattcggagtattgggaatgttccttctgggtgctattgtggtcgccgtcagtatcgctcgcctcatccagaacttggaagtgaacgcgcaatatctgaattttggtaacgatgtgacttactacacaacggctgtcttcttctggactaacatcgaattgtccattgctgtgattgcagcctgtctcccaactatgaaaccgatcttatcgtatttcttccccaaagcacccgcgacgacgaagtcagctcagtcgacacccagccactacatacaaattagcgaatcccgacagatttcgcataaatcgcgtcagtcccacatgtcagataactatcctgcgtactccgcgaacgcatacgcaggggatcacgacaagaataacatcgagctacactcgtttgacccggcgtgaaatcaggcagatacatcttaattaaacccatgccctccaccattatgaatttctagaggcgccaatttacaacataccatactaagctttattcgctctatcttctcgataccatacttgtattaagcgacatgtatattacccctgataaaagcacataccgaactagcatccagagcgatgaggggtagcggcttgacgaagcgagcatgagtatatgaggtcttttaaagccccggggaatgtggaatggaacatgagatatcgttatcaatattcaaggatacgacttaatggcaatgcaagacaattactacaactctttgcaaagtgaccaatgggacatatgatatagacaacctgggttgtaatagagacttgggtcccttgcggtttgggtccttgttcagtagcacaggccggcctggcccgaatatgacacgcgtgcaacggagatggaagatagattagtgatagttgacggtaaacctagtcgtcgcaagtgcgggcttaagttgcgatcaggcgatagcacatgactattaccacaagaactatagaacccatcacctgaagatcaatgcatgtggcagcagcc

SEQ ID NO: 13542 - DNA, 1437 bp, Muscodor strobelii
  misc_feature: SGI cDNA ID NO. 564441
  misc_feature: Reduced expression when VOC is produced
  misc_feature: Encodes the peptide sequence at SEQ ID NO 13543
atgaagttcacaaacctgttggtttgcgccgtcgcgggactcaccaccgtcctcgccgacgagatctgtccaagagacgccatctacagcaaggtgcagagcgggttgtcgtctcagctgtcgagtaaaaacctcataacctcgacagcgccggcacgatggagtgactttgatgccccccatccgggcgcagtcatcaatgtcaggaatgaggcggatgtcgttgcttcggtcaaattcctaacagctgctaagatcccgtttctagcacagaatggaggtaatgggtgggcaacaaccttccacctcgacacaaatggagtcataatcaacctggcgggcttaaatcaggtcacattcaactctgctaggacacaagccactattggtggaggtgccagtgtaaagactaccatcgacgccgcctatgctgcgggggctttggttgagactggcaattgcaactgcgtcggcacccttggagctattcttggtgctggctacggtaatctcatgggggagtacagctttggaatagacaatgtgctttcgatccgtgtcgtcactgcggacggtcaacttcgcaacgtaacggcgcaatccgacccggatcttttctgggctcttcgcggcgccggccctaactttggcatcgtcacatcggcgaccgtgaaggcacgcaaagcctcaactgtggacaaccaagcatggacaggctccttggtctacaccgaagaccagcttgaagatgtcatacaggccatcgaagatctccctctcacccaagaaatggtcattttcctgtactacttggcagactccaccaccggcagtccggtcattgttgcttcgccatggatgcacagagccgatgagacaagtggtccagccgcctacgcctctctatatgccatcggccccgtggctactaacactgctgtggtacaatacaaccaatggaactctggtggcgactcgctttgcgaccgcggcgagtacaagcctggttgggctgctggcttccagcacatggtccctgagacgtggcgcggaatttgggatgcatatgtcgcattccagcaactacctggtgcagagagaagtggtgtcctcatggagaagtacaatctcaacgcggcgagatcttaccctgctagctcggctgctttccctaaccgcaacgtcaacatcaatgcctttgccatcccatggtacgatgactcgtctctcgacgccgaggccgccaaattcggcaacaaggtgcgcgacttattacgatccaccagtggtctgcccaagaaccaaacctatatcaacttcgcccacggcgatgagccccttgcggaggtgtatggcgacagcgtagctagactcaagacgctcaagaagaagtacgatcccaaggacgtcttcaatcagtggttcaatatcaaataa

SEQ ID NO: 13543 - protein, 478 aa, Muscodor strobelii
  misc_feature: SGI Peptide ID NO. 564441
  misc_feature (436)..(478): Pfam Id: PF08031 Pfam Desc: Berberine and berberine like
  misc_feature (62)..(198): Pfam Id: PF01565 Pfam Desc: FAD binding domain
  misc_feature (31)..(477): NCBI GI: 238501764 Blast Desc: conserved [Aspergillus flavus NRRL3357] gi|220692353|gb|EED48700.1| conserved [Aspergillus flavus NRRL3357]
  misc_feature (31)..(477): NCBI GI: 169769298 Blast Desc: [Aspergillus oryzae RIB40] gi|83766977|dbj|BAE57117.1| protein product [Aspergillus oryzae]
  misc_feature (53)..(477): NCBI GI: 238841546 Blast Desc: FAD binding domain-containing protein [Microsporum canis CBS 113480]
  misc_feature (34)..(418): NCBI GI: 156053664 Blast Desc: SS1G_05679 [Sclerotinia sclerotiorum 1980] gi|154703460|gb|EDO03199.1| SS1G_05679 [Sclerotinia sclerotiorum 1980]
  misc_feature (17)..(477): NCBI GI: 259483385 Blast Desc: TPA: conserved [Aspergillus nidulans FGSC A4]
  misc_feature (32)..(478): NCBI GI: 238838229 Blast Desc: FAD binding domain-containing protein [Microsporum canis CBS 113480]
  misc_feature (1)..(434): NCBI GI: 169604306 Blast Desc: SNOG_05164 [Phaeosphaeria nodorum SN15] gi|160706543|gb|EAT87555.2| SNOG_05164 [Phaeosphaeria nodorum SN15]
  misc_feature (10)..(477): NCBI GI: 145240595 Blast Desc: An08g08310 [Aspergillus niger] gi|134077467|emb|CAK40032.1| protein product [Aspergillus niger]
  misc_feature (32)..(431): NCBI GI: 67900564 Blast Desc: AN7269.2 [Aspergillus nidulans FGSC A4] gi|40741950|gb|EAA61140.1| AN7269.2 [Aspergillus nidulans FGSC A4]
  misc_feature (28)..(477): NCBI GI: 169613607 Blast Desc: SNOG_09934 [Phaeosphaeria nodorum SN15] gi|160707195|gb|EAT82269.2| SNOG_09934 [Phaeosphaeria nodorum SN15]
  misc_feature: Useful for introducing or modulating the production of volatile compounds
MKFTNLLVCAVAGLTTVLADEICPRDAIYSKVQSGLSSQLSSKNLITSTAPARWSDFDAPHPGAVINVRNEADVVASVKFLTAAKIPFLAQNGGNGWATTFHLDTNGVIINLAGLNQVTFNSARTQATIGGGASVKTTIDAAYAAGALVETGNCNCVGTLGAILGAGYGNLMGEYSFGIDNVLSIRVVTADGQLRNVTAQSDPDLFWALRGAGPNFGIVTSATVKARKASTVDNQAWTGSLVYTEDQLEDVIQAIEDLPLTQEMVIFLYYLADSTTGSPVIVASPWMHRADETSGPAAYASLYAIGPVATNTAVVQYNQWNSGGDSLCDRGEYKPGWAAGFQHMVPETWRGIWDAYVAFQQLPGAERSGVLMEKYNLNAARSYPASSAAFPNRNVNINAFAIPWYDDSSLDAEAAKFGNKVRDLLRSTSGLPKNQTYINFAHGDEPLAEVYGDSVARLKTLKKKYDPKDVFNQWFNIK

SEQ ID NO: 13544 - DNA, 1802 bp, Muscodor strobelii
  misc_feature: SGI EST ID NO. CUFF.32454.0
  misc_feature: Variant of the nucleotide sequence at SEQ ID NO 13542
cgccccagacacccccctgcagcctccgcccaccctaacatcgaccatacagtaatgaataaatactagaacgtggcaacgtcgtagcggatttagaaagtgcttggctctctctagttacactgctacacctcgctcgagcttcatcgcgatgaagttcacaaacctgttggtttgcgccgtcgcgggactcaccaccgtcctcgccgacgagatctgtccaagagacgccatctacagcaaggtgcagagcgggttgtcgtctcagctgtcgagtaaaaacctcataacctcgacagcgccggcacgatggagtgactttgatgccccccatccgggcgcagtcatcaatgtcaggaatgaggcggatgtcgttgcttcggtcaaattcctaacagctgctaagatcccgtttctagcacagaatggaggtaatgggtgggcaacaaccttccacctcgacacaaatggagtcataatcaacctggcgggcttaaatcaggtcacattcaactctgctaggacacaagccactattggtggaggtgccagtgtaaagactaccatcgacgccgcctatgctgcgggggctttggttgagactggcaattgcaactgcgtcggcacccttggagctattcttggtgctggctacggtaatctcatgggggagtacagctttggaatagacaatgtgctttcgatccgtgtcgtcactgcggacggtcaacttcgcaacgtaacggcgcaatccgacccggatcttttctgggctcttcgcggcgccggccctaactttggcatcgtcacatcggcgaccgtgaaggcacgcaaagcctcaactgtggacaaccaagcatggacaggctccttggtctacaccgaagaccagcttgaagatgtcatacaggccatcgaagatctccctctcacccaagaaatggtcattttcctgtactacttggcagactccaccaccggcagtccggtcattgttgcttcgccatggatgcacagagccgatgagacaagtggtccagccgcctacgcctctctatatgccatcggccccgtggctactaacactgctgtggtacaatacaaccaatggaactctggtggcgactcgctttgcgaccgcggcgagtacaagcctggttgggctgctggcttccagcacatggtccctgagacgtggcgcggaatttgggatgcatatgtcgcattccagcaactacctggtgcagagagaagtggtgtcctcatggagaagtacaatctcaacgcggcgagatcttaccctgctagctcggctgctttccctaaccgcaacgtcaacatcaatgcctttgccatcccatggtacgatgactcgtctctcgacgccgaggccgccaaattcggcaacaaggtgcgcgacttattacgatccaccagtggtctgcccaagaaccaaacctatatcaacttcgcccacggcgatgagccccttgcggaggtgtatggcgacagcgtagctagactcaagacgctcaagaagaagtacgatcccaaggacgtcttcaatcagtggttcaatatcaaataaatagaagcgattccattatgccagacagggaccaggggacggcgaacataaggacagggtctcataagcagttagcatattcccaggcgggctcctgtcgttacctactaactagattggcggctgagtagccctcgttaattttaagatacctatgtactaattgacaataaacactaataaaatgtcatcaatcgctttaccttaccccgcg

SEQ ID NO: 13545 - DNA, 1236 bp, Muscodor strobelii
  misc_feature: SGI cDNA ID NO. 564442
  misc_feature: Encodes the peptide sequence at SEQ ID NO 13546
atgaagctcaccggcttagctctgctgctctgcggcagcttgagagccttcgcctaccgtgtgcagcaaccgctaggcacgacgacagactcaaatggtcaagctccgtcctaccgtgacagcctcctagccctgcacaagtccctcgtcgagatatcgtccctcacgagcaacgagaccgccgtcggccactggctcgccgactacctcgaacaccgcggcttcagcacctatctgcagtacatcccgcccgccgacgacgtgaacaaaggtcccaagcctcgcttcaacgtcatcgccaagccctggcccaaacaccagtcctcgctcgagtcccccaaggtcatcgtgtccagccacatcgacaccgtcccgcccttcatcccctactccatctccgacgagcagcccagctccgacaccgtcatcgccggccgcggcaccgtcgatgccaaggcgagcgtcgccgcccagatcaccgctgtcatcgagctgttggactcgggccgcatcgacgccgacagcatcgttctggtctatgtcgtcggagaggagcgatccggtgatggcatgaagtacttctccaagagtctgctgcccctcgacccgcctcccaacatcaaggccgccatctttggggagccgaccgagggcaagctcgcctgtggacacaagggcattactagttgtacggtcaaggcccacggcaaggcgggacacagcggatacccctggctcggcaagagcgcaactgagatcctgatgagagggctggtcaaggttctagatacggatcttgggagcagtgatgagtttgggaataccactgtcaacgttggtctactagagggcggcgttgcgcctaacgttatccccgagacggccgaggcgaccatggctgtccgtgtcgctatcgggcccgaggaggacggtggcaagattgtcgcgaagcgcatacaggacgtgctgaagagtgtggacgacgaggcgtttgacgtcaactgtgtagtgggctatggtgtcgtgaaatgcgagtgtgaggttgatgatttcgagtctatcaccgtcaactacggcaccgatgtgcctaacctcgacggcaaccacactcgctatctctacggaccgggcactatcctcgttgcacatggagccgacgaggcgatcaaagtctcggacctcgagaccggcgtcgaagacttcaagaagctcattcttcacgcgctcaagaactga

SEQ ID NO: 13546 - protein, 411 aa, Muscodor strobelii
  misc_feature: SGI Peptide ID NO. 564442
  misc_feature (222)..(329): Pfam Id: PF07687 Pfam Desc: Peptidase dimerisation domain
  misc_feature (116)..(407): Pfam Id: PF01546 Pfam Desc: Peptidase family M20/M25/M40
  misc_feature (222)..(303): Pfam Id: PF07687 Pfam Desc: Peptidase dimerisation domain
  misc_feature (35)..(410): NCBI GI: 169602901 Blast Desc: SNOG_04455 [Phaeosphaeria nodorum SN15] gi|111067095|gb|EAT88215.1| SNOG_04455 [Phaeosphaeria nodorum SN15]
  misc_feature (27)..(409): NCBI GI: 85093167 Blast Desc: NCU02227 [Neurospora crassa OR74A] gi|28921086|gb|EAA30404.1| conserved [Neurospora crassa OR74A]
  misc_feature (1)..(409): NCBI GI: 171680705 Blast Desc: protein product [Podospora anserina] gi|170939980|emb|CAP65206.1| protein product [Podospora anserina]
  misc_feature (1)..(349): NCBI GI: 256727269 Blast Desc: NECHADRAFT_26181 [Nectria haematococca mpVI 77-13-4]
  misc_feature (1)..(349): NCBI GI: 46121347 Blast Desc: FG05052.1 [Gibberella zeae PH-1]
  misc_feature (30)..(410): NCBI GI: 261353935 Blast Desc: peptidase family protein [Verticillium albo-atrum VaMs.102]
  misc_feature (36)..(408): NCBI GI: 169601680 Blast Desc: SNOG_03711 [Phaeosphaeria nodorum SN15] gi|111067796|gb|EAT88916.1| SNOG_03711 [Phaeosphaeria nodorum SN15]
  misc_feature (42)..(410): NCBI GI: 238844723 Blast Desc: acetylornithine deacetylase [Microsporum canis CBS 113480]
  misc_feature (42)..(409): NCBI GI: 70991449 Blast Desc: peptidase [Aspergillus fumigatus Af293] gi|66848206|gb|EAL88535.1| peptidase, [Aspergillus fumigatus Af293] gi|159124129|gb|EDP49247.1| peptidase, [Aspergillus A1163]
  misc_feature (46)..(409): NCBI GI: 154297082 Blast Desc: BC1G_12200 [Botryotinia fuckeliana B05.10] gi|150843029|gb|EDN18222.1| BC1G_12200 [Botryotinia fuckeliana B05.10]
  misc_feature (40)..(394): SWISSPROT Homolog: EC 3.5.1.16 Acetylornithine deacetylase
MKLTGLALLLCGSLRAFAYRVQQPLGTTTDSNGQAPSYRDSLLALHKSLVEISSLTSNETAVGHWLADYLEHRGFSTYLQYIPPADDVNKGPKPRFNVIAKPWPKHQSSLESPKVIVSSHIDTVPPFIPYSISDEQPSSDTVIAGRGTVDAKASVAAQITAVIELLDSGRIDADSIVLVYVVGEERSGDGMKYFSKSLLPLDPPPNIKAAIFGEPTEGKLACGHKGITSCTVKAHGKAGHSGYPWLGKSATEILMRGLVKVLDTDLGSSDEFGNTTVNVGLLEGGVAPNVIPETAEATMAVRVAIGPEEDGGKIVAKRIQDVLKSVDDEAFDVNCVVGYGVVKCECEVDDFESITVNYGTDVPNLDGNHTRYLYGPGTILVAHGADEAIKVSDLETGVEDFKKLILHALKN

SEQ ID NO: 13547 - DNA, 2979 bp, Muscodor strobelii
  misc_feature: SGI EST ID NO. CUFF.32585.1
  misc_feature: Variant of the nucleotide sequence at SEQ ID NO 13545
gacagcttcatattcttgccaccagcggcgtgtcaaggaagcaattttacctccttgcatttgcatacaccctctagatttcttggaaagcataggcagacactcattaatcactaactccctggatattctcaaatactcatctccttctagaccgggcccgcggagctgccatgaagctcaccggcttagctctgctgctctgcggcagcttgagagccttcgcctaccgtgtgcagcaaccgctaggcacgacgacagactcaaatggtcaagctccgtcctaccgtgacagcctcctagccctgcacaagtccctcgtcgagatatcgtccctcacgagcaacgagaccgccgtcggccactggctcgccgactacctcgaacaccgcggcttcagcacctatctgcagtacatcccgcccgccgacgacgtgaacaaaggtcccaagcctcgcttcaacgtcatcgccaagccctggcccaaacaccagtcctcgctcgagtcccccaaggtcatcgtgtccagccacatcgacaccgtcccgcccttcatcccctactccatctccgacgagcagcccagctccgacaccgtcatcgccggccgcggcaccgtcgatgccaaggcgagcgtcgccgcccagatcaccgctgtcatcgagctgttggactcgggccgcatcgacgccgacagcatcgttctggtctatgtcgtcggagaggagcgatccggtgatggcatgaagtacttctccaagagtctgctgcccctcgacccgcctcccaacatcaaggccgccatctttggggagccgaccgagggcaagctcgcctgtggacacaagggcattactagttgtacggtcaaggcccacggcaaggcgggacacagcggatacccctggctcggcaagagcgcaactgagatcctgatgagagggctggtcaaggttctagatacggatcttgggagcagtgatgagtttgggaataccactgtcaacgttggtctactagagggcggcgttgcgcctaacgttatccccgagacggccgaggcgaccatggctgtccgtgtcgctatcgggcccgaggaggacggtggcaagattgtcgcgaagcgcatacaggacgtgctgaagagtgtggacgacgaggcgtttgacgtcaactgtgtagtgggctatggtgtcgtgaaatgcgagtgtgaggttgatgatttcgagtctatcaccgtcaactacggcaccgatgtgcctaacctcgacggcaaccacactcgctatctctacggaccgggcactatcctcgttgcacatggagccgacgaggcgatcaaagtctcggacctcgagaccggcgtcgaagacttcaagaagctcattcttcacgcgctcaagaactgataggtcgatttccttttttgggcctttgatccgtgtagaaaaacaggtacgtaggtagcgaattctatgtacatgccattcaaatcattgcccgacgacctttgcccaccgctcaggcatgatctcccggaaatcaaaactcccactttcccccttgacgaccacaccacgctccgtgaccacggcatcgatcagttccgcaggcgtgacgtcgaaagccgggttccagacgcctatctcctggtgcgccgtagccaccctcgccgtcttgctgatgtccactttcccatcgctgcccaccaccgcaccgctgatctgcgtgagttcctcggccttgcgctcttcgatcttgatatccgcccccgtggtagtctgcagatcgatgcttgtcgtcggcgcggcgacgatgaacttgatgccgtggtgcttcgccagaacggcgagcccatatgtgccgatcttgtttgccgtgtcgccgtttcggactacgcggtctgcgcccactatcacggctgcgatgtgctcactctctttccgcgtcgcgaatagcgcgcctgccatggagtccgtgatgagtgttgatgggatcttctcgtacactagttcgaaggccgtgagtctactcccttggttgtagggtcttgtttccgtgcagaaagcgtggtgtaagtgaccgtctgaatgtagtgagcggatgattccaagcgccgtgccgtggccggacgtcgcgagggagcctgtgttgcagtgtgtgaggacggagactttgtcctcgctagactttacgggtgcgttcgctaggagccatttactaccgtgttctccgattaaaagattggtttctgtgtctttgcggaatatctcctcggccgctgggatgtaggactctatgatggaggacttatcctgggatgcagaacggatgacgccttttaggtgtgatatcgcgtttgtgaggtctactgctgttggacgtgattggaagaggtagtctagccgtccgtctatgtaggatactgtttcttctggggttgtggcagcttcgaaatgttagacatgagggctctgatgtgaaatgggatagagaacatactgcaacttccattagatagctcgacgccgtgagccagtgctgctactattgctattgctggtgcgcctatacatcaagagagatggccatgttagaaaagagacctgtcattgttgcttcatgattggtgtgtgtctgctcacctctcactctcatagacttaatacagtcaaatgcctcctcgctcgtagacacgacgtcaaagtggtgctcatgaggcagtcggagctgatccaagacctcgagtttgccacgcgtgtagcggatggcttggagtcctgacattctcgtgtcgatagagctgtgatatgagtgtgaggcttgccgagttgtcttctagctgcgagttgggattgaggaggggtggctaagggaattagttccgacaaaaattgggttgataggcctaaatgagctacgcgacgagatccttgatatgtcttttatttattggtaagttattatactcaattgccg

SEQ ID NO: 13548 - DNA, 1164 bp, Muscodor strobelii
  misc_feature: SGI cDNA ID NO. 564443
  misc_feature: Reduced expression when VOC is produced
  misc_feature: Encodes the peptide sequence at SEQ ID NO 13549
atgtcaggactccaagccatccgctacacgcgtggcaaactcgaggtcttggatcagctccgactgcctcatgagcaccactttgacgtcgtgtctacgagcgaggaggcatttgactgtattaagtctatgagagtgagaggcgcaccagcaatagcaatagtagcagcactggctcacggcgtcgagctatctaatggaagttgcactgccacaaccccagaagaaacagtatcctacatagacggacggctagactacctcttccaatcacgtccaacagcagtagacctcacaaacgcgatatcacacctaaaaggcgtcatccgttctgcatcccaggataagtcctccatcatagagtcctacatcccagcggccgaggagatattccgcaaagacacagaaaccaatcttttaatcggagaacacggtagtaaatggctcctagcgaacgcacccgtaaagtctagcgaggacaaagtctccgtcctcacacactgcaacacaggctccctcgcgacgtccggccacggcacggcgcttggaatcatccgctcactacattcagacggtcacttacaccacgctttctgcacggaaacaagaccctacaaccaagggagtagactcacggccttcgaactagtgtacgagaagatcccatcaacactcatcacggactccatggcaggcgcgctattcgcgacgcggaaagagagtgagcacatcgcagccgtgatagtgggcgcagaccgcgtagtccgaaacggcgacacggcaaacaagatcggcacatatgggctcgccgttctggcgaagcaccacggcatcaagttcatcgtcgccgcgccgacgacaagcatcgatctgcagactaccacgggggcggatatcaagatcgaagagcgcaaggccgaggaactcacgcagatcagcggtgcggtggtgggcagcgatgggaaagtggacatcagcaagacggcgagggtggctacggcgcaccaggagataggcgtctggaacccggctttcgacgtcacgcctgcggaactgatcgatgccgtggtcacggagcgtggtgtggtcgtcaagggggaaagtgggagttttgatttccgggagatcatgcctgagcggtgggcaaaggtcgtcgggcaatga

SEQ ID NO: 13549 - protein, 387 aa, Muscodor strobelii
  misc_feature: SGI Peptide ID NO. 564443
  misc_feature (45)..(365): Pfam Id: PF01008 Pfam Desc: Initiation factor 2 subunit family
  misc_feature (1)..(387): NCBI GI: 261353934 Blast Desc: methylthioribose-1-phosphate isomerase [Verticillium albo-atrum VaMs.102]
  misc_feature (1)..(386): NCBI GI: 46121349 Blast Desc: FG05053.1 [Gibberella zeae PH-1]
  misc_feature (1)..(381): NCBI GI: 116200782 Blast Desc: CHGG_10936 [Chaetomium globosum CBS 148.51] gi|88175650|gb|EAQ83118.1| CHGG_10936 [Chaetomium globosum CBS 148.51]
  misc_feature (1)..(386): NCBI GI: 256726701 Blast Desc: [Nectria haematococca mpVI 77-13-4]
  misc_feature (1)..(387): NCBI GI: 171680707 Blast Desc: protein product [Podospora anserina] gi|170939981|emb|CAP65207.1| protein product [Podospora anserina]
  misc_feature (1)..(381): NCBI GI: 85093163 Blast Desc: NCU02226 [Neurospora crassa OR74A] gi|28921085|gb|EAA30403.1| NCU02226 [Neurospora crassa OR74A]
  misc_feature (1)..(385): NCBI GI: 156057707 Blast Desc: SS1G_04585 [Sclerotinia sclerotiorum 1980] gi|154702370|gb|EDO02109.1| SS1G_04585 [Sclerotinia sclerotiorum 1980]
  misc_feature (1)..(385): NCBI GI: 154323222 Blast Desc: BC1G_00010 [Botryotinia fuckeliana B05.10] gi|150842239|gb|EDN17432.1| BC1G_00010 [Botryotinia fuckeliana B05.10]
  misc_feature (4)..(384): NCBI GI: 189193785 Blast Desc: methylthioribose-1-phosphate isomerase [Pyrenophora tritici-repentis Pt-1C-BFP] gi|187978795|gb|EDU45421.1| methylthioribose-1-phosphate isomerase [Pyrenophora Pt-1C-BFP]
  misc_feature (4)..(377): NCBI GI: 67528168 Blast Desc: AN4290.2 [Aspergillus nidulans FGSC A4] gi|40740852|gb|EAA60042.1| AN4290.2 [Aspergillus nidulans FGSC A4] gi|259482906|tpe|CBF77829.1| TPA: translation initiation FGSC
  misc_feature (4)..(362): SWISSPROT Homolog: EC 5.3.1.23 S-methyl-5-thioribose-1-phosphate isomerase
  misc_feature: Useful for introducing or modulating the production of volatile compounds
MSGLQAIRYTRGKLEVLDQLRLPHEHHFDVVSTSEEAFDCIKSMRVRGAPAIAIVAALAHGVELSNGSCTATTPEETVSYIDGRLDYLFQSRPTAVDLTNAISHLKGVIRSASQDKSSIIESYIPAAEEIFRKDTETNLLIGEHGSKWLLANAPVKSSEDKVSVLTHCNTGSLATSGHGTALGIIRSLHSDGHLHHAFCTETRPYNQGSRLTAFELVYEKIPSTLITDSMAGALFATRKESEHIAAVIVGADRVVRNGDTANKIGTYGLAVLAKHHGIKFIVAAPTTSIDLQTTTGADIKIEERKAEELTQISGAVVGSDGKVDISKTARVATAHQEIGVWNPAFDVTPAELIDAVVTERGVVVKGESGSFDFREIMPERWAKVVGQ

SEQ ID NO: 13550 - DNA, 2963 bp, Muscodor strobelii
  misc_feature: SGI EST ID NO. CUFF.32586.3
  misc_feature: Variant of the nucleotide sequence at SEQ ID NO 13548
cggcaattgagtataataacttaccaataaataaaagacatatcaaggatctcgtcgcgtagctcatttaggcctatcaacccaatttttgtcggaactaattcccttagccacccctcctcaatcccaactcgcagctagaagacaactcggcaagcctcacactcatatcacagctctatcgacacgagaatgtcaggactccaagccatccgctacacgcgtggcaaactcgaggtcttggatcagctccgactgcctcatgagcaccactttgacgtcgtgtctacgagcgaggaggcatttgactgtattaagtctatgagagtgagaggcgcaccagcaatagcaatagtagcagcactggctcacggcgtcgagctatctaatggaagttgcagtatgttctctatcccatttcacatcagagccctcatgtctaacatttcgaagctgccacaaccccagaagaaacagtatcctacatagacggacggctagactacctcttccaatcacgtccaacagcagtagacctcacaaacgcgatatcacacctaaaaggcgtcatccgttctgcatcccaggataagtcctccatcatagagtcctacatcccagcggccgaggagatattccgcaaagacacagaaaccaatcttttaatcggagaacacggtagtaaatggctcctagcgaacgcacccgtaaagtctagcgaggacaaagtctccgtcctcacacactgcaacacaggctccctcgcgacgtccggccacggcacggcgcttggaatcatccgctcactacattcagacggtcacttacaccacgctttctgcacggaaacaagaccctacaaccaagggagtagactcacggccttcgaactagtgtacgagaagatcccatcaacactcatcacggactccatggcaggcgcgctattcgcgacgcggaaagagagtgagcacatcgcagccgtgatagtgggcgcagaccgcgtagtccgaaacggcgacacggcaaacaagatcggcacatatgggctcgccgttctggcgaagcaccacggcatcaagttcatcgtcgccgcgccgacgacaagcatcgatctgcagactaccacgggggcggatatcaagatcgaagagcgcaaggccgaggaactcacgcagatcagcggtgcggtggtgggcagcgatgggaaagtggacatcagcaagacggcgagggtggctacggcgcaccaggagataggcgtctggaacccggctttcgacgtcacgcctgcggaactgatcgatgccgtggtcacggagcgtggtgtggtcgtcaagggggaaagtgggagttttgatttccgggagatcatgcctgagcggtgggcaaaggtcgtcgggcaatgatttgaatggcatgtacatagaattcgctacctacgtacctgtttttctacacggatcaaaggcccaaaaaaggaaatcgacctatcagttcttgagcgcgtgaagaatgagcttcttgaagtcttcgacgccggtctcgaggtccgagactttgatcgcctcgtcggctccatgtgcaacgaggatagtgcccggtccgtagagatagcgagtgtggttgccgtcgaggttaggcacatcggtgccgtagttgacggtgatagactcgaaatctgtgtacgtatcagctcaacgaacaattctttggggagactacaagacaaaagactataccatcaacctcacactcgcatttcacgacaccatagcccactacacagttgacgtcaaacgcctcgtcgtccacactcttcagcacgtcctgtatgcgcttcgcgacaatcttgccaccgtcctcctcgggcccgatagcgacacggacagccatggtcgcctcggccgtctcggggataacgttaggcgcaacgccgccctctagtagaccaacgttgacagtggtattcccaaactcatcactgctcccaagatccgtatctagaaccttgaccagccctctcatcaggatctcagttgcgctcttgccgagccaggggtatccgctgtgtcccgccttgccgtgggccttgaccgtacaactagtaatgcccttgtgtccacaggcgagcttgccctcggtcggctccccaaagatggcggccttgatgttgggaggcgggtcgaggggcagcagactcttggagaagtacttcatgccatcaccggatcgctcctctccgacgacatagaccagaacgatgctgtcggcgtcgatgcggcccgagtccaacagctcgatgacagcggtgatctgggcggcgacgctcgccttggcatcgacggtgccgcggccggcgatgacggtgtcggagctgggctgctcgtcggagatggagtaggggatgaagggcgggacggtgtcgatgtggctggacacgatgaccttgggggactcgagcgaggactggtgtttgggccagggcttggcgatgacgttgaagcgaggcttgggacctttgttcacgtcgtcggcgggcgggatgtactgcagataggtgctgaagccgcggtgttcgaggtagtcggcgagccagtggccgacggcggtctcgttgctcgtgagggacgatatctcgacgagggacttgtgcagggctaggaggctgtcacggtaggacggagcttgaccatttgagtctgtcgtcgtgcctagcggttgctgcacacggtaggcgaaggctctcaagctgccgcagagcagcagagctaagccggtgagcttcatggcagctccgcgggcccggtctagaaggagatgagtatttgagaatatccagggagttagtgattaatgagtgtctgcctatgctttccaagaaatctagagggtgtatgcaaatgcaaggaggtaaaattgcttccttgacacgccgctggtggcaagaatatgaagctgtc

SEQ ID NO: 13551 - DNA, 1410 bp, Muscodor strobelii
  misc_feature: SGI cDNA ID NO. 564444
  misc_feature: Encodes the peptide sequence at SEQ ID NO 13552
atggagtccagtctgctgcccaggacgcgcgggagagcagagaggcggagcgcccactatgccgatttcaccatctccgacctccccaatctgcctgaatggaaagagaagggcagtttcagtcccgacaccgtcacgcccccgccgccggtcgacaaagattcggtgcgctccgtcagctcgtcccgccaccgccctatcccgccacccaaggaaggcatccttcgaagcgcaagatcccgaggctcgacccttcaccttgtgaccactgcagatgtgttgaataacagccaggtcacgcgccagcagaccacactccagaaagtccgctccaaaccgtcgcaagccatcgtcgcgacgtggaagaactggacacactggattgtggagaacacgaggaggcatcggccgaacaagcgaggcagccagtccacgcccaatcttcacaaagatggcgcgtcgggcggcaaagcctccggcgagccaagtccacggccacaaaccagcaaataccctgggcccgtgggcagctcgaacgcgcggagtaacggcaactcgcccaacatcaccaatgggcatgtgaaggagaaggatagcgtcgcgggcaacccgtcgacgaaaccgttaccgacggggctcacgatccagcccaatgtggcaccgagagtatcgtccgccagctacaagcgccagtccctttcgccagtccctctgacgccacggtcatcgatgcggcgcccttcgaccggtctacgcggaagaaagtcgacgtcgtcgtctctgtcgtcgatccggacgatgccacatcatcatcacacccactccaaggctagctcgacgagctccaacggctctgtgtcgacatcgaagacgccactgggaggaagcaggtcaccgcatcactcggtcaaagtgctgccggcgacgcccacgagcacatccttcccgtcaaacatccggctggtgcgcggccctgcgttgacactcaacttcaacgagggaatgccagcttcagggtcacataaccctcccgggtcaccgaatccgttctcggcgggcagcagccagtcggtgctttttgccaagcgaaaacggaacttgttcaagggtccgatgctttcgatgaacaccgcgacagctagccgggcgggttcgtcatcgggaaaccacagtcgaagcgccagcgccagcggcttggctcgacgaagtggggagatcacgatacaagaagaagacgaagaggctgcagatgaggaagaaatagaagaggtagaccagttctcgccgatttttagtagacctggcgagaaggtagaggagatatacgagagcgaggagaaggacgaaggcgaacataacgacacagtcacggcggccaaccatattacgaccgagataaaaagcgactag

SEQ ID NO: 13552 - protein, 469 aa, Muscodor strobelii
  misc_feature: SGI Peptide ID NO. 564444
  misc_feature (8)..(446): NCBI GI: 46122773 Blast Desc: FG05764.1 [Gibberella zeae PH-1]
  misc_feature (18)..(446): NCBI GI: 256725024 Blast Desc: NECHADRAFT_91501 [Nectria haematococca mpVI 77-13-4]
  misc_feature (8)..(438): NCBI GI: 171680751 Blast Desc: protein product [Podospora anserina] gi|170940003|emb|CAP65229.1| protein product [Podospora anserina]
  misc_feature (8)..(409): NCBI GI: 85092699 Blast Desc: NCU02245 [Neurospora crassa OR74A] gi|28920938|gb|EAA30268.1| conserved [Neurospora crassa OR74A]
  misc_feature (7)..(442): NCBI GI: 156057115 Blast Desc: SS1G_04288 [Sclerotinia sclerotiorum 1980] gi|154702074|gb|EDO01813.1| SS1G_04288 [Sclerotinia sclerotiorum 1980]
  misc_feature (133)..(449): NCBI GI: 145604923 Blast Desc: MGG_13666 [Magnaporthe grisea 70-15] gi|145012832|gb|EDJ97473.1| MGG_13666 [Magnaporthe grisea 70-15]
  misc_feature (131)..(366): NCBI GI: 261353936 Blast Desc: protein kinase domain-containing protein [Verticillium albo-atrum VaMs.102]
  misc_feature (7)..(384): NCBI GI: 119185180 Blast Desc: CIMG_07296 [Coccidioides immitis RS]
  misc_feature (7)..(386): NCBI GI: 240106568 Blast Desc: Protein kinase domain containing protein [Coccidioides posadasii C735 delta SOWgp]
  misc_feature (6)..(413): NCBI GI: 258564670 Blast Desc: OSK2 protein [Uncinocarpus reesii 1704] gi|237908587|gb|EEP82988.1| OSK2 protein [Uncinocarpus reesii 1704]
MESSLLPRTRGRAERRSAHYADFTISDLPNLPEWKEKGSFSPDTVTPPPPVDKDSVRSVSSSRHRPIPPPKEGILRSARSRGSTLHLVTTADVLNNSQVTRQQTTLQKVRSKPSQAIVATWKNWTHWIVENTRRHRPNKRGSQSTPNLHKDGASGGKASGEPSPRPQTSKYPGPVGSSNARSNGNSPNITNGHVKEKDSVAGNPSTKPLPTGLTIQPNVAPRVSSASYKRQSLSPVPLTPRSSMRRPSTGLRGRKSTSSSLSSIRTMPHHHHTHSKASSTSSNGSVSTSKTPLGGSRSPHHSVKVLPATPTSTSFPSNIRLVRGPALTLNFNEGMPASGSHNPPGSPNPFSAGSSQSVLFAKRKRNLFKGPMLSMNTATASRAGSSSGNHSRSASASGLARRSGEITIQEEDEEAADEEEIEEVDQFSPIFSRPGEKVEEIYESEEKDEGEHNDTVTAANHITTEIKSD

SEQ ID NO: 13553 - DNA, 3608 bp, Muscodor strobelii
  misc_feature: SGI EST ID NO. CUFF.32590.0
  misc_feature: Variant of the nucleotide sequence at SEQ ID NO 13551
caggtatcgaacatcgtcttgctccctgtcaggctggcaaagcatcacctgcaatttctccggccgtttcttcaggccaggcacgacgaggggcccctggttgatgattttattttttttcgtttcgactcgaagccttggttttttcccttcgaatgtttcacacgtccaatccgaccaaccgtggccaacttcaactcatgctccttcccggcgtcctctgcaattgtccccccgtccgtcgaatccctctgcgtccgcccccgtcgttgcccgagcgtgcatcgtatgtgccatccgtgtgtatgattaccttagcgtagaggcagatccagatccagatccagtgttttcgtccgtttcgaaacatctgcgccgcccgagacattcccactgccacgcgactgctctgtctctgtctcgccccgtgcaacactgctttgtatacctacctacctaatgatcctcggtgcctccgttgtctctcccgatgcgacgctctccccggccttcccccatcgacgccctgtctcattagccggccattggtccccttgcccgtcccgtccccgtccccgtcctcttgtcccgacgaacgacctgctcgcctcggccgaagtgggcagcagcagcgccctgcgtagcgcctgtgccgtagggggatccggatatgcagccgtccaaggccaaggtcgaggtgcaaggacgcaaggccaaacttgccacttcctaccaggaactcctcgatgaattctcgaacaaggacctcaagaacgtgggcaactatgccttgggaaggctgatagggaaaggctccttcggcaaggtatacctcgcgcaccacaagctcaccaacggctccaaggttgtcctcaagtccgccgacaaggacgacgccaaccttgcccgcgagatccaccaccaccgccagttcgtccatcctcacatcgcccgcctgtacgaagtcatagtcaccgagtctctcgtctggctcgtcctcgaatactgctcgggcgatgagctctataatttcctcctcaagcacggccgtctgtccgtcgaaaagtcccagaagatcttcacccagcttgttggcgccgtctcctacgtccaccagcagtcgtgtgtgcaccgcgacctgaagctcgagaacatcctgctcgacaagcacgagaacgtgaagctggtcgacttcggcttcacccgcgagtatgaaggcaagtccaaccacctgcagaccttctgcggcaccgtctgctactcggccccggagatgctgaagggcgagaagtacgccggcgagaaggtcgatgtctggagcctgggcgtcattctctacgcactcctctgcggcgagctccccttcgacgatgacgatgacaacgttacgaggaccaagatcctgtccgacgacccgaaattccccgaccacttgcccagtgatgcggttgcactgttgaagatgctactatccaagcggccactgctccgaccgacgctgcccgacatcctctcccatcctttcctcgccgaccacgcgcctcagcagcaggccatcctgaagctccaccaaccgcctccgtttgccacaccgctcgagaaggactgcctccaccgaatgcgcagcgccggcgtcgacatcgatgccgtcatcgagagcgttctgtcgcagagatgcgatgcgctggcgggctggtggacgttgctcttggaaaaggaggagcgcaaggccaagagacgcgagaggcggcgcagggagaaggaagagaaccgaaactctaggcgtttttcggcgaattcgagcaaactcgagcgcatggcccctattctcgacgaagaccccagcggcatggagtccagtctgctgcccaggacgcgcgggagagcagagaggcggagcgcccactatgccgatttcaccatctccgacctccccaatctgcctgaatggaaagagaagggcagtttcagtcccgacaccgtcacgcccccgccgccggtcgacaaagattcggtgcgctccgtcagctcgtcccgccaccgccctatcccgccacccaaggaaggcatccttcgaagcgcaagatcccgaggctcgacccttcaccttgtgaccactgcagatgtgttgaataacagccaggtcacgcgccagcagaccacactccagaaagtccgctccaaaccgtcgcaagccatcgtcgcgacgtggaagaactggacacactggattgtggagaacacgaggaggcatcggccgaacaagcgaggcagccagtccacgcccaatcttcacaaagatggcgcgtcgggcggcaaagcctccggcgagccaagtccacggccacaaaccagcaaataccctgggcccgtgggcagctcgaacgcgcggagtaacggcaactcgcccaacatcaccaatgggcatgtgaaggagaaggatagcgtcgcgggcaacccgtcgacgaaaccgttaccgacggggctcacgatccagcccaatgtggcaccgagagtatcgtccgccagctacaagcgccagtccctttcgccagtccctctgacgccacggtcatcgatgcggcgcccttcgaccggtctacgcggaagaaagtcgacgtcgtcgtctctgtcgtcgatccggacgatgccacatcatcatcacacccactccaaggctagctcgacgagctccaacggctctgtgtcgacatcgaagacgccactgggaggaagcaggtcaccgcatcactcggtcaaagtgctgccggcgacgcccacgagcacatccttcccgtcaaacatccggctggtgcgcggccctgcgttgacactcaacttcaacgagggaatgccagcttcagggtcacataaccctcccgggtcaccgaatccgttctcggcgggcagcagccagtcggtgctttttgccaagcgaaaacggaacttgttcaagggtccgatgctttcgatgaacaccgcgacagctagccgggcgggttcgtcatcgggaaaccacagtcgaagcgccagcgccagcggcttggctcgacgaagtggggagatcacgatacaagaagaagacgaagaggctgcagatgaggaagaaatagaagaggtagaccagttctcgccgatttttagtagacctggcgagaaggtagaggagatatacgagagcgaggagaaggacgaaggcgaacataacgacacagtcacggcggccaaccatattacgaccgagataaaaagcgactagaagatacccgatagcttttctacagtaaatattaacgaacatgaattcttttatttcgatcttctacacgacttggttttaggagcaacgtaatgagaattaaactacgcatgggatacttcgaagtaaatctgtgaagaactttgaaggtaaatgatgcagctaaccactaaggttcctacctaactttactgccgggaagatgccgggctgcgatgcttcaacctcacccactcgaatcatagtgtttttgttcctagatatcatactcaaaatttaagatcgaaatttaaaaagaagggggttgaacctcaagaaaaggaaatattacagaatgaaagacttaaat

SEQ ID NO: 13554 - DNA, 2589 bp, Muscodor strobelii
  misc_feature: SGI cDNA ID NO. 564445
  misc_feature: Reduced expression when VOC is produced
  misc_feature: Encodes the peptide sequence at SEQ ID NO 13555
atgcagccgtccaaggccaaggtcgaggtgcaaggacgcaaggccaaacttgccacttcctaccaggaactcctcgatgaattctcgaacaaggacctcaagaacgtgggcaactatgccttgggaaggctgatagggaaaggctccttcggcaaggtatacctcgcgcaccacaagctcaccaacggctccaaggttgtcctcaagtccgccgacaaggacgacgccaaccttgcccgcgagatccaccaccaccgccagttcgtccatcctcacatcgcccgcctgtacgaagtcatagtcaccgagtctctcgtctggctcgtcctcgaatactgctcgggcgatgagctctataatttcctcctcaagcacggccgtctgtccgtcgaaaagtcccagaagatcttcacccagcttgttggcgccgtctcctacgtccaccagcagtcgtgtgtgcaccgcgacctgaagctcgagaacatcctgctcgacaagcacgagaacgtgaagctggtcgacttcggcttcacccgcgagtatgaaggcaagtccaaccacctgcagaccttctgcggcaccgtctgctactcggccccggagatgctgaagggcgagaagtacgccggcgagaaggtcgatgtctggagcctgggcgtcattctctacgcactcctctgcggcgagctccccttcgacgatgacgatgacaacgttacgaggaccaagatcctgtccgacgacccgaaattccccgaccacttgcccagtgatgcggttgcactgttgaagatgctactatccaagcggccactgctccgaccgacgctgcccgacatcctctcccatcctttcctcgccgaccacgcgcctcagcagcaggccatcctgaagctccaccaaccgcctccgtttgccacaccgctcgagaaggactgcctccaccgaatgcgcagcgccggcgtcgacatcgatgccgtcatcgagagcgttctgtcgcagagatgcgatgcgctggcgggctggtggacgttgctcttggaaaaggaggagcgcaaggccaagagacgcgagaggcggcgcagggagaaggaagagaaccgaaactctaggcgtttttcggcgaattcgagcaaactcgagcgcatggcccctattctcgacgaagaccccagcggcatggagtccagtctgctgcccaggacgcgcgggagagcagagaggcggagcgcccactatgccgatttcaccatctccgacctccccaatctgcctgaatggaaagagaagggcagtttcagtcccgacaccgtcacgcccccgccgccggtcgacaaagattcggtgcgctccgtcagctcgtcccgccaccgccctatcccgccacccaaggaaggcatccttcgaagcgcaagatcccgaggctcgacccttcaccttgtgaccactgcagatgtgttgaataacagccaggtcacgcgccagcagaccacactccagaaagtccgctccaaaccgtcgcaagccatcgtcgcgacgtggaagaactggacacactggattgtggagaacacgaggaggcatcggccgaacaagcgaggcagccagtccacgcccaatcttcacaaagatggcgcgtcgggcggcaaagcctccggcgagccaagtccacggccacaaaccagcaaataccctgggcccgtgggcagctcgaacgcgcggagtaacggcaactcgcccaacatcaccaatgggcatgtgaaggagaaggatagcgtcgcgggcaacccgtcgacgaaaccgttaccgacggggctcacgatccagcccaatgtggcaccgagagtatcgtccgccagctacaagcgccagtccctttcgccagtccctctgacgccacggtcatcgatgcggcgcccttcgaccggtctacgcggaagaaagtcgacgtcgtcgtctctgtcgtcgatccggacgatgccacatcatcatcacacccactccaaggctagctcgacgagctccaacggctctgtgtcgacatcgaagacgccactgggaggaagcaggtcaccgcatcactcggtcaaagtgctgccggcgacgcccacgagcacatccttcccgtcaaacatccggctggtgcgcggccctgcgttgacactcaacttcaacgagggaatgccagcttcagggtcacataaccctcccgggtcaccgaatccgttctcggcgggcagcagccagtcggtgctttttgccaagcgaaaacggaacttgttcaagggtccgatgctttcgatgaacaccgcgacagctagccgggcgggttcgtcatcgggaaaccacagtcgaagcgccagcgccagcggcttggctcgacgaagtggggagatcacgatacaagaagaagacgaagaggctgcagatgaggaagaaatagaagaggtagaccagttctcgccgatttttagtagacctggcgagaaggtagaggagatatacgagagcgaggagaaggacgaaggcgaacataacgacacagtcacggcggccaaccatattacgaccgagataaaaagcgactag

SEQ ID NO: 13555 - protein, 862 aa, Muscodor strobelii
  misc_feature: SGI Peptide ID NO. 564445
  misc_feature (39)..(286): Pfam Id: PF00069 Pfam Desc: Protein kinase domain
  misc_feature (39)..(286): Pfam Id: PF07714 Pfam Desc: Protein tyrosine kinase
  misc_feature (39)..(234): Pfam Id: PF07714 Pfam Desc: Protein tyrosine kinase
  misc_feature (1)..(839): NCBI GI: 256725024 Blast Desc: NECHADRAFT_91501 [Nectria haematococca mpVI 77-13-4]
  misc_feature (1)..(831): NCBI GI: 171680751 Blast Desc: protein product [Podospora anserina] gi|170940003|emb|CAP65229.1| protein product [Podospora anserina]
  misc_feature (60)..(839): NCBI GI: 46122773 Blast Desc: FG05764.1 [Gibberella zeae PH-1]
  misc_feature (1)..(802): NCBI GI: 85092699 Blast Desc: NCU02245 [Neurospora crassa OR74A] gi|28920938|gb|EAA30268.1| conserved [Neurospora crassa OR74A]
  misc_feature (1)..(779): NCBI GI: 240106568 Blast Desc: Protein kinase domain containing protein [Coccidioides posadasii C735 delta SOWgp]
  misc_feature (1)..(820): NCBI GI: 261201416 Blast Desc: serine/threonine protein kinase [Ajellomyces dermatitidis SLH14081] gi|239592167|gb|EEQ74748.1| serine/threonine protein kinase [Ajellomyces dermatitidis protein
  misc_feature (1)..(806): NCBI GI: 258564670 Blast Desc: OSK2 protein [Uncinocarpus reesii 1704] gi|237908587|gb|EEP82988.1| OSK2 protein [Uncinocarpus reesii 1704]
  misc_feature (1)..(770): NCBI GI: 242808856 Blast Desc: serine/threonine protein kinase, [Talaromyces stipitatus ATCC 10500] gi|218715875|gb|EED15297.1| serine/threonine protein kinase, [Talaromyces stipitatus ATCC
  misc_feature (27)..(799): NCBI GI: 189193737 Blast Desc: PTRG_02874 [Pyrenophora tritici-repentis Pt-1C-BFP] gi|187978771|gb|EDU45397.1| PTRG_02874 [Pyrenophora tritici-repentis Pt-1C-BFP]
  misc_feature (4)..(766): NCBI GI: 255938782 Blast Desc: Pc14g01670 [Penicillium chrysogenum Wisconsin 54-1255] gi|211584782|emb|CAP74308.1| Pc14g01670 [Penicillium chrysogenum Wisconsin 54-1255]
  misc_feature: Useful for introducing or modulating the production of volatile compounds
MQPSKAKVEVQGRKAKLATSYQELLDEFSNKDLKNVGNYALGRLIGKGSFGKVYLAHHKLTNGSKVVLKSADKDDANLAREIHHHRQFVHPHIARLYEVIVTESLVWLVLEYCSGDELYNFLLKHGRLSVEKSQKIFTQLVGAVSYVHQQSCVHRDLKLENILLDKHENVKLVDFGFTREYEGKSNHLQTFCGTVCYSAPEMLKGEKYAGEKVDVWSLGVILYALLCGELPFDDDDDNVTRTKILSDDPKFPDHLPSDAVALLKMLLSKRPLLRPTLPDILSHPFLADHAPQQQAILKLHQPPPFATPLEKDCLHRMRSAGVDIDAVIESVLSQRCDALAGWWTLLLEKEERKAKRRERRRREKEENRNSRRFSANSSKLERMAPILDEDPSGMESSLLPRTRGRAERRSAHYADFTISDLPNLPEWKEKGSFSPDTVTPPPPVDKDSVRSVSSSRHRPIPPPKEGILRSARSRGSTLHLVTTADVLNNSQVTRQQTTLQKVRSKPSQAIVATWKNWTHWIVENTRRHRPNKRGSQSTPNLHKDGASGGKASGEPSPRPQTSKYPGPVGSSNARSNGNSPNITNGHVKEKDSVAGNPSTKPLPTGLTIQPNVAPRVSSASYKRQSLSPVPLTPRSSMRRPSTGLRGRKSTSSSLSSIRTMPHHHHTHSKASSTSSNGSVSTSKTPLGGSRSPHHSVKVLPATPTSTSFPSNIRLVRGPALTLNFNEGMPASGSHNPPGSPNPFSAGSSQSVLFAKRKRNLFKGPMLSMNTATASRAGSSSGNHSRSASASGLARRSGEITIQEEDEEAADEEEIEEVDQFSPIFSRPGEKVEEIYESEEKDEGEHNDTVTAANHITTEIKSD

SEQ ID NO: 13556 - DNA, 3608 bp, Muscodor strobelii; identical to SEQ ID NO: 13553
  misc_feature: SGI EST ID NO. CUFF.32590.0
  misc_feature: Variant of the nucleotide sequence at SEQ ID NO 13554

SEQ ID NO: 13557 - DNA, 1704 bp, Muscodor strobelii
  misc_feature: SGI cDNA ID NO. 564446
  misc_feature: Encodes the peptide sequence at SEQ ID NO 13558
atgtttctggatcgactattctcaaagctcgagttggtccctggcgtatcgactgcaacgctctcgtcatggcatatttgcatagtgacattggctacggccatcacggccattattcttgattatatctatatgttatatatgcggtctcaactaccgcccggacctttcccctggcccatcgtaggaaacactttcatgctgcctgatgaaaaaccgtggatctggttcgaggagctatcgaagtcatacgatgcacaactcataacgatatggattggccgtaatccaacgatctggatcaatgatgcatgggccgcttcagaaatcttcgagaagcgcgccgggatatactcatcaagaccccggatgcttgtctttgctgagctgggtgccggccaggaaaacttactcaacatgtacacaaccacgccagagcagcgcgacaggtggcgtgtccaccgtaaactcatccaccacggcgtcggtgtgcaatccgtccgcaagtatcgagagttccagaataacgagagccgtgtagtggccaaggacttgcttcacgcacctgacgactatgtgaaacacttcgagcgatatgccactagcgttgtgtccatcatcgctttcgggcggcgagtagagagttgggacgatccgatcattaccgaagtcatcgccatgatgcacctggcggcagatttgaatgttccgggtaaaaagttccctatgctgatggagactttccccttcctcgccagatttccaaacgaaattgcgccgtggaagtacggactcggaaagaagcgagctttccatttcttttacgcacttgccgacgaggcggtgaaaaaggacgggcacaaggactcttttgccaattacctgtttgctgaaagaccaaaatatgatctacgagaggtggaaatctcatctcttacaggtaatttatttggcgctgggtcagacacgagcagcagtactctcatcaccttcatcttggcctgttgtgccttcccggaggctgtaaagcccgcagtcgaggagttagaccgggttgtcggccaccacaggagcccatcttgggaagacgaagacgctctaccttatgtcaaggcttttgtgaaggaaattcttcggtggcgatccgttgctattataggtggtcaacctcatgctcccacgcaagacgattattacaagggctggttgataccgaaaggcgcgtggattcaaggcaacatctgggcaattcaccacaatgaacgggaattccctgaacctgatacttttaacccgaaccggtttctgccataccatccggatagtcgcccgtttccaggggaaaggggctacatgacctttggctggggccgaagagtgtgctcagggcaggcgctggcggaacaaggggtctggatcaccgtggctcgtattctctggggcttcaacatacagaagaagacgagagaagatggcagtgtcgtcgaagtagacattttcgactatacaaacggccttaacatgagacctcgcccttttgagtgcagtattacgccaaggagtagcgagattcgcgaaacgattgagagagagggcataaaggcattggaggagttagaagagtatcgtggtgaaacgaaataccgaatgtcgacattctacagccgaaacaatctcgcgatggatctgtatgccgacgagtag

SEQ ID NO: 13558 - protein, 567 aa, Muscodor strobelii
  misc_feature: SGI Peptide ID NO. 564446
  misc_feature (53)..(517): Pfam Id: PF00067 Pfam Desc: Cytochrome P450
  misc_feature (308)..(479): Pfam Id: PF00067 Pfam Desc: Cytochrome P450
  misc_feature (53)..(258): Pfam Id: PF00067 Pfam Desc: Cytochrome P450
  misc_feature (1)..(559): NCBI GI: 212529520 Blast Desc: cytochrome P450, [Penicillium marneffei ATCC 18224] gi|210074315|gb|EEA28402.1| cytochrome P450, [Penicillium marneffei ATCC 18224]
  misc_feature (28)..(559): NCBI GI: 115384806 Blast Desc: conserved [Aspergillus terreus NIH2624] gi|114196642|gb|EAU38342.1| conserved [Aspergillus terreus NIH2624]
  misc_feature (52)..(542): NCBI GI: 189207745 Blast Desc: cytochrome P450 98A3 [Pyrenophora tritici-repentis Pt-1C-BFP] gi|187976299|gb|EDU42925.1| cytochrome P450 98A3 [Pyrenophora tritici-repentis Pt-1C-BFP]
  misc_feature (1)..(557): NCBI GI: 171682918 Blast Desc: protein product [Podospora anserina] gi|170941418|emb|CAP67069.1| protein product [Podospora anserina]
  misc_feature (36)..(558): NCBI GI: 164424538 Blast Desc: NCU10344 [Neurospora crassa OR74A] gi|157070556|gb|EDO65067.1| conserved [Neurospora crassa OR74A]
  misc_feature (50)..(556): NCBI GI: 145608536 Blast Desc: MGG_12799 [Magnaporthe grisea 70-15] gi|145016002|gb|EDK00492.1| MGG_12799 [Magnaporthe grisea 70-15]
  misc_feature (88)..(559): NCBI GI: 169783212 Blast Desc: [Aspergillus oryzae RIB40] gi|83774812|dbj|BAE64935.1| protein product [Aspergillus oryzae]
  misc_feature (140)..(503): NCBI GI: 169615046 Blast Desc: SNOG_10677 [Phaeosphaeria nodorum SN15] gi|160702872|gb|EAT82071.2| SNOG_10677 [Phaeosphaeria nodorum SN15]
  misc_feature (38)..(563): NCBI GI: 256723500 Blast Desc: NECHADRAFT_80967 [Nectria haematococca mpVI 77-13-4]
  misc_feature (28)..(552): NCBI GI: 256726340 Blast Desc: NECHADRAFT_82145 [Nectria haematococca mpVI 77-13-4]
  misc_feature (49)..(519): SWISSPROT Homolog: EC 1.14.14.1 Unspecific monooxygenase
MFLDRLFSKLELVPGVSTATLSSWHICIVTLATAITAIILDYIYMLYMRSQLPPGPFPWPIVGNTFMLPDEKPWIWFEELSKSYDAQLITIWIGRNPTIWINDAWAASEIFEKRAGIYSSRPRMLVFAELGAGQENLLNMYTTTPEQRDRWRVHRKLIHHGVGVQSVRKYREFQNNESRVVAKDLLHAPDDYVKHFERYATSVVSIIAFGRRVESWDDPIITEVIAMMHLAADLNVPGKKFPMLMETFPFLARFPNEIAPWKYGLGKKRAFHFFYALADEAVKKDGHKDSFANYLFAERPKYDLREVEISSLTGNLFGAGSDTSSSTLITFILACCAFPEAVKPAVEELDRVVGHHRSPSWEDEDALPYVKAFVKEILRWRSVAIIGGQPHAPTQDDYYKGWLIPKGAWIQGNIWAIHHNEREFPEPDTFNPNRFLPYHPDSRPFPGERGYMTFGWGRRVCSGQALAEQGVWITVARILWGFNIQKKTREDGSVVEVDIFDYTNGLNMRPRPFECSITPRSSEIRETIEREGIKALEELEEYRGETKYRMSTFYSRNNLAMDLYADE

SEQ ID NO: 13559 - DNA, 2011 bp, Muscodor strobelii
  misc_feature: SGI EST ID NO. CUFF.32456.0
  misc_feature: Variant of the nucleotide sequence at SEQ ID NO 13557
ccggacctttcccctggcccatcgtaggaaacactttcatgctgcctgatgaaaaaccgtggatctggttcgaggagctatcgaagtcatacgatgcacaactcataacgatatggattggccgtaatccaacgatctggatcaatgatgcatgggccgcttcagaaatcttcgagaagcgcgccgggatatactcatcaagaccccggatgcttgtctttgctgagctgggtgccggccaggaaaacttactcaacatgtacacaaccacgccagagcagcgcgacaggtggcgtgtccaccgtaaactcatccaccacggcgtcggtgtgcaatccgtccgcaagtatcgagagttccagaataacgagagccgtgtagtggccaaggacttgcttcacgcacctgacgactatgtgaaacacttcgagcgatatgccactagcgttgtgtccatcatcgctttcgggcggcgagtagagagttgggacgatccgatcattaccgaagtcatcgccatgatgcacctggcggcagatttgaatgttccgggtaaaaagttccctatgctgatggagactttccccttcctcgccagatttccaaacgaaattgcgccgtggaagtacggactcggaaagaagcgagctttccatttcttttacgcacttgccgacgaggcggtgaaaaaggacgggcacaaggactcttttgccaattacctgtttgctgaaagaccaaaatatgatctacgagaggtggaaatctcatctcttacaggtaatttatttggcgctgggtcagacacgagcagcagtactctcatcaccttcatcttggcctgttgtgccttcccggaggctgtaaagcccgcagtcgaggagttagaccgggttgtcggccaccacaggagcccatcttgggaagacgaagacgctctaccttatgtcaaggcttttgtgaaggaaattcttcggtggcgatccgttgctattataggtggtcaacctcatgctcccacgcaagacgattattacaagggctggttgataccgaaaggcgcgtggattcaaggcaacatctgggcaattcaccacaatgaacgggaattccctgaacctgatacttttaacccgaaccggtttctgccataccatccggatagtcgcccgtttccaggggaaaggggctacatgacctttggctggggccgaagagtgtgctcagggcaggcgctggcggaacaaggggtctggatcaccgtggctcgtattctctggggcttcaacatacagaagaagacgagagaagatggcagtgtcgtcgaagtagacattttcgactatacaaacggccttaacatgagacctcgcccttttgagtgcagtattacgccaaggagtagcgagattcgcgaaacgattgagagagagggcataaaggcattggaggagttagaagagtatcgtggtgaaacgaaataccgaatgtcgacattctacagccgaaacaatctcgcgatggatctgtatgccgacgagtagtaggatgccggtttaggaaggaaccacagttcaatgacttgtgagatgtccggagagctacagtataatcactattgatggctttttgtcaatgcagagttgttgcatatccaacggcggctaccgatattgatcgtgcctcctgagagtctgcctcaattaatgacattttgttgactcgttgtctagtctctctttgttcggtagtcggtctcctcgaacgccgtaggctttgaagcgtgggttcaaagacatgaggatcggttctttgccggcggtaattccatggacctgtttctagacctcgatcgatcgcagttgatgatgcaaagctcttcacgttgctacctgcctagaatgggatgacgaccccgttgggtacacttcgaaccatgttcaatagctccaggtcgcatcaaatagtgtctactatatagtgtaaaatgcatattcccacttatctcgct

SEQ ID NO: 13560 - DNA, 1446 bp, Muscodor strobelii
  misc_feature: SGI cDNA ID NO. 564447
  misc_feature: Encodes the peptide sequence at SEQ ID NO 13561
atgtacacaagaacacttcttgcgttaggtctcacagccgcgacttctggggttgccgctggaccgtgtgacatctatgcatctggaggcacgccttgcgtcgcagcccacagcaccactcgagccctctatagttcctattcaggctcgctataccaggtgcttcgtggctctgacaatgccaccgcaaacatattaccactttccgccggcggtgttgccaatgctgcaacacaagataacttctgcagtggcacgacctgcctcatctcgatcatttatgatcagtccggacgtggtaaccatctgacgcaagctccgcccggcggtgccgcgcggggaccaaacaggaaagcatacggcgttttcatatcgcccttcaccggctatcgcaataacaaccccagcggtactgctaaaggcgatgccgcggagggtatatatgctgtcttcgatggcacccactataacgaagcctgttgcttcgactatggtaacgcagagacaagttctctcgacactggcaatgggcatatggaagccatctactttgggacagaatttggctttggctctgggtctgggccgtggattctggcggatctagaaaatggtctctatactgccgcaggattggggcttaattcaaacaacccaaccatcaactaccgctttgtcaccgctgttgtcaaagggaactcgggcaatcagtgggctgtccgcggtggtaatgccgtatctgggtcgttgtcgacgtattacagtggtgcaaggccaacacccaactacaatcctatgagcaaggagggcgccattcttctcggcatcggtggtgacaacagcaatggggcgcagggcactttctatgaaggtgtaataacctctgggtacccatctgatgctactgaaaactcggttcaggccaacatcgtggcggcaaaatacgcgaccacttcattaacgagcggtcccgctatcaatgtcggctctaccgtgactttcaaagtcaccacatctggctataccgacaggtatatcgcacactccggttcgcaggtcaacacacaagtcatcaagtcgtccagtactgctgccttgaggaattccggtagctggatcgtccacactggtctcgctaacagcggttgcctatctttcgagtcggcagacacacctggcaatttcatccgtcactcgaattacgccttggtggttaattcaaacgacggcagcaaaatcttccaagaggacgccacattttgccaggtgagcggcctcgatggacagggcagcacactccgatctttcagctatccagctcgtaattggcgccattacaatgcccttctctacattgcaggtaactccggtcccatggccttcgacaatccggcggtctatagccaagacgtgagctttgttgtcagcaccagcttccaatcttag

SEQ ID NO: 13561 - protein, 481 aa, Muscodor strobelii
  misc_feature: SGI Peptide ID NO. 564447
  misc_feature (332)..(476): Pfam Id: PF05270 Pfam Desc: Alpha-L-arabinofuranosidase B (ABFB)
  misc_feature (22)..(319): Pfam Id: PF09206 Pfam Desc: Alpha-L-arabinofuranosidase B, catalytic
  misc_feature (117)..(319): Pfam Id: PF09206 Pfam Desc: Alpha-L-arabinofuranosidase B, catalytic
  misc_feature (22)..(116): Pfam Id: PF09206 Pfam Desc: Alpha-L-arabinofuranosidase B, catalytic
  misc_feature (6)..(479): NCBI GI: 13991905 Blast Desc: AF367026_1 alpha-L-arabinofuranosidase [Penicillium purpurogenum]
  misc_feature (7)..(479): NCBI GI: 169772253 Blast Desc: [Aspergillus oryzae RIB40] gi|83768456|dbj|BAE58593.1| protein product [Aspergillus oryzae]
  misc_feature (7)..(479): NCBI GI: 238490130 Blast Desc: fungal alpha-L-arabinofuranosidase, [Aspergillus flavus NRRL3357] gi|220696715|gb|EED53056.1| fungal alpha-L-arabinofuranosidase, [Aspergillus flavus NRRL3357]
  misc_feature (7)..(479): NCBI GI: 16754883 Blast Desc: alpha-L-arabinofuranosidase B [Aspergillus oryzae]
  misc_feature (7)..(479): NCBI GI: 16754881 Blast Desc: alpha-L-arabinofuranosidase B [Aspergillus oryzae]
  misc_feature (7)..(479): NCBI GI: 154314102 Blast Desc: BC1G_04994 [Botryotinia fuckeliana B05.10] gi|150849140|gb|EDN24333.1| BC1G_04994 [Botryotinia fuckeliana B05.10]
  misc_feature (5)..(479): NCBI GI: 70992975 Blast Desc: fungal alpha-L-arabinofuranosidase [Aspergillus fumigatus Af293] gi|66848969|gb|EAL89298.1| fungal alpha-L-arabinofuranosidase, [Aspergillus fumigatus Af293]
  misc_feature (6)..(479): NCBI GI: 3023257 Blast Desc: ABF1_TRIRE RecName: Full=Alpha-N-arabinofuranosidase; Short=Arabinosidase; Flags: Precursor gi|1580814|emb|CAA93243.1| alpha-L-arabinofuranosidase [Hypocrea jecorina]
  misc_feature (5)..(479): NCBI GI: 119473418 Blast Desc: alpha-L-arabinofuranosidase B domain protein [Neosartorya fischeri NRRL 181] gi|119406756|gb|EAW16707.1| alpha-L-arabinofuranosidase B domain protein [Neosartorya NRRL
  misc_feature (6)..(479): NCBI GI: 121709492 Blast Desc: alpha-L-arabinofuranosidase B domain protein [Aspergillus clavatus NRRL 1] gi|119400586|gb|EAW11011.1| alpha-L-arabinofuranosidase B domain protein [Aspergillus NRRL 1]
  misc_feature (22)..(479): SWISSPROT Homolog: EC 3.2.1.55 Alpha-N-arabinofuranosidase
MYTRTLLALGLTAATSGVAAGPCDIYASGGTPCVAAHSTTRALYSSYSGSLYQVLRGSDNATANILPLSAGGVANAATQDNFCSGTTCLISIIYDQSGRGNHLTQAPPGGAARGPNRKAYGVFISPFTGYRNNNPSGTAKGDAAEGIYAVFDGTHYNEACCFDYGNAETSSLDTGNGHMEAIYFGTEFGFGSGSGPWILADLENGLYTAAGLGLNSNNPTINYRFVTAVVKGNSGNQWAVRGGNAVSGSLSTYYSGARPTPNYNPMSKEGAILLGIGGDNSNGAQGTFYEGVITSGYPSDATENSVQANIVAAKYATTSLTSGPAINVGSTVTFKVTTSGYTDRYIAHSGSQVNTQVIKSSSTAALRNSGSWIVHTGLANSGCLSFESADTPGNFIRHSNYALVVNSNDGSKIFQEDATFCQVSGLDGQGSTLRSFSYPARNWRHYNALLYIAGNSGPMAFDNPAVYSQDVSFVVSTSFQS

SEQ ID NO: 13562 - DNA, 897 bp, Muscodor strobelii
  misc_feature: SGI cDNA ID NO. 564448
  misc_feature: Encodes the peptide sequence at SEQ ID NO 13563
atgttggtgacagatccaatggcggcaaaacaccacgtgagctttctgatactcggtgctgggtggacctccacattcttgatcccgcaactcgagcgccaaggcgtcacctacgcggcgacgacaacagacggtcgaaatggcacaatccccttcaaatttgacccggaatcggacgatcaatcacaattcgaaaagttgccttctgctgatactatattgattactttcccgctgaaaggcgaaggaccttctgccaagctcgtcaagatatacgctgccacgcacagtcacgacagtggaagatcgaaaacgcatgatcctcactatatccagtttggcgtaacaagtatatggacggcgcctggttggcaagacgattcgtcaccctacgaccagcataacccccgagccattgctgaagacgaactcatgacgcaggcttccgcgtcagtgttgagtctcgctggcctatacggagcggcacggcaaccgcgagattgggtaagccgagtgatcaagtccaaggctgacctcaagacgaaaggtgcattgcacgtgatacacggcgatgatgttgccagagccgttctagccctacaccggaacttcacgccgaacaagcgttggctgatatgtgatatgcatgtctacgactggtgggacctgactcaagactgggctgtacagactttgcgggacgcggaaactaacacgtccgtttccaaggagaaggttcaacaacagagtgaattgctacaatgggtcggggagttgatggtagaagagggagtgcgagcgctgcccagggatacatctgcggttgggcgaaggctcgatggtcgtggtttctggcaaaacatgggaatctggcccgtacatggtcgaattaggtag

SEQ ID NO: 13563 - protein, 298 aa, Muscodor strobelii
  misc_feature: SGI Peptide ID NO. 564448
  misc_feature (11)..(297): NCBI GI: 169614822 Blast Desc: SNOG_10560 [Phaeosphaeria nodorum SN15] gi|111060834|gb|EAT81954.1| SNOG_10560 [Phaeosphaeria nodorum SN15]
  misc_feature (9)..(297): NCBI GI: 39946502 Blast Desc: MGG_08260 [Magnaporthe grisea 70-15] gi|145020101|gb|EDK04329.1| MGG_08260 [Magnaporthe grisea 70-15]
  misc_feature (13)..(297): NCBI GI: 189208091 Blast Desc: conserved [Pyrenophora tritici-repentis Pt-1C-BFP] gi|187976472|gb|EDU43098.1| conserved [Pyrenophora tritici-repentis Pt-1C-BFP]
  misc_feature (13)..(297): NCBI GI: 170098208 Blast Desc: [Laccaria bicolor S238N-H82] gi|164644761|gb|EDR09010.1| [Laccaria bicolor S238N-H82]
  misc_feature (12)..(297): NCBI GI: 171679026 Blast Desc: protein product [Podospora anserina] gi|170937584|emb|CAP62241.1| protein product [Podospora anserina]
  misc_feature (13)..(297): NCBI GI: 85092171 Blast Desc: NCU06915 [Neurospora crassa OR74A] gi|28920665|gb|EAA30026.1| [Neurospora crassa OR74A]
  misc_feature (13)..(270): NCBI GI: 169863763 Blast Desc: CC1G_10741 [Coprinopsis cinerea okayama7#130] gi|116500405|gb|EAU83300.1| CC1G_10741 [Coprinopsis cinerea okayama7#130]
  misc_feature (9)..(203): NCBI GI: 154295696 Blast Desc: BC1G_12851 [Botryotinia fuckeliana B05.10] gi|150843884|gb|EDN19077.1| BC1G_12851 [Botryotinia fuckeliana B05.10]
  misc_feature (8)..(286): NCBI GI: 71020155 Blast Desc: UM04161.1 [Ustilago maydis 521] gi|46100017|gb|EAK85250.1| UM04161.1 [Ustilago maydis 521]
  misc_feature (1)..(187): NCBI GI: 169863785 Blast Desc: CC1G_10752 [Coprinopsis cinerea okayama7#130] gi|116500416|gb|EAU83311.1| CC1G_10752 [Coprinopsis cinerea okayama7#130]
MLVTDPMAAKHHVSFLILGAGWTSTFLIPQLERQGVTYAATTTDGRNGTIPFKFDPESDDQSQFEKLPSADTILITFPLKGEGPSAKLVKIYAATHSHDSGRSKTHDPHYIQFGVTSIWTAPGWQDDSSPYDQHNPRAIAEDELMTQASASVLSLAGLYGAARQPRDWVSRVIKSKADLKTKGALHVIHGDDVARAVLALHRNFTPNKRWLICDMHVYDWWDLTQDWAVQTLRDAETNTSVSKEKVQQQSELLQWVGELMVEEGVRALPRDTSAVGRRLDGRGFWQNMGIWPVHGRIR

SEQ ID NO: 13564 - DNA, 942 bp, Muscodor strobelii
  misc_feature: SGI cDNA ID NO. 564449
  misc_feature: Reduced expression when VOC is produced
  misc_feature: Encodes the peptide sequence at SEQ ID NO 13565
atgtcatcaaataatgcggtcacgcccacattcggggcagctgattacgtgaagttcttcagcgctggtgcattagcagcaacactcacacatggtgccgcaacgccgatagatgtggtcaagacacgtattcaggttgacgatgccatgaaaggaatgaatatggtccgtgcagcgcggacaattgtcgccaaagagggcgcgtccgccttattgacaggtttcggtcccacggcggttggttatctcgtccagggtggtggcaagttcgcaggatacgagttcttcaagaagaaatacatcgacttggttggttctcaggagaaagcgacgaagcaccgcacggctatttatttgagtgcaagtgccagcgctgagttcttcgctgatattgcgctctgtccgctagaagctacacgtattcgtctagtatcgcaacgtggtttcgcaaatggtcttgttcctggcttcatgagactcgctcgcgaggaaggcttccgcgggttctactctggcttcgttcctttgttgttcaagcaggtaccttacgctgtaggccagttttctgtacatgaggcagccgtggaggcgatttaccgcaccatcggatcggagcgcaaggctaagctcacacacctcgaatcgaccggggttgaattgagttccggtatcgttgccggcgttgcagctgctgtcttatcccatcctgcagatacgctgctatccgcaatcaataaaggctctggggaccctaagcaaggcgccaccgctcggatgttctcgcttgcacgagaattcggccccaagcggctattgctatcgggactcggaccacgtgttttgatgacttgtggcctggttgccggacaattcgttatctacgcgcagtgcaagactctgacaggcgctccacccggtatcgaaattcataaagaggagtga

SEQ ID NO: 13565 - protein, 313 aa, Muscodor strobelii
  misc_feature: SGI Peptide ID NO. 564449
  misc_feature (15)..(104): Pfam Id: PF00153 Pfam Desc: Mitochondrial carrier protein
  misc_feature (114)..(202): Pfam Id: PF00153 Pfam Desc: Mitochondrial carrier protein
  misc_feature (215)..(305): Pfam Id: PF00153 Pfam Desc: Mitochondrial carrier protein
  misc_feature (9)..(313): NCBI GI: 261360064 Blast Desc: mitochondrial phosphate carrier protein [Verticillium albo-atrum VaMs.102]
  misc_feature (9)..(313): NCBI GI: 145609439 Blast Desc: MGG_13428 [Magnaporthe grisea 70-15] gi|145016804|gb|EDK01234.1| MGG_13428 [Magnaporthe grisea 70-15]
  misc_feature (1)..(313): NCBI GI: 46134031 Blast Desc: FG09155.1 [Gibberella zeae PH-1]
  misc_feature (1)..(312): NCBI GI: 256720843 Blast Desc: [Nectria haematococca mpVI 77-13-4]
  misc_feature (1)..(313): NCBI GI: 170089309 Blast Desc: [Laccaria bicolor S238N-H82] gi|164649137|gb|EDR13379.1| [Laccaria bicolor S238N-H82]
  misc_feature (7)..(312): NCBI GI: 58262964 Blast Desc: phosphate transport protein MIR1 [Cryptococcus neoformans var. neoformans JEC21] gi|134108144|ref|XP_777270.1| CNBB2550 [Cryptococcus neoformans var. neoformans B-3501A] var.
  misc_feature (5)..(312): NCBI GI: 71003872 Blast Desc: UM00455.1 [Ustilago maydis 521] gi|46096133|gb|EAK81366.1| UM00455.1 [Ustilago maydis 521]
  misc_feature (16)..(309): NCBI GI: 58262268 Blast Desc: inorganic phosphate transporter [Cryptococcus neoformans var. neoformans JEC21] gi|134118840|ref|XP_771923.1| CNBN1030 [Cryptococcus neoformans var. neoformans B-3501A] var.
  misc_feature (1)..(309): NCBI GI: 284096602 Blast Desc: [Naegleria gruberi]
  misc_feature (37)..(298): NCBI GI: 238583043 Blast Desc: MPER_10665 [Moniliophthora perniciosa FA553] gi|215453158|gb|EEB91048.1| MPER_10665 [Moniliophthora perniciosa FA553]
  misc_feature: Useful for introducing or modulating the production of volatile compounds
MSSNNAVTPTFGAADYVKFFSAGALAATLTHGAATPIDVVKTRIQVDDAMKGMNMVRAARTIVAKEGASALLTGFGPTAVGYLVQGGGKFAGYEFFKKKYIDLVGSQEKATKHRTAIYLSASASAEFFADIALCPLEATRIRLVSQRGFANGLVPGFMRLAREEGFRGFYSGFVPLLFKQVPYAVGQFSVHEAAVEAIYRTIGSERKAKLTHLESTGVELSSGIVAGVAAAVLSHPADTLLSAINKGSGDPKQGATARMFSLAREFGPKRLLLSGLGPRVLMTCGLVAGQFVIYAQCKTLTGAPPGIEIHKEE

SEQ ID NO: 13566 - DNA, 2714 bp, Muscodor strobelii
  misc_feature: SGI EST ID NO. CUFF.32518.0
  misc_feature: Variant of the nucleotide sequence at SEQ ID NO 13564
cggcacaggtcggtgggaaaggcgtaatctgttcgaccaaaacttcatcgctatcacatcaaattacctacgcaaggagaatcgctagttgaatctttagctgggtttggcctcaaaatgcgtcagacccactggaggtattgctatcgtagtgacgtcactgggttcaccgttcgtctactccgtcacagacattagcttgtttgccacgggtcaattccagaataaaagatgcgactcatatccagtcgtccaagttgtgctctgcaaatgagatattcgagagatagagcagtatcctacggtgccgacgacaagtattgaagagaattcgattgtgcttacactaccctgtccatccgccgtgccccgtccaattgagtgaggtctcgttgcatcccgcctgcatggtcttcgggggatcactcaagactgattgcattgtgccattgagacacaaaaccagaagcctcctgttctttctactcgcctttacctcacctcataccggcggaagagtgctctagaagtcatcagtaccagtcggaaaatgtcatcaaataatgcggtcacgcccacattcggggcagctgattacgtgaagttcttcagcgctggtgcattagcagcaacactcacacatggtgccgcaacgccgatagatgtggtcaagacacgtattcaggttgacgatgccatgaaaggaatgaatatggtccgtgcagcgcggacaattgtcgccaaagagggcgcgtccgccttattgacaggtttcggtcccacggcggttggttatctcgtccagggtggtggcaagttcgcaggatacgagttcttcaagaagaaatacatcgacttggttggttctcaggagaaagcgacgaagcaccgcacggctatttatttgagtgcaagtgccagcgctgagttcttcgctgatattgcgctctgtccgctagaagctacacgtattcgtctagtatcgcaacgtggtttcgcaaatggtcttgttcctggcttcatgagactcgctcgcgaggaaggcttccgcgggttctactctggcttcgttcctttgttgttcaagcaggtaccttacgctgtaggccagttttctgtacatgaggcagccgtggaggcgatttaccgcaccatcggatcggagcgcaaggctaagctcacacacctcgaatcgaccggggttgaattgagttccggtatcgttgccggcgttgcagctgctgtcttatcccatcctgcagatacgctgctatccgcaatcaataaaggctctggggaccctaagcaaggcgccaccgctcggatgttctcgcttgcacgagaattcggccccaagcggctattgctatcgggactcggaccacgtgttttgatgacttgtggcctggttgccggacaattcgttatctacgcgcagtgcaagactctgacaggcgctccacccggtatcgaaattcataaagaggagtgaattgcatataatgcatatttggtgccgttcacgagaatgagtttttgaatagaatggcggagttcggggccaatatacttggattgcatgaaaagcgcaatggagttcggacagtaattcttgcatatgtatataattcataatatataccgtccacctacctaattcgaccatgtacgggccagattcccatgttttgccagaaaccacgaccatcgagccttcgcccaaccgcagatgtatccctgggcagcgctcgcactccctcttctaccatcaactccccgacccattgtagcaattcactctgttgttgaaccttctccttggaaacggacgtgttagtttccgcgtcccgcaaagtctgtacagcccagtcttgagtcaggtcccaccagtcgtagacatgcatatcacatatcagccaacgcttgttcggcgtgaagttccggtgtagggctagaacggctctggcaacatcatcgccgtgtatcacgtgcaatgcacctttcgtcttgaggtcagccttggacttgatcactcggcttacccaatctcgcggttgccgtgccgctccgtataggccagcgagactcaacactgacgcggaagcctgcgtcatgagttcgtcttcagcaatggctcgggggttatgctggtcgtagggtgacgaatcgtcttgccaaccaggcgccgtccatatacttgttacgccaaactggatatagtgaggatcatgcgttttcgatcttccactgtcgtgactgtgcgtggcagcgtatatcttgacgagcttggcagaaggtccttcgcctttcagcgggaaagtaatcaatatagtatcagcagaaggcaacttttcgaattgtgattgatcgtccgattccgggtcaaatttgaaggggattgtgccatttcgaccgtctgttgtcgtcgccgcgtaggtgacgccttggcgctcgagttgcgggatcaagaatgtggaggtccacccagcaccgagtatcagaaagctcacgtggtgttttgccgccattggatctgtcaccaacattattgcggaggtagaaattgattggctaggcttttgggagatgagctgagagtcagacaattttcgaatcgcaggagattattgttttgtttgtgaagagcatgcattcggtatagacggtaattcgcaagtggtgacgtgacgtctgagggccaagcttttcgggtg

SEQ ID NO: 13567 - DNA, 3285 bp, Muscodor strobelii
  misc_feature: SGI cDNA ID NO. 564450
  misc_feature: Encodes the peptide sequence at SEQ ID NO 13568
atgaccggtctacgtattgccgcaaagaccccgaggcctaccctcagggagtacctcgatgtccagcttgagagggcctggtacgatcagaactggaccctcgtggcgtcactcgctcgcaatcggcacaagacttctaaggacgactacttcaagtctctcgagctttatgcacagtcacacagcgacaataactctgagacgactgtggtcagagaggctatacaaaaattggccaacgagaaggctgtcatcaaggattctgacgcgttaagcctatacgagagtgcctatagtaacgcattctcatatggtgaccttgcaagcgactatgctgagactattggcgcacttcgtctcgcacatgctaaagcgaatccgaaggattctaacgcgtgcatgcactctcttgaggcctgtgtctttcatggcgattttgcgaacgcgcaggagatcgctgcgctcctaaagggcaaatactcctcagagcgaaagtacgcgctcctgaacgttttgactctgtacctcctcgctactttcggcaaaatcaagacaagcggtgttcggtcgcaagaggaactccagaagaagaagcagttacttagcgcgctatctttgcgccaagctgacttggtcttgaacattcgtcaattgtctaccaagggagatcaccctgaaccaatcttgcagctttacactctgcctgatgttgttctgtggttgcaagtcagagagacatttggggcacccaaagataacctcgttatccttaagacccctcggtgggggccaattgtatttctcgagagaggttttactgatgcataccacggatgtcttgtaatcctcatgaagaattgccagtgggacgagatactctcggtcggttataccattcttgacagaattcgatcaccggcataccagcaatttttaaagcagagcaaggaagccacgaagactgccggcactgatgacgaagagtttcgcgtcgatctacgttatgctgaggcggcacaagaccaatctctctggaacgccatgtacttggctgctacgtctagccgtgggaattctgtcagcccggtgaaaagactccgaaatattcttgccaccgttgctggaattctcgagtcgcacggcttgtgtaagcctattttcaggacaaattacaacttcttcgtcttgcgcactgttctcgtcgacacagaacgatcgcaaggtactgcgacggattcacgtcacgggaagatccggctcctccttaacctcaccttgggtgccaaggacacgcgccattcccttgacttcatgttgctgaaggcaattttcaagcaactcactaaatcggaaatcgctaccttcgtctcggaactcaagatccacagcgagcttatggagcgcaatccgtacgagcttgcgctagttttctccctagagcttaagacaattttcttcctcgcaacgtcttctacggctggccaagagtgcccacgatgccgttccgtagtgccacagagcaatgagtgcgagaagtgtctcgttttcgtcacgacttgcgcgcttcgcaaataccgcgagtggacgacgagctgtgaagatgaacattcggtgaaaatcctcaacagtcctcttgaagatatctgtcttatcggagcaatcggactgatcaagcttgccatcacacctgttacaagctgggcagaggaggaagaagcaccttcatttagagtcaaaactccgcttctcctcgcagcgattgcgttcctcgactcttgcatgaagcgagtgccccgaggtgccagcatgcgtattctgttggttcgattgtacttcatgatgggctgtgtcactcgtgggttagaggcttgggattgcttccatgttaagaatatgttactcgaaagtctcggaagtctctgtcttgaccgcttgtcaactattagtccgggacatttgatttccggttccggtcacaatagcaacgctgcgcagaccatcgttcgttactacgagaaagcaacacagtctcaacaacccgagaccttgattacctgtatgaggagaaataattacagagaagccatatacgcagtagagcgtactcaaaagatgagcagaagctgtacgttagtgatatccgttatcgagcagcgtcgcggaatacgactcaaaggcggcaagaacgatatcctcattgacgatgagccacttatgagttcaatatctccagatgtccactttgaggacatcaccgactacaatactgttccccactgggagggcaagacgggcatcgctctccaggaactggtcacgactggaccattgccttccaacaaccgctgccatcttagcatccttgctgaacgattcatcgacttaatcacacatgtccagcccaaggagcagaagccctcaaaacctctcacatctgtgcgctctgagtgccaggccgtgatcctcaaatgtcacagtctcatttgggatgaattcgaggcttatttggacggtattgacgcaaagggcaaagtgtcctgccccgagaggacttatttcatcgctatcgctggactggcgaacatcgtgaaagtctgcttagagcagatgatggacgatcaagaggcggaccagaccgatactcattttcaagttttggcaagtgtcgttaaggagcagatgtccacattcatcactattggacctagcggcacgaaacgacaggtgctctatgccttcatggagcttcatgcgatggggatgcttcgtgagacatcctacgccatcaaacgcactgtccaataccttaccaactacttttcgtatcttaaggcagcagatggcaagcgcccagctatcaataactcgatcaatcgctttaattccgagcttaagaagatgtcggccatggctgattcgatggacatgaagatgaagctccatatcaagacactagattcggccttgagtgagactggatgggtcgacttcctcatagacgaggcttttccaagtggagattacgatgatcccaagggtgatcatgcagatgatgccaagcatgatactgaggatggttccgagagtggcgatgacgataatttagagagtggtggtgctgacggcgacagcagttctcagcaggcagtcagcatctcgtatagtgaactctacgagcacctcaatttagcaatcctgatggaggtgaaggaggaacaggctatgggaatcgtggattcctggcgtgacactatccgaggttggaaccaggtcaagtttgactaa

SEQ ID NO: 13568 - protein, 1094 aa, Muscodor strobelii
  misc_feature: SGI Peptide ID NO. 564450
  misc_feature (12)..(1003): NCBI GI: 85093132 Blast Desc: NCU02218 [Neurospora crassa OR74A] gi|28921077|gb|EAA30395.1| [Neurospora crassa OR74A]
  misc_feature (13)..(1094): NCBI GI: 171680699 Blast Desc: protein product [Podospora anserina] gi|170939977|emb|CAP65203.1| protein product [Podospora anserina]
  misc_feature (497)..(1094): NCBI GI: 145604927 Blast Desc: MGG_01973 [Magnaporthe grisea 70-15] gi|145012835|gb|EDJ97476.1| MGG_01973 [Magnaporthe grisea 70-15]
  misc_feature (14)..(996): NCBI GI: 156057107 Blast Desc: SS1G_04284 [Sclerotinia sclerotiorum 1980] gi|154702070|gb|EDO01809.1| SS1G_04284 [Sclerotinia sclerotiorum 1980]
  misc_feature (440)..(947): NCBI GI: 261353940 Blast Desc: conserved [Verticillium albo-atrum VaMs.102]
  misc_feature (15)..(796): NCBI GI: 154297088 Blast Desc: BC1G_12203 [Botryotinia fuckeliana B05.10] gi|150843032|gb|EDN18225.1| BC1G_12203 [Botryotinia fuckeliana B05.10]
  misc_feature (474)..(939): NCBI GI: 46122783 Blast Desc: FG05769.1 [Gibberella zeae PH-1]
  misc_feature (474)..(939): NCBI GI: 256726633 Blast Desc: NECHADRAFT_33734 [Nectria haematococca mpVI 77-13-4]
  misc_feature (12)..(290): NCBI GI: 261353940 Blast Desc: conserved [Verticillium albo-atrum VaMs.102]
  misc_feature (12)..(312): NCBI GI: 145604927 Blast Desc: MGG_01973 [Magnaporthe grisea 70-15] gi|145012835|gb|EDJ97476.1| MGG_01973 [Magnaporthe grisea 70-15]
MTGLRIAAKTPRPTLREYLDVQLERAWYDQNWTLVASLARNRHKTSKDDYFKSLELYAQSHSDNNSETTVVREAIQKLANEKAVIKDSDALSLYESAYSNAFSYGDLASDYAETIGALRLAHAKANPKDSNACMHSLEACVFHGDFANAQEIAALLKGKYSSERKYALLNVLTLYLLATFGKIKTSGVRSQEELQKKKQLLSALSLRQADLVLNIRQLSTKGDHPEPILQLYTLPDVVLWLQVRETFGAPKDNLVILKTPRWGPIVFLERGFTDAYHGCLVILMKNCQWDEILSVGYTILDRIRSPAYQQFLKQSKEATKTAGTDDEEFRVDLRYAEAAQDQSLWNAMYLAATSSRGNSVSPVKRLRNILATVAGILESHGLCKPIFRTNYNFFVLRTVLVDTERSQGTATDSRHGKIRLLLNLTLGAKDTRHSLDFMLLKAIFKQLTKSEIATFVSELKIHSELMERNPYELALVFSLELKTIFFLATSSTAGQECPRCRSVVPQSNECEKCLVFVTTCALRKYREWTTSCEDEHSVKILNSPLEDICLIGAIGLIKLAITPVTSWAEEEEAPSFRVKTPLLLAAIAFLDSCMKRVPRGASMRILLVRLYFMMGCVTRGLEAWDCFHVKNMLLESLGSLCLDRLSTISPGHLISGSGHNSNAAQTIVRYYEKATQSQQPETLITCMRRNNYREAIYAVERTQKMSRSCTLVISVIEQRRGIRLKGGKNDILIDDEPLMSSISPDVHFEDITDYNTVPHWEGKTGIALQELVTTGPLPSNNRCHLSILAERFIDLITHVQPKEQKPSKPLTSVRSECQAVILKCHSLIWDEFEAYLDGIDAKGKVSCPERTYFIAIAGLANIVKVCLEQMMDDQEADQTDTHFQVLASVVKEQMSTFITIGPSGTKRQVLYAFMELHAMGMLRETSYAIKRTVQYLTNYFSYLKAADGKRPAINNSINRFNSELKKMSAMADSMDMKMKLHIKTLDSALSETGWVDFLIDEAFPSGDYDDPKGDHADDAKHDTEDGSESGDDDNLESGGADGDSSSQQAVSISYSELYEHLNLAILMEVKEEQAMGIVDSWRDTIRGWNQVKFD

SEQ ID NO: 13569 - DNA, 8572 bp, Muscodor strobelii
  misc_feature: SGI EST ID NO. CUFF.32737.2
  misc_feature: Variant of the nucleotide sequence at SEQ ID NO 13567
agccacgaatattttgttcattggtcgcgatgctactctcaatggtatcaagcactgtgctcaataaaaggtattcccttatatctcgcaaagcttgaacatcaattggttacttgatatatctatgtacatgcctacttatgatagtactctcattattatgattccgcattggaaagattttacttaggcacataacccttcagcccttcgggcttctcagccacaattcgatatgtggttgtgattagtcgcatattgtccatctccacgaatgcttggccatcaaggcagagtctatctattagcgtcttgaagtgagctgggaggcaatgcaccttcaccagaccatgaatcatcctgcgtacagagcgaaaatggatgtcaaccttatctatgagggaggactgaaggccattgatagacgggttatcagatcgcgtgacgacaaacccagcgttttggagagctatttctagactttcaggcgttggtgttccaacggcgccaatcagaggcttgacgcgcctcatgagcgatgcatgcttaggatcgtgaggatcgaacgcgggaagtctgacccaatccagaagaagaaatttggcgccaggtttcaaaatccggtagatctccgcgaacaaggcgccggtttttgcaaagcgagagtgcttgtatttcgtagaaggcatcgaagtgctcgtctaaaaaaggaagcgggaggttgttctggtcgtgtactatgaattcattgtgaaacccgcattcccggttgaatttctgcgcttgtgtaatttgattcgaatcgatgttgagccctgttactttcgctccattgctgaaacttgtcatatgtgcggcgactctccctctgccacaaccaagatccaagactttcatgcctcgtgccaagccaatatctctggcaatcgcttcctcgacgagaagttggttatctctgacagatgctttctcattcatcagaggggggatatacatcttttctacatctccgaggctgcagagatggttcaaaactgagtaatatgcctccagacaccgtcccacatgtttctggtagtcagcaccgaaagcagccaccattgcctcttcatcttcccagtctaaattatagatctcatatgatgacatgaaatcatcaacctcctgaggtgtgagtccgtggagtgcctttaaagccctaaagattgtcgtgaggcgaccgggtgacgcggaacgatccacatcatatctctcgtcaactttgctatcagaagattttcggaaaaatgaaggtgctattttcaatttctcagcactgatatcgcttgtacgtgagctatcgctactgtcgttccggacggagagaataaatggccgtgcaatgtcggcggtttgttgcggtggaggcacttgagcgattgatgctgccattgaatgaaaatgctgcctatgtagcttgggggacaatctggtgcattcctagaatattagcgatgggctctttcacgaggatatccccgatgatacaggtctggatgccaaataaaatggaattgtaggaaacgatgttcacatgtcggcgggaatgtgttttgttcccgagaaacgtgacgggaaagggatcactattattaaggtttcgtcatttacgcatgatggcgctttccacgacacgggatcggtactgatgcgttacctcgcatccgagttgtccgaatgtaaggttccgtataaatgcctgatgaatcacgccctcccgttggtatctaccgggccgttctatatgcttattaagcagaagattcaagtgactcttcatcgtcgatgatggtccagtgtgcgcatcggcaacgatagcctttctgagcctctagctgaacagaagttgtggtcaaatggtaaacagtatgagtcattcccgattgcggctctccgctgttggttggagcaaacagtcacgtcactttgcggcataacctgtaagacgagaatctcacatacattgcccacttatccagctgcaaggtccggacaatccggagctttacgtttaccccttacatacttgatatcttaagaagctgccaaggacttttgaatcagatggcatccgtataattagccatgtaattcaaagacagaccaggctgacccggtcttcgaagtacgttgttatctcttcctatcaaccatagctggtgtctgctcctacaagacataccgtcgagcaatactagacaagagaagactattagcgatttccctcaaatcctatcatgcggcatgcagaccgcaaagctggaaaattgtgcatcagaatcatgtaggaccgaaacagccgatgaggccaacacaaataattgctgatctcaaatcgcgcgagtgcgagttattttaccagcagagcgccctgcgtatatcctagcaagtactcaagcatacgtggaatgcaggaggagggccaaaagctgcaacagagtcatcggcaatgagcgcgaaccgcaggaatgaagcggcaaaataacgactgccgttcatctattgcaacagagctaccatacgctggatagaagctagcactgctcctgtagcaacggaagctggtgggcattaatttgagcagagtggtacgcagaaggcgaacaagggaatctggcaagcccctggttgctgtcgtcgtttgtactgtctgcttaagccgacgtcgccgaacgcgtaggcataggtagcagctcattcgaggttgaacttttcgatgttcaggcagcaagatattgtagaacgtcaccacgcggtcagagtgccggtagatatatgccatgcgtctaggcaactaccctcaaatggcacagcaacgacaagctcgggcttttgctggaattcctctttgtcgttgatgtcacgatctcgatcgactattgcatgctgacgactatagaaaacaaaatggaatgcagtcagttcgagttagattaacaggagcgcattcgaaattgagaatatttgctgcctgggtgccattctaagaaccttcgatcagaatatggtaaggacaattaggcaggggaattgtagacatagttttcgtctgtcggcttgatagcactgctctcgctgtcatctatcacatctacttgtatttcaccaagctcactattaggtaagtaacgttgttcaagctaggctacctatgtggtgcgaagtggaaaggagggctagtcggccatgcgccaaagctggcaagctttcggggacgatgcagtaggtgtgcgctatttgtgcgctattgaacttgagaaacaaaatggccttccgaatgtatcattgaacaaaaggagtaaaggaggttgtaaagggccacgcagagaagacggagaccagcagaaggatgagtgatgattcagtgttgcaacaactcatggactgatgggttaggatgtagctagttagatgtggtaccataccctatactcggaggtatttgcgcgacaaacccgtcgcgcattgagtttcctgccagcctgcctcatgggaaccaaaagctctcagtgacacatgcatgcacgcatgcaaaccaccatctactatcctcatctgctgcgacctgagtgcctatacgcaattgatggcccgaaatgcccgacacatccgactcaggtgaccaaggctccggtccttgggaccaggagacgaaacgaaagttccagaacaagtccaaatcagagtacttcgacccttgcgccgaggccgccgccatgagcatccgctgcctgaaccgcaacggcggcgaccgcgccatgtgcaccgactatttcgagtgagttggccgcgaacacgacgacacggcctgcagacggtgcgctaatgggataattacatggcagagcctatcgcgcatgcaagaaggaatggatggacaagcgcaaagaagagaagaagaaagtcggctggggcagtatcttctcttgatgagataggctgcctttgcacatgtcctctcagctaaccgaacggaatgcatcatctgtcggatcagttcgtgggtggcttatttgcaaatgacatccactgtatacctaccaatatttcatgtataaaactgtactattgctgtctccaatgaaacctgtggaattgtcccactcaatgcagaatcattccaatgccagcaccgtctagtgtcctaaacacgaccggtcttgggaatcaaatgcgcacagcttgatgtcattcaccctggtctacagtatacaaggcctccacaaatgggtgcagtcatggttcaagacttcaaatcctcgattctgatggattggtgaattaaactttgttggaaagttgtccggtgtacgatccaatctggcgttggtgctggtgatagtgaccgcctacctgattgggagtgagtgttccagtcaagtggaattaaagggtggaattctcggcagaaaaaggtaacccccgccgtagcatgaagccttgttcaatatctcaagatcaatgtgtaactgggcttcactacattctgatgttatttcttgtcttgtggaattctagatcaaacaaattttataattattgtacaaagaaaacagttcagatttgaattcttcctgactgcgaatctcaacgggcgggcaccgcccagaactccaacgacgtccatgtacaccaaatggtagcccagttctgtattttcggcgacgattctacataaataatcccataatcggcgacaacgagggtgtagatgcttctttctccacttgggtagtgacctggcttgcaggaccaaagctccttcattatttgcgcttccttcccagcaatgcacctccgaaaactaaacaactcctctcatctctcttcacctttaccacggccactctcctcttccaactcccccacgcactatactttttctccgttcatgtctacaggaaattcatagcactcgtcaatttctgccatgaccggtctacgtattgccgcaaagaccccgaggcctaccctcagggagtacctcgatgtccagcttgagagggcctggtacgatcagaactggaccctcgtggcgtcactcgctcgcaatcggcacaagacttctaaggacgactacttcaagtctctcgagctttatgcacagtcacacagcgacaataactctgagacgactgtggtcagagaggctatacaaaaattggccaacgagaaggctgtcatcaaggattctgacgcgttaagcctatacgagagtgcctatagtaacgcattctcatatggtgaccttgcaagcgactatgctgagactattggcgcacttcgtctcgcacatgctaaagcgaatccgaaggattctaacgcgtgcatgcactctcttgaggcctgtgtctttcatggcgattttgcgaacgcgcaggagatcgctgcgctcctaaagggcaaatactcctcagagcgaaagtacgcgctcctgaacgttttgactctgtacctcctcgctactttcggcaaaatcaagacaagcggtgttcggtcgcaagaggaactccagaagaagaagcagttacttagcgcgctatctttgcgccaagctgacttggtcttgaacattcgtcaattgtctaccaagggagatcaccctgaaccaatcttgcagctttacactctgcctgatgttgttctgtggttgcaagtcagagagacatttggggcacccaaagataacctcgttatccttaagacccctcggtgggggccaattgtatttctcgagagaggttttactgatgcataccacggatgtcttgtaatcctcatgaagaattgccagtgggacgagatactctcggtcggttataccattcttgacagaattcgatcaccggcataccagcaatttttaaagcagagcaaggaagccacgaagactgccggcactgatgacgaagagtttcgcgtcgatctacgttatgctgaggcggcacaagaccaatctctctggaacgccatgtacttggctgctacgtctagccgtgggaattctgtcagcccggtgaaaagactccgaaatattcttgccaccgttgctggaattctcgagtcgcacggcttgtgtaagcctattttcaggacaaattacaacttcttcgtcttgcgcactgttctcgtcgacacagaacgatcgcaaggtactgcgacggattcacgtcacgggaagatccggctcctccttaacctcaccttgggtgccaaggacacgcgccattcccttgacttcatgttgctgaaggcaattttcaagcaactcactaaatcggaaatcgctaccttcgtctcggaactcaagatccacagcgagcttatggagcgcaatccgtacgagcttgcgctagttttctccctagagcttaagacaattttcttcctcgcaacgtcttctacggctggccaagagtgcccacgatgccgttccgtagtgccacagagcaatgagtgcgagaagtgtctcgttttcgtcacgacttgcgcgcttcgcaaataccgcgagtggacgacgagctgtgaagatgaacattcggtgaaaatcctcaacagtcctcttgaagatatctgtcttatcggagcaatcggactgatcaagcttgccatcacacctgttacaagctgggcagaggaggaagaagcaccttcatttagagtcaaaactccgcttctcctcgcagcgattgcgttcctcgactcttgcatgaagcgagtgccccgaggtgccagcatgcgtattctgttggttcgattgtacttcatgatgggctgtgtcactcgtgggttagaggcttgggattgcttccatgttaagaatatgttactcgaaagtctcggaagtctctgtcttgaccgcttgtcaactattagtccgggacatttgatttccggttccggtcacaatagcaacgctgcgcagaccatcgttcgttactacgagaaagcaacacagtctcaacaacccgagaccttgattacctgtatgaggagaaataattacagagaagccatatacgcagtagagcgtactcaaaagatgagcagaagctgtacgttagtgatatccgttatcgagcagcgtcgcggaatacgactcaaaggcggcaagaacgatatcctcattgacgatgagccacttatgagttcaatatctccagatgtccactttgaggacatcaccgactacaatactgttccccactgggagggcaagacgggcatcgctctccaggaactggtcacgactggaccattgccttccaacaaccgctgccatcttagcatccttgctgaacgattcatcgacttaatcacacatgtccagcccaaggagcagaagccctcaaaacctctcacatctgtgcgctctgagtgccaggccgtgatcctcaaatgtcacagtctcatttgggatgaattcgaggcttatttggacggtattgacgcaaagggcaaagtgtcctgccccgagaggacttatttcatcgctatcgctggactggcgaacatcgtgaaagtctgcttagagcagatgatggacgatcaagaggcggaccagaccgatactcattttcaagttttggcaagtgtcgttaaggagcagatgtccacattcatcactattggacctagcggcacgaaacgacaggtgctctatgccttcatggagcttcatgcgatggggatgcttcgtgagacatcctacgccatcaaacgcactgtccaataccttaccaactacttttcgtatcttaaggcagcagatggcaagcgcccagctatcaataactcgatcaatcgctttaattccgagcttaagaagatgtcggccatggctgattcgatggacatgaagatgaagctccatatcaagacactagattcggccttgagtgagactggatgggtcgacttcctcatagacgaggcttttccaagtggagattacgatgatcccaagggtgatcatgcagatgatgccaagcatgatactgaggatggttccgagagtggcgatgacgataatttagagagtggtggtgctgacggcgacagcagttctcagcaggcagtcagcatctcgtatagtgaactctacgagcacctcaatttagcaatcctgatggaggtgaaggaggaacaggctatgggaatcgtggattcctggcgtgacactatccgaggttggaaccaggtcaagtttgactaagtatgcagggttctgtcgcgggtttgggatagctttctatgtagctacctaggtagctaataaatgacacaccaacaaactcctaaataatcgaggaaatgccatgcaatcaaatgtatacctatctattatctacactgcacgaactatgtaaaccaccactatgcatgagaagagggtcgaatgcggacacatttccatttcaaataaaggaaaaacacactatgatataaccaactgtgcaatctttagatccgacattgtaactatataccgattcaagaaaggcgccggtgttacctatgaaatctagctcgc

SEQ ID NO: 13570 - DNA, 267 bp, Muscodor strobelii
  misc_feature: SGI cDNA ID NO. 564451
  misc_feature: Encodes the peptide sequence at SEQ ID NO 13571
atgcccgacacatccgactcaggtgaccaaggctccggtccttgggaccaggagacgaaacgaaagttccagaacaagtccaaatcagagtacttcgacccttgcgccgaggccgccgccatgagcatccgctgcctgaaccgcaacggcggcgaccgcgccatgtgcaccgactatttcgaagcctatcgcgcatgcaagaaggaatggatggacaagcgcaaagaagagaagaagaaagtcggctggggcagtatcttctcttga

SEQ ID NO: 13571 - protein, 88 aa, Muscodor strobelii
  misc_feature: SGI Peptide ID NO. 564451
  misc_feature (28)..(69): Pfam Id: PF06747 Pfam Desc: CHCH domain
  misc_feature (5)..(82): NCBI GI: 85093128 Blast Desc: NCU02217 [Neurospora crassa OR74A] gi|74615626|sp|Q7S4H6.1|COX23_NEUCR RecName: Full=Cytochrome c oxidase-assembly factor cox-23, mitochondrial; Flags: Precursor
  misc_feature (13)..(85): NCBI GI: 156057109 Blast Desc: [Sclerotinia sclerotiorum 1980] gi|154702071|gb|EDO01810.1| [Sclerotinia sclerotiorum 1980]
  misc_feature (13)..(85): NCBI GI: 154297090 Blast Desc: BC1G_12204 [Botryotinia fuckeliana B05.10] gi|150843033|gb|EDN18226.1| BC1G_12204 [Botryotinia fuckeliana B05.10]
  misc_feature (14)..(71): NCBI GI: 116200790 Blast Desc: CHGG_10940 [Chaetomium globosum CBS 148.51] gi|88175654|gb|EAQ83122.1| CHGG_10940 [Chaetomium globosum CBS 148.51]
  misc_feature (5)..(82): NCBI GI: 171680697 Blast Desc: protein product [Podospora anserina] gi|170939976|emb|CAP65202.1| protein product [Podospora anserina]
  misc_feature (9)..(77): NCBI GI: 256726632 Blast Desc: NECHADRAFT_32950 [Nectria haematococca mpVI 77-13-4]
  misc_feature (3)..(83): NCBI GI: 46122779 Blast Desc: FG05767.1 [Gibberella zeae PH-1] gi|121933706|sp|Q4IAJ1.1|COX23_GIBZE RecName: Full=Cytochrome c oxidase-assembly factor COX23, mitochondrial; Flags: Precursor
  misc_feature (4)..(83): NCBI GI: 189193767 Blast Desc: PTRG_02889 [Pyrenophora tritici-repentis Pt-1C-BFP] gi|187978786|gb|EDU45412.1| PTRG_02889 [Pyrenophora tritici-repentis Pt-1C-BFP]
  misc_feature (2)..(83): NCBI GI: 121920816 Blast Desc: PTRG_02889 [Pyrenophora tritici-repentis Pt-1C-BFP] gi|187978786|gb|EDU45412.1| PTRG_02889 [Pyrenophora tritici-repentis Pt-1C-BFP]
  misc_feature (5)..(81): NCBI GI: 242808737 Blast Desc: cytochrome c oxidase-assembly factor cox23, mitochondrial precursor, [Talaromyces stipitatus ATCC 10500] gi|218715851|gb|EED15273.1| cytochrome c oxidase-assembly factor
MPDTSDSGDQGSGPWDQETKRKFQNKSKSEYFDPCAEAAAMSIRCLNRNGGDRAMCTDYFEAYRACKKEWMDKRKEEKKKVGWGSIFS

SEQ ID NO: 13572 - DNA, 8572 bp, Muscodor strobelii; identical to SEQ ID NO: 13569
  misc_feature: SGI EST ID NO. CUFF.32737.2
  misc_feature: Variant of the nucleotide sequence at SEQ ID NO 13570

SEQ ID NO: 13573 - DNA, 1425 bp, Muscodor strobelii
  misc_feature: SGI cDNA ID NO. 564452
  misc_feature: Elevated expression when VOC is produced
  misc_feature: Encodes the peptide sequence at SEQ ID NO 13574
atggcacaccgagtacgcacaagtgacgaggagaaacaggtagaagtaggagagccggctgtaccgagacagaccagccatgaagaacaccaagggcatcatctcaaaggctccgtagtcccggcgattcttgctccaaacgcagccgagagagcgctggtatggcggcaagacaagagaattatccccctatctgctgcgatctacttcctatgctatttggaccgatcgaatatcggcaatgcgaagattctcaactcatctactggcaacgacatgcagcaggaaacgcatacaacgacgtaccaattcacaattgcgctgatgatttttctgatcggatatttcttatttgaagttccgtcaaacatcttgctcaagagattccgcccatcgcgatggctcgccttgctaatgtttgcatggggtatcatcacaatcacccttggtacggtacatagctacgcccagattactgctgtgcgatttctgctgggggcagttgaagctggccttttccccgggctcgtgtactatttaacattctggtacaaatcaaacgagcgaagtgtgcgtgtcgcatttattctttcctctgcgacgctcgcaggtgcatttgggggtgcgatcgcttacggcgtcggacacatcaaccaagtccggggtctctcaggttggcgttggcttttcatcctcgagggcattccatccgtcctttcgtcaatttttgtcctattcatcctcccagattttcctgagcgcgcgaaatggctgtccgagggcgagaaggatctcgcagcacagcgactagcggttgagggttctaaaggctcatccgctgggcttacttgggcggatgttagagagactctgacagactggaggctttacggccactatgccatctatttcgccatctcgattccattcagctccctctctctattcacgccttcaatcgtcgccggcttgggatataaggatctgcaagcgcaattgctgactgtgcctccttgggctgtggcttatgtagcaggagcggcatttctagcctcagcactcctaccagcagatgcgtacgcgagccgatatggcacattgatcgttggagcttcaggggcattcgcgtctatacctcctatgctcggatggctgacatctaacatatggagcacggcctctgttggcctagctgttgcgctcaacgtgagtatcggagctgggctcggacagataccgggtgtctggacttataaggctagcgaggcgaaattgggttatcctaccggccatggcgtaaatgcagcgatgttgttctttgttgcgctcggcgcggttggattgaggatttactatggtcggaagaataagatgctgttgagcattgcccctgatggttcatcaccgagactgtatgctctataa

SEQ ID NO: 13574 - protein, 474 aa, Muscodor strobelii
  misc_feature: SGI Peptide ID NO. 564452
  misc_feature (65)..(445): Pfam Id: PF07690 Pfam Desc: Major Facilitator Superfamily
  misc_feature (65)..(410): Pfam Id: PF07690 Pfam Desc: Major Facilitator Superfamily
  misc_feature (50)..(467): NCBI GI: 145606468 Blast Desc: MGG_02315 [Magnaporthe grisea 70-15] gi|145014114|gb|EDJ98755.1| MGG_02315 [Magnaporthe grisea 70-15]
  misc_feature (1)..(474): NCBI GI: 85091586 Blast Desc: NCU09027 [Neurospora crassa OR74A] gi|28920368|gb|EAA29738.1| NCU09027 [Neurospora crassa OR74A]
  misc_feature (47)..(457): NCBI GI: 255936103 Blast Desc: Pc13g06440 [Penicillium chrysogenum Wisconsin 54-1255] gi|211583698|emb|CAP91713.1| Pc13g06440 [Penicillium chrysogenum Wisconsin 54-1255]
  misc_feature (9)..(457): NCBI GI: 119486919 Blast Desc: MFS transporter, [Neosartorya fischeri NRRL 181] gi|119410536|gb|EAW20482.1| MFS transporter, [Neosartorya fischeri NRRL 181]
  misc_feature (50)..(457): NCBI GI: 70982163 Blast Desc: MFS transporter [Aspergillus fumigatus Af293] gi|66844233|gb|EAL84572.1| MFS transporter, [Aspergillus fumigatus Af293] gi|159122155|gb|EDP47277.1| MFS transporter,
  misc_feature (50)..(474): NCBI GI: 256735503 Blast Desc: [Nectria haematococca mpVI 77-13-4]
  misc_feature (8)..(457): NCBI GI: 121714367 Blast Desc: MFS transporter, [Aspergillus clavatus NRRL 1] gi|119402948|gb|EAW13368.1| MFS transporter, [Aspergillus clavatus NRRL 1]
  misc_feature (50)..(457): NCBI GI: 145248698 Blast Desc: An14g00590 [Aspergillus niger] gi|134081356|emb|CAK41858.1| protein product [Aspergillus niger]
  misc_feature (45)..(459): NCBI GI: 67541727 Blast Desc: AN7027.2 [Aspergillus nidulans FGSC A4] gi|40742483|gb|EAA61673.1| AN7027.2 [Aspergillus nidulans FGSC A4] gi|259483659|tpe|CBF79229.1| TPA: MFS transporter, nidulans
  misc_feature (3)..(461): NCBI GI: 212526026 Blast Desc: MFS transporter, [Penicillium marneffei ATCC 18224] gi|210072568|gb|EEA26655.1| MFS transporter, [Penicillium marneffei ATCC 18224]
  misc_feature: Useful for introducing or modulating the production of volatile compounds
MAHRVRTSDEEKQVEVGEPAVPRQTSHEEHQGHHLKGSVVPAILAPNAAERALVWRQDKRIIPLSAAIYFLCYLDRSNIGNAKILNSSTGNDMQQETHTTTYQFTIALMIFLIGYFLFEVPSNILLKRFRPSRWLALLMFAWGIITITLGTVHSYAQITAVRFLLGAVEAGLFPGLVYYLTFWYKSNERSVRVAFILSSATLAGAFGGAIAYGVGHINQVRGLSGWRWLFILEGIPSVLSSIFVLFILPDFPERAKWLSEGEKDLAAQRLAVEGSKGSSAGLTWADVRETLTDWRLYGHYAIYFAISIPFSSLSLFTPSIVAGLGYKDLQAQLLTVPPWAVAYVAGAAFLASALLPADAYASRYGTLIVGASGAFASIPPMLGWLTSNIWSTASVGLAVALNVSIGAGLGQIPGVWTYKASEAKLGYPTGHGVNAAMLFFVALGAVGLRIYYGRKNKMLLSIAPDGSSPRLYAL

SEQ ID NO: 13575 - DNA, 2447 bp, Muscodor strobelii
  misc_feature: SGI EST ID NO. CUFF.32484.0
  misc_feature: Variant of the nucleotide sequence at SEQ ID NO 13573
cggtagtgaatgctcagacaaaacttttcgtgcaagaagctctaaagcagcgtaatagtctttcgtgaagttgccgttggcttcgtagacagccactaaatgagcgacccctacgagccaccgtgaaaactctagcaaccactttgtcgtgagtatgtatcattgcatactcgttgagagggtgcgcactccgacaagtcagggataaatgccgagaaaacggaatgaccagcatctgatattaaccgagaagacaaaccctgccaacaaccactacataggccttgcagctatcagtctgcatcagccacccaattcctgcaaccaatttggtctttgaatccctccaaatgtcacctgaaagttcggtctgggttccccgcaagacaagctttacgctccgacgaagccagccctgccgaatttagtggcatgtatgccgtatcatggtacactattcggttgtctgatgacttgtaagccagtatcaatccaacatcgtctgcatggctgccgtgtctcacgtctcttcctattggatcatgactgctctcatgaagtcaaagtgcggggtcgacgcatgtaagcaatgaagtattgagctcgctggatctggacacaactcgccgtctctcacgttggcggctcgataagttctctacttgtgaatttcgtctagagacgactattgggatctcgccctattcgcgagcgcatcaagtccaatggcacaccgagtacgcacaagtgacgaggagaaacaggtagaagtaggagagccggctgtaccgagacagaccagccatgaagaacaccaagggcatcatctcaaaggctccgtagtcccggcgattcttgctccaaacgcagccgagagagcgctggtatggcggcaagacaagagaattatccccctatctgctgcgatctacttcctatgctatttggaccgatcgaatatcggcaatgcgaagattctcaactcatctactggcaacgacatgcagcaggaaacgcatacaacgacgtaccaattcacaattgcgctgatgatttttctgatcggatatttcttatttgaagttccgtcaaacatcttgctcaagagattccgcccatcgcgatggctcgccttgctaatgtttgcatggggtatcatcacaatcacccttggtacggtacatagctacgcccagattactgctgtgcgatttctgctgggggcagttgaagctggccttttccccgggctcgtgtactatttaacattctggtacaaatcaaacgagcgaagtgtgcgtgtcgcatttattctttcctctgcgacgctcgcaggtgcatttgggggtgcgatcgcttacggcgtcggacacatcaaccaagtccggggtctctcaggttggcgttggcttttcatcctcgagggcattccatccgtcctttcgtcaatttttgtcctattcatcctcccagattttcctgagcgcgcgaaatggctgtccgagggcgagaaggatctcgcagcacagcgactagcggttgagggttctaaaggctcatccgctgggcttacttgggcggatgttagagagactctgacagactggaggctttacggccactatgccatctatttcgccatctcgattccattcagctccctctctctattcacgccttcaatcgtcgccggcttgggatataaggatctgcaagcgcaattgctgactgtgcctccttgggctgtggcttatgttgtctcaatcgcgaactcatggtcgggggatcactttaacgctcgcggccttcactgtgcgggcgctgctctagtagcaggagcggcatttctagcctcagcactcctaccagcagatgcgtacgcgagccgatatggcacattgatcgttggagcttcaggggcattcgcgtctatacctcctatgctcggatggctgacatctaacatatggagcacggcctctgttggcctagctgttgcgctcaacgtgagtatcggagctgggctcggacagataccgggtgtctggacttataaggctagcgaggcgaaattgggttatcctaccggccatggcgtaaatgcagcgatgttgttctttgttgcgctcggcgcggttggattgaggatttactatggtcggaagaataagatgctgttgagcattgcccctgatggttcatcaccgagactgtatgctctataagaatggtgcagatgatttacttcggggcagaatgaatcctagttccgcaaacatccaaggcaagcaaggaggaagaggggtgtgagatcacttattgcgtgttcattaataataagcgtagattaggcaggttagttgggttacttaaggatccaacgtggaatcaaggtcctcgacagcacggttaatattgacgatagcctcgaaacttggcgtctttca

SEQ ID NO: 13576 - DNA, 1653 bp, Muscodor strobelii
  misc_feature: SGI cDNA ID NO. 564453
  misc_feature: Encodes the peptide sequence at SEQ ID NO 13577
atgatatacaataatgcgttccgaaggctggccgttgccttattatggtttgtggcgatctacacctctgcggcagaacaacgtagacaagacacaaatcgttgtgttccttcgactttcatctctatcctaccaaaggacagtaaattagaacgagtagagtatgttgaagcaggcagcacctatggcggtggcctcgcagatctcggctaccccatacagcccaccaatctacctgcattatgcgccgtgacagtgtcggtcgcgacctcagcgatttcagcatatcggctagggatatttctcccatcagaatggaacaatagatttctagccgtcggaaatggagggttcgctggtggaattaactggcttgacatgggtgctggtgtacactatggttttgctgttgtctcaactgacacgggacataactcgatcgtcactgacatcacctgggcgtttaacaatactgattcgaagatgaactggggttggcgggccgtgcatgggtcggtcgtcctggggaaactactcactgaggcttatttcgcccgcccgatatcttactcgtactggagtgggtgctccacagggggtagacaaggactcaaagaggtacagatatcgcctcgcagcttcgatgggctgcttattggctctcccgcttggtacacaagtcatttgaacacatgggtggcaaatgttgcaacatacaactggcccgccgatgatgaaaagcatatagactggcgtctcttcccaggaatcgccgctgaaattgtcaagcagtgcgatgacatcgatggtgttgtggatggaatcatatctatccccgagcaatgcaatgtcaactacactgctttatcatgcaatagcgctggagccaatcaatcagcctgtgtcacagaggctcagtcagaaactctcaaaaaggtctatggcgactggaaaacgccaacaggcgacttcttatacaaagggctgaccgcgggttctgagcgacaaatgtatacagtacttaattactcaaactctagtccgtatgggattggatacgtccagaatttcctactcgacgatagatcatttactttagccgacttcaacgactcgatagtctcgctagctgacatgctggatcctggaaatgctactgccgacgactataatctcactacgttccgtgaccgcggtggcaggatgctgatgtatcatggaacagcagatgggctcgtgccaatgaaagggtcaaacctgtattatgatagaactgtgaagaccatgggcgataacataaccgctacgcaggagttcttccgatacttcatggtccctggtatgcaacactgctttacgaccgccgtgaatgcaccatgggcgtttggtggagcatcacaggcaggatttctagggaacaatacatggtcagtccctgggttcgtggatgcgcagcatgatatactcctgtcgctcgtggattgggttgaaaaaggcgttgccgtggattcggtagttgctacgacatggaaccaacagctgaacgtgacgtcgggagttctgaagcagcgcccaatttgtccgtatccacaaatggcaaggtgggatgggacaggtgatctgaatgatgcacagagctggacatgtgggtga

SEQ ID NO: 13577 - protein, 550 aa, Muscodor strobelii
  misc_feature: SGI Peptide ID NO. 564453
  misc_feature (82)..(549): Pfam Id: PF07519 Pfam Desc: Tannase and feruloyl esterase
  misc_feature (35)..(544): NCBI GI: 116214427 Blast Desc: CHGG_11054 [Chaetomium globosum CBS 148.51] gi|88175409|gb|EAQ82878.1| CHGG_11054 [Chaetomium globosum CBS 148.51]
  misc_feature (9)..(549): NCBI GI: 39942844 Blast Desc: MGG_03502 [Magnaporthe grisea 70-15] gi|145009941|gb|EDJ94597.1| MGG_03502 [Magnaporthe grisea 70-15]
  misc_feature (26)..(549): NCBI GI: 171679739 Blast Desc: protein product [Podospora anserina] gi|170939495|emb|CAP64723.1| protein product [Podospora anserina]
  misc_feature (33)..(530): NCBI GI: 85091584 Blast Desc: NCU09026 [Neurospora crassa OR74A] gi|28920367|gb|EAA29737.1| conserved [Neurospora crassa OR74A]
  misc_feature (35)..(549): NCBI GI: 189210102 Blast Desc: feruloyl esterase B precursor [Pyrenophora tritici-repentis Pt-1C-BFP] gi|187977476|gb|EDU44102.1| feruloyl esterase B precursor [Pyrenophora tritici-repentis Pt-1C-BFP]
  misc_feature (5)..(549): NCBI GI: 154302760 Blast Desc: BC1G_09495 [Botryotinia fuckeliana B05.10] gi|150855242|gb|EDN30434.1| BC1G_09495 [Botryotinia fuckeliana B05.10]
  misc_feature (35)..(549): NCBI GI: 145606552 Blast Desc: MGG_02261 [Magnaporthe grisea 70-15] gi|145014177|gb|EDJ98818.1| MGG_02261 [Magnaporthe grisea 70-15]
  misc_feature (32)..(549): NCBI GI: 145257202 Blast Desc: An04g02780 [Aspergillus niger] gi|134058558|emb|CAK96445.1| protein product [Aspergillus niger]
  misc_feature (32)..(549): NCBI GI: 154322593 Blast Desc: BC1G_00639 [Botryotinia fuckeliana B05.10] gi|150847973|gb|EDN23166.1| BC1G_00639 [Botryotinia fuckeliana B05.10]
  misc_feature (34)..(549): NCBI GI: 169621189 Blast Desc: SNOG_13802 [Phaeosphaeria nodorum SN15] gi|111057706|gb|EAT78826.1| SNOG_13802 [Phaeosphaeria nodorum SN15]
  misc_feature (81)..(549): SWISSPROT Homolog: EC 3.1.1.73 Feruloyl esterase
MIYNNAFRRLAVALLWFVAIYTSAAEQRRQDTNRCVPSTFISILPKDSKLERVEYVEAGSTYGGGLADLGYPIQPTNLPALCAVTVSVATSAISAYRLGIFLPSEWNNRFLAVGNGGFAGGINWLDMGAGVHYGFAVVSTDTGHNSIVTDITWAFNNTDSKMNWGWRAVHGSVVLGKLLTEAYFARPISYSYWSGCSTGGRQGLKEVQISPRSFDGLLIGSPAWYTSHLNTWVANVATYNWPADDEKHIDWRLFPGIAAEIVKQCDDIDGVVDGIISIPEQCNVNYTALSCNSAGANQSACVTEAQSETLKKVYGDWKTPTGDFLYKGLTAGSERQMYTVLNYSNSSPYGIGYVQNFLLDDRSFTLADFNDSIVSLADMLDPGNATADDYNLTTFRDRGGRMLMYHGTADGLVPMKGSNLYYDRTVKTMGDNITATQEFFRYFMVPGMQHCFTTAVNAPWAFGGASQAGFLGNNTWSVPGFVDAQHDILLSLVDWVEKGVAVDSVVATTWNQQLNVTSGVLKQRPICPYPQMARWDGTGDLNDAQSWTCG

SEQ ID NO: 13578 - DNA, 266 bp, Muscodor strobelii
  misc_feature: SGI EST ID NO. CUFF.32490.0
  misc_feature: Variant of the nucleotide sequence at SEQ ID NO 13576
gcgggccgtgcatgggtcggtcgtcctggggaaactactcactgaggcttatttcgcccgcccgatatcttactcgtactggaggtcagtcactttccgacatgaccttataaagacaagaaatactaccatcgagagaactaaccttctaatgtttcaagtgggtgctccacagggggtagacaaggactcaaagaggtacagatatcgcctcgcagcttcgatgggctgcttattggctctcccgcttggtacacaagtcattt

SEQ ID NO: 13579 - DNA, 1710 bp, Muscodor strobelii
  misc_feature: SGI cDNA ID NO. 564454
  misc_feature: Encodes the peptide sequence at SEQ ID NO 13580
atgatatacaataatgcgttccgaaggctggccgttgccttattatggtttgtggcgatctacacctctgcggcagaacaacgtagacaagacacaaatcgttgtgttccttcgactttcatctctatcctaccaaaggacagtaaattagaacgagtagagtatgttgaagcaggcagcacctatggcggtggcctcgcagatctcggctaccccatacagcccaccaatctacctgcattatgcgccgtgacagtgtcggtcgcgacctcagcgatttcagcatatcggctagggatatttctcccatcagaatggaacaatagatttctagccgtcggaaatggagggttcgctggtggaattaactggcttgacatgggtgctggtgtacactatggttttgctgttgtctcaactgacacgggacataactcgatcgtcactgacatcacctgggcgtttaacaatactgattcgaagatgaactggggttggcgggccgtgcatgggtcggtcgtcctggggaaactactcactgaggcttatttcgcccgcccgatatcttactcgtactggagtgggtgctccacagggggtagacaaggactcaaagaggtacagatatcgcctcgcagcttcgatgggctgcttattggctctcccgcttggtacacaagtcatttgaacacatgggtggcaaatgttgcaacatacaactggcccgccgatgatgaaaagcatatagactggcgtctcttcccaggaatcgccgctgaaattgtcaagcagtgcgatgacatcgatggtgttgtggatggaatcatatctatccccgagcaatgcaatgtcaactacactgctttatcatgcaatagcgctggagccaatcaatcagcctgtgtcacagaggctcagtcagaaactctcaaaaaggtctatggcgactggaaaacgccaacaggcgacttcttatacaaagggctgaccgcgggttctgagcgacaaatgtatacagtacttaattactcaaactctagtccgtatgggattggatacgtccagaatttcctactcgacgatagatcatttactttagccgacttcaacgactcgatagtctcgctagctgacatgctggatcctggaaatgctactgccgacgactataatctcactacgttccgtgaccgcggtggcaggatgctgatgtatcatggaacagcagatgggctcgtgccaatgaaagggtcaaacctgtattatgatagaactgtgaagaccatgggcgataacataaccgctacgcaggagttcttccgatacttcatggtccctggtatgcaacactgctttacgaccgccgtgaatgcaccatgggcgtttggtggagcatcacaggcaggatttctagggaacaatacatggtcagtccctgggttcgtggatgcgcagcatgatatactcctgtcgctcgtggattgggttgaaaaaggcgttgccgtggattcggtagttgctacgacatggaaccaacagctgaacgtgacgtcgggagttctgaagcagcgcccaatttgtccgtatccacaaatggcaaggtgggatgggacaggtgatctgaatgatgcacagagctggacatgtggtcatgccaacaactactgtggccccatcggcgaccgcatcgccatcaagcgcagcagttag

SEQ ID NO: 13580 - protein, 569 aa, Muscodor strobelii
  misc_feature: SGI Peptide ID NO. 564454
  misc_feature (82)..(551): Pfam Id: PF07519 Pfam Desc: Tannase and feruloyl esterase
  misc_feature (35)..(544): NCBI GI: 116214427 Blast Desc: CHGG_11054 [Chaetomium globosum CBS 148.51] gi|88175409|gb|EAQ82878.1| CHGG_11054 [Chaetomium globosum CBS 148.51]
  misc_feature (9)..(549): NCBI GI: 39942844 Blast Desc: MGG_03502 [Magnaporthe grisea 70-15] gi|145009941|gb|EDJ94597.1| MGG_03502 [Magnaporthe grisea 70-15]
  misc_feature (26)..(549): NCBI GI: 171679739 Blast Desc: protein product [Podospora anserina] gi|170939495|emb|CAP64723.1| protein product [Podospora anserina]
  misc_feature (33)..(530): NCBI GI: 85091584 Blast Desc: NCU09026 [Neurospora crassa OR74A] gi|28920367|gb|EAA29737.1| conserved [Neurospora crassa OR74A]
  misc_feature (35)..(549): NCBI GI: 189210102 Blast Desc: feruloyl esterase B precursor [Pyrenophora tritici-repentis Pt-1C-BFP] gi|187977476|gb|EDU44102.1| feruloyl esterase B precursor [Pyrenophora tritici-repentis Pt-1C-BFP]
  misc_feature (5)..(549): NCBI GI: 154302760 Blast Desc: BC1G_09495 [Botryotinia fuckeliana B05.10] gi|150855242|gb|EDN30434.1| BC1G_09495 [Botryotinia fuckeliana B05.10]
  misc_feature (35)..(549): NCBI GI: 145606552 Blast Desc: MGG_02261 [Magnaporthe grisea 70-15] gi|145014177|gb|EDJ98818.1| MGG_02261 [Magnaporthe grisea 70-15]
  misc_feature (32)..(549): NCBI GI: 145257202 Blast Desc: An04g02780 [Aspergillus niger] gi|134058558|emb|CAK96445.1| protein product [Aspergillus niger]
  misc_feature (32)..(549): NCBI GI: 154322593 Blast Desc: BC1G_00639 [Botryotinia fuckeliana B05.10] gi|150847973|gb|EDN23166.1| BC1G_00639 [Botryotinia fuckeliana B05.10]
  misc_feature (34)..(549): NCBI GI: 169621189 Blast Desc: SNOG_13802 [Phaeosphaeria nodorum SN15] gi|111057706|gb|EAT78826.1| SNOG_13802 [Phaeosphaeria nodorum SN15]
  misc_feature (81)..(549): SWISSPROT Homolog: EC 3.1.1.73 Feruloyl esterase
MIYNNAFRRLAVALLWFVAIYTSAAEQRRQDTNRCVPSTFISILPKDSKLERVEYVEAGSTYGGGLADLGYPIQPTNLPALCAVTVSVATSAISAYRLGIFLPSEWNNRFLAVGNGGFAGGINWLDMGAGVHYGFAVVSTDTGHNSIVTDITWAFNNTDSKMNWGWRAVHGSVVLGKLLTEAYFARPISYSYWSGCSTGGRQGLKEVQISPRSFDGLLIGSPAWYTSHLNTWVANVATYNWPADDEKHIDWRLFPGIAAEIVKQCDDIDGVVDGIISIPEQCNVNYTALSCNSAGANQSACVTEAQSETLKKVYGDWKTPTGDFLYKGLTAGSERQMYTVLNYSNSSPYGIGYVQNFLLDDRSFTLADFNDSIVSLADMLDPGNATADDYNLTTFRDRGGRMLMYHGTADGLVPMKGSNLYYDRTVKTMGDNITATQEFFRYFMVPGMQHCFTTAVNAPWAFGGASQAGFLGNNTWSVPGFVDAQHDILLSLVDWVEKGVAVDSVVATTWNQQLNVTSGVLKQRPICPYPQMARWDGTGDLNDAQSWTCGHANNYCGPIGDRIAIKRSS

SEQ ID NO: 13581 - DNA, 266 bp, Muscodor strobelii; identical to SEQ ID NO: 13578
  misc_feature: SGI EST ID NO. CUFF.32490.0
  misc_feature: Variant of the nucleotide sequence at SEQ ID NO 13579

SEQ ID NO: 13582 - DNA, 1890 bp, Muscodor strobelii
  misc_feature: SGI cDNA ID NO. 564455
  misc_feature: Reduced expression when VOC is produced
  misc_feature: Encodes the peptide sequence at SEQ ID NO 13583
atgtcgactgtccaagacgacgggcacggacggcctgagcaattacctctgcgcgacaagctcggcgatgctgctaatatcaacgacgtgaacaacgatgacaatgtccaacaagggccagaccgtggcctaccgccgcacagtgacgttgcgcccaaggccgaagggaccggcgagactagcgaggaccacctcgcaaatcacagcagtacactgaagactaaaatacaggaccaaaaacagaaagtcagcgatcagaaggaaaaaataaaggagaaggcaaatccgcccggtggattcgactccacgccaattcctgatgcgccgcaaggatatacggtcaaatttatttttcatcgtgctgagaatctacccacgtccgactatggaactggcgcagctgatccttttatcgcggccaccctctctacggcggtgcccaaacgacacaaagaagatccggacctcttcttcagaacccgcaccattcgaaggtcactcgagccgcaatgggacgaggaatggatcgtcgccaatgttccatcatctggcttcaagctcaagtgccgcttatacgatgaggactggcccgaccacaacgatcgtcttggcaatgtgacaatctatgtgaacaatgtcaacgagtcttggcaaggatttccgccgcctggtaagatgttcgaggtgaagaagcgtgtcggcagcaagcgagcctacttccttaaagctgtcactactgcttttgataaaaactcgtccatgacgccgcggttgtatgtcagtgcccaagttcttgaaaagtcccagccaccacatgggcagatctacacggtaggaccaaccaagtttttcaagcatttttcacccatgatagggcggatcactggcatcagagtcaacgccgacgaggctgctgactcacaagaccatgaatcttcccaaggtgccagcgcagacgggcacagcgagaagaaaccgcaaaagtatgattttcaagccaacgagattcaattgtcgggccctgtgcctcccaaactctatcatcgatttgtcgaattcagacctataattggtcgtcttttccaggataccgggctccgtggacgtgtgctgaataaagccctacatcatcaacatgaccgcgtttacaattttgacaagtctacacagtggggcacattcaagccatgttcggaagaagcaagtcttcagtttctcaagatggcacactttgacgaaggtggacgcctttttacatacatcattacccttgacggcctcatgcgcttcaccgagactggcaaagagttcggtatcgacctgctgagcaagcacactatgcacagcgacgctcagatatatatcgcatgctccggcgaatttctcattaggaggttgaaaaagccaaaagcaagtgaggatgctgagcccgatgtgcccactcacccagatcaagatgttaaaggaggtcctccacatgacccgccgccagcgaagccagaatactatcagcttgtgattgacaacgacagcggcacataccgtcctgacaagtcagtcttgcctgacttgcagaagtttctggagcgcaacttccctggactgggagtcgttgccctggcctgtgatgacgatgaagatcaaaggttgaaagagaagcagcgtgctgtgaagaagagagaaggtcagcaggtcaagatggtgatgaatcgcagtcccagctcaagctcgcttagctccggcgaccttagcgatcttgaagatgtagagcgatctggagacatgggcaggaagagcaagaaagaacgtgcttgggatttaatggaagaaccaagacggatcaaggagatgactaaatcgaaagcaggtggcagtgatcccgtggcctga

SEQ ID NO: 13583 - protein, 629 aa, Muscodor strobelii
  misc_feature: SGI Peptide ID NO. 564455
  misc_feature (114)..(207): Pfam Id: PF00168 Pfam Desc: C2 domain
  misc_feature (84)..(624): NCBI GI: 256727356 Blast Desc: NECHADRAFT_57922 [Nectria haematococca mpVI 77-13-4]
  misc_feature (24)..(617): NCBI GI: 261353830 Blast Desc: C2 domain-containing protein [Verticillium albo-atrum VaMs.102]
  misc_feature (96)..(624): NCBI GI: 46136351 Blast Desc: FG09691.1 [Gibberella zeae PH-1]
  misc_feature (75)..(619): NCBI GI: 154323910 Blast Desc: BC1G_00354 [Botryotinia fuckeliana B05.10] gi|150842583|gb|EDN17776.1| BC1G_00354 [Botryotinia fuckeliana B05.10]
  misc_feature (81)..(617): NCBI GI: 171680747 Blast Desc: protein product [Podospora anserina] gi|170940001|emb|CAP65227.1| protein product [Podospora anserina]
  misc_feature (75)..(628): NCBI GI: 156056691 Blast Desc: SS1G_04076 [Sclerotinia sclerotiorum 1980] gi|154701862|gb|EDO01601.1| SS1G_04076 [Sclerotinia sclerotiorum 1980]
  misc_feature (69)..(487): NCBI GI: 116200776 Blast Desc: CHGG_10933 [Chaetomium globosum CBS 148.51] gi|88175647|gb|EAQ83115.1| CHGG_10933 [Chaetomium globosum CBS 148.51]
  misc_feature (86)..(611): NCBI GI: 85092697 Blast Desc: NCU02244 [Neurospora crassa OR74A] gi|28920937|gb|EAA30267.1| NCU02244 [Neurospora crassa OR74A]
  misc_feature (40)..(465): NCBI GI: 39968013 Blast Desc: MGG_02099 [Magnaporthe grisea 70-15] gi|145012981|gb|EDJ97622.1| MGG_02099 [Magnaporthe grisea 70-15]
  misc_feature (92)..(565): NCBI GI: 189193585 Blast Desc: C2 domain containing protein [Pyrenophora tritici-repentis Pt-1C-BFP] gi|187978695|gb|EDU45321.1| C2 domain containing protein [Pyrenophora tritici-repentis Pt-1C-BFP]
  misc_feature: Useful for introducing or modulating the production of volatile compounds
MSTVQDDGHGRPEQLPLRDKLGDAANINDVNNDDNVQQGPDRGLPPHSDVAPKAEGTGETSEDHLANHSSTLKTKIQDQKQKVSDQKEKIKEKANPPGGFDSTPIPDAPQGYTVKFIFHRAENLPTSDYGTGAADPFIAATLSTAVPKRHKEDPDLFFRTRTIRRSLEPQWDEEWIVANVPSSGFKLKCRLYDEDWPDHNDRLGNVTIYVNNVNESWQGFPPPGKMFEVKKRVGSKRAYFLKAVTTAFDKNSSMTPRLYVSAQVLEKSQPPHGQIYTVGPTKFFKHFSPMIGRITGIRVNADEAADSQDHESSQGASADGHSEKKPQKYDFQANEIQLSGPVPPKLYHRFVEFRPIIGRLFQDTGLRGRVLNKALHHQHDRVYNFDKSTQWGTFKPCSEEASLQFLKMAHFDEGGRLFTYIITLDGLMRFTETGKEFGIDLLSKHTMHSDAQIYIACSGEFLIRRLKKPKASEDAEPDVPTHPDQDVKGGPPHDPPPAKPEYYQLVIDNDSGTYRPDKSVLPDLQKFLERNFPGLGVVALACDDDEDQRLKEKQRAVKKREGQQVKMVMNRSPSSSSLSSGDLSDLEDVERSGDMGRKSKKERAWDLMEEPRRIKEMTKSKAGGSDPVA

SEQ ID NO: 13584 - DNA, 4789 bp, Muscodor strobelii
  misc_feature: SGI EST ID NO. CUFF.32657.1
  misc_feature: Variant of the nucleotide sequence at SEQ ID NO 13582
gaatacctctcgtcctgccttgcctgctctgtagaatcatagttctgtgacggaagactgccgttgccattttcttacacatcctcggtcatcttcaagagaataggctacccatcttggatcacaagttgtgatatgagcgacggtaataccgtgcatagttgtccttctactcgtgattgagagcacatgcgttatcatgagcatcggctcctaatttcgtgattggcataatctactgtggcctccttgacgggcttgaagctaagaggcccagcgccaatttgcccggtgctcaccataacgtgtatctaatgttcaaacaatctaactatgtaactcgattgaatttataaggcagaagtatgtcactctgctaatacttgtttccgaagtcttgcaatatcagcagcggttgctttgcaacagccgcctaccacgatgctctgccagcaaccgcggctacgggcctcggcgacaatacttcctaattggacctcccatgataactacagcgtgttcacacaaacaaggttagcaacatcgccctgctggagctgtccatgtcttggtggtcgtatcgtagacctcaccattggtgccatctggatacagcagtaagctgggccaggatttaagatgaccggcgttttctagaacttttacgccgctctcgaacatggtgattaatcgtggaagcttcgctaacttcgtacaattaactccgatgccccatggaacacgttcggaaatttctaaacttagaagtgcacggataacctggtcgacgctgctaccatccggaagagtgtagtcatcgccgggaaacacgcaggagatccagtatggaacgttggtaagacttctaacagcttcgatctcaccggaattcgaagcctgggctgcagtgagctgtcgcagcgcgaggatctcatcaatgcgtggcatggtctcgaaggcgatataatcaatacggtttcctaagagcttcacgttggaaaataactccatgcgacttgtgtgccaacggagtaacttgtcagtggtattatgttcttcgtcatacaaaccgctgtactcctggctactaggcgtcatgacggcgccataaggtccaaggctcaatgcaagttttgtaccaggaaccctgacctgctcaacgatggatatagcatgctctaagaagttgggaatccggtcccttgcgaccccagcgcgctggaagccatcggctgagacctggtaggtggcagtgagcaggatgtcgacgggaacacgcgcgaagtcactttggcaggacagaagcgtctcgcggtctgagatgagcaagctggaagaccacaggggcgtcgtgtggtcgaaatgcacgccgtacgcatcttcgagagatgtccccaagcctccgtcgagaacttgtactggagtcgtctgtaatgtcattgcgccgagccacaactcagattcttgaccgcgtacagtagtattgctctggtcttgatacccgggcatatcaggcaagggattaagatgggttctctcggcatgagcacagatcgtatttaggtccaatttcgtggggctgcccagacattcttgccttacatgaccacgcctcaatcgcggctctagacgctgtgacggtccctattccatgtctctggtggaccgggcattggacacttgtaccgacttttcatcagactcaaaaaagtgataaacttctattctcgtcgcggatggcttgttcgtcgtaattgtctgtctcgtctgtctattaacatgcctctgtgtgcagccggcgctgccccgtcactgcccgtaaagttggtcgtgacatcacaatggaaacaataaggttgataccggcaatgcggcaccaatggactgtgcatcgagccccgccagttcggcacttcccccacctaacaacttggaaccagactcgccagacttcgcagatagtgccattacgtagaaatttgtgaaaagatatcggatgttgcgtgccgtcaggtcattgctcttcgaatggacaccgatacacttatataacagtcttaccacatcgctattcataagagtcctattatcatcaatgtcgaacgagtatctacacgtagaagcctaaatctgatacctcaagcccccctgccgactgtgccacggcagtgttgaaataaactactgagtcgcgcaacttcggagagaaacttgctttacagcatctagtgacctggttacgtcagagttcgtgattttgatcccaccaaccggttcagcgcccgccagactgcgctgagggcttggattcctcagactacctaagccgggcatagcccaagctgcaagtcctgttggtcgggtgcatgtccattctttcggcaagggctgtctttgcgacggattcattcatcggccgccaagttcgcagacacgacaaagcacgccgccgggaccctctcgcattgcacatccgcggctcttggctttcatcatcaccagccaacaaccaacgcgcatactctaccctgacacgcctcaacaacacggtcggagtaggagctccgactgccatcgcatatcgacggtagtatcgctctatcgcagacagcccacaggccgactatctgcctcgctagacccattgcgaccccgcaagcatgtcgactgtccaagacgacgggcacggacggcctgagcaattacctctgcgcgacaagctcggcgatgctgctaatatcaacgacgtgaacaacgatgacaatgtccaacaagggccagaccgtggcctaccgccgcacagtgacgttgcgcccaaggccgaagggaccggcgagactagcgaggaccacctcgcaaatcacagcagtacactgaagactaaaatacaggaccaaaaacagaaagtcagcgatcagaaggaaaaaataaaggagaaggcaaatccgcccggtggattcgactccacgccaattcctgatgcgccgcaaggatatacggtcaaatttatttttcatcgtgctgagaatctacccacgtccgactatggaactggcgcagctgatccttttatcgcggccaccctctctacggcggtgcccaaacgacacaaagaagatccggacctcttcttcagaacccgcaccattcgaaggtcactcgagccgcaatgggacgaggaatggatcgtcgccaatgttccatcatctggcttcaagctcaagtgccgcttatacgatgaggactggcccgaccacaacgatcgtcttggcaatgtgacaatctatgtgaacaatgtcaacgagtcttggcaaggatttccgccgcctggtaagatgttcgaggtgaagaagcgtgtcggcagcaagcgagcctacttccttaaagctgtcactactgcttttgataaaaactcgtccatgacgccgcggttgtatgtcagtgcccaagttcttgaaaagtcccagccaccacatgggcagatctacacggtaggaccaaccaagtttttcaagcatttttcacccatgatagggcggatcactggcatcagagtcaacgccgacgaggctgctgactcacaagaccatgaatcttcccaaggtgccagcgcagacgggcacagcgagaagaaaccgcaaaagtatgattttcaagccaacgagattcaattgtcgggccctgtgcctcccaaactctatcatcgatttgtcgaattcagacctataattggtcgtcttttccaggataccgggctccgtggacgtgtgctgaataaagccctacatcatcaacatgaccgcgtttacaattttgacaagtctacacagtggggcacattcaagccatgttcggaagaagcaagtcttcagtttctcaagatggcacactttgacgaaggtggacgcctttttacatacatcattacccttgacggcctcatgcgcttcaccgagactggcaaagagttcggtatcgacctgctgagcaagcacactatgcacagcgacgctcagatatatatcgcatgctccggcgaatttctcattaggaggttgaaaaagccaaaagcaagtgaggatgctgagcccgatgtgcccactcacccagatcaagatgttaaaggaggtcctccacatgacccgccgccagcgaagccagaatactatcagcttgtgattgacaacgacagcggcacataccgtcctgacaagtcagtcttgcctgacttgcagaagtttctggagcgcaacttccctggactgggagtcgttgccctggcctgtgatgacgatgaagatcaaaggttgaaagagaagcagcgtgctgtgaagaagagagaaggtcagcaggtcaagatggtgatgaatcgcagtcccagctcaagctcgcttagctccggcgaccttagcgatcttgaagatgtagagcgatctggagacatgggcaggaagagcaagaaagaacgtgcttgggatttaatggaagaaccaagacggatcaaggagatgactaaatcgaaagcaggtggcagtgatcccgtggcctgatgtaatcactaatcattcccttctttgtcagtcacttctctaattataagaactgagggcgctggtcgcgtggggttctggcgttcatgcgagtctcaactagtctagcaaagcactttttgcttatcatcgtgctctaagtcatcgttcgagtctaataattcaattcaacacgactcgaaatttcatcactaagtcctttcaaatcttgtggtcttactgatcttaaacaatgcaaa

SEQ ID NO: 13585 - DNA, 1053 bp, Muscodor strobelii
  misc_feature: SGI cDNA ID NO. 564456
  misc_feature: Encodes the peptide sequence at SEQ ID NO 13586
atgacattacagacgactccagtacaagttctcgacggaggcttggggacatctctcgaagatgcgtacggcgtgcatttcgaccacacgacgcccctgtggtcttccagcttgctcatctcagaccgcgagacgcttctgtcctgccaaagtgacttcgcgcgtgttcccgtcgacatcctgctcactgccacctaccaggtctcagccgatggcttccagcgcgctggggtcgcaagggaccggattcccaacttcttagagcatgctatatccatcgttgagcaggtcagggttcctggtacaaaacttgcattgagccttggaccttatggcgccgtcatgacgcctagtagccaggagtacagcggtttgtatgacgaagaacataataccactgacaagttactccgttggcacacaagtcgcatggagttattttccaacgtgaagctcttaggaaaccgtattgattatatcgccttcgagaccatgccacgcattgatgagatcctcgcgctgcgacagctcactgcagcccaggcttcgaattccggtgagatcgaagctgttagaagtcttaccaacgttccatactggatctcctgcgtgtttcccggcgatgactacactcttccggatggtagcagcgtcgaccaggttatccgtgcacttctaagtttagaaatttccgaacgtgttccatggggcatcggagttaattgtacgaagttagcgaagcttccacgattaatcaccatgttcgagagcggcgtaaaagttctagaaaacgccggtcatcttaaatcctggcccagcttactgctgtatccagatggcaccaatggtgaggtctacgatacgaccaccaagacatggacagctccagcagggcctaatgttgactcagagttatcatgggaggtccaattaggaagtattgtcgccgaggcccgtagccgcggttgctggcagagcatcgtggtaggcggctgttgcaaagcaaccgctgctgatattgcaagacttcggaaacaagtattagcagagtga

SEQ ID NO: 13586 - protein, 350 aa, Muscodor strobelii
  misc_feature: SGI Peptide ID NO. 564456
  misc_feature (8)..(349): Pfam Id: PF02574 Pfam Desc: Homocysteine S-methyltransferase
  misc_feature (10)..(349): NCBI GI: 256732281 Blast Desc: NECHADRAFT_40637 [Nectria haematococca mpVI 77-13-4]
  misc_feature (5)..(348): NCBI GI: 261353917 Blast Desc: homocysteine S-methyltransferase [Verticillium albo-atrum VaMs.102]
  misc_feature (8)..(350): NCBI GI: 121719378 Blast Desc: homocysteine S-methyltransferase, [Aspergillus clavatus NRRL 1] gi|119404586|gb|EAW14962.1| homocysteine S-methyltransferase, [Aspergillus clavatus NRRL 1]
  misc_feature (6)..(350): NCBI GI: 159125886 Blast Desc: homocysteine S-methyltransferase, [Aspergillus fumigatus A1163]
  misc_feature (6)..(350): NCBI GI: 70985372 Blast Desc: homocysteine S-methyltransferase [Aspergillus fumigatus Af293] gi|66845820|gb|EAL86154.1| homocysteine S-methyltransferase, [Aspergillus fumigatus Af293]
  misc_feature (6)..(348): NCBI GI: 46134149 Blast Desc: FG09214.1 [Gibberella zeae PH-1]
  misc_feature (3)..(347): NCBI GI: 145251449 Blast Desc: An15g07110 [Aspergillus niger] gi|134082772|emb|CAK48546.1| protein product [Aspergillus niger]
  misc_feature (8)..(346): NCBI GI: 255949320 Blast Desc: Pc22g15090 [Penicillium chrysogenum Wisconsin 54-1255] gi|211592444|emb|CAP98797.1| Pc22g15090 [Penicillium chrysogenum Wisconsin 54-1255]
  misc_feature (8)..(350): NCBI GI: 119499249 Blast Desc: homocysteine S-methyltransferase, [Neosartorya fischeri NRRL 181] gi|119414546|gb|EAW24485.1| homocysteine S-methyltransferase, [Neosartorya fischeri NRRL 181]
  misc_feature (8)..(350): NCBI GI: 115384034 Blast Desc: conserved [Aspergillus terreus NIH2624] gi|114196256|gb|EAU37956.1| conserved [Aspergillus terreus NIH2624]
  misc_feature (3)..(343): SWISSPROT Homolog: EC 2.1.1.10 Homocysteine S-methyltransferase
MTLQTTPVQVLDGGLGTSLEDAYGVHFDHTTPLWSSSLLISDRETLLSCQSDFARVPVDILLTATYQVSADGFQRAGVARDRIPNFLEHAISIVEQVRVPGTKLALSLGPYGAVMTPSSQEYSGLYDEEHNTTDKLLRWHTSRMELFSNVKLLGNRIDYIAFETMPRIDEILALRQLTAAQASNSGEIEAVRSLTNVPYWISCVFPGDDYTLPDGSSVDQVIRALLSLEISERVPWGIGVNCTKLAKLPRLITMFESGVKVLENAGHLKSWPSLLLYPDGTNGEVYDTTTKTWTAPAGPNVDSELSWEVQLGSIVAEARSRGCWQSIVVGGCCKATAADIARLRKQVLAE

SEQ ID NO: 13587 - DNA, 4770 bp, Muscodor strobelii
  misc_feature: SGI EST ID NO. CUFF.32656.0
  misc_feature: Variant of the nucleotide sequence at SEQ ID NO 13585
tttgcattgtttaagatcagtaagaccacaagatttgaaaggacttagtgatgaaatttcgagtcgtgttgaattgaattattagactcgaacgatgacttagagcacgatgataagcaaaaagtgctttgctagactagttgagactcgcatgaacgccagaaccccacgcgaccagcgccctcagttcttataattagagaagtgactgacaaagaagggaatgattagtgattacatcaggccacgggatcactgccacctgctttcgatttagtcatctccttgatccgtcttggttcttccattaaatcccaagcacgttctttcttgctcttcctgcccatgtctccagatcgctctacatcttcaagatcgctaaggtcgccggagctaagcgagcttgagctgggactgcgattcatcaccatcttgacctgctgaccttctctcttcttcacagcacgctgcttctctttcaacctttgatcttcatcgtcatcacaggccagggcaacgactcccagtccagggaagttgcgctccagaaacttctgcaagtcaggcaagactgacttgtcaggacggtatgtgccgctgtcgttgtcaatcacaagctgatagtattctggcttcgctggcggcgggtcatgtggaggacctcctttaacatcttgatctgggtgagtgggcacatcgggctcagcatcctcacttgcttttggctttttcaacctcctaatgagaaattcgccggagcatgcgatatatatctgagcgtcgctgtgcatagtgtgcttgctcagcaggtcgataccgaactctttgccagtctcggtgaagcgcatgaggccgtcaagggtaatgatgtatgtaaaaaggcgtccaccttcgtcaaagtgtgccatcttgagaaactgaagacttgcttcttccgaacatggcttgaatgtgccccactgtgtagacttgtcaaaattgtaaacgcggtcatgttgatgatgtagggctttattcagcacacgtccacggagcccggtatcctggaaaagacgaccaattataggtctgaattcgacaaatcgatgatagagtttgggaggcacagggcccgacaattgaatctcgttggcttgaaaatcatacttttgcggtttcttctcgctgtgcccgtctgcgctggcaccttgggaagattcatggtcttgtgagtcagcagcctcgtcggcgttgactctgatgccagtgatccgccctatcatgggtgaaaaatgcttgaaaaacttggttggtcctaccgtgtagatctgcccatgtggtggctgggacttttcaagaacttgggcactgacatacaaccgcggcgtcatggacgagtttttatcaaaagcagtagtgacagctttaaggaagtaggctcgcttgctgccgacacgcttcttcacctcgaacatcttaccaggcggcggaaatccttgccaagactcgttgacattgttcacatagattgtcacattgccaagacgatcgttgtggtcgggccagtcctcatcgtataagcggcacttgagcttgaagccagatgatggaacattggcgacgatccattcctcgtcccattgcggctcgagtgaccttcgaatggtgcgggttctgaagaagaggtccggatcttctttgtgtcgtttgggcaccgccgtagagagggtggccgcgataaaaggatcagctgcgccagttccatagtcggacgtgggtagattctcagcacgatgaaaaataaatttgaccgtatatccttgcggcgcatcaggaattggcgtggagtcgaatccaccgggcggatttgccttctcctttattttttccttctgatcgctgactttctgtttttggtcctgtattttagtcttcagtgtactgctgtgatttgcgaggtggtcctcgctagtctcgccggtcccttcggccttgggcgcaacgtcactgtgcggcggtaggccacggtctggcccttgttggacattgtcatcgttgttcacgtcgttgatattagcagcatcgccgagcttgtcgcgcagaggtaattgctcaggccgtccgtgcccgtcgtcttggacagtcgacatgcttgcggggtcgcaatgggtctagcgaggcagatagtcggcctgtgggctgtctgcgatagagcgatactaccgtcgatatgcgatggcagtcggagctcctactccgaccgtgttgttgaggcgtgtcagggtagagtatgcgcgttggttgttggctggtgatgatgaaagccaagagccgcggatgtgcaatgcgagagggtcccggcggcgtgctttgtcgtgtctgcgaacttggcggccgatgaatgaatccgtcgcaaagacagcccttgccgaaagaatggacatgcacccgaccaacaggacttgcagcttgggctatgcccggcttaggtagtctgaggaatccaagccctcagcgcagtctggcgggcgctgaaccggttggtgggatcaaaatcacgaactctgacgtaaccaggtcactagatgctgtaaagcaagtttctctccgaagttgcgcgactcagtagtttatttcaacactgccgtggcacagtcggcaggggggcttgaggtatcagatttaggcttctacgtgtagatactcgttcgacattgatgataataggactcttatgaatagcgatgtggtaagactgttatataagtgtatcggtgtccattcgaagagcaatgacctgacggcacgcaacatccgatatcttttcacaaatttctacgtaatggcactatctgcgaagtctggcgagtctggttccaagttgttaggtgggggaagtgccgaactggcggggctcgatgcacagtccattggtgccgcattgccggtatcaaccttattgtttccattgtgatgtcacgaccaactttacgggcagtgacggggcagcgccggctgcacacagaggcatgttaatagacagacgagacagacaattacgacgaacaagccatccgcgacgagaatagaagtttatcacttttttgagtctgatgaaaagtcggtacaagtgtccaatgcccggtccaccagagacatggaatagggaccgtcacagcgtctagagccgcgattgaggcgtggtcatgtaaggcaagaatgtctgggcagccccacgaaattggacctaaatacgatctgtgctcatgccgagagaacccatcttaatcccttgcctgatatgcccgggtatcaagaccagagcaatactactgtacgcggtcaagaatctgagttgtggctcggcgcaatgacattacagacgactccagtacaagttctcgacggaggcttggggacatctctcgaagatgcgtacggcgtgcatttcgaccacacgacgcccctgtggtcttccagcttgctcatctcagaccgcgagacgcttctgtcctgccaaagtgacttcgcgcgtgttcccgtcgacatcctgctcactgccacctaccaggtctcagccgatggcttccagcgcgctggggtcgcaagggaccggattcccaacttcttagagcatgctatatccatcgttgagcaggtcagggttcctggtacaaaacttgcattgagccttggaccttatggcgccgtcatgacgcctagtagccaggagtacagcggtttgtatgacgaagaacataataccactgacaagttactccgttggcacacaagtcgcatggagttattttccaacgtgaagctcttaggaaaccgtattgattatatcgccttcgagaccatgccacgcattgatgagatcctcgcgctgcgacagctcactgcagcccaggcttcgaattccggtgagatcgaagctgttagaagtcttaccaacgttccatactggatctcctgcgtgtttcccggcgatgactacactcttccggatggtagcagcgtcgaccaggttatccgtgcacttctaagtttagaaatttccgaacgtgttccatggggcatcggagttaattgtacgaagttagcgaagcttccacgattaatcaccatgttcgagagcggcgtaaaagttctagaaaacgccggtcatcttaaatcctggcccagcttactgctgtatccagatggcaccaatggtgaggtctacgatacgaccaccaagacatggacagctccagcagggcctaatgttgactcagagttatcatgggaggtccaattaggaagtattgtcgccgaggcccgtagccgcggttgctggcagagcatcgtggtaggcggctgttgcaaagcaaccgctgctgatattgcaagacttcggaaacaagtattagcagagtgacatacttctgccttataaattcaatcgagttacatagttagattgtttgaacattagatacacgttatggtgagcaccgggcaaattggcgctgggcctcttagcttcaagcccgtcaaggaggccacagtagattatgccaatcacgaaattaggagccgatgctcatgataacgcatgtgctctcaatcacgagtagaaggacaactatgcacggtattaccgtcgctcatatcacaacttgtgatccaagatgggtagcctattctcttgaagatgaccgaggatgtgtaagaaaatggcaacggcagtcttccgtcacagaactatgattctacagagcaggcaaggcaggacgagaggtattc

SEQ ID NO: 13588 - DNA, 1182 bp, Muscodor strobelii
  misc_feature: SGI cDNA ID NO. 564457
  misc_feature: Encodes the peptide sequence at SEQ ID NO 13589
atggtccgcctgatcaagtacgccggcgccagcgccctgctggttgcctcggtgagcgcccactacagcgtttcctcttatcccggaggcgacgatgagtgcactgaggagtacattcctccgacttccagttatcctgccgatgatgactgtcccgcggagacttcaagctattcgagctacccagcgcctacgagcagctacccagcgccccctagctcatatggcgtgacatcttacccatatcctacgcccagcagttcggtttacgcaacgcctagcacttctgatgaggatgaatgtcctcccgagacttcggaaagttctgggccgacttatgtccacagcagctatcctgtgacttctggtggatattctggatatcctacaccatctagctcggcttatccaaccccatctacatcagatgaagatgaatgtccgcctgagacatcggaaacttatggtcccacgtcgacctacattcactccagttaccccgtgactggataccctacgccttcgagctctccttacccttcgagctctgacgaggaggaatgcccgcctgagacttcgactcctggtggaggctacccaactggaggttcatatccttctagcagcgctccagtgacttattctgcctctgagacttcccctggtcaaggttacccaacgggaggcgtgacttcttatgccacgtcaaccatctactcgaccacttgctatgaaacgagcggaaccacgacgacagagagcattcctatcacgaccacggtctatcctgtgactgagacgccatacccttcaggctcctcgagcagcgtttatgtgacctcccctggtggaggtagctaccctagtagctctattccctacagtgtctcgactcctgccggttatccatcttctgaggctccatcaacttatcccgttgcttctagcagccctatttcgtacccaggctcttatccatcatctagctaccccggtggccccgtctcgtcttattcgactctgacgacttcttatgcagtttctcctgtcccaactacttctgcatcgtaccccgcaactactactgctgccgctaccagccctgttcctaccgctggtgccttcaaggctggtatcagcttcgccgctgttgccgttgccggggcctttttcctcctctaa

SEQ ID NO: 13589 - protein, 393 aa, Muscodor strobelii
  misc_feature: SGI Peptide ID NO. 564457
MVRLIKYAGASALLVASVSAHYSVSSYPGGDDECTEEYIPPTSSYPADDDCPAETSSYSSYPAPTSSYPAPPSSYGVTSYPYPTPSSSVYATPSTSDEDECPPETSESSGPTYVHSSYPVTSGGYSGYPTPSSSAYPTPSTSDEDECPPETSETYGPTSTYIHSSYPVTGYPTPSSSPYPSSSDEEECPPETSTPGGGYPTGGSYPSSSAPVTYSASETSPGQGYPTGGVTSYATSTIYSTTCYETSGTTTTESIPITTTVYPVTETPYPSGSSSSVYVTSPGGGSYPSSSIPYSVSTPAGYPSSEAPSTYPVASSSPISYPGSYPSSSYPGGPVSSYSTLTTSYAVSPVPTTSASYPATTTAAATSPVPTAGAFKAGISFAAVAVAGAFFLL

SEQ ID NO: 13590 - DNA, 1928 bp, Muscodor strobelii
  misc_feature: SGI EST ID NO. CUFF.32532.0
  misc_feature: Variant of the nucleotide sequence at SEQ ID NO 13588
tggggctgtcggcctagctgcagctgcttattccctgcagcctccctgtcctagtccttgtcctcacgagagatcctccacaggaaaaaatagtacacagagctagaagcgatcagtcagtccagtcataggctgggccatccagacctgcgggacgatacgacggatagaagcgtgggcgccgggtgccttgcgtctttattaaccttgccatggcccagctgctcaccttctgctgatcttcctcacgcttgcctactcgctctcgtctccaagctcaagtctccttaagtcgtgaagggttccgctttccccggcctaacttcagtcattcgcttgagatccgatatctaatcagacaatatggtccgcctgatcaagtacgccggcgccagcgccctgctggttgcctcggtgagcgcccactacagcgtttcctcttatcccggaggcgacgatgagtgcactgaggagtacattcctccgacttccagttatcctgccgatgatgactgtcccgcggagacttcaagctattcgagctacccagcgcctacgagcagctacccagcgccccctagctcatatggcgtgacatcttacccatatcctacgcccagcagttcggtttacgcaacgcctagcacttctgatgaggatgaatgtcctcccgagacttcggaaagttctgggccgacttatgtccacagcagctatcctgtgacttctggtggatattctggatatcctacaccatctagctcggcttatccaaccccatctacatcagatgaagatgaatgtccgcctgagacatcggaaacttatggtcccacgtcgacctacattcactccagttaccccgtgactggataccctacgccttcgagctctccttacccttcgagctctgacgaggaggaatgcccgcctgagacttcgactcctggtggaggctacccaactggaggttcatatccttctagcagcgctccagtgacttattctgcctctgagacttcccctggtcaaggttacccaacgggaggcgtgacttcttatgccacgtcaaccatctactcgaccacttgctatgaaacgagcggaaccacgacgacagagagcattcctatcacgaccacggtctatcctgtgactgagacgccatacccttcaggctcctcgagcagcgtttatgtgacctcccctggtggaggtagctaccctagtagctctattccctacagtgtctcgactcctgccggttatccatcttctgaggctccatcaacttatcccgttgcttctagcagccctatttcgtacccaggctcttatccatcatctagctaccccggtggccccgtctcgtcttattcgactctgacgacttcttatgcagtttctcctgtcccaactacttctgcatcgtaccccgcaactactactgctgccgctaccagccctgttcctaccgctggtgccttcaaggctggtatcagcttcgccgctgttgccgttgccggggcctttttcctcctctaagcggttatggaaaggctcgcggggtttgggctgtgatgtggtgtgaatagagaaaatgagaggatatttaatcatttgagattcacctagagctcccttgttttcctatttactgcatgcgcaagcactacccattgttaatacactgtttcaaactttctaatgtatatattgttttgtccctagtcgcccgctcgcattgcgctcttttgtacacgtgaatgttgattatcattaattgatagaccattgaaatctgcatatctacattttggtcgcgctcgtgatactaattgggtataatctcctatgtcgatcttacgccttttgagactgtgatgaactcgcgtatctcagatcttgtttgacccgtgagagacctg

SEQ ID NO: 13591 - DNA, 1086 bp, Muscodor strobelii
  misc_feature: SGI cDNA ID NO. 564458
  misc_feature: Reduced expression when VOC is produced
  misc_feature: Encodes the peptide sequence at SEQ ID NO 13592
atgaggcttcacatactcacgtctctgctgaggggaggagggcctgcatttgatccaccggctacttctacaacacacaaatcgccatcgccgtcgccagagccggtatcttcagcgaaaagctcagcacccagtagtgcgaagccgacgcctacatcggaacccgtaacgcgtaccattgaagtcgggaagggcgggttcaatttcaacccagactctctcacggcaaacccgggcgatagtatcgaatttgagttctggccaggcggccactctgtcgcgagggctcaatatgggtctccatgcttgccgtacgaatccgtcgtgccagacggccaaggattctggagtggcgacatgcccgattctgaccctcatcctaaatattcaataatcataaacgacacagatccagtgtttttctattgcggagcaccgggctcgtgcaaagggcacaaaatggtcggtgtgatcaatcctaacggcacctggaacgcgacaagccaagaatcattcatcaacaacgaaacgatcgacatccaaccaggtgaaccgatccccagcgaaggatcagagacaccagcagcgggcggatctagctccggttctcactccggttccggtctgtcgagcggtggcatcgcaggaatagcgatagcagctgccgtgatcatcatcgccgttgctgtgctgctatacttctgcggtcgacaaggcgggttcgaaaagggatatcgacggagcattttccatgcggcgaaaccagagatgaggataagtcatgatgggacgcctcgccctccaccttctgatatgtattccccgggcacgacacgtgtaggatcctcgatctatatgccgccgagtccagcagcggtatacagtccggtggtgaatagagagcaccagagccccttcttaccgtatcgacctggcgtgggtatgcagagtccgactctgtcggagtcgcctgtgttgccccgcgaccgccttagtccttgccctcatgaagttgacaaggttgagattccggactcacaggcacctgcagagcttccggcggacgtacactcgaaacatacgtaa

SEQ ID NO: 13592 - protein, 361 aa, Muscodor strobelii
  misc_feature: SGI Peptide ID NO. 564458
  misc_feature (59)..(243): NCBI GI: 156050343 Blast Desc: SS1G_07758 [Sclerotinia sclerotiorum 1980] gi|154692159|gb|EDN91897.1| SS1G_07758 [Sclerotinia sclerotiorum 1980]
  misc_feature (57)..(247): NCBI GI: 189210383 Blast Desc: conserved [Pyrenophora tritici-repentis Pt-1C-BFP] gi|187977616|gb|EDU44242.1| conserved [Pyrenophora tritici-repentis Pt-1C-BFP]
  misc_feature (56)..(247): NCBI GI: 169597005 Blast Desc: SNOG_01280 [Phaeosphaeria nodorum SN15] gi|111069809|gb|EAT90929.1| SNOG_01280 [Phaeosphaeria nodorum SN15]
  misc_feature (21)..(288): NCBI GI: 189195386 Blast Desc: conserved [Pyrenophora tritici-repentis Pt-1C-BFP] gi|187979910|gb|EDU46536.1| conserved [Pyrenophora tritici-repentis Pt-1C-BFP]
  misc_feature (47)..(261): NCBI GI: 156057903 Blast Desc: [Sclerotinia sclerotiorum 1980] gi|154702468|gb|EDO02207.1| [Sclerotinia sclerotiorum 1980]
  misc_feature (39)..(267): NCBI GI: 256729658 Blast Desc: NECHADRAFT_46724 [Nectria haematococca mpVI 77-13-4]
  misc_feature (41)..(255): NCBI GI: 46122457 Blast Desc: FG05606.1 [Gibberella zeae PH-1]
  misc_feature (70)..(251): NCBI GI: 169620860 Blast Desc: SNOG_13635 [Phaeosphaeria nodorum SN15] gi|160704123|gb|EAT79082.2| SNOG_13635 [Phaeosphaeria nodorum SN15]
  misc_feature (57)..(251): NCBI GI: 154295069 Blast Desc: [Botryotinia fuckeliana B05.10] gi|150844439|gb|EDN19632.1| [Botryotinia fuckeliana B05.10]
  misc_feature (46)..(279): NCBI GI: 115385549 Blast Desc: [Aspergillus terreus NIH2624] gi|114187768|gb|EAU29468.1| [Aspergillus terreus NIH2624]
  misc_feature: Useful for introducing or modulating the production of volatile compounds
MRLHILTSLLRGGGPAFDPPATSTTHKSPSPSPEPVSSAKSSAPSSAKPTPTSEPVTRTIEVGKGGFNFNPDSLTANPGDSIEFEFWPGGHSVARAQYGSPCLPYESVVPDGQGFWSGDMPDSDPHPKYSIIINDTDPVFFYCGAPGSCKGHKMVGVINPNGTWNATSQESFINNETIDIQPGEPIPSEGSETPAAGGSSSGSHSGSGLSSGGIAGIAIAAAVIIIAVAVLLYFCGRQGGFEKGYRRSIFHAAKPEMRISHDGTPRPPPSDMYSPGTTRVGSSIYMPPSPAAVYSPVVNREHQSPFLPYRPGVGMQSPTLSESPVLPRDRLSPCPHEVDKVEIPDSQAPAELPADVHSKHT

SEQ ID NO: 13593 - DNA, 1348 bp, Muscodor strobelii
  misc_feature: SGI EST ID NO. CUFF.32527.0
  misc_feature: Variant of the nucleotide sequence at SEQ ID NO 13591
ctgcatttgatccaccggctacttctacaacacacaaatcgccatcgccgtcgccagagccggtatcttcagcgaaaagctcagcacccagtagtgcgaagccgacgcctacatcggaacccgtaacgcgtaccattgaagtcgggaagggcgggttcaatttcaacccagactctctcacggcaaacccgggcgatagtatcgaatttgagttctggccaggcggccactctgtcgcgagggctcaatatgggtctccagtaagttgctgtgaactagttgccccttttatgccgtggggatgacgttctttagaggttgattcagagaatcctcacctttcgcaagaatgtcaccttacgaagtcagttgaatgactgtttgaccgtacatctagtgcttgccgtacgaatccgtcgtgccagacggccaaggattctggagtggcgacatgcccgattctgaccctcatcctaaatattcaataatcataaacgacacagatccagtgtttttctattgcggagcaccgggctcgtgcaaagggcacaaaatggtcggtgtgatcaatcctaacggcacctggaacgcgacaagccaagaatcattcatcaacaacgaaacgatcgacatccaaccaggtgaaccgatccccagcgaaggatcagagacaccagcagcgggcggatctagctccggttctcactccggttccggtctgtcgagcggtggcatcgcaggaatagcgatagcagctgccgtgatcatcatcgccgttgctgtgctgctatacttctgcggtcgacaaggcgggttcgaaaagggatatcgacggagcattttccatgcggcgaaaccagagatgaggataagtcatgatgggacgcctcgccctccaccttctgatatgtattccccgggcacgacacgtgtaggatcctcgatctatatgccgccgagtccagcagcggtatacagtccggtggtgaatagagagcaccagagccccttcttaccgtatcgacctggcgtgggtatgcagagtccgactctgtcggagtcgcctgtgttgccccgcgaccgccttagtccttgccctcatgaagttgacaaggttgagattccggactcacaggcacctgcagagcttccggcggacgtacactcgaaacatacgtaacataattgcgcatgggaaagcatgaggaagagttgaatagtctttcggttttaggcatttaagtatcttgcagacataggcaaaatctcaattattacaaagctcgttgttggacgtagatcattattgttagttaatacccaatcactgatattatctttatgagtg

SEQ ID NO: 13594 - DNA, 1767 bp, Muscodor strobelii
  misc_feature: SGI cDNA ID NO. 564459
  misc_feature: Encodes the peptide sequence at SEQ ID NO 13595
atgtcttcgccggcgacgcacaagcccaggcgcaaggtcaaaaagactgcccactttgccgacagcgtcaaacccgagccactcgtccgaagcgcctcgttccctctcgaagccctgctctggcctgcccgaacctcgctctcgcaatgggagactctgccccttatactcatggccgtcggcctcttccgctgggcggccggtctctggggctactcgggctatgagaagccgcccatgttcggcgactacgaggcccagcggcactggatggagatcaccacgcagctgcccgtctcccagtggtacttccacgacctgcagtggtgggggctcgactatccgcccctgaccgcgtaccacagctggctgctcggcctcgtcggctcctacgtcaacccggcatggttcgccctctacacgtcgcgcggctactcgggccccgacctcaagatcttcatgcgcgccaccgtcgtcgtctccgagtacctcatttacgtccccgccgtcgtcatcttcgtccgccgctacagcagacacctcggcgttgcccagtggcccgcctccgtcgccctcgtcgccatcctcatgcagccgggcctcatcctcatcgaccatgtccacttccagtacaacaccgtcatgctcggcttcgtcgttgcctgcatgtctagcgccttggccggccgctacatgtggactgccatcttcttcgtggccgctctgggattcaagcagatggccttgtactacgcccccgttgtctttgcttttctgctcggcagctgtatcttccctgagattaagatcggtcgcttctttggcattgccgccgtcaccgtcctgtcgtttgccatcttggttcttcccctgtttctgggtgtactctacgatcagaccagggggatcactgcgcatcccagcttggaaggaactcatccccctctccctatcttcacttttctagaaccgtatctcgacacggatgccgcctactatccatttgtcgagcagctggttcagatgatacaccgagtctttccctttgcccgaggtctgttcgaagacaaagttgccaatttttggtgtaccgccaacgtggtcatcaagctacgaaaatacccttctgagctcctccagcaagcatctcttgccgccacgctcgcagtcatcgcaccctcttgcgctattatcttcttccgacccaggagggacttgttgccttacgccttcgctgctacggcctggggtttcttcctcttcagctaccaggttcatgagaagagcgtacttctccctctactgcccatgacactacttcttgccggcaaacaaggtctgggaaaggagacccgagcatgggttggatttgccaatatcattggcgcttggactatgttccctcttctgcagcgagtcgatctgcgaatgccctacgctgtgctcactttgctctgggcttatctcctcggtctccctccgacttcattgagtgcctatctccaccaaggccagagccccatggtccagtggggaacgttcctaatccacggctcgttctacgttgccatggctgtctggcacgttgtagagcgcactctcgacccgcctaccgacaagccagacctctgggtcgtcgccaacgtcggtcttggttttgctgggttcgtgctctgctatctgtggtgttcttggaagctgatccaggagagcaacatccttccgacttgggctacgtcgaggaccgataaactcaagaccaagtaa

SEQ ID NO: 13595 - protein, 588 aa, Muscodor strobelii
  misc_feature: SGI Peptide ID NO. 564459
  misc_feature (58)..(566): Pfam Id: PF03155 Pfam Desc: ALG6, ALG8 glycosyltransferase family
  misc_feature (58)..(293): Pfam Id: PF03155 Pfam Desc: ALG6, ALG8 glycosyltransferase family
  misc_feature (334)..(566): Pfam Id: PF03155 Pfam Desc: ALG6, ALG8 glycosyltransferase family
  misc_feature (3)..(588): NCBI GI: 116181924 Blast Desc: CHGG_01590 [Chaetomium globosum CBS 148.51] gi|88185887|gb|EAQ93355.1| CHGG_01590 [Chaetomium globosum CBS 148.51]
  misc_feature (2)..(586): NCBI GI: 39959120 Blast Desc: MGG_09310 [Magnaporthe grisea 70-15] gi|145013228|gb|EDJ97869.1| MGG_09310 [Magnaporthe grisea 70-15]
  misc_feature (3)..(588): NCBI GI: 46122459 Blast Desc: FG05607.1 [Gibberella zeae PH-1]
  misc_feature (3)..(588): NCBI GI: 171687383 Blast Desc: protein product [Podospora anserina] gi|170943653|emb|CAP69305.1| protein product [Podospora anserina]
  misc_feature (3)..(575): NCBI GI: 256729656 Blast Desc: glycosyltransferase family 57 [Nectria haematococca mpVI 77-13-4]
  misc_feature (23)..(588): NCBI GI: 85113262 Blast Desc: NCU03317 [Neurospora crassa OR74A] gi|28926278|gb|EAA35258.1| NCU03317 [Neurospora crassa OR74A]
  misc_feature (1)..(582): NCBI GI: 169623993 Blast Desc: SNOG_15246 [Phaeosphaeria nodorum SN15] gi|111056351|gb|EAT77471.1| SNOG_15246 [Phaeosphaeria nodorum SN15]
  misc_feature (1)..(573): NCBI GI: 189203857 Blast Desc: glucosyltransferase [Pyrenophora tritici-repentis Pt-1C-BFP] gi|187985363|gb|EDU50851.1| glucosyltransferase [Pyrenophora tritici-repentis Pt-1C-BFP]
  misc_feature (2)..(584): NCBI GI: 261203283 Blast Desc: glucosyltransferase [Ajellomyces dermatitidis SLH14081] gi|239586640|gb|EEQ69283.1| glucosyltransferase [Ajellomyces dermatitidis SLH14081] gi|239608321|gb|EEQ85308.1|
  misc_feature (6)..(584): NCBI GI: 226288244 Blast Desc: dolichyl pyrophosphate Man9GlcNAc2 alpha-1,3-glucosyltransferase [Paracoccidioides brasiliensis Pb18]
MSSPATHKPRRKVKKTAHFADSVKPEPLVRSASFPLEALLWPARTSLSQWETLPLILMAVGLFRWAAGLWGYSGYEKPPMFGDYEAQRHWMEITTQLPVSQWYFHDLQWWGLDYPPLTAYHSWLLGLVGSYVNPAWFALYTSRGYSGPDLKIFMRATVVVSEYLIYVPAVVIFVRRYSRHLGVAQWPASVALVAILMQPGLILIDHVHFQYNTVMLGFVVACMSSALAGRYMWTAIFFVAALGFKQMALYYAPVVFAFLLGSCIFPEIKIGRFFGIAAVTVLSFAILVLPLFLGVLYDQTRGITAHPSLEGTHPPLPIFTFLEPYLDTDAAYYPFVEQLVQMIHRVFPFARGLFEDKVANFWCTANVVIKLRKYPSELLQQASLAATLAVIAPSCAIIFFRPRRDLLPYAFAATAWGFFLFSYQVHEKSVLLPLLPMTLLLAGKQGLGKETRAWVGFANIIGAWTMFPLLQRVDLRMPYAVLTLLWAYLLGLPPTSLSAYLHQGQSPMVQWGTFLIHGSFYVAMAVWHVVERTLDPPTDKPDLWVVANVGLGFAGFVLCYLWCSWKLIQESNILPTWATSRTDKLKTK

SEQ ID NO: 13596 - DNA, 5884 bp, Muscodor strobelii
  misc_feature: SGI EST ID NO. CUFF.32569.1
  misc_feature: Variant of the nucleotide sequence at SEQ ID NO 13594
gcgtattggcaatcatgaaactcctagaaatcggtaacagttgaacatccgctccaagaggtacaggttgagattatgtatttgcataccccttactttgagtcaaaccagtggcctcggccatgctaacagcttcactcaatctcattcgtactcggccctatcagatatatacatttagaataaggtactcatgcctcccacagtcgcccacaaatcgaatcgtggtgacagtatgtcgtggtcgatgaaggactgagtcttgacattcctgcgaataactagtagcatcgctctcagagcatgaacaccaaaaatctcgccatattgcgcaaaagtaaaaacgcgctacggcacaaggaaagctacaatcaaaagacaaaggcccaacacgatgccgcaataaccgcagcgctctacctgaactcacccttgaactgatcctatcgttcatacatgagcttgaagctggcttgataaattttctgtcgactacaacatcgctgatgtcttccgcattcgagtgtaggattacagctgccacgagatgtaactgcaaaatcagcttctgcgccttctacgatgatccctggatctgatctccatagggcaagagcaccttcgcttagacctaagtacgaagccgattcatgcccatgctttaacacaatccgattatctacttgctgttgagaaagtcagccgcggggctatcgtagcaacatccgagcttgggttgcgagtgatacgcatcatgggaattgcgtgtcgccgccgagcggctcttggtcttgaattgcgtaagcccatggaaagccgcgactgatgtgcaactcgggctccggcgtcgtgctgatatattgattcgtctctcgcaagagcgcagcatcttcgggtgtcaagcaagatgcgtgtccgaaaatgatcggcaaactgccgttgtgtagaccctattcttcggggttgaggacttgaatgctgttgttgaaaccctatagcccccctacgcgacgaggaaatgaggcagaaagtgctggttcttgacgacgttgaaaattcttgtttactgaacttgattattgttgaagacgtatactagatacatagctaagtagactgactgtcgtaactaagtacgcttttcattaccctttaaggtagaaagagcttaatgaagttgttgaggcatatcagcctatatatggtcgcatacccttcttctccttgatataaatctcgactagaagtaagacctggtgctttcacttctatactcacccgccgtgcctggaaacccacctacaggggtttcaactgaccgttctcttatcgtcatcggaacttagctgctctccggcatagtcatccactctatcaggtggggctcgcatggactcaagagactgacttgacagctctggcggttgatagggcttgatggtgtgcatgtctcgaccagatggaagagttgaaaggagagttgcggaggccggaactgtctgcgtgagcatctataaagctgttagctacaaatgagatgtgtagttgtttaggtttagctaccgtatcattgactttggtccatttcgtttcaagcatctccatgaccctcgtctcctctactctccccgcgtcgaagccccaattcgtacccttctcgatcttcttatcttccctcttctctgaccagtctttcttcatgcggcttagactcaagcccttcttagcctctttcggctcgatccctagctcctgaagaccgcatcgtagccatcccagtgcattcccagtctggcccgataactccgcatcgatgccaaagaaacgacaggcttttgctcgactagtctttctcaagtcttctaaataccgaagaaggtcatcgttcaatctagccactctctttcctctcgaagattggcagagcgacgatgcctgagccgcatggtcggccgccgcgaggcataagcgtgcaaataagtgagcgcggacctttgggatctcgggagctttgtacatccactctctgtcattatcgttgcgatcctgggctacaacagctggatatggatcgtctttcaatactgctaagagtgttgcttctgctagcgcgagtgaggccagcgcgcgagcagtaggctgcgtgatatctgcacacggagccggagtcgtgagcccttctgccctccgcgccacgtagtcatggacggatgctgcgtctaagagatgcttggtagctgtcgtgatggctgtagtgcgcacttgagcactgattggcgcacctgttgtgacatataatgaatgaagggttgctcgagccagtagggtgtgagcatatccgagcgtcgtgagcgtgaagagtaggtcatactctaaagactgaaccttgacgcgcggcgtttctctccccggcaccgcacgatcggatatcgtggggcgccattctatgacgggagtagctttcaatacgacattgatctcctcgcccagctgcgagccgtgactgatgccagcatcgatggccaagacgaatggtagatagctgttcaagctagacactatggaggggagatttgatccctgggaggatggcgggagcctcttgtgttttttcaaggcatccctgacgactcctcgataggtgcttgcattgagcggtaacgagggatgtgactcgcacgtaaagctggaggagaaagagaaagaagatgtggttgggagaggaaaggggaagggcattttggaattcaaaactgtagactcgatacccaagctagtaccggctcaataggtttaatgaggggaatctctcagtcctagaaagcgggatcaagcttgagccacaatatgagatgtcactagtagtatatatggtgaattatattctgcttcaaaatatgtctacaagtagatttacgtgtgtaagtggaatgttttacgacaatgaattgttcttcaagtcgatggcatctgtgatcaacccctccagagccaagagtgcctcgagagtctagcttctgccaagcaaaacatcatatatgtgtatgtagatggaattaaggaacggcgagttctttttttgtcttttcacgtttcaatacttctagcttaggtagctacagctcggtttcttggaagctctattcccaaataagggcattctctgaagttcaaaactgcatgagtagaacaagcggtatgaacattggaacatagtagcgggcataggagcttggtgcagtgcatgttatcgggcttatcgtaggtagctcagcaagtgacgctaagccctcatagggctgcaatacatcatcttcagaagccccaagccgcccacaaatgaaaccccagagtgaacacctatcctggagctgttctaggtgcgttgcatgcagctgcgaccgttgtagatcctggacggcgggtagtcgcgacgttgaattgctgacgaccgtggtgaaacccaattcggtgtccttttttcttcttcacatcgtgttcacaaccaccacgcactctctctcaagtgtcaccttcgccgtcgctgttgccgagacccaatgcctccccctgtcggcgatattcattcctttctttctctttaaggcgccttcgtcccctcttggtccgtcttgtcccctctctgaccgctgtcgcaatgtcttcgccggcgacgcacaagcccaggcgcaaggtcaaaaagactgcccactttgccgacagcgtcaaacccgagccactcgtccgaagcgcctcgttccctctcgaagccctgctctggcctgcccgaacctcgctctcgcaatgggagactctgccccttatactcatggccgtcggcctcttccgctgggcggccggtctctggggctactcgggctatgagaagccgcccatgttcggcgactacgaggcccagcggcactggatggagatcaccacgcagctgcccgtctcccagtggtacttccacgacctgcagtggtgggggctcgactatccgcccctgaccgcgtaccacagctggctgctcggcctcgtcggctcctacgtcaacccggcatggttcgccctctacacgtcgcgcggctactcgggccccgacctcaagatcttcatgcgcgccaccgtcgtcgtctccgagtacctcatttacgtccccgccgtcgtcatcttcgtccgccgctacagcagacacctcggcgttgcccagtggcccgcctccgtcgccctcgtcgccatcctcatgcagccgggcctcatcctcatcgaccatgtccacttccagtacaacaccgtcatgctcggcttcgtcgttgcctgcatgtctagcgccttggccggccgctacatgtggactgccatcttcttcgtggccgctctgggattcaagcagatggccttgtactacgcccccgttgtctttgcttttctgctcggcagctgtatcttccctgagattaagatcggtcgcttctttggcattgccgccgtcaccgtcctgtcgtttgccatcttggttcttcccctgtttctgggtgtactctacgatcagaccagggggatcactgcgcatcccagcttggaaggaactcatccccctctccctatcttcacttttctagaaccgtatctcgacacggatgccgcctactatccatttgtcgagcagctggttcagatgatacaccgagtctttccctttgcccgaggtctgttcgaagacaaagttgccaatttttggtgtaccgccaacgtggtcatcaagctacgaaaatacccttctgagctcctccagcaagcatctcttgccgccacgctcgcagtcatcgcaccctcttgcgctattatcttcttccgacccaggagggacttgttgccttacgccttcgctgctacggcctggggtttcttcctcttcagctaccaggttcatgagaagagcgtacttctccctctactgcccatgacactacttcttgccggcaaacaaggtctgggaaaggagacccgagcatgggttggatttgccaatatcattggcgcttggactatgttccctcttctgcagcgagtcgatctgcgaatgccctacgctgtgctcactttgctctgggcttatctcctcggtctccctccgacttcattgagtgcctatctccaccaaggccagagccccatggtccagtggggaacgttcctaatccacggctcgttctacgttgccatggctgtctggcacgttgtagagcgcactctcgacccgcctaccgacaagccagacctctgggtcgtcgccaacgtcggtcttggttttgctgggttcgtgctctgctatctgtggtgttcttggaagctgatccaggagagcaacatccttccgacttgggctacgtcgaggaccgataaactcaagaccaagtaaatcgcctagactacacacttggccaactgccatttctttgcacattagaggtgctttaccattgctactatattacctactgatacccgccgaaaaacagatttcggttcaatgaaatttcaatgcgatgactttacagagcaaatctttcgtctcatggtctttgtgatgtgaactaagcatagcctccgtctgttctcgtgcgtaacacctaggaccttgactgagactttgagactcgggctttgcggacattgacccacgacccacgaggttatgactgttgctacttgtggcgatttagaatgacacggctttgacttatgattggatttatcgtgtgtctttccttatttgaaatgcgtacgaaatgcgtgcgcatccgaccctcctctcgtatatagttgttgacatacgatatgtacagtagttgagatataatcgaaattatatagtctg

SEQ ID NO: 13597 - DNA, 1377 bp, Muscodor strobelii
  misc_feature: SGI cDNA ID NO. 564460
  misc_feature: Encodes the peptide sequence at SEQ ID NO 13598
atgcccttcccctttcctctcccaaccacatcttctttctctttctcctccagctttacgtgcgagtcacatccctcgttaccgctcaatgcaagcacctatcgaggagtcgtcagggatgccttgaaaaaacacaagaggctcccgccatcctcccagggatcaaatctcccctccatagtgtctagcttgaacagctatctaccattcgtcttggccatcgatgctggcatcagtcacggctcgcagctgggcgaggagatcaatgtcgtattgaaagctactcccgtcatagaatggcgccccacgatatccgatcgtgcggtgccggggagagaaacgccgcgcgtcaaggttcagtctttagagtatgacctactcttcacgctcacgacgctcggatatgctcacaccctactggctcgagcaacccttcattcattatatgtcacaacaggtgcgccaatcagtgctcaagtgcgcactacagccatcacgacagctaccaagcatctcttagacgcagcatccgtccatgactacgtggcgcggagggcagaagggctcacgactccggctccgtgtgcagatatcacgcagcctactgctcgcgcgctggcctcactcgcgctagcagaagcaacactcttagcagtattgaaagacgatccatatccagctgttgtagcccaggatcgcaacgataatgacagagagtggatgtacaaagctcccgagatcccaaaggtccgcgctcacttatttgcacgcttatgcctcgcggcggccgaccatgcggctcaggcatcgtcgctctgccaatcttcgagaggaaagagagtggctagattgaacgatgaccttcttcggtatttagaagacttgagaaagactagtcgagcaaaagcctgtcgtttctttggcatcgatgcggagttatcgggccagactgggaatgcactgggatggctacgatgcggtcttcaggagctagggatcgagccgaaagaggctaagaagggcttgagtctaagccgcatgaagaaagactggtcagagaagagggaagataagaagatcgagaagggtacgaattggggcttcgacgcggggagagtagaggagacgagggtcatggagatgcttgaaacgaaatggaccaaagtcaatgatacgatgctcacgcagacagttccggcctccgcaactctcctttcaactcttccatctggtcgagacatgcacaccatcaagccctatcaaccgccagagctgtcaagtcagtctcttgagtccatgcgagccccacctgatagagtggatgactatgccggagagcagctaagttccgatgacgataagagaacggtcagttga

SEQ ID NO: 13598 - protein, 458 aa, Muscodor strobelii
  misc_feature: SGI Peptide ID NO. 564460
  misc_feature (1)..(453): NCBI GI: 156032465 Blast Desc: SS1G_13930 [Sclerotinia sclerotiorum 1980] gi|154699332|gb|EDN99070.1| SS1G_13930 [Sclerotinia sclerotiorum 1980]
  misc_feature (1)..(453): NCBI GI: 85113257 Blast Desc: pH-response regulator protein palC [Neurospora crassa OR74A] gi|73921592|sp|Q7SEM8.1|PALC_NEUCR RecName: Full=pH-response regulator protein palC pH-response regulator
  misc_feature (1)..(456): NCBI GI: 154296115 Blast Desc: BC1G_12787 [Botryotinia fuckeliana B05.10] gi|150843748|gb|EDN18941.1| BC1G_12787 [Botryotinia fuckeliana B05.10]
  misc_feature (1)..(455): NCBI GI: 256729841 Blast Desc: [Nectria haematococca mpVI 77-13-4]
  misc_feature (1)..(454): NCBI GI: 39959130 Blast Desc: MGG_09311 [Magnaporthe grisea 70-15] gi|73921591|sp|Q524Z5.1|PALC_MAGGR RecName: Full=pH-response regulator protein palC gi|145013227|gb|EDJ97868.1| MGG_09311
  misc_feature (1)..(453): NCBI GI: 46122461 Blast Desc: FG05608.1 [Gibberella zeae PH-1]
  misc_feature (1)..(454): NCBI GI: 189204001 Blast Desc: pH-response regulator protein palC [Pyrenophora tritici-repentis Pt-1C-BFP] gi|187985435|gb|EDU50923.1| pH-response regulator protein palC [Pyrenophora tritici-repentis
  misc_feature (1)..(453): NCBI GI: 171687385 Blast Desc: protein product [Podospora anserina] gi|170943654|emb|CAP69306.1| protein product [Podospora anserina]
  misc_feature (1)..(453): NCBI GI: 116181922 Blast Desc: CHGG_01589 [Chaetomium globosum CBS 148.51] gi|88185886|gb|EAQ93354.1| CHGG_01589 [Chaetomium globosum CBS 148.51]
  misc_feature (1)..(456): NCBI GI: 121716086 Blast Desc: pH-signalling protein PalC [Aspergillus clavatus NRRL 1] gi|119403809|gb|EAW14226.1| pH-signalling protein PalC [Aspergillus clavatus NRRL 1]
MPFPFPLPTTSSFSFSSSFTCESHPSLPLNASTYRGVVRDALKKHKRLPPSSQGSNLPSIVSSLNSYLPFVLAIDAGISHGSQLGEEINVVLKATPVIEWRPTISDRAVPGRETPRVKVQSLEYDLLFTLTTLGYAHTLLARATLHSLYVTTGAPISAQVRTTAITTATKHLLDAASVHDYVARRAEGLTTPAPCADITQPTARALASLALAEATLLAVLKDDPYPAVVAQDRNDNDREWMYKAPEIPKVRAHLFARLCLAAADHAAQASSLCQSSRGKRVARLNDDLLRYLEDLRKTSRAKACRFFGIDAELSGQTGNALGWLRCGLQELGIEPKEAKKGLSLSRMKKDWSEKREDKKIEKGTNWGFDAGRVEETRVMEMLETKWTKVNDTMLTQTVPASATLLSTLPSGRDMHTIKPYQPPELSSQSLESMRAPPDRVDDYAGEQLSSDDDKRTVS

SEQ ID NO: 13599 - DNA, 5832 bp, Muscodor strobelii
  misc_feature: SGI EST ID NO. CUFF.32569.0
  misc_feature: Variant of the nucleotide sequence at SEQ ID NO 13597
cagactatataatttcgattatatctcaactactgtacatatcgtatgtcaacaactatatacgagaggagggtcggatgcgcacgcatttcgtacgcatttcaaataaggaaagacacacgataaatccaatcataagtcaaagccgtgtcattctaaatcgccacaagtagcaacagtcataacctcgtgggtcgtgggtcaatgtccgcaaagcccgagtctcaaagtctcagtcaaggtcctaggtgttacgcacgagaacagacggaggctatgcttagttcacatcacaaagaccatgagacgaaagatttgctctgtaaagtcatcgcattgaaatttcattgaaccgaaatctgtttttcggcgggtatcagtaggtaatatagtagcaatggtaaagcacctctaatgtgcaaagaaatggcagttggccaagtgtgtagtctaggcgatttacttggtcttgagtttatcggtcctcgacgtagcccaagtcggaaggatgttgctctcctggatcagcttccaagaacaccacagatagcagagcacgaacccagcaaaaccaagaccgacgttggcgacgacccagaggtctggcttgtcggtaggcgggtcgagagtgcgctctacaacgtgccagacagccatggcaacgtagaacgagccgtggattaggaacgttccccactggaccatggggctctggccttggtggagataggcactcaatgaagtcggagggagaccgaggagataagcccagagcaaagtgagcacagcgtagggcattcgcagatcgactcgctgcagaagagggaacatagtccaagcgccaatgatattggcaaatccaacccatgctcgggtctcctttcccagaccttgtttgccggcaagaagtagtgtcatgggcagtagagggagaagtacgctcttctcatgaacctggtagctgaagaggaagaaaccccaggccgtagcagcgaaggcgtaaggcaacaagtccctcctgggtcggaagaagataatagcgcaagagggtgcgatgactgcgagcgtggcggcaagagatgcttgctggaggagctcagaagggtattttcgtagcttgatgaccacgttggcggtacaccaaaaattggcaactttgtcttcgaacagacctcgggcaaagggaaagactcggtgtatcatctgaaccagctgctcgacaaatggatagtaggcggcatccgtgtcgagatacggttctagaaaagtgaagatagggagagggggatgagttccttccaagctgggatgcgcagtgatccccctggtctgatcgtagagtacacccagaaacaggggaagaaccaagatggcaaacgacaggacggtgacggcggcaatgccaaagaagcgaccgatcttaatctcagggaagatacagctgccgagcagaaaagcaaagacaacgggggcgtagtacaaggccatctgcttgaatcccagagcggccacgaagaagatggcagtccacatgtagcggccggccaaggcgctagacatgcaggcaacgacgaagccgagcatgacggtgttgtactggaagtggacatggtcgatgaggatgaggcccggctgcatgaggatggcgacgagggcgacggaggcgggccactgggcaacgccgaggtgtctgctgtagcggcggacgaagatgacgacggcggggacgtaaatgaggtactcggagacgacgacggtggcgcgcatgaagatcttgaggtcggggcccgagtagccgcgcgacgtgtagagggcgaaccatgccgggttgacgtaggagccgacgaggccgagcagccagctgtggtacgcggtcaggggcggatagtcgagcccccaccactgcaggtcgtggaagtaccactgggagacgggcagctgcgtggtgatctccatccagtgccgctgggcctcgtagtcgccgaacatgggcggcttctcatagcccgagtagccccagagaccggccgcccagcggaagaggccgacggccatgagtataaggggcagagtctcccattgcgagagcgaggttcgggcaggccagagcagggcttcgagagggaacgaggcgcttcggacgagtggctcgggtttgacgctgtcggcaaagtgggcagtctttttgaccttgcgcctgggcttgtgcgtcgccggcgaagacattgcgacagcggtcagagaggggacaagacggaccaagaggggacgaaggcgccttaaagagaaagaaaggaatgaatatcgccgacagggggaggcattgggtctcggcaacagcgacggcgaaggtgacacttgagagagagtgcgtggtggttgtgaacacgatgtgaagaagaaaaaaggacaccgaattgggtttcaccacggtcgtcagcaattcaacgtcgcgactacccgccgtccaggatctacaacggtcgcagctgcatgcaacgcacctagaacagctccaggataggtgttcactctggggtttcatttgtgggcggcttggggcttctgaagatgatgtattgcagccctatgagggcttagcgtcacttgctgagctacctacgataagcccgataacatgcactgcaccaagctcctatgcccgctactatgttccaatgttcataccgcttgttctactcatgcagttttgaacttcagagaatgcccttatttgggaatagagcttccaagaaaccgagctgtagctacctaagctagaagtattgaaacgtgaaaagacaaaaaaagaactcgccgttccttaattccatctacatacacatatatgatgttttgcttggcagaagctagactctcgaggcactcttggctctggaggggttgatcacagatgccatcgacttgaagaacaattcattgtcgtaaaacattccacttacacacgtaaatctacttgtagacatattttgaagcagaatataattcaccatatatactactagtgacatctcatattgtggctcaagcttgatcccgctttctaggactgagagattcccctcattaaacctattgagccggtactagcttgggtatcgagtctacagttttgaattccaaaatgcccttcccctttcctctcccaaccacatcttctttctctttctcctccagctttacgtgcgagtcacatccctcgttaccgctcaatgcaagcacctatcgaggagtcgtcagggatgccttgaaaaaacacaagaggctcccgccatcctcccagggatcaaatctcccctccatagtgtctagcttgaacagctatctaccattcgtcttggccatcgatgctggcatcagtcacggctcgcagctgggcgaggagatcaatgtcgtattgaaagctactcccgtcatagaatggcgccccacgatatccgatcgtgcggtgccggggagagaaacgccgcgcgtcaaggttcagtctttagagtatgacctactcttcacgctcacgacgctcggatatgctcacaccctactggctcgagcaacccttcattcattatatgtcacaacaggtgcgccaatcagtgctcaagtgcgcactacagccatcacgacagctaccaagcatctcttagacgcagcatccgtccatgactacgtggcgcggagggcagaagggctcacgactccggctccgtgtgcagatatcacgcagcctactgctcgcgcgctggcctcactcgcgctagcagaagcaacactcttagcagtattgaaagacgatccatatccagctgttgtagcccaggatcgcaacgataatgacagagagtggatgtacaaagctcccgagatcccaaaggtccgcgctcacttatttgcacgcttatgcctcgcggcggccgaccatgcggctcaggcatcgtcgctctgccaatcttcgagaggaaagagagtggctagattgaacgatgaccttcttcggtatttagaagacttgagaaagactagtcgagcaaaagcctgtcgtttctttggcatcgatgcggagttatcgggccagactgggaatgcactgggatggctacgatgcggtcttcaggagctagggatcgagccgaaagaggctaagaagggcttgagtctaagccgcatgaagaaagactggtcagagaagagggaagataagaagatcgagaagggtacgaattggggcttcgacgcggggagagtagaggagacgagggtcatggagatgcttgaaacgaaatggaccaaagtcaatgatacgatgctcacgcagacagttccggcctccgcaactctcctttcaactcttccatctggtcgagacatgcacaccatcaagccctatcaaccgccagagctgtcaagtcagtctcttgagtccatgcgagccccacctgatagagtggatgactatgccggagagcagctaagttccgatgacgataagagaacggtcagttgaaacccctgtaggtgggtttccaggcacggcgggtgagtatagaagtgaaagcaccaggtcttacttctagtcgagatttatatcaaggagaagaagggtatgcgaccatatataggctgatatgcctcaacaacttcattaagctctttctaccttaaagggtaatgaaaagcgtacttagttacgacagtcagtctacttagctatgtatctagtatacgtcttcaacaataatcaagttcagtaaacaagaattttcaacgtcgtcaagaaccagcactttctgcctcatttcctcgtcgcgtaggggggctatagggtttcaacaacagcattcaagtcctcaaccccgaagaatagggtctacacaacggcagtttgccgatcattttcggacacgcatcttgcttgacacccgaagatgctgcgctcttgcgagagacgaatcaatatatcagcacgacgccggagcccgagttgcacatcagtcgcggctttccatgggcttacgcaattcaagaccaagagccgctcggcggcgacacgcaattcccatgatgcgtatcactcgcaacccaagctcggatgttgctacgatagccccgcggctgactttctcaacagcaagtagataatcggattgtgttaaagcatgggcatgaatcggcttcgtacttaggtctaagcgaaggtgctcttgccctatggagatcagatccagggatcatcgtagaaggcgcagaagctgattttgcagttacatctcgtggcagctgtaatcctacactcgaatgcggaagacatcagcgatgttgtagtcgacagaaaatttatcaagccagcttcaagctcatgtatgaacgataggatcagttcaagggtgagttcaggtagagcgctgcggttattgcggcatcgtgttgggcctttgtcttttgattgtagctttccttgtgccgtagcgcgtttttacttttgcgcaatatggcgagatttttggtgttcatgctctgagagcgatgctactagttattcgcaggaatgtcaagactcagtccttcatcgaccacgacatactgtcaccacgattcgatttgtgggcgactgtgggaggcatgagtaccttattctaaatgtatatatctgatagggccgagtacgaatgagattgagtgaagctgttagcatggccgaggccactggtttgactcaaagtaaggggtatgcaaatacataatctcaacctgtacctcttggagcggatgttcaactgttaccgatttctaggagtttcatgattgccaatacgc

SEQ ID NO: 13600 - DNA, 870 bp, Muscodor strobelii
  misc_feature: SGI cDNA ID NO. 564461
  misc_feature: Reduced expression when VOC is produced
  misc_feature: Encodes the peptide sequence at SEQ ID NO 13601
atgccggccttctctcgacttgtccgcttcctcgcgaagaacggtcaagtatactatggcgatgccatcttacctgcgggcactagcgacatcgcgaaagcaacaagggccaagatcatcaaaggcgatatcttcggaaaatatgaggtgacggatcaagtcgcggatgtccggctgttacttgcgccgctggcattagaagacgtcaagacggtgcgatgcttggggcttaactatgcgctgcatgcgaaagagtccaatcttcccattcccaaatttcccgtcttattctacaaacctgtgacttcactctcaggcccaacagacaatattccagtccacgaacaagctcaagtatcggagggactagactacgaatgtgagcttgtggccgtcatcggcaagcaatgcgcagacgtttcagaggctgaagcactagactatgttcttgggtatgcaattggcaatgatgtctcgcatcgcgactggcagattcagcgtggtggtgggcagtggtcattgggtaaaggttttgatggttgggcgccatatggtccaggcatcgtcagtagctcagtcattaaagacccccagacgctaaaaattagcacgcgtttgaatgggaagactgttcaggagagcaatacggccgacatgatcttcgacgtgaagaagacaatttctttcttgagcaaggggcatacacttctgccgggtgatttgatctttacggggactccttcgggcgtcggaatgggaagaacaccgaagctctggttgaaagatcgcgacgttgttgaggttgagctggagggtgttggcatctgcactaaccaggtcgaatttgcaaaagagaacgccaagctgtag

SEQ ID NO: 13601 - protein, 289 aa, Muscodor strobelii
  misc_feature: SGI Peptide ID NO. 564461
  misc_feature (86)..(255): Pfam Id: PF01557 Pfam Desc: Fumarylacetoacetate (FAA) hydrolase family
  misc_feature (6)..(289): NCBI GI: 154324032 Blast Desc: BC1G_00415 [Botryotinia fuckeliana B05.10] gi|150842644|gb|EDN17837.1| BC1G_00415 [Botryotinia fuckeliana B05.10]
  misc_feature (2)..(289): NCBI GI: 156057521 Blast Desc: SS1G_04492 [Sclerotinia sclerotiorum 1980] gi|154702277|gb|EDO02016.1| SS1G_04492 [Sclerotinia sclerotiorum 1980]
  misc_feature (6)..(282): NCBI GI: 85116414 Blast Desc: NCU07506 [Neurospora crassa OR74A] gi|28926854|gb|EAA35817.1| NCU07506 [Neurospora crassa OR74A]
  misc_feature (1)..(289): NCBI GI: 242786417 Blast Desc: fumarylacetoacetate hydrolase family protein [Talaromyces stipitatus ATCC 10500] gi|218720948|gb|EED20367.1| fumarylacetoacetate hydrolase family protein [Talaromyces ATCC
  misc_feature (1)..(289): NCBI GI: 258564634 Blast Desc: UREG_07835 [Uncinocarpus reesii 1704] gi|237908569|gb|EEP82970.1| UREG_07835 [Uncinocarpus reesii 1704]
  misc_feature (1)..(289): NCBI GI: 212543357 Blast Desc: fumarylacetoacetate hydrolase family protein [Penicillium marneffei ATCC 18224] gi|210066740|gb|EEA20833.1| fumarylacetoacetate hydrolase family protein [Penicillium ATCC
  misc_feature (1)..(289): NCBI GI: 116180878 Blast Desc: CHGG_01067 [Chaetomium globosum CBS 148.51] gi|88185364|gb|EAQ92832.1| CHGG_01067 [Chaetomium globosum CBS 148.51]
  misc_feature (1)..(289): NCBI GI: 255938702 Blast Desc: Pc14g01270 [Penicillium chrysogenum Wisconsin 54-1255] gi|211584742|emb|CAP74268.1| Pc14g01270 [Penicillium chrysogenum Wisconsin 54-1255]
  misc_feature (1)..(289): NCBI GI: 119185121 Blast Desc: CIMG_07272 [Coccidioides immitis RS]
  misc_feature (1)..(289): NCBI GI: 240106548 Blast Desc: fumarylacetoacetate hydrolase domain-containing protein 2A, [Coccidioides posadasii C735 delta SOWgp]
  misc_feature (75)..(274): SWISSPROT Homolog: EC 4.3.2.3 Ureidoglycolate lyase
  misc_feature: Useful for introducing or modulating the production of volatile compounds
MPAFSRLVRFLAKNGQVYYGDAILPAGTSDIAKATRAKIIKGDIFGKYEVTDQVADVRLLLAPLALEDVKTVRCLGLNYALHAKESNLPIPKFPVLFYKPVTSLSGPTDNIPVHEQAQVSEGLDYECELVAVIGKQCADVSEAEALDYVLGYAIGNDVSHRDWQIQRGGGQWSLGKGFDGWAPYGPGIVSSSVIKDPQTLKISTRLNGKTVQESNTADMIFDVKKTISFLSKGHTLLPGDLIFTGTPSGVGMGRTPKLWLKDRDVVEVELEGVGICTNQVEFAKENAKL

SEQ ID NO: 13602 - DNA, 2007 bp, Muscodor strobelii
  misc_feature: SGI EST ID NO. CUFF.32595.0
  misc_feature: Variant of the nucleotide sequence at SEQ ID NO 13600
ggccggccgatccattatgacgaccaagtacaaattgtatgcatcatatttgaacatataatctcactcgcttctcatcaattgttcacgaataagagagtcgattcgccaaactctaaagaatttctatcgacacactgagacaacatgccggccttctctcgacttgtccgcttcctcgcgaagaacggtcaagtatactatggcgatgccatcttacctgcgggcactagcgacatcgcgaaagcaacaagggccaagatcatcaaaggcgatatcttcggaaaatatgaggtgacggatcaagtcgcggatgtccggctgttacttgcgccgctggcattagaagacgtcaagacggtgcgatgcttggggcttaactatgcgctgcatgcgaaagaggtaacgcaaccgaattgcttggagtatcttcggtcgtatcttatgcgctaaatttgtccagtccaatcttcccattcccaaatttcccgtcttattcgtaagttttcgctcacggcttagtagacttgcactgtccattgacatactccccacctacagtacaaacctgtgacttcactctcaggcccaacagacaatattccagtccacgaacaagctcaagtatcggagggactagactacgaatgtgagcttgtggccgtcatcggcaagcaatgcgcagacgtttcagaggctgaagcactagactatgttcttgggtatgcaattggcaatgatgtctcgcatcgcgactggcagattcagcgtggtggtgggcagtggtcattgggtaaaggttttgatggttgggcgccatatggtccaggcatcgtcagtagctcagtcattaaagacccccagacgctaaaaattagcacgcgtttgaatgggaagactgttcaggagagcaatacggccgacatgatcttcgacgtgaagaagacaatttctttcttgagcaaggggcatacacttctgccgggtgatttgatctttacggggactccttcgggcgtcggaatgggaagaacaccgaagctctggttgaaagatcgcgacgttgttgaggttgagctggagggtgttggcatctgcactaaccaggtcgaatttgcaaaagagaacgccaagctgtagctgattttgtgtgacaaacggcgaaaccaagtgcagcagtggaatgacagtggaattgaaagacagtagcataaatacgtgttaaagccttaaagcctcaattgcggtgttggctgctattacaattgaaatgaaggtgttgcgcatatagaaatatcagtatctcgataaccaaaaccccagttcctcagaagaatctcgtatttcgtgtcccatcattctatgccatcatgcctcatcatacgcgatatatgggaagtatcataacgtatcgaaagcctccgtgtaccaaggcattaatcatcaagcgcaatcgcatagtcgcaccatagtatccattgaaccgacgtaaaatcaaactctcgcctttcggccgcgactgcccttcccgtcggtgccatgcatcttcttggtgccagcagcctttttgcctggccggcgcgtcactttgccgactgctttctcggctgcaccctcgatcttgtcggtgaggtggggtttccgtttgtggtgagacacgggagtcttgcgctttgttacgcctgatgagcgcttagtggtagttgtcttgcgcttgcgctccggcgccgtagagacacttagatgaatgcgcggctttgagttgcccgtggttgatcgcgtcgaggccatttttattgggtggtatttactttacggcttggttttgggttgggttgggttgggagcgtgtgaaagttgcgctgcttttgcgacggagaagtttacttgttttgctctggtgacatgtaaacggaagagataccctttatccaagttatctaggcgccactacttctacaccttacctaagtcatcatgtttcctaccaatagcctatgcaatcag

SEQ ID NO: 13603 - DNA, 297 bp, Muscodor strobelii
  misc_feature: SGI cDNA ID NO. 564462
  misc_feature: Encodes the peptide sequence at SEQ ID NO 13604
atggcctcgacgcgatcaaccacgggcaactcaaagccgcgcattcatctaagtgtctctacggcgccggagcgcaagcgcaagacaactaccactaagcgctcatcaggcgtaacaaagcgcaagactcccgtgtctcaccacaaacggaaaccccacctcaccgacaagatcgagggtgcagccgagaaagcagtcggcaaagtgacgcgccggccaggcaaaaaggctgctggcaccaagaagatgcatggcaccgacgggaagggcagtcgcggccgaaaggcgagagtttga

SEQ ID NO: 13604 - protein, 98 aa, Muscodor strobelii
  misc_feature: SGI Peptide ID NO. 564462
  misc_feature (37)..(92): NCBI GI: 46136913 Blast Desc: FG09972.1 [Gibberella zeae PH-1]
  misc_feature (20)..(91): NCBI GI: 154295433 Blast Desc: BC1G_13195 [Botryotinia fuckeliana B05.10] gi|150844063|gb|EDN19256.1| BC1G_13195 [Botryotinia fuckeliana B05.10]
  misc_feature (37)..(92): NCBI GI: 39970083 Blast Desc: [Magnaporthe grisea 70-15] gi|145013123|gb|EDJ97764.1| [Magnaporthe grisea 70-15]
  misc_feature (26)..(96): NCBI GI: 70983992 Blast Desc: conserved [Aspergillus fumigatus Af293] gi|66845147|gb|EAL85483.1| conserved [Aspergillus fumigatus Af293] gi|159123499|gb|EDP48618.1| conserved [Aspergillus A1163]
  misc_feature (44)..(92): NCBI GI: 171692023 Blast Desc: protein product [Podospora anserina] gi|170945960|emb|CAP72761.1| protein product [Podospora anserina]
  misc_feature (44)..(91): NCBI GI: 256732114 Blast Desc: [Nectria haematococca mpVI 77-13-4]
  misc_feature (44)..(91): NCBI GI: 156048961 Blast Desc: [Sclerotinia sclerotiorum 1980] gi|154692586|gb|EDN92324.1| [Sclerotinia sclerotiorum 1980]
  misc_feature (44)..(92): NCBI GI: 169604568 Blast Desc: SNOG_05298 [Phaeosphaeria nodorum SN15] gi|111066569|gb|EAT87689.1| SNOG_05298 [Phaeosphaeria nodorum SN15]
  misc_feature (35)..(96): NCBI GI: 119485843 Blast Desc: NFIA_100040 [Neosartorya fischeri NRRL 181] gi|119410420|gb|EAW20367.1| conserved [Neosartorya fischeri NRRL 181]
  misc_feature (39)..(92): NCBI GI: 242773474 Blast Desc: conserved [Talaromyces stipitatus ATCC 10500] gi|218721866|gb|EED21284.1| conserved [Talaromyces stipitatus ATCC 10500]
MASTRSTTGNSKPRIHLSVSTAPERKRKTTTTKRSSGVTKRKTPVSHHKRKPHLTDKIEGAAEKAVGKVTRRPGKKAAGTKKMHGTDGKGSRGRKARV

SEQ ID NO: 13605 - DNA, 963 bp, Muscodor strobelii
  misc_feature: SGI cDNA ID NO. 564463
  misc_feature: Encodes the peptide sequence at SEQ ID NO 13606
atggagcagttggctgtagcgaaaaacgaagcactggctcgacgacaagcacgtctacaaagggaagcacaggaagaagcagagatacaagaagccattagacaaattgaggaatttgaacgcgaacaagcgcttaaggcggagctccttcgtcaagaacaggcacgaattgcggaagagcgtcatagaagagagttagaagaacgcatcaggcgcgaaggcgaacgtcggagagccatcacggtcaagtacgaggggcttcaggagatattcttgagagtgactgctgaacaacgcaccatcatcgagaagtatcatgagacatgcgagcaagagattcagcaatcgggcgagaagatcattcaatcgttacgcgactctcaccaggaggaatgttcatatcatgaacgtaaggccgaggcgaagattgcaaggcgccgatcagaggacagagaggaatttacggcacgtattgtggaagaacgtttcattgaagagcaatatgccaaacagctagcagcattctgggcgaaaagacctgacggtaattttcagtcgagcaaagcaatccgcagcttcaaaaaggagatggacaaaaacttcatggtgtggaagaaagcaacggataacgacttcgaacacttttcgtacacggtgcgcgaggaattagcgatccgcaaagaactcatggtcgaaaaagaacgtcgtgcagagaagaaaaagcgcgatacagacctagagttcgccaagaggaagcgtgccgagcttcgatggatgcgagaggtctttgaagagcgcaaccgcatcctcaccaatatggaggttgaggaaattgagaatggcgaagacaccgatgcatggttcgcagagccgtcgcttatcgaggacttgtctgacagtgagggaaatgcggaagagaacttagagtatgcagcatacagagtccctggtgcatttgagtga

SEQ ID NO: 13606 - protein, 320 aa, Muscodor strobelii
  misc_feature: SGI Peptide ID NO. 564463
  misc_feature (1)..(307): NCBI GI: 46108754 Blast Desc: FG01259.1 [Gibberella zeae PH-1]
  misc_feature (1)..(289): NCBI GI: 256735061 Blast Desc: NECHADRAFT_31482 [Nectria haematococca mpVI 77-13-4]
  misc_feature (153)..(289): NCBI GI: 261356433 Blast Desc: conserved [Verticillium albo-atrum VaMs.102]
MEQLAVAKNEALARRQARLQREAQEEAEIQEAIRQIEEFEREQALKAELLRQEQARIAEERHRRELEERIRREGERRRAITVKYEGLQEIFLRVTAEQRTIIEKYHETCEQEIQQSGEKIIQSLRDSHQEECSYHERKAEAKIARRRSEDREEFTARIVEERFIEEQYAKQLAAFWAKRPDGNFQSSKAIRSFKKEMDKNFMVWKKATDNDFEHFSYTVREELAIRKELMVEKERRAEKKKRDTDLEFAKRKRAELRWMREVFEERNRILTNMEVEEIENGEDTDAWFAEPSLIEDLSDSEGNAEENLEYAAYRVPGAFE

SEQ ID NO: 13607 - DNA, 1264 bp, Muscodor strobelii
  misc_feature: SGI EST ID NO. CUFF.32607.0
  misc_feature: Variant of the nucleotide sequence at SEQ ID NO 13605
cccgtatcactttccagctgcctgtccccacgatcatgatatgacgaggactgaagaacttgctgagtcagaaggctggaaacggtgctatggctgtggcgtatttgttgagcatagtgaagcatgtcaacatatgacctgccgttgtggtgcggaattttgttatgtctgcggctcccgctggcgaacgtgtcgctgtaccatggagcagttggctgtagcgaaaaacgaagcactggctcgacgacaagcacgtctacaaagggaagcacaggaagaagcagagatacaagaagccattagacaaattgaggaatttgaacgcgaacaagcgcttaaggcggagctccttcgtcaagaacaggcacgaattgcggaagagcgtcatagaagagagttagaagaacgcatcaggcgcgaaggcgaacgtcggagagccatcacggtcaagtacgaggggcttcaggagatattcttgagagtgactgctgaacaacgcaccatcatcgagaagtatcatgagacatgcgagcaagagattcagcaatcgggcgagaagatcattcaatcgttacgcgactctcaccaggaggaatgttcatatcatgaacgtaaggccgaggcgaagattgcaaggcgccgatcagaggacagagaggaatttacggcacgtattgtggaagaacgtttcattgaagagcaatatgccaaacagctagcagcattctgggcgaaaagacctgacggtaattttcagtcgagcaaagcaatccgcagcttcaaaaaggagatggacaaaaacttcatggtgtggaagaaagcaacggataacgacttcgaacacttttcgtacacggtgcgcgaggaattagcgatccgcaaagaactcatggtcgaaaaagaacgtcgtgcagagaagaaaaagcgcgatacagacctagagttcgccaagaggaagcgtgccgagcttcgatggatgcgagaggtctttgaagagcgcaaccgcatcctcaccaatatggaggttgaggaaattgagaatggcgaagacaccgatgcatggttcgcagagccgtcgcttatcgaggacttgtctgacagtgagggaaatgcggaagagaacttagagtatgcagcatacagagtccctggtgcatttgagtgaaatactcgcatcccgttagaggtttgacgagtatatcatacatatcttagctacataggaagatcaattggatctattagctataagacgatattcttc

SEQ ID NO: 13608 - DNA, 2265 bp, Muscodor strobelii
  misc_feature: SGI cDNA ID NO. 564464
  misc_feature: Encodes the peptide sequence at SEQ ID NO 13609
atgctcatcgtcagcctattctcctctgatccggaagatcctgttgatatagacaatggatcaaccccacatattagagcacaggaaacaatggacaccaaacggaaagcaaaggggaaagcggttgaattgaaggttgccgatgtcgcaacagtcccgattgagctggaagttcctcctgatccgattgtagttgaatggaccaaatatgaaccacctgaaggtttaagacatgcccctgacgtcaaatcagaaatcgccctccagatccttatagagtccatcgacaatgtcaaaacccgcattgtcgaggatgcaagaagacgagaagctgagactgaagcgatcaaacgaagacgggaagaacttgcatcgggaaataacaacgagccggctgttggaggcacgctacatcccatcgcctcagctagtgatctaatgagactgcacagtgggacgtcgactacaacagaccatattctaagtgcaaatccttttccgtcagatttgcccatgcagccgaagaaacgagctttgaagaacttgttccgaaaacagaataacaggcaggaaaagggagaatccagttctgctggtagtcttcaaaggtttttgaaacctttgccacaagagctttctacttactctgcccggagacgcttcttttcggatcttatcaagaaaaatgcaggtgatgagaccagcacaagttctgtactatccatgcatgtacctgaagtggaatgtgtcgtctgcctagacgattttgacccccgggacaccatcaaaggaccatgtcacaacttttgcaaactctgtttcgtccgtttagtcagatccgcatgtgagcatgaacagcattggccacctaaatgttgcctcaatgttattccaaaacgtaccatccttgcgtatattgataacagagacctcctctcacggtaccgagatcgagctattgaatggaacgtacctattaatgataggttctactgcagcgagatatcttgtggtgcgttcattcaagttggtcgcatcgaacaagttcagggttttgctacttgttctgcagatcataagacttgctttcactgccgtagcccgtatcactttccagctgcctgtccccacgatcatgatatgacgaggactgaagaacttgctgagtcagaaggctggaaacggtgctatggctgtggcgtatttgttgagcatagtgaagcatgtcaacatatgacctgccgttgtggtgcggaattttgttatgtctgcggctcccgctggcgaacgtgtcgctgtaccatggagcagttggctgtagcgaaaaacgaagcactggctcgacgacaagcacgtctacaaagggaagcacaggaagaagcagagatacaagaagccattagacaaattgaggaatttgaacgcgaacaagcgcttaaggcggagctccttcgtcaagaacaggcacgaattgcggaagagcgtcatagaagagagttagaagaacgcatcaggcgcgaaggcgaacgtcggagagccatcacggtcaagtacgaggggcttcaggagatattcttgagagtgactgctgaacaacgcaccatcatcgagaagtatcatgagacatgcgagcaagagattcagcaatcgggcgagaagatcattcaatcgttacgcgactctcaccaggaggaatgttcatatcatgaacgtaaggccgaggcgaagattgcaaggcgccgatcagaggacagagaggaatttacggcacgtattgtggaagaacgtttcattgaagagcaatatgccaaacagctagcagcattctgggcgaaaagacctgacggtaattttcagtcgagcaaagcaatccgcagcttcaaaaaggagatggacaaaaacttcatggtgtggaagaaagcaacggataacgacttcgaacacttttcgtacacggtgcgcgaggaattagcgatccgcaaagaactcatggtcgaaaaagaacgtcgtgcagagaagaaaaagcgcgatacagacctagagttcgccaagaggaagcgtgccgagcttcgatggatgcgagaggtctttgaagagcgcaaccgcatcctcaccaatatggaggttgaggaaattgagaatggcgaagacaccgatgcatggttcgcagagccgtcgcttatcgaggacttgtctgacagtgagggaaatgcggaagagaacttagagtatgcagcatacagagtccctggtgcatttgagtga

SEQ ID NO: 13609 - protein, 754 aa, Muscodor strobelii
  misc_feature: SGI Peptide ID NO. 564464
  misc_feature (313)..(375): Pfam Id: PF01485 Pfam Desc: IBR domain
  misc_feature (65)..(726): NCBI GI: 256735061 Blast Desc: NECHADRAFT_31482 [Nectria haematococca mpVI 77-13-4]
  misc_feature (61)..(726): NCBI GI: 46108754 Blast Desc: FG01259.1 [Gibberella zeae PH-1]
  misc_feature (194)..(711): NCBI GI: 154296129 Blast Desc: BC1G_12794 [Botryotinia fuckeliana B05.10] gi|150843755|gb|EDN18948.1| BC1G_12794 [Botryotinia fuckeliana B05.10]
  misc_feature (25)..(439): NCBI GI: 261356432 Blast Desc: IBR domain-containing protein [Verticillium albo-atrum VaMs.102]
  misc_feature (248)..(559): NCBI GI: 226279714 Blast Desc: IBR domain-containing protein [Paracoccidioides brasiliensis Pb01]
  misc_feature (248)..(475): NCBI GI: 258577859 Blast Desc: [Uncinocarpus reesii 1704] gi|237903377|gb|EEP77778.1| [Uncinocarpus reesii 1704]
  misc_feature (248)..(559): NCBI GI: 225682221 Blast Desc: IBR domain-containing protein [Paracoccidioides brasiliensis Pb03]
  misc_feature (248)..(559): NCBI GI: 226289592 Blast Desc: IBR domain-containing protein [Paracoccidioides brasiliensis Pb18]
  misc_feature (12)..(561): NCBI GI: 171696364 Blast Desc: protein product [Podospora anserina] gi|170948424|emb|CAP60588.1| protein product [Podospora anserina]
  misc_feature (248)..(560): NCBI GI: 154273208 Blast Desc: [Ajellomyces capsulatus NAm1] gi|150415968|gb|EDN11312.1| [Ajellomyces capsulatus NAm1]
MLIVSLFSSDPEDPVDIDNGSTPHIRAQETMDTKRKAKGKAVELKVADVATVPIELEVPPDPIVVEWTKYEPPEGLRHAPDVKSEIALQILIESIDNVKTRIVEDARRREAETEAIKRRREELASGNNNEPAVGGTLHPIASASDLMRLHSGTSTTTDHILSANPFPSDLPMQPKKRALKNLFRKQNNRQEKGESSSAGSLQRFLKPLPQELSTYSARRRFFSDLIKKNAGDETSTSSVLSMHVPEVECVVCLDDFDPRDTIKGPCHNFCKLCFVRLVRSACEHEQHWPPKCCLNVIPKRTILAYIDNRDLLSRYRDRAIEWNVPINDRFYCSEISCGAFIQVGRIEQVQGFATCSADHKTCFHCRSPYHFPAACPHDHDMTRTEELAESEGWKRCYGCGVFVEHSEACQHMTCRCGAEFCYVCGSRWRTCRCTMEQLAVAKNEALARRQARLQREAQEEAEIQEAIRQIEEFEREQALKAELLRQEQARIAEERHRRELEERIRREGERRRAITVKYEGLQEIFLRVTAEQRTIIEKYHETCEQEIQQSGEKIIQSLRDSHQEECSYHERKAEAKIARRRSEDREEFTARIVEERFIEEQYAKQLAAFWAKRPDGNFQSSKAIRSFKKEMDKNFMVWKKATDNDFEHFSYTVREELAIRKELMVEKERRAEKKKRDTDLEFAKRKRAELRWMREVFEERNRILTNMEVEEIENGEDTDAWFAEPSLIEDLSDSEGNAEENLEYAAYRVPGAFE

SEQ ID NO: 13610 - DNA, 828 bp, Muscodor strobelii
  misc_feature: SGI cDNA ID NO. 564465
  misc_feature: Encodes the peptide sequence at SEQ ID NO 13611
atggcttcgacccgatcagttccaagttcatatcccgaaacagcatcacctctcccgccaatcaatctcactcaccttaataatcgtcgattttctcgtgccataatgtctcaggatatggaccccaacaagcagaacaatgccttctcccggaacggcattaatcctggaacggactcggacttgatcgaggatattttcacgcctgctcgtcctccgcaatacagaacccagaacaatcatttgctctccgctggtcctgacaccgtcccacgaactgtgcgcgagaacggtctgcatatctacttgcatagcaagtatggcgttcgcccttgcagtgacaatgcatctcataccgatagcacccaaactatcacggcagatgctgctgctgcagtcactgcggcggcggtgcttccacggagcctctcccctgtcgagaacttggctcgtgggcctcgaaatcatgtcctatggcacgctacccggagctatgacggcacgcttcagcccttgactgagcttgctatcgcagctctaaaccacagcttcaaagacacctacactggtaatgtcgaccagtgggtcgatggccagtgtccatcgacactagaggagcccataagcattgatctgtcactgctcgaggctcgttccggcgtcacgatacgcacggagagtacgattgactcatcctggactgtcgtatcttcgacttatgacgtcgtaccatctcacatggacgaggaccttcgacgtgcgggtgcagagttcgacgacgtgcctgcttgcatcaattatgacctcatggatgaggactgtgcttga

SEQ ID NO: 13611 - protein, 275 aa, Muscodor strobelii
  misc_feature: SGI Peptide ID NO. 564465
MASTRSVPSSYPETASPLPPINLTHLNNRRFSRAIMSQDMDPNKQNNAFSRNGINPGTDSDLIEDIFTPARPPQYRTQNNHLLSAGPDTVPRTVRENGLHIYLHSKYGVRPCSDNASHTDSTQTITADAAAAVTAAAVLPRSLSPVENLARGPRNHVLWHATRSYDGTLQPLTELAIAALNHSFKDTYTGNVDQWVDGQCPSTLEEPISIDLSLLEARSGVTIRTESTIDSSWTVVSSTYDVVPSHMDEDLRRAGAEFDDVPACINYDLMDEDCA
